United States Patent Application Publication US 2015/0376612 A1 - sequence listing, part 36

SEQ ID NO: 86635 - DNA, 1009 bp, Homo sapiens
agttggagaccagcctggccaacatggtgaaacccagtctctactaaaaatacaaaaaattagccaggcgtggtggcaggcacctgtaatcccagctacgcgggaggctgaggcaggagaatcgcttgaacccgggaaacggaggttacagtgagccgagactgcaccactgcactccagcctgggcaatagagtgagactccatctgaaaaaaaaaagatagaaaaatactgtggtattgtggtttacatttgttgtcttttgataccaaaacagaattttcatttaaagtggtaatactctatttattaggcttacgaaaactattattcatggtcgaatcatatttagaaaattctacatctaaaaagtatgtaattttttacagactgaattagcccttgccaagaattatcctggaaaaaaagtatccagtactaacaacactccagttccaaggctgacttccaacccatctagagttgatcgcttaattgtggatgaacttcgagaactagccagagtaagctgtaaaaatagataacagtggatggattttttgttaaattttttttaagtttcaggccaggcgtggtggctcactcctgtaatcccaccactttgggaggccgaggcgggcagatcacctgaagtcaggagttcgagaccagcctggccattatggtgaaaccccgtctctactaaaaatacaaaaattagctgggggtggtggcatgcgcctgtagtcccagctacttgggaggctgaggcaggagaatcatttaaacccaggaggcagaggttgcagtgagtgaagatcacgccactgcactccagcctgagtgacagagcgagactctatctcaataaataaataaataaaactctcatcaagttttagagctttgaagggtttttaaatcacatttacatctaactctctgaaatatatttttttcatgtttggtcctagaactataatatttaggaaaggggctgggtgcagtgg

SEQ ID NO: 86636 - DNA, 1039 bp, Homo sapiens
atattttgcgtagttgtgttcattagtttgcttctgtatttttttaaaactattgaaagcttaactttttctgtttctcatcacttagtatctttgtatagaacttgagtaatttattcgttaatatgaaatgttggtattatgtgactcagaagatcttgggttttaacatttctagcatgagttaaactataatgtactgatgaaatttaattgaaatatccttgactagaaacactgatgttttaaatgttagtgtttttcttagttttagaaattctggtattaaaaaaaaaaagagtgtaatcataccacataaattttctttagatgatgtgcagaagaaactgattgagaatgcaagagtaactgtagggagaaacattttgatcactgatatgccttagaactacccaaatgaattacattgagggtagtcaaataaaatagatcatctcaccacagtcactgcatagaaagtggttaagtttaacataagacatgttggatgttataaaaacaaatactgtactgaatttagtctcaggaaaaaaataaattactttgttgaaaacatttggtttcatttttctaaattcatatgtttctaaccttaagagtcactcatatcagaaagtcaaatgaatttcatttaagaacttatactaagttttagatttcattattaacgcacaagtaataatgttggtttataaatcaatgccattcagatatccatggatctaaccagatctccttcaaagatgaaatttttgctctatctttatgctaatccgtgtaaaccagaataaaaattttagggaagcttttacatgatactggtcagaaatgaaataccagtccgttaataagaaccaaacacttaaaaaaattctttgaaatattgttaatcatatcacccaatagataatttttaaattagtcggttgtccctttcagtggcatatcctctaacagatggttcttatgtacttgtatttctgaattacaacctataaaacattgtacttctgaatta

SEQ ID NO: 86637 - DNA, 1042 bp, Homo sapiens
gttaaacatcttatttaactcttttaaggcattttaacagagccaagtacataaacatttagtcagttacattactactctgttcaccaaaactagcctagattctctaatattctgccattgaatgatataagtacttattctagaatgaaatttcattttgatgaaatattttgttttcttatttttttgtttctttggtaaaatattttaaaattcagatttaggtaaatctgaataagagttttattccaaaggacattttaaaacttttgtaatatagctttaggatttctctgttagaccaaggataaacataagggttttttttaaaaaaccaggaatagataaagacgattcaggactcagcaggtggagagaggataagtagaatgaggaaaggcagcagtaggtgtgatctgtgtgacctgtaccctaatcccttaactcacctgtagttctgttccgaaacaccaatgtggaagatgtccttaatgcccgaaaactggagcgagactcacttcgggatgaatcccaaaggaagaaggaacaggacaagctgcagagggagagagacaaactagccaagcaggagcgcaaggaaaaggaaaaaaaaaggacacagagaggggagcgaaagcgataaccttggcctactctattctttccccccatgaacttatcaaagggagaactggttgtgtatttaagagaaatgagagtgcattgcaaagtagtttcccaaggcatttcccctattgtttacatggtcaaaaggaaaatcaaaatcacttctaattacaaaatgtgctgttttggtggggtgggcaatcagattattatagttgatgactgtaccaaagatctggaatgggggccacctttatattttaatactcaagtcctgtgctccttttggccactttaaaaagtcttccctcaccttggataaataggattcagaaagctaacagttttcattctgaaggagcagaaacataatcaatccctccctgagataaaatgtgggcatgcacattgc

SEQ ID NO: 86638 - DNA, 1119 bp, Homo sapiens
gagggcacttcctccacagtcccccacccacctcctgcggctcagccttgcacacccactgccccgtgtgaatgtagcttccacctcatggattgccacagctcaactcgggggcgcctggagggatgcccccaggcagccaccagtggacctagcctggatggcccctccttgcaaccaggcagctgagaccagggtcttacctctctgggacctagggggacggggctgacatctacattttttaaaactgaatcttaatcgatgaatgtaaactcgggggtgctggggccagggcagatgtggggatgttttgacatttacaggagggcccggagaaactgaggtatggccatgccctagaccctccccaaggatgaccacacccgaagtcctgtcactgagcacagtcaggggctgggcatcccagcttgcccccgcttagccccgctgagcttggaggaagtatgagtgctgattcaaaccaaagctgcctgtgccatgcccaaggcctaggttatgggtacggcaaccacatgtcccagatcgtctccaattcgaaaacaaccgtcctgctgtccctgtcaggacacatggattttggcagggcggggggggttctagaaaatatagttcctataataaaatggcaccttccccctttcaagaagggtgattctggggccgactcagggtttaggtgccccctggtgtggcctagatgtccccacctgggccatctttctggggaggactctcccaggtagggaaggccagaggtggcccagtgcctggagggttagggtctctgcctgggatatgcaagaggaagtaggaaagggaggtctcatggatgatcctaggctgctagaagtccttaaggccccatctagtccattccactccctacccccattccagagccgagtagtaagtttacagatgtttcccccattacgtacccccacccatccctgctgcagcgagcctgagagccaggtagagccaggcacagctcctcagtcttctcacacagtcctgccggtggccttccctcatgacccttgcttgggagggtggagcactggctccttgaccctaaaaggtagctggcagggg

SEQ ID NO: 86639 - DNA, 1049 bp, Homo sapiens
agcactgccagtagcaaatcaggggatgggaagacctccgtctggatttaatcctggcgggcttaaaacctgtgcttttcatagtttatggtaagcagcagctcactgaataatgacttccattgagtaaacatttggctctggttatcttcagggatgctgttggctcatgatccaagctcaggggactctggaggcggggctgggctgagggagagaaagggaaacacagtgttcccaggcacatgttcttagcaataatacagttgcagaactttacatttgtgtcttccagatctggagaagaacagacatatttaaatcattcttgttgaacagtttttgtatgtacagtattatggtacttttttttttttagtatgagaactttttttgtatttgtacattgaactgctgtagttatacttttatattaaaggggaaaaagtccttataaataatgcctattaggctagtgctattactttgttcagcaaattctaccctggctttagagtttttaatagatgctacacctaataaaagtgcctctcatattgcaggaacgatttcagatgtgtaaggagactgaagaggagataccagtttttagtcttggaaagcaagttcacagtagaaggaggttgagatctttcttttatgtgagaaatctttgaatctcattcatgcgatcagagttgtagccaatttttgaaaaccttattttcaaaggaaataaatgattcactgtaggattcctttaaatatcaagcatcaccagtatatgctttgatggtatatgtatataacttaaagttctttcaaaagcctgatacagaaacgtgtccccagtttggtagcaatgtggaaaacctggctagagatgatatggagctgtccctcagaaagcaaagccatgcctggaatccctaataggctgcttagttgtgaacctgtttgatttgccttaagcctctatccagaaacctgcccgcttccgtctggttaagaagccagtggtggatattttctttgttaacattagaaat

SEQ ID NO: 86640 - DNA, 1314 bp, Homo sapiens
agtagagagtgagatgctgtttattctttttttttgagatggagtcttgctctgttcaagcaattctcctgtctcagcctcctgagctgctgggattacaggtgcacaccaccgtgcccgggtaatttttgtatttttgtagagacggagtttcaccatgttgaccaggctggtctttaactcctgacctcaactaatctgcccgccttggcctcccaaagtgctgggattacaggcgtgagccaccctacccaactgagatgctgtttattctaacatttgttccactgtgaaccttgaggttagatttcaagtattcaaagcagtagttcctagagatatcataattagtaattaaattaagatttaatatttgttgattttattttggtatttttccacttttatcagggcataccaattcaatcaccatgagttggagcttcctgactcgcctgctagaggagattcacaaccattccacatttgtggggaagatctggctcactgttctgattgtcttccggatcgtccttacagctgtaggaggagaatccatctattacgatgagcaaagcaaatttgtgtgcaacacagaacagccgggctgtgagaatgtctgttatgatgcgtttgcacctctctcccatgtacgcttctgggtgttccagatcatcctggtggcaactccctctgtgatgtacctgggctatgctatccacaagattgccaaaatggagcacggtgaagcagacaagaaggcagctcggagcaagccctatgcaatgcgctggaaacaacaccgggctctggaagaaacggaggaggacaacgaagaggatcctatgatgtatccagagatggagttagaaagtgataaggaaaataaagagcagagccaacccaaacctaagcatgatggccgacgacggattcgggaagatgggctcatgaaaatctatgtgctgcagttgctggcaaggaccgtgtttgaggtgggttttctgatagggcagtattttctgtatggcttccaagtccacccgttttatgtgtgcagcagacttccttgtcctcataagatagactgctttatttctagacccactgaaaagaccatcttccttctgataatgtatggtgttacaggcctttgcctcttgcttaacatttgggagatgcttcatttagggtttgggaccattcgagactcactaaacagtaaaaggagggaacttgaggatccgggtgcttataattatcctttcacttggaatacaccatctgctccccctggctataacattgctgtca

SEQ ID NO: 86641 - DNA, 1103 bp, Homo sapiens
acatttggccagagctatgcagagttgccagagcttaataatgagcaataattcatcttggaaacttttctgttttgctgtttaatccagtacagatgcaggtgttttctttctgtgactttttgtgagtagttgtatctgtaaatcacctcccatggagacgggtgttcctgtgactgagagccagctgttgggtgttttagctaaacagcttgctcctagttagctgctcaaatccccctgagaggtgtatcggctgcttcagggaatagagcagatggggtgaaggtttttgcaaggcctttagtgacctgctttcaatttgctgcaattcttctgctttggctttttcctataggtgccagagttcatctgcttcatatttttactactgacgcatcttcctgtcgtatattcttagactgtggtgacttaagaatctttgggtcacctgttacatggtttctcctgccacctgtatggggaggagaagactggtattcaaactcaagcctgtttctatcttattctcattgatttttatgatacatagaaaactttgtttctttctgaaaatggcattttagtgattcattgttttctgtgggagaaagcttatgacctgctcttttctttttcccttccagagggaatctggaaaaattgcaatcaaaacatcatttctctaagaaaattttgggtaaccgaagttctggacaacaggtaaagtgtgtttaaactttggtggtgctgacaaatcatctgtaatctgcagaagtaaactgggagagggaggaggacaagttaaaaattaagtctactttgtgtcggggctttattggggatttcccatatattacctcatttaggtggtttttacctggatcctggatgtagatctgggaatctcagaaagaatctgtcctttaaaatgctgttttaaatggatttgctgttgattggatttaatgtcctcacagttcagtttagcaatcattttttaatgtctaccataaataaggtacagaagtataatttgtagattctgttatatagtaaaggggtacaatatttattgcaagaccatttactgggcttctaag

SEQ ID NO: 86642 - DNA, 1036 bp, Homo sapiens
gcctagagaatgagtgacccattacagaaatgaggactaatgttttcaaaatgttccccagactgcactcatctcccaggaattatttgacatttcactgagagtaagaatgggtaacttgtggccgggcgtggtgactcacgcctgtaatcttagcactttgggaggccgaggtgagcagatcacctgaggtcaggtgttggagaccagcctggccaacatggtgaaacgctgtctctcctaaaaatacaaaaattagttgggcgtggtggtgtgtgcctgtagtcccagctactcaggatgctaaggcaggagaattgcttgaacccgggagatggaggctgcagtaagttgagatcgtggtactgcactccagcctgggcgacagagagagactcttgtctcaaaaaaaaaaaaaaaaaaaaaaaaagtaacttggaaggagaggaaagggaagagtatccaagaaaaacttactgactcaataggtaaaaacattggtgatactgccattcattttaggaaactcatggttctttattttagaaagaagattgcagctgggtgcggtggctcacacctgtaatcccagcatttgggaagccgaagggtgaatctcctgaggtcaggagttcgagaccagactggccaacggggcgaaaccccatctctactaaaaattagttggacgtggtggtgtgcgcctgtagtccagctactcgggaggctaaggcaggagaattgcttggacccaggagacggaggctacagtcagctgagattgcggtactgtgctccagcctgggtgacagagactcttgtctcaaagaaaaaaaagagaaagggaggaaaggagaaggaaggaaggttagttgctcgtcacccattttgtgagatgttggagttaagttgataaacacatttacacaaaaagaaatgcaaatagtaaacaagtataagagaagtttggccgggcgtggtggctcacgtctgtaatcccagcactttgggaggccgaggtgggcagaacatgagg

SEQ ID NO: 86643 - DNA, 1341 bp, Homo sapiens
ataagtagatgattttaggcaaataataaagttttttggtttttgggtttttttgagatggagtttcactcttgttgcccaggctggagtgcaatggcacaatctcagctcaccacaacctccccctcctgagttcaagcgattctcctgcctcagcctcctgagtaactaggattacaggcatgcaccatcacgcctggctaatattgtatttttagtagagacagggtttctccatcttggtcaggctggtctcgaactcctgacttcaggtgatccgcccgcctcagcctcccaaagtgctgggattacaggcatgagccaccgtgcctggccttgtgcttttcttttgcagttctgatcctaaagactgggattagggtcacatagaacctgtacataattccatctgtaatgtaattctttactagcgagtggtcaagaaagagtccaaactctagtgcaagactgcctgacttcaaattctggcttcactacttaataagtagatgattttaggcaaataataaagttatttgttttttgtgggttttttttgagacagacttttgctcttgttgcccaggctggagtgcaatggcacgatctcagctcactgcaaccaccgcctcctgggttcaagcaattctgtctcagcctcctgagtagctgggattacaggcatgcaccaccacgcctggctaattttgtatttttagtagaggcaggtttctccatcttggtcaggctggtctcgaactcctgacttcaggtgatccgcccgccttggcctcccaaagtgctgggattacagacgtgaaccactgcgcctggcaggcaaattataaatttttaaacctgatttcctcatctttaaaatgagtttaatattagaatctacctgctgaaataattcaaataatgttcattacatttgatcttcaaaaatcctattaattcggctgggcgcggtagctcacacctgtaatcccagcacgttgggaggccgaggcagagggatcagttaagtcaggagttcgagaccagcctggataacaaggtgaaacctcatctctactaaaaatagaaaaattagccaggcctggtggcgagtgcctgtaatcccagctactcgagaagctgactgaggcaggagaattgcttgaaccccggaggcagaggttgcagtgagctgagacttcgccattgcactccagcctgggcgacagagcgacactctgtctcagaaaaccaaaaacaaaacaaaacaaactgaattatgttttacagaaaaacagtgttaatttgagtctgtttggatataacctatagaaaactctt

SEQ ID NO: 86644 - DNA, 1012 bp, Homo sapiens
aggaggattgcttgagtccaggagttcaagaccaacctgggcaatatgatgagaccctgtctctacaaaaataagaaattttaaaaaaaaggaggaaagaggctaggtacggtggctcacgcctgtaatctcagcactttgggaggccgaggcggggggatcatgaggtcaagagatcaagaccatcctggccaacatggtgaaaccccgtctctactaaaaatacaaaaattagctgggcctggtggcacacacctgtagtcccagctacttgcgagactgagacaggagaatcacttgaacccgggaggcggagtttgcagtgagctgagatcacaccactgcactgaagcctggtgacagagcaacactccgtcttaaaaaaaaaaaaaaaaaaaaaacaggaaagaaatgcatagggtttcagagtaagttttgatgtttttcctctatataaatcggataaacttcacacacccctattcttatcctctaatctctaaactatattcaactcccaatagttatagagattattttcattcacatgtttgtagtatttatcagttttggcttaatttattattacttaactaatgagttataacattccttttgggaacgttcaaattagagctggactctattttaggaattccccttgagtcattcttggacttggaattcctaattgcccatccagagtagatgtttatttggattcaaaattttccttcctgaaattatccattctgtggcttcggttaccatatatattttgaatactgccacatttttatctgtagccagacctctttttttatcctggctgcctgttcaacatctccacagagatactcagaggaggtaatttgaattgtgttgtccaaagtgagctcttcatcttggccccacacctagactttcttcagtgtactctattttattaagtggctctatcacacaatttactgaggctggactctttttttttttttttttttttgagatg

SEQ ID NO: 86645 - DNA, 1062 bp, Homo sapiens
ccccgacctcgatccctgcgtctccggcggcgtgcgggctcgtctgaggcttcccgcatctccccgctggaactcctgcctcccgggggttagaggagggttcgttcgagggctggaagcgggaaagcggggcggaaggactgggctcatcgcctcctgattaactcgttgtctttacttaaaatgacttttcccccactttgtcaaacttgagaactgttttgtgtgtgtgtgtgtttccttaagtctctagcttcaaaattaagagtaggcgctaccgctgtgattgtgggcagttgtgtggttggcggctgcgtttggagctctgagttgaaaagatgtacgtgaatgtatggtttagattttgttcttttttttgcgattgtctgattgggagtacttttcctttgcgaaatgggcgaatttggttttctttttgttcattgagaactggcagtgataccgatttcattatgctcatgcttaattttgttagcatcaagacgatgtgaaatcgagtaagttaagtttgaataagttcaggctgagggtcatcttgtatgcctgataagtctaaatttgttatatgtttgtgtcgtgtatacgttcaagtgaatatatgtgaaagcgctataaaaaatcaaactacataaatgaaagggattttaatttcctgataagcaggaaacagcatatctccagtactttaatatctgtagaaaaatgcgttaataatgtcatttaggaataaaatatttctctccctagagagggtttaggtattattcagagtaaaagagcaaaaaaatttcaacctcagagggtatggaaaaaaacagaaaaatacccttacttccagagctcctgattaaaatattgtgagttgtgggttaagtttactgatttaaaaaaaacttagcatagagttgtatcactgcagttgctttgaatgtcttaagtactgtgtaatgtcagaattaaacacgaactaacttttctgggtagaaggtaaaaagctccaataaacagatcttagttttccccagatttttgtgcccagag

SEQ ID NO: 86646 - DNA, 1086 bp, Homo sapiens
aaacaaaaaagggccgggcgcggtggctcacgcctgtaatcccagcactttgggaggccgaggcaggtggatcatgaggtcaggagatcgagaccatcctggctaacaaggtgaaaccccgtctctactaaaaatacaaaaaattagccgggcgcggtggcgggcgcctgtagtcccagctactcgggaggctgaggcaggagaatggcgtgaacccgggaagcggagcttgcagtgagccgagattgcgccactgcagtccgcagtccggcctgggcgacagagcgagactccgtctcaaaaagaaggcatcccattggcagaacccttgtttccagcccagggatgaaggtagccagttggtaattgtgaagaacctgcctggaaagagatggacctggaaaaacaggagcagctcaggaaccagaatgtgttccttagtactcatgtgcaaaatatatgctaaattacatgcaaatcaatgtccaatcattataatctctggcaatttggtaactaatgctgttacactatctggtctaggacatttctggctccctggggccagatcctgctctgtagctcccacaggagaaaccatcacagaccaaaggccagcgggggccccagcactcaaggactgtttctcccaccaccatctgtggacttttccagctgtttttcttggcccaaggatcacacccatagggatgcagatgggggaaggggaagctgagaaagcagtgaagacagaatgagctggggaagaggcagatggtaggaaatggagacggagaaatggcactaatggcccagccacctgagatgggatacctgggagggacatcttttcaagtagaggctgtgttggggcatggtgagagagggtcttagcaggtaaccttcctttcctctccagactgaggaatcagagttctgattgtggagtgcctctctctaggacggggctgcagcataggagtctcagctgcttacatccaggtccaggattatgtctgctaacagacgctggtgggtaccacctgacgacgaagactgtgtgtctgagaagctcctgaggaagac

SEQ ID NO: 86647 - DNA, 1153 bp, Homo sapiens
cccctggacaagagcattgtcatccgccccttggagccacagccagctcctcacctggcccgggaattcatgatcaaaacccgccgtaggaaggtatgtctcccttgggcctgttgccatccctcaaccccccaggactctcagaagcaggatctctctctctttcttttggccccttttcctaagggacacttttccaatgtagagatatgatctgtatactccttaggcaaccaaacctgggccccagtctcgttgggaaaggagagccttatcctcccatgtgatagtaccctaaaggcagggctcctgaaacaccaccacctacattccagccaccactagcctccccactgaacacaggtcttggatagtctccttgcttagtctgcgaccacctcgggctttcttatatttgccccattccctgcagggcctcagtgaagatgtgagcatcagcaaattcttcgatgatcctatgttgctggaacttgccaaacaggatgttgtgctcaattaccccatgtgagtgcgtggactcctgggagctcctgctccctacagtgggctgcaactcctgtacttgaagctgagacctcatatgacgtggccttcgtgttgtcagagagtgtctggaagctgctgttgccatcttgaacaactcaccaacctccaacccagagccccagtgagagaggagcatttggcctcctgcttccttctgtggcctctgccgggctccattcccaaggaaaagagaggagcttgggctcacagaaagagaaggggatgaaaccccaaggggccctatctttgggatttacatggaattttattttctacaagtttgaccttagccatggtttgcaagtgaacagaacattctgacctctgtcttgctctgctcctttcatcctcgtctcccctgccccgtctggtgcttacattctgaatatatgtcatctcccaagaggcttcactgcctctgcttccagctgcagcctccttcctgcctgggtccccagggaagccgcctgccttttaattcagtgttcccatgagcgccaaggccccattattgcccccttgctcccactccatgctgcttctgggtggaacctaagatggcttgggagttgttgggttcctgcga

SEQ ID NO: 86648 - DNA, 1398 bp, Homo sapiens
ctccgccttctgggttcaagtgattcccctgcctcaacctgagtagttgtgattacaggcatgtgccagcgcacgccaccacgcccagctaattttttgtattttagtagagatggggtttcaccatgttggccagggtaggctcgatcttctgaccttgtgatccgcccacctcggcctcccaaaatgccgggattacaggggtgagccaccgcgcctggctgtttgtttttaagaggcagtatgttgctgtatcacccagactggagtgcagtggtgtgagccatagctcactgcagcctcaaattcctgggtttcagtgatcctcctgccttggcctctcaaagtgctgggattacaggtctgaaccaccacgcttggcccctgtggctttcactgatgtcacttcctcagctgtccgtcttgttacccttttcttagtaatgcctcttctgctgttctgttagccgtccttaccacccatttccattctgaccaggaacaagatcaccatgattgctgagcctcttgagaagggcctggcagaggacatagagaatgaggtggtccagattacgtggaacaggtgagaacagggctctgacgccagggtcgaaaggaggcagggatgccacagtttaactgccgggtctctaagagcacacatctttctggggagcatttatgtctttgcctttgctcttgttctgggcacagtgggtaggatgaagtgactgtcttccaggaagggagggtctgtggctccaggaccagcaatcacagagctggctgacagctccattgtctcctcccttccccaggaagaagctgggagagttcttccagaccaagtacgattgggatctgctggctgcccgttccatctgggcttttggccctgatgcgactggccccaacattctggtggatgatactctgccctctgaggtacagcagaactgatgggaactgggtggcggtctcttacctctggagtggaagaaactacaaagtgttcttttcccaaaagtatcttgtgtcctctggtgaaggacagtatccccttacaggcacatctgtcttctccctctaaatgcttcagccgttgccagggcgactgctaaggaggcctcatgtttctctataggtggacaaggctcttcttggttcagtgaaggacagcatcgttcaaggtttccagtggggaaccagggagggccccctctgtgatgaatgtaagtccaccagcactcccccaccccagtcctcgagggtccttgcagccaggcatatgagtgggatgggctcaccatctttaggattcggcaggagaagcagcttggggtacacaggaccatcccaagtcctgggccagcttcttcccttttccttccttat

SEQ ID NO: 86649 - DNA, 1050 bp, Homo sapiens
tcctctactgatgtatctaggaaggaggaaggattggtgtcatagaaaacactgggtttcctgggcagcagaccatgttggggcttcagggcagagcttcactcagatgctgtgggttgagaatgacatgggtgcacgccagtgggtctcagcaccagctctgtcagacccatgggggttgttcagtgaatggtggtagatggctgaatggatgctgagagctacctttgaagactagaattaaggccctagtttgataccccacttactcttggctcaggaatctaatttctttactacagtaagttttcttgggctttttggtgatgatttggacagctcttttaacctgctgttgtacttatcacttgtgctgattaaggcagttggggttttcacagaggtagtgtcaagggagcttctgaattcccttaggtaaatggttgcccttccaacaaaattagacctcgcttcagtaatttattttctgtttcccaggtggctgacccagttgtcacgttttgtgagacggtggtggaaacatcctccctcaagtgctttgctgaaacgcctaataagaagtaagctgggagcacagtgtccctgggactgcagcctcctggacactctctctcctttatcttccacctctacccccaccatgagcactatgcacatagagacctctacagctcagaatagggggtgcttacaatacttgagtttcactccagccctctcagcccttctgcctttgaacacaatgacatgggattattcgccttgggtattcccaagaggagtttcataactgccactttgtctctataaaatgactatcttaaaagtttactccaaatcttactcactttttgtttttttgttttttttttttttgacacaggctggagtgcagcctcaactttctgggcttaagcaatcctcccaagcagctaggactatgggcacacaccaggccatctgttaatttttttattttttgttgtccagactggtcttggacttttgggctcaagtgttcctcccatc

SEQ ID NO: 86650 - DNA, 1053 bp, Homo sapiens
tgatggggggtataggacaaggttgtgtgtgtgtgtgtgtgtgcgtatttgtgttccgcagatgtctttatctagacaaaaatacatttcttaatgagtatactttgaattgattttctcgagaagagaaggaaaagtgagttgttactctgatccttgtacactatgagcctgccagtgtacctttccaggtagcaggccaggagggctaaagggctagcttatgtccatgggtatagggtagagtttgacctaaatcattaagatgggaattaaatcattgacttcacacctagtatcaccatgctgagtggtcctggtgtcttgaggacccactcataggcagatgctcctcactgaaccttcttgaagaggctggaacagatgctaagtagtagctgtttctgataggcaacttcttgtctgctctggccttgattttgtttgtgtgtgcctttgctggcataagagaatccaggctgtgactgcctgttgtgtttcaggtggaggagtctggcgagcatgtgatcctgggcactggggagctctacctggactgtgtgatgcatgatttgcggaagatgtactcagagatagacatcaaggtacagcagtatctgccgggagctgggttcacggtccagacttttcacaagtgaccaaatccttgaattcctgggaagctccaagggaagagagagtacatgtgtttgtgaaaaccatgatctgttgctccttatatgggaaggtttttgagaactggtttgcccccttctgctgtgtcatacgtttaaaatcaaggctcagccgtgcttggtggctcactcccagcactttgggaggccgaggtgggaggattgcttgtagccaggaattcaagaccaacctgagcaacaaagtgagacactgcctctacaaaaattaaaataaaaaaaatagccaggccgggcatggtggtccgttgctgtaattgcagcactttgggagactgaggtgagaggattgcttgagcccagtttgagaccaatctgggcaacatagtgaaacctcgtc

SEQ ID NO: 86651 - DNA, 1087 bp, Homo sapiens
ccagtgtgctcatgggggttccctcttatgtggtttattaatgtgttcagaaaacggggtaacttattgaatagagatgcatgcagtgtttctcaaggggagtcaggttgggaattgttttaagtagatgttagatggggtgcttattttgttccacgtaaatgcgtatagccaataaaagttcatagatcgatgtactttaaactttttgtcagctgagttccaaggaaccatgtaccactgatacctgctgcttgctcttttctggcatcagggtgactccaaatcttctagcagcacattcccaggaagcaggctatcactatctatagtgccagagcttttagagctaacaatcagtccccgcactttgagctttttgaccattgtgaatggctcagtaactcctgctcgtgctccctgggaaggcatgtattaatggctttctcttctccatccacaggctttgtggacatgtgtgtgcagcatatcccttctccaaaggtgggcgccaagcccaagattgagcacacctacaccggtggtgtggactccgacctcggcgaggctatgagtgactgtgaccctgatgtaagggcatgtggctccccggttctctggtctttttttccccttcctgtgtggggatactgatttctggtcacaggagtaatgcccactttcccacccttgcctccccatccccatgagcacagtcaggcctgaatgcaaagcctgatgttgccaccgctagtgctatgaccttgggaacattactcacatttcctgagcctcaaggccttggtctataacacgagcataataaaatgtgagcggttgttatgagatttaaataagattaaggaagtgttacggttgtgttcagcatgttgcctggcagatactaaagattcaacaaatggtagctaatcttgtcagtcctggcttttaaaaacatctttcccagccatttcttaggctgtctagtttcttatcataaatacacagccagttgagaattgagttacatcttaagaggaaatttgggacagtaagtaatcttgccaatagtgcctctctgctatct

SEQ ID NO: 86652 - DNA, 1604 bp, Homo sapiens
ttgagacggagtctcactctgtcgcccagcaggctggagtgcagtggtgcgatcttggctcactgcaagctctgcctcccgggttcacgccattctcctgcctcagcctcccaagtagctgggactacaggtgcctgccaccacgcccagctcatctttttgtatttttagtcgagacagggtttcaccgtgttagccaggatggtctcgatctcctgacctcgtgattcgcccacctcagcctcccaaagtgctggaattacaggcatgagccactgtgcccggccagtggggattagtatttagaaacaaaggtttggatgtgctcattgctactggggtacattgcttctaggccctctcactgagcacagctaggttatatacactcatacatatctataactatttctacacacatatattaaaaatcatgcattaatcctaatacccccaattccatttcagcaccactggctcttcccagccttcttagttccttctttagcactgagaaacctggctcccaacatcattgttcatgggtttattcatttctcaatcctgcaaggtgccctcttaaagttcctgtgtctatcttcgggcaggatgctctctgcttccacccagtaatatttcccgaggtctttttttctccccaggcttcatggtttgaaatagtgccttctttggttctgctttgaactttctgccctccttgttcttcttaccaccttctgagccttgtttttctcaggtgatgctgaacacagagcggctgatcaagcatgcggtgcaggagaggctggcagtcactgtgtgcatcaacaagattgaccggctgatcctggagctgaagctgcctccaactgatgcttattacaagctgcgccacattgtggatgaggtcaatggattaataaggtagaaaacccctgggagtggatttcctgtcctcggaggctctgggttttaaccctgaatacctctgggaacaactgtgatttatttctaagcgtgtgttgatgagtttgttgggcaaaactagaggcacatcctgggactctgcaggggttgacttcatactttaacacatcttcattttactattatgatcagtacttgggctgtattaatttcttctctttttagagataggatctctgttacccaagctagagtgcagtgtcacaatcacagctcactgcagcctcgaacttctgggctcaagcaatcctcccacctcagtctcctgatagctgggaccacaggcatgtgccaccatacctggctatatattttttaaattaattaatttatttttttttgagacggagtctcgctctgtcgcccaggctggagtgcagtggcatgatctcggctcactgcaagctccgcctcccgggttcatgccattctcctgcctcagcctctcaagtagccgggactacaggcacccgtcaccacgcccggctaattttttgtatttttagtagagacagggtttcactgtgttagccaggttggtcttgaccttctgagctcgtgatccgcccacctcggcctcccaaagtgctgggattacaggcgtgaaccaccacccc

SEQ ID NO: 86653 - DNA, 1416 bp, Homo sapiens
aaaaagacaaaatcacaaccaaaaagaaaaacccagccatgtgtggtggctcacgcctgtaatcccagcactttgggaggctgagccggggggatcacatgaggtcaggagttcgagaccagcctgaccaacatgatgaaaccctgtgtctaccgaaaatacaaaattagctgagcatggtggcgcacgtctgcaatccctgctacttgggaggctgaggcaggagaatctcttaaaccctggaggcaaaggaggttgcagtaagctgagatcgcgccattgcactccagcctgggctacaagagcaaaactctgtctccaaaaaagtaaaaataaaaaaatccctccacacacccaggagcatttccagctgggagggcactggtctcattgtctgtaattgctgtggggacaccctgctctctctctctctttaatctcaaagaaacccttgagctgggaggtagtgagggaaagtgattgatggttcgtttgtgggagagcagtctcaactcaggtggtaacaacagttaattttttttcagctgtgctatactgacatcctcttcacagagcaagaggtaagcatgccttggggaatctgattgtcacctacaccagacccaccagtaatagttttgtagggaatgtagaggagcctttatgatagcattttagttcatatcctactcctctctctccacttctcacatcccatctccttcttcccccagttactccagggttataacttgaaaaagaactgggtaggcaagctgtaggttaggaggggaaccctcctgttcttgactagattaaatttggcctaatataggagaagtactaagaggcgatgtctgcatttgtgctataagttacgcagaagctcaacatgatttttttaaaatgacatcatcctttaaaaatccgcaggatgagtccatccatatgatgacctctttctaggagtagcttctctttgaaaatgggttcctatatctttgtgtttctctttttgtctttccttccggatctttctctctaatctctgaccccttctgtttccctcctcttatttctgtctctttttcctaatggaagttttaagtataataagtatggttaactaaaggcacttggaattagtaaagatagataggcaatcaatgttagctgttattattttataatgtatttatgtatttgtttggagttttaaaaaaaatgtttatttctgtcatagcttttatatttcttttttaaaaaaaaactaaaataccccagattgtttctttttactttcaaggtgctcagctattgtttttgtttctaatgtataaagaggatgagattctaggaccctggattctctgataaggcttaatactgttttgtttgcagtaattcattttcatc

SEQ ID NO: 86654 - DNA, 1626 bp, Homo sapiens
aaaccccgtctctgctgaaaatgcaaaaattagctggtcgtggtggcctcggcctcccaaagtgttgggattacaggcgtgagcctctgctcccggcctaatttttgtatttttagtagagacagggttttaccatgttggccaggctggtcttgaactcctgacctcaggtaatccacccacctcggcctcccaaagtgctgggatcacaggcatgagccaccatgcccagcctcttcttccttttttagtcttgctgttttactattgaaatccccgtgatagtccattcacagattgtgttacctcttggataagtttcttgcattcccaaagccagagctatgtaagtatagacattcacatctgcctgagcactctccagttggtctgaaagttgttcctggccaaaaaatacctgaaacacctttacaccactcctcatttggaaacgtttgccaatctctcttttctcttttcctttgtcctttcagtttcttggcggatctgatggataactcagagctcatcagaaatgtgaccctttgtggacatctccaccatggcaaggtaagacggaactttcagctacttggaacaggatttctcttttgtacctgctcatgttttagcccttagagtcacagcggttgaggtttgaggtcacaaggctcaacctcctgactaggggtgctgcatgcctgttacgaagtcatactgtgaaattctggcttttcccaagcagcaggtggagcctgttcctaagccacttgcatgcctgagccttatgtctacatctggacagaagatgggaaattgagccttactctgatttttataagttttcatttcctgagggatgcctgtctaagaaagatttcatcttttatttgaaaataatcctgtggcttcagtgttaattatttgctgtcccataaccctccttgctctcctttttctctccttatccctaaattatgtggtgtattgggagctgggggaagggcacagtaaattttcctctgtggtcggcagatgttaactgtttcttcccttttagacatgttttgtggattgtttaattgaacagactcacccggaaatcagaaagcgctatgaccaagatgtaagtagaacttctgttgagggtttaggatgaaccattcagaacagatagagatgtctctctcctccttccttcacccttcctgttctctataaataatgacgcctccaaagtgcagctttataattgtgatctctattaataggctgtaagaaaataatttcaactttctcgggagcatagagaatattgagctgcagtatttttggatgatccattttgcacttgggatccctcctctgttatgatatatcctgacttttatagtctattctttcctgttatagtattaatagcctgctctataaatatggtacaattgtacctggttttcatggtaaatttaaatgcctgtgaatgaggccaactgtgtctgcaagtctcagtgcaataaatgttcaaaccctgccagattgattgttttaacactttagcattaaggctgacatgtgtctccctttaccacactaagaattctgtgcatttgatataaattatct

SEQ ID NO: 86655 - DNA, 1094 bp, Homo sapiens
agccttattgtccatttaatagttttcataggctggaagcggtggctcatgcctgtaatcccagtactttgggaggccagagcaggaggatcgcttgaacccagcagttcgagaccaacctgggcaacatggtgaaaccccatctctacaaaaaaagtacaaaaattagctgggcatggtggtagatgcctcctggcaactcgggagactgaggcaggaggatcacttgatcacgccatttgtacgcttcagcctgggtaacagtgaaaccctgtctcccaaaaaaaaaagttttcattgatcttttggaaagtgattgcatcttataaatgcaaggaaagatcctgaactgacattgacctcaacctacatccattccccctccctccctcccactgtccctcaaaatgaagcccagactcctctttccacaattcaaggtccttcactgtctcatgccaaacagcatttccaaaactttctcaacatatgagtgatccttgagagtaaaataaattgatgtcatacatcatacattctgaaaggtcagtctaatggaatagtgttccgtatttttatgttttatgcccacctacacatcactaccttttttttttcttctagaacccattattaagccagtgaaaaccaagaaattcactctgatggagcagacattacctgttacggtgtatgagatggagtaagttacaaggtttctcagcttctctgcaggaatgctgtgggttcatgtttttgtagagataagaggtggcttttggctgaaatagctagtaaattgtggccgtacatagctctcaaattctccttcagcttgtgtggctgctgggatatttggggtcaatcttaacttttctcttggtgttcatccaaatgttagctgtttcctcttccagatctttagtttgatgttgaaagccagccttcaagagagatctgggtattgcagttatcactgttggatccaccagagcctgtttggactcaataagactgctgagtattttaggaatatattagctctttattttgtttttgttgttgttattttgagacaaggtctcgttttgttg

SEQ ID NO: 86656 - DNA, 1086 bp, Homo sapiens
ccaaagcagctgcacctttttcccatcagcagtgtgggaggtttcagtttctccacatccttgccagcacctgttattatctatcacaaagttattttccaaaaacaattctgtggatataagtgaaaattttaaaggtatgggcttatcttcagtttttacctctggcttttggtttctgcctttggagaaagttgcttttttccccgtaaagggctgtgctgtgatttgttttctccagtctcaacccacttgtgaccagtggcccacattcagaaaggggcaagtttgaaccaggagcactgtccatggcctcggcttagagtcttctctttgtgaagggtctcaaaggagtggaacctcccccactggcatagaactcagaataagaagctggccagcatgtacagtcagtgctgtcactcacggaggtagtcagatatcaaacaggaaaagcgtgtgcctcttcgattctccctctccctcttgctttcagatggatgatgatgacgacgacgatgacgtaggagatcatgacgatgaccaccctgggatggaggtggtgctgcatgaggacaagaagtactacccaacagccgaggaggtgtatggtcctgaggtggagaccatagttcaagaggaagacactcagcctctcacaggtacatcaggaggacatgggctgtgcggagtgaaattgaaacctggaaacttcatagctctcagcaaaccttaaaagttcagtgaatgaattgatcagtttttctttactaccttcaggtactgtttctggtttaagatttagttaatccttttttaatattcagtaaagttcttaactagtttctaagcaaataagagttatttcttatttatctgctatcagtttaggtgcatgaagactgtcgttaagtttatttaccctgtggcctgatatgtttttccatccaaataactccaacccttttaaccagttctcataatatgtattgtccatttctttttctttttttgagacgaagtcttgctctgtcgcccatgctggattacggtggcacaatcttggctcactgcaacctccgcctc

SEQ ID NO: 86657 - DNA, 1026 bp, Homo sapiens
aaataatttaggaaaaagtaagttatttgtactgttcttgccattttttgatactgagttgttttaaaattaaatttagtattaaaaaagtggagggagggggacctcctcttttggctttggagcgccccccacgccccatctctgtacggcggagcttcttccttctgtcttctttcttccttcttgcctattcaactctctgctccttaaaacccaaaacaagaaaagtggagggaagactacataaatagagacaagtaaggcagagacttggggaaagtactgggctttgggaggagcattcagtaggttgatgtcactggagaggaggcatgtgaaaggggtatggccaaccataagactaagactagacaggtggagccaccacatgaaggccttgattaccttgtcagaatctaactcttctctccttgaattttagcatcatggataccgacttatatgatgagtttgggaattatattggaccagagcttgattctgatgaagatgatgatgaattgggtagagagaccaaagatcttgatgaggtaaaacaaatatattgctcttttatctcactcttatttattttatttaagacaagatctcactctcttgccaggttggagtgcagtggcgcaatctcagctcactgcaacctccacctcctgggcttaagtgatcctcccaccttggcctcccaagtagctgggactacaggtatgcaccaccatgcccagctaatttttttttatttttcgtggagatgaaacattgcccaggctggtcttgaactcctgagctcgagcagtccacctgccttggcctcccaaactgctaggattacaggcatgagccaccatgcccagccccctcttttttcttttttttttttttgagacagtctcaccctgttgcccaggcaggagcgcagtggcaccatcttggctcactgcagcctctgcctcccaggtccaagcaattctcaatgcctcagcctcctgagtagctgggattaca

SEQ ID NO: 86658 - DNA, 2842 bp, Homo sapiens
agaaccagtggcagactgacctgcacctgtggggcagaggctggcaggctctgcccacccacgcacccgcccattccatagcccgagaagcagctctcggtaacaagcgcagagctgggcaggtggaagggtgaaattgtttgaactccagttccccgggtgcaccagaaactggcatctggatgtcctcccagagcaggcctgtcactcagctgtcagccaggcagagagaggaatccacctctttgtagaagaaacctcagaggtcatcttgtccaaccaccctcccccatgcccgagctgggggctggagggaggaagtggctggccttgcttccggttccctgctgatcagcctccttccctgtcctccctccccagggcacctgtgcccctgttcaccatgaagggccccaagccaacatcttccctccctgggacctctgcctgcaagaagaagcgcgttgcgaggtgaggtttgggaggtgtcagctgtctgggagaaggagctcgctctcaccagggcagtagacacctgggccgactctgggcccccagtgtctctgtctctacacccccggagcaagcagctgaggtcctgtgagcagggcccgcatctagttctcctattgaggtttccttggcccttgctatcccaggatcaccccagagctgatccatgagggaggctctcagcacccatttatccatgagggagatgttgcacaccattaatccagcaaagggactctccatcctcactgctacttccctcttgtgtccccaaccctacacactgcctctcccacccttagatccagctctggaagctcctgctggtgcccagcagcctttgctctcagggcttagtgtcaagtacttatatgccccacttcaatgcacacccatagtccagagacagggccgtaaccttccaccttccctcctttcctccctcagttcctcagtctcccatggccgcagccgcatcgcccgcctccccagcagcactttgaagaggccagctgggccccttgtactcccaggtgactggcactagggacagggatagcctgggccatggaggccgatgaagacaagaaggaggaggggacggggagctgagacccagaagaaaggagggcctagggtattgccaagcatctcagggatgctgctgatgagacaggtgggaggtgggctggaggacggggacagagcgtcactttccttcctcgctgcactccccgccacccatccaactggcctgcagagctgcccttgagtcccctgtgccctagcaaccggaggaatggaaaggacctcatcagggtggggagagcactctcagcagggaacggcgtcaccaaggtgtcctgaccgccagaatgtcctgaccaccaaggtgtcctaacctaccggcccctctgctggatacccctcttggacctgtagccacctgcaccaggagctggacctgccttccttacctgggagcaattagtgccaacacacctttgctgtattaacatccctccccagacatccatcctgctactcaccctctgttaatctcctgttacactcagcttcttggcatgtacatattcatttgtgagtgttaatgtgctgctgttttttgttttttggtggtttttgttttttgttttttttgttttgagatggagtcttactctgtcgcccaggctggagtgcagtggtacgatcttggctcactgcaacctccgcctcctgggttcaagtaattctcctgcctcagctttccaagtagctgggattacaggcacccatcaccacacccagctaattttcgtctttttaatagagagggggtttttccatgttggccaggctggtcttgaactcctgacctcaggtgatccgcctgcctcagcttcccaaagtgctgagattacaggcatgagctaccacgcctggcccgtgttgctgttttaaaggtgctgccatgttcccccatcttttttttttttgagatggagtctcgctctgtcgcccaggctggagtgcagtggtggcgatcttggctcactgcaagctccgcctcccaggttcacaccattctcctgcctcagcctcccaagtagctgggactacaggcgcccaccaccacgcctggctaattttttgtatttttagtagagatggggtttcaccgtgttagccaggctggtctcgatctgacctcatgatccacccgcctcggcctcccaaagtgctgggattacaggcgtgagccactgcgcccggcctcccctctcatttatgatgccctctgtgcaggcagacggctcttgggctcttttccccacctgtctctaacacaggccccacggtgatggccacaggcagtagaggaggaatgaggatgggttggggagcggggagtcgcggcttggctcttcctggtttctgagagggacatcttcatccctactccccttggtccccaaccacagtcctggtgaagatgtggatgataatggtgccttgatttccaaatgaagacagctttattgcttaactctattgtacataggatacacgttcagtgtaaaataaagtgtaaaggggaattcaggcttaatgctgcacctagatataaatgctaatgatacttgggtttatagccttctgatcctttatttctgcatatatatatagatatatacatatatttttggtataacaataaaccgtctccatccttggtgtgtgtgtctctctgtacacctagataggatagcaacaccttccctttctcaccttgctactcttaagacctcaggaaacttctgagtat

SEQ ID NO: 86659 - DNA, 1007 bp, Homo sapiens
cactgcactccagcctgggcgacagagctagactctgtctcaaaaaaaaaaaaaagaagttcctctgtcttcagagagtctttgtgatagaagcgacacagtccccatccctgggtgggaagccaccagctgagaggggcaagatgttctccaaaaccaagggagacggcaggagggtggcctctcattggccagtggtctagttcagacttgtttttagcagtgggagcatattttcagcaaaacataaacaccaatatatgctttctgccacatctgcttgacccctctcttcctccctccccccagggagccctggctctcctgggaccactgcaagaacaccctaaccctggcaagaaggtcttagtcgtggagtcaggggtcttctgcccctcgctgtggtctcaggcatgatactgaccttctctgctgtgtctccccacttgcgagggtgggtcatggggacgtgggagagacctagtgcagtgcctggccatcggcggtggctgataaaagctgctttgaatgaacaaataaatctctctcctgttccccatctcagctgaagagcaatgtgaccagcctggactgtcacatcagccagtatgctaccatctgccaacagctccaggctgaggtgaggagcccgccttgggggcaggctggagggccgacagccagaggcaggagcttgagggtgtggcgggggctctgtctgcccctcccctcctgtgcttagctggggctctcaggggctgggctgcttctgttccaggtagccgctctgaggaagaagctccaagtgtatgaggggggaggccagcccccaccacaggacctcccaggatctcccaagtcgggaccaccaccagaacagtgagttccactgcccattcccgcccccaccctgcagctcagccaggatggggagccaggccctcttctccagtttctggaggactaggactccttgcttctgctccaatccctagggttaagggttt

SEQ ID NO: 86660 - DNA, 1050 bp, Homo sapiens
ggccaccggggctgggaagacacacaccatgctgggaagggagggggaccccggcatcatgtacctgaccaccgtggaactgtacaggcgcctggaggcccgccagcaggagaagcacttcgaggtgctcatcagctaccaggaggtcggctgcccctgccctgggccttgttctcacaaccacccggggggaagtgagcccatggggtggagtgagctggtgtgggacagggtggcaggaaatggagagctggcacccctcaaggagatagatactgctcagtgagatgctgcactagagacacccgcctgttcaccctgctgtggtcatgtaacacagtcctgggaagcgccacttctgtgggtgtctcagatacatcccggcctcagctcccctgtccagccgctagggagaggtttcctgatgggccgctctccctcaggcctcttcctttcttcctttctcaggtgtataatgaacagatccatgacctcctggagcccaaggggccccttgccatccgcgaggaccccgacaagggggtggtggtgcaaggactttctttccaccaggtgtgggattgggctcgggtaggatgatcggccccatgggtccttggggttccctcacaaaactgtttggggatgccctgggtcctgtgatggtggtagcagtggtggtggtagcaagggggtgatgtagattctgaagagcagcccttcctgttaggggaaaagtcctgatccgggaacccacagccccgttcctgggcttctcctctgtagccagcctcagccgagcagctgctggagatactgaccagggggaaccgtaaccgcacgcagcaccccactgatgccaacgcgacttcctcccgctcccatgccatcttccaggtgaggtcatgggtcagagcctgaaaccagtgcccctgatgcccatctccccctcacccctgccatctgccttcagatctttgtgaagcagcaggaccgggttccaggactgacccaggctgtccaggtggccaagatgagcctgattgacct

SEQ ID NO: 86661 - DNA, 1854 bp, Homo sapiens
aaaatacaaaaattacctggccgtaatggtgggcgcctgtaatcccagctactggggaggctgaggcagaagaattccttgaacctgggaggccgaggttgcagtgagccaagatcgtgccactgcactctagtctgggcgacagagcgagactctgtctcaaaaaaaaaaaaaaaagaaaaagaaaattaggtacagtccatatatttgaaagtgtagaatacagaacgctaattccataaaaggaattataattattatacaaacataagggactattacaatgatgtgatcattgtagcataatatataatatcactataaggcagtatagcccgatgtgtagtcagactgcctggattggaatggggctccatcactcactagcattgagaccttgggcaaattgcttaaccctctctgtctcaatttcttcattgaaaaatgagtataataatagtatccatcttgtgagattgcaatggggataaaaggagatgatatgcataaggtgctttgaacagttcctgatgcagtgagcacttagctaatatgcttactatggcaatctgattgctgggacaggaatagaattacatacatgtaaaaggattatggttggttgatatctttttcttgttttatatggggacgaagttaagaagtttagggatgaggggacaggagtttcaaatcagctcagttctgtctcattccccaaggaaaaccttagctgtttgctagagtgtcaggtagaaaccccacttttctttgctgaatgaccttggcatttgtgacccaccagtggaagctagtctttacctggaaggcatccatctattcataacgcccaggaacagcccctgttcctcacccctgtcaatatatccccagagttgggctgaacttttccaggctgcattccaaaattccatccctacccttggtacgctgcattccaaaaattccatccctacctttggtacgctgtttcgaaagagaaatgaaaaaccagggagagaggtctggggatgatataagagtgaatgagtaaatatatgtttggaattattaccaggtcaacattaggaaatctgttgagtcaccctctacattaatagattaaaggagaaatatgtgtgatcacttcaacaagtgccaaaaagcatttgataaaattcaacacccattcctaccttcctaatgggcagtggaggtggggagctaaacatagaagagctaaaaatagaaagtaactctcattatttgcaaacgatatcatcatttaattgaaagacttaagataatcaatgacaatctattagaaccaataagggagttcagcaatgtggccagatacaagatctgcatgcagaaatcagtagctttcctatcttctggaaagaaggagtttgaaaatgtgattttaaaaggagtgggtgggcgcagtggctcacgcctgtaatcccaacactttgggaggccaaggcgggtggatcgcttgaggtcaggagttggagaccccacctctactaaaaatacaaaaattagctgggcgtggtggcacacgcctgtaatcccagctgctcaggaggctgaggcaagagaacctgggaggcggaggttgcagtgagccaagatcgtgccactgcactccagcctgggcgatagcgagactcagtctaaaaaaaaaataaaaataaaataaggagcctattcataatatagcaaagatcatgtaataactagtaataaacctatcaagaaatatataatacccatgtgaagaaaattataaaattttactaaagactgtaaaggtgtgaataaatggaaagagatatcagttcctag

SEQ ID NO: 86662 - DNA, 1064 bp, Homo sapiens
ggcgggcgcctgtagtcccagctacttgggaggctgaggcaggagaatggcatgaacccaggaggcggagcttgcagtgagccgagatggcgccactgcactccagcctggtcgacagagcgagactctccctcaaaaaaaaaacaaaaaaaacacaatttcttcctctgcatgaccacaacatgtaggaagaaccagtggatcgggggtgctgttcttttgtgggtaccaaggtgagggggagatgggagctacccaagcccaattgcagggcagaacagcctaaggatggggtagtgcccctggtgacagaaggtcaagttctagccttgctacttcacatttgggagacaagttcctgtgcctcctgttccttttgtacagtagggatatgacaattgttgtgaaagttaaacaccatttgtaaagcacttagcatagtgtctaattcatagtaagcactaagtaaatgttagctgtaataataattatttttagatttttggattcagactctgctcttctctggcccttatttattcataggacaaattcagcatctgctgcatgctgggccgggtgcccaggcacctggggtacacagactatgtcagaagaaggtcctcctcttggagtttaaggacaaaaaaacaagtgtattagggttgtgaaggagagatgaagggggctacagcatcgcctgtaaaaataggacgtccaggggctgggcttcttcccctaccccctcacccctactacgttcctcagcttccagagtctgcaggtagattccctcaagtcctctgaaattcttctccagggacttgtgaggagcttgggctcactggacctgtctctactagggtgggcagagcaggctctccccaaaacaacagaatcttggcttcccagccccagcctggcagagcactagcctctgggttttaatgagctgccctgggttagaaacaggacgtgactgtggctggctgagaatcctgaagatcttattaaagaatcatctcccttgtactttgggctgaaatgctctttccaaccaagga

SEQ ID NO: 86663 - DNA, 1751 bp, Homo sapiens
ctcttctctattccttgtatgtctctctttcccacgtgtgtctatcagacatccccgtgtctctcctctttgtccttggttcctgaccaaatgggaggccccagtatccagcaaaggctcattctgcagacagccccatgattccccctattaatcaccaataagggatgcagcaatgtcaccttcatcaatggaatgtcttcctttcccaaagaagtttgggctgacacagagctgaggtttcaggggattggcagcttgcctggatagggaggcagtcattgggccacaggttggccctagaccctgcaccacctcaggaagtcccagcaggtccccagagatgaggcaacaagaggccccggagatgctatgtgcttagaatggggaacttgcttcagtcactgggaggtaaaaccatctcaaaagctccttttccctccagcaggggcagggtgttgacagagtctgatgaaggggtgctcactggagatgggaccacaggctagtaggaaaaaaggaggtggctttaactaggggtttcaaaggcccagcactttaatagttattcagaccagccccctcaaaagaaaaacaggagaggctgggcctggtggctcacgtctgtaatcccagcactttgggaggctgaggcagatggatcaactgaggtcaggggtttgagatcatcctggccaacacagcgaaacaccatctctattaaaaatacaaacattaggccaggcacggtggctcacgcctgtaatcccagcactttgggaggccgaggcaagtggatcatgaggtcaggagatcaagaccatcctggctaacacggtgaaaccccatctctactaaaaatacaaaaaattagctgggcgtggtggcaggcacctgtagtcccagctacttgggaggctaaggcgggagaatggcgtgaacccgggaggcggagcttgcagtgagctgagatcgcgccactgcactacagcctgggtgacagagcgagactccgtctcaaaaaaaaaaaaaaatacaaacattagctgggcgtgatggtgcatacctgtaatcccagttagtcaggaggctgaggcaagagaataacttgaacccaggaggcagaggttgcaatgaggtgagatctcgccactgtactctagcctgggcaacagagtgagactctgtctcaaaaaaaaaagaaaagaaaagaaaagataaaaacgaaaagaaaagaaaaccaggagaaatagtggggcccgtagccccctctcccatgtcctttatgacttcttccaaattgcccaagagactcatttgatctcactagccatcccacttgttagttttgagcccctactaggagccagatttgaggctttgtaggagttcagtccacttgccctccaagacctcatggcctatgcagggggaacattcataacatacaaccacacgccccagcgaatactgtgttaaaggtgggctgggagcccagctgatgactttggtccccaaatgtgttggctgggagggagtgcttcagtagggcctaccctggtgcagaccaacctgatgcagggggagaagatggtgaaccttggtctgcaaagtgaggagataccacaagggagaatataaaaggtcaagtgtaggggaaagccagctcagaggtggacaaggacatttaaataagcagagaaaaaaatggcaggaccagacaatgtatgggaacaaaagagagaagcttg

SEQ ID NO: 86664 - DNA, 1020 bp, Homo sapiens
atagctcctacttgtggacccatgcacattcacaattccttagtcacaaagtctacacaaacatatgtatgccaccccatcacactctgcctggcacctgcacaaactcagacacttacacgggaagagaaatgcagccatcactctactccccaacccccactgccactgatcaggaagagccagcttactggccagaccatgcataattcagaggtttggcccaaaatagttctatcaggcccagattctccagtgggggctaggggaggagcaggagcagcaaagggagtggggagagacatctcaacttggagaagaccctagagtctgcctcctgccctaggtgcctgggcagagcctgggggccaggggaacttcagcgcagcctgaagcactcacttcccaagttccctctcccccccacacatccccaaatcctcccaccctggggagacagggtcacccgcaggcagctgggagtgccaacacctggccattcacacctgctggggcctggagtcctcacctgtgtgtgtcaggctccccagcacctccccagggcccaggctgagagggacactgctgagttctcaggcatctttgtcccaggtctcctgtcttcacttcaccaatcaatcagttgataagtccacaaatatttactgagcacaagcccgggcaaagctgggtcctaggacttcagagggcacctggctgtgcatggagaggctcagaacttgctgaggaggcaggaaatccacagaaaggacaaagactgggtcagagagggacaggccatggagctagggatgcaggcggggaaaagcttccagctgaaagcctgacttgagctgggcctgcccaggtgaaggcctggattcagagagatggaaaggcaggtgggagggacagggtcggctggatgggggcagagggtccgaggctatctggatgttagtaagaagattggctgatggaactggagtcatgtgaggaagtcatggggcaggactggca

SEQ ID NO: 86665 - DNA, 1028 bp, Homo sapiens
cttcccaccttatgactggggaatgtcaggtctagtagcaaagcaaagagaccccagatggcaaaaaaaaaaaaaaaaaaaagagctgtggccaaagttccccccttgtttgtattaaggggcttccgtagcccatagagctctgggttcctcacagtgagtggagtggggtgtgaggcagccagtgagcttccaagcctccctccctggctgtgggaccctaagtagcccagagcagggtagggttggagggaagatccagtccccatgctctctgtttcaggctgggcctggcagggctgcctatccctgtaacttggggtgagagggaggcaggacctacagtgcccttttgccctatccttagcgaccgggacacacagctggcacggctgatgcggcggaacagcctgaaccgcaaggacgcagaggcccgcatcaatgcccagctgcccctgacagacaaggcccgcatggcccgccatgtcctagacaactcgggcgagtggagtgtcaccaaacgccaggtcatcctcttgcacactgagctggagcgctccctggagtacctgccgctgaggtttggggtcctcacagggctcgctgccattgccagcctcctctacctgctcacccactaccttctgccttacgcctagtggggcactcaaggcagggagccccaggcctccatctatctccttggaggctgaagccaggtaacacatcctgtttcctctcagccccctccccacacacacacacacacacacacacacacacacacacacacacacacacacacggactctccgaatcagggctgggcctctgtgccaggccatcccgtctttggagtgtatcctatttgagatcaagaaatagcctgctgtccttcccaccttccctgagcagcacctacagaacagcaaccgtgatggtgtgtgaaagcaacagtcagagactgctatacatttctgtgggtgggggtagggaatactggctctgtggccctcctcagagctggg

SEQ ID NO: 86666 - DNA, 1035 bp, Homo sapiens
tggctctttggggagaacctatcttttgggtgttttgtttgtttgtttgtttgtttctgagaaataacaacttgagatttaagatcaaggtgaactaaacccttagtgcctgccctgatcacctccttgcctcacacggcctgaggcctctgcttcagcccgcacagtagagcctccctctccctgtgctgtggtggttctcattcgtggaatcctcaccttcaccttctcattttcaagtatcaaaagacctgccccccacttttcaaggccagcacaagtgccagcccttctacaaggtcttccctgatcagctatccagaaataattttctgcagccttctgttctgcacggcattggaaccggccagtgtgcagggtatgtgtgtccttggaaggcctgcccctctgctgggcgctctggacggtggggcccagcatatcatcagtcctcagtgtgcgcttgcagaattgaacttgggggatttccaacctctccccaggataccgctacgtgattctggatatccccctgctgtttgagaccaagaagttgctcaagtacatgaagcacaccgtggtagtatactggtgagtgtgtagcatgccctggctggaagggaggaccatgggggtatctgggaaacagcccacatcattttgcactttgccctttccccacggggcggccaagaggcatgggggtttgggcagcagtgctcagggtctgtagaaaccaacctttgtgcctgacgcggatagtcctgggggcaggtgtgggaagggacagcccgcgggcttctctagtgtttggggagcgctcccccgctgaccattgcaggcacttcagcccagatgcctggcctcgccctgggccactgttactcagtggctccttcttcctcctgtagcacctttattactttgcacagtttacctctcagtgggaggtggtcaggacaggtgttgatattcctattactgaagataaaattaaagagggggcagttacagaatgtgtccagggtcaccctt

SEQ ID NO: 86667 - DNA, 1106 bp, Homo sapiens
tcagtgatccaggtgttccagcagctgggctgtgcggtgattgacgtggacgtgatggcccggcacggtgagttggaggggcaggttggggggccgtgcacagcagctccccacgcttccggccttctgccatgcctcctttttttataagtctcagaggaggggaaggctcctgttgaccctggtctgacttctgtctctgccccgtgcttgccttctctgctcttctattttctgtttttagaaaccccccagctgtaccccattaccagcacaagggatcctgtacactctgctcttttccttcactgctttctctaccctcattttgcttttgctccacctgaaagaagcacccgagttcccccatcattttgcccctggtcactgaggtcctctgactggccctgaggcttcagggagtgacccagcttcttcctcctgccacagtcgtgcagccaggataccctgcccaccggcgcatcgtagaggtcttcggcactgaggtcttgctggagaacggcgacataaatcgcaaggtcctgggggacctgatctttaaccagcctgaccggcggcagctgctcaacgccatcacccaccccgagattcgcaaggagatgatgaaggagacgttcaagtacttcctccggggtaagtgccagggcctggggcggggggcggggcctccttccagggccagggcccttctcctctgcagaaagtttggccagggtaggggagctggttatcccagctgatgagttcatactgcttactggcatcccctccacacagagccccgtaccagccccagaggaaagaagcacgttccctcagctcttaaggaggctgacagtttaatgagaagagacacatgaggctttcgagccatgagcccaggaagtaagttggtttttctagtagggatgggagtaataagagctggtgaataatggagccatagatctgagttcaaatcccaaccctgactttctagctgtgtgacttcattgagtgatctcgccctcagctcattttttcatttgtgcagtggggataataatccaacatgaggctgggcacagtggctcatgcctgtaatc

SEQ ID NO: 86668 - DNA, 1098 bp, Homo sapiens
cctggcctcaagtgatccgcccaccttggccttacagccactgcgcctggccccaggggagcatttattcaccactcccaggagagctctgaaccactgaaggggaggaagaaatcaccagtgtgactctcagcctccctggggagctgcaccgttcttggcactgaaactccagcccctctcactcacaagtgtggggactgaggctcagaggagggaaggcacccggggctcagctgtttcttgtatggagtccttaccaccctgggccaggctggagagaagacttcctgcagtcacatgggtagttttatcacagaattcagagaccaggacccaggactttccacttccagtccacagcctttcattttagccatggttctgggcctagctgattcagattcagtgggctggggtagatggagcctgggtgtctgtaccttttgtaagtttcgcagtaaattcagattatagccaggtttagcacttgctgtgaggaatgtactgcctctgtgtaagcggcagtggaatgtgggaagccagatcggattctggagaatgatgacttgaccagagcagaaagagggtcatgaacacaggtgatcaaaggtggtcgtttgttcatgtgggcctgacagggagctgctggcaggtctaggtgtgacttggaggccgctgggtacctaagcctctatttcctccttgctgagctttgggagcaccgtgggctgcaacttcctccctggcagatcccagtagatctgtgcgcagccaagtgagtgggaaggcactcatacagcaggcccagggccagcaccacctgaccattcctgcttacctgtcagcgctctgttctcagatgttttcatctggtactatctagctctccagttttcccaaggggcaagacttgtgttttcctctggttacccaagaggtccctggcaccgttcctgcagagcacagagatgctcagtggatggtcagtgaaggaatgagctacagaggggcttgttggacaggaacagctgttatttgtcaaggcccttttaagttggggacccggagcctccctgggcgtgtgctcctttgtcc

SEQ ID NO: 86669 - DNA, 1018 bp, Homo sapiens
acatggattctttataagttctcctcatttcctggttgtgagatactatcccttatgaaaacttaggaggagagaaaagtctttctgaaaataaattccataaagctagccttacttgtttttgtttttttcttcagcttctccaagagtcgttctttccctatttatttgatggcttatagctgcagctagctcttggaaataagaaatctttttagttcctttttaatttctcccttcaacttttggtttttcaaaactagatcaaagcagaatggaaagagaaacctcatcactgatatcaaataagtgttctaattttgtttcccaattaaatggcaattaaaaagaaactaatcaagagctgcttcaaagagaagagactggaaagcagaagaaatggaaagtaaatgagagcctatttcagggactcgctgctcatggcacagcagttttgctgatttttcacattgttcaactaatatgctcacgctaaaattccccagctttactaagttggcagttaaccctttccctatagagcccatagatttatgagccatacatttagtaacttcaggaggatgcttctttaactctttctcttcagctttttatctgaaatctctacccttcaggcctctcttccaattcctcaaagaagatgtccttgtgattgttacatttaagggacaaaaatatggtgttctctattgagagcgccaaaaatactaaaccggaattcctccataggctcagtatttgcctcaaaaatgtcccagcactttgagaggctgaagtgcgcagatcacttgaggtcaggagttcgagaccagccgggccaacatggcaaaaccccatctctactaaaaatacaaaaattagctgggcgtggtggcacacacctgtagtcccagctacatgggaggctgagacaagagaatcacttgaacccgggaggcagaggttgcagtgagcccagatggcgccattgcacttcagtctgggcgacagagag

SEQ ID NO: 86670 - DNA, 1109 bp, Homo sapiens
agctgggactacaggcgcccgccaccgtgcccggctaatttttttgtatttttagtagagatggggtttcaacatgttagccaggatggtcttgatctcctgacctcatgatctgcccgcctcggcctcccaaagtgctgagattacaggtgtgagccaccgcgcattgctgccttttcctttttttgagacgaggtctgtctctgtcatacaggctggagtgcaatgacgtgatctcaactcactgcaacctccacctcccgggttcaagcagttctcctgcctcgtcctcctgagtagctgggactacaggcatgtgccaccaggccccagctaatgtttatatttttagtagaaacagggttttgccatgttggccagtctggccttaaactcctgacctcaagtgatccacctgcctcggcctcccaaagtgttgggattacaggtgtgagctaccacgcctggctgatttgggcatttctcatgactgaccattttggacacagattgtggcaatgttaatgtgcctttttcctcatccctcactcccttttcatactgtcttgtgctccagatccagctggggaaaatcatgaaacctaatacatttgggaggtggaggaaggaagggcaaagcattccagaaagcccatcactgccttttggctgtcatccttttacattcagagttcaaggaagtattgtggtatgaatgccttgttaacaattatcattcgtctttggtgccattaccctggcaatataaagaaaataagcaacataaaagcaagaacggaaaaggccctttcacacaaataggacatcccttgcccagcactccctccctgaaagccgagggggcgcgagtcaggaggagtgctggtgtcctccaaatgccctttctggacctgggttcttcagcctgcttctgaagccaacaggcttgattaaggaaggtctggctccacagaaagctctttgtcaggggtagcacaaaacagattttttttaaaccctgcattagtatttactttttgttacagtggtttgagtccagccaatgacactggagccaaaaagaagaaaaagaaacaaaaaaagaagaa

SEQ ID NO: 86671 - DNA, 1040 bp, Homo sapiens
cacgattgagcctggcgcctagaagccatcatctggttcagaaatgggcccagtacattgttgttgctgttgacacaaaagcagccttgttgtgactccttacaaacccatccagactgatgggcctgggccagggccctgacagcactctttacaccaaccaggaggcaggaagccaaattactaaagataaatgtttgtcattcagtgacccaagggagatttaaatggatttccaaaacacgaaccaccttggatcccagtgattgtcctgaggttttgccatgaattggccctcagttaggggctaagggtagctggaaagacggtttgcagttgccaagcacagaatgttcttcagatagagggctcctagggacaggaggaatttgctctggttgagttttgaactgagccctttactgccccgagggggcaaagggtgaggctcacagctgtgctcttctttcaggcgaagtggtgaacacccatggccccgtggagcctgacaaggacaatatccgccaggagccctacaccctgccccagggcttcacctgggatgctttggacctgggcgatcgtggtgtggtgagtgggccctcagaaggttacacctgcgggtaggagccactttcacagtaagccctgcagtctcacctagactacgtttactcgagccctagagagctgagccaaggaggtctgaacagactcccgtctgtaacttcctggggcatggccaagactccacataaatagctcttagcttttctggcaggttggaagttaacctctgtaggtccccgatgtggatacctgtttttcatttattcttttttgttcattcatttcctcattttctttctagtctgtctcctgactggagcagctggggctgctaaatgaggccctgtcctcccctttccaccccggccacccagagccccttgttttgacctgagggatttatttcccttataaagaatgatgaaaatgtcgccgggcgtggtggctcacacctgtaatcccaccgtttt

SEQ ID NO: 86672 - DNA, 1024 bp, Homo sapiens
tacctgaaagggaaggaagaatttgtaccagaaagagggagacaggacaccagagctccagggttgccacagtcagctctcaaccatgggacccactggcctccgaaccaaagatgccagtaccttggttcaagctgtcaaagtgaacacagaaattggatcaggcatgaaatcctcagtatgataaccttgggttggatgagtaactaggccaaatgggatgagcagccagaaatggtgatggctcgattctgtgtgtccaggagggcttggccctaaagagaatccagctattaaccctcagggaggtggtagcaccaggtccgaaccaaatttggctgtggagcccaagcggcttgtccagcctgccggcaagcagcacaaccaccccagcctctcttttccagggctctccggccacccggctggctcccccagtggcactgtggggttcgagtggtctcaagtcggaaattggttgggttcattagcgccatcccagcaaacatccatatctatgacacgtaagcacctgcacctacccccaccccccacaacaccgccatcctgcttggtctgggagagagtagaaaaaggctgcacaatgtgccccatgaaaggaagagggaaggtctcaggaagggaggatgcccaggtgcggggactgcagattcatcctaggaaccacctgttctgctcagagtcccagccagctcccttgtttgtggcccaggttggaaggagcccaccctgaggcctggtgtgcctgctcagcagaggcttgtttttgtttttgtttattattttttacattttatagaggcaaggtcttgctatgttgcccacgctagtctcaaactcctgagctcaagtgatccactcacctctgcctcccaagagtgttgggaatatagacgtgagccattgtgcctggccagaggcttttcttagtctcactctgttgcccgggctggagtgcagtggtgcgatcttggttcactgcaagctccacctccagggttca

SEQ ID NO: 86673 - DNA, 1112 bp, Homo sapiens
agagcgagtgtgacccagattcagatagtccttggggcctgtgatctctgctcttcattttccctggaagtgttgaaaccatctgcctgccacagtcttcagggcttattaccagctgtgttcttgagggaatcagaacccttgaaaccctagaattgccttgacctgccccgtgggttccctgtgctgcttccctgcatgctaaaggtgggattccccagccaactcctagggactcatcagggagatgctggtggtaccttcaaataaaggtgtttgcttgggtcccaccttcctttggaaatagattctgttgaagtgaggcaggctccttgcctggtggagtgtggtggggagtcccagtactgagtgcaggtggcagctaaaagtacacccgtgctgcagacctggtccttctaggtgtggctgcacgtgcttgatgggatcaccattcccttccctgttaaaaaccttgtcacctggatttttccccctcttagagagaagaagatggtagagatcaacttcctgtgtgtccacaagaagctgcgttccaagagggttgctccagttctgatccgagagatcaccaggcgggttcacctggagggcatcttccaagcagtttacactgccggggtggtactaccaaagcccgttggcacctgcaggtaaaactgtcttcctgtaaggccccaaaaatgcgggtgtctgcactgtagttgaggagcatgtgccactgtgagtcacagctccgcccttagcatcccacctctggcgtatctggtaaggcgggcacttggtgcctgcaggagccagatggggagcatggagagggcgggagggttgtagggatggcagattggcaagtccctgccttgtctggagggctcttggtgtctgctggctgctgccatttggagatggtggggggcggtactggtggtttgtttttgtttttagggatgagcccaaatctggatttttatgggaaatgtcctaaagttttaaatggttggctcaaattgttttgaatattgtgtgcaccaaatagagcaagtcagctatgtgatctaagggcaacctctgccttagaaagttgtttaaaacaa

SEQ ID NO: 86674 - DNA, 1260 bp, Homo sapiens
gatcagctcatctcactccatctcttctgtcttgcctccagactcccaagacagctgggctgcgaccaatggaaacaaaggacattccagtagtgcaccagctcctcaccaggtacttgaagcaatttcaccttacgcccgtcatgagccaggaggaggtggagcactggttctacccccaggagaatatcatcgacactttcgtggtggaggtgagtcagggagtggtgttccaggtctctaacacgttcccagagaggcacccccctgagtggccgggttcccagggctcgagtgttggcaccttagacttccttgaccatccgtgtttggtcctccctaaaaacagggagttggtgcttgaatttgctgaaaagatacctctggatctggcttgagcccttctccccctctgccccactttgataacacaaaatagagagaactgagccccgcttaatccttcaggaaagcctgcaattccctgcctgtcccagcttaacccagtgctgaccagacataggagacacagtctggggggatgtgagctgcaagaagaggtccctggcggtgcccatgctgggaaagaggtctggcaggttcagcccacgatcacggctctgtcctcaagtgccctgagccaatgtccctcctcctccccacatgtcctgttgcagtttccagccatttatctagaggggcagagctgcctgaaggtggagtgagagaaacattttgttcccgggccgcagtgccactgtgcatgcttgacattgcctctttattgccttcccttcagaacgcaaacggagaggtgacagatttcctgagcttttatacgctgccctccaccatcatgaaccatccaacccacaagagtctcaaagctgcttattctttctacaacgttcacacccagacccctcttctagacctcatgagcgacgcccttgtcctcgccaaaatggtgaggagcagacgggggggtctctggagatgtgcagggaagaggcagtggagccatggtgagcacagctcccgggacgcagcctcccatgggctggaggctctgagccctcctcatctgttctgcttaggcagggttcccgcagtttttaggcagaaactcaaaacttggagggaacaaggagcatccgaagtgaaggcattgaactcctcctgattcatttcagtgagtttcgttctcacaggaggcgccaccaaggagcctgaatagccaggccttccctgggaggacag

SEQ ID NO: 86675 - DNA, 2186 bp, Homo sapiens
gccagcgaacttgacaattgtattgcgatggcgtgggctgcgtgacgtcacctccggtcgtgtctctggtctccgtgttttccagttaattacatcctcatgcagccgtgatcaagggaatgtaactgctgaaaactagctcgtgattggcatataatggagttaacgggtgaataataaaagtatatatatatattatatatatataaatattttaaatatctttcatgttccaaatgtacaaggatgtttggtctttaatgaaaagctgaatccagatcattcctcagaatgaggacccgaggacagtggcagacagacgcgttggcacagttcatggtttcctccagaggagacattggcttatcatggggaaaaagaggatctggagaacctcatccagctccccttctgaatcagctgggatgactggctttgagaaggaagggaagatggaacaggctcagatctcatgggatagcacgtggagctcttggctggggctgaccctgggcagggactttcctgcagggccagacctgcctgcattctgagacaaagcaatggacggtccgcagaagcagacctcattgattgagtcctttcttccatccccttggcctgctccctgtaggaagtcatcctgccaactgatttaaaagggctctttagccagttgttgccaaccttatagggatgagtcccctgtgagattttgcttttccactgcctgggatgatgcagtttgaagaggcccttggacctccttgtaacatcagggacctttggagaccattatcagtgtaagccctgcttagctcatcttagagcaaagagccagcaccctgatgtccctggggtggctaggcaggagtggcgtggggccaatacccagaccccttcagccaccagcccctggcctgtgccttccaacccattagccatttcttgttgtgcccctttccaagatacagcctgcaagtggtagcaagaagtgattagaggcagatctggacttggcaacagaagtggtttcccatctccattgtctgagtctgattttcgctgatgctgttttgtggatttttgtggtagtgatggttgtcagtgctgccagtttcccaaaacgtaatcaagcctctggtcacatggctgtcgatgtaggcattctggagtggtgttcagccaagtgaccgggcaaaattgggctgtgaaattgtacttccaggcttggatgtaatttttgctctagagagaagcaagtggtgggaaggaggtagcatgacgtgtggtgtgcgggtttccttgctgccgtcacctctccgctcatacaggaatgaagccttagccaggaggccaggctcagccctgtgccactcaccgaagccactttctacaggccagcaggggcttgttgcaggctgtgggttttggtgtggtttgtcagaggctaattctgcagagtttccaaaaccagaagacatcgtatgcttgggatgggggccgtgccacccgtgggaatgctgcccgctctgcagactgctgctagagccagcaactccactaaggtggattttcatcaggggcctgcagggccctcccttttcccattgttcctgcgctgcaaattgcaggccccagcaatcgtgactgacgtttgctccttgactccaagaaactgagaccaaagaagctgctgttcttagcaagatgcgcactgcattccacaggtgggaggagtcggagaggcaggggcttgctttgcagccccacagacaacagttgcacagtgcctcaagccccagagtggctcaccctgtccagacctttgaggatatcaaaggacaaagtgcccaagtctttcctaccttgggggaacctggaacttggaaaggctccctgtcctagtcttgatctgttctgggccaggtcccagcttgagctgcctctgagatttgggctgtgcggatctctggagtgagctctgtttcggttgacccaggtcatggaatggaaacggtgaggccccagtggctgttctggaagaaacagatctcctggcaaaggccccagcatctccctcactgaaaccaggtggccggctcctcggactctgctttatgttgcggtgagaactctgcccaggtgtgcagggtttggcttgtgggctgcttgctgctcatctg

SEQ ID NO: 86676 - DNA, 1025 bp, Homo sapiens
ttccaggttcccccaaggtaggaaagacttgggcactttgtcctttgatatcctcaaaggtctggacagggtgagccactctggggcttgaggcactgtgcaactgttgtctgtggggctgcaaagcaagcccctgcctctccgactcctcccacctgtggaatgcagtgcgcatcttgctaagaacagcagcttctttggtctcagtttcttggagtcaaggagcaaacgtcagtcacgattgctggggcctgcaatttgcagcgcaggaacaatgggaaaagggagggccctgcaggcccctgatgaaaatccaccttagtggagttgctggctctagcagcagtctgcagagcgggcagcattcccacgggtggcacggcccccatcccaagcatacgatgtcttctggttttggaaactctgcagaattagcctctgacaaaccacaccaaaacccacagcctgcaacaagcccctgctggcctgtagaaagtggcttcggtgagtggcacagggctgagcctggcctcctggctaaggcttcattcctgtatgagcggagaggtgacggcagcaaggaaacccgcacaccacacgtcatgctacctccttcccaccacttgcttctctctagagcaaaaattacatccaagcctggaagtacaatttcacagcccaattttgcccggtcacttggctgaacaccactccagaatgcctacatcgacagccatgtgaccagaggcttgattacgttttgggaaactggcagcactgacaaccatcactaccacaaaaatccacaaaacagcatcagcgaaaatcagactcagacaatggagatgggaaaccacttctgttgccaagtccagatctgcctctaatcacttcttgctaccacttgcaggctgtatcttggaaaggggcacaacaagaaatggctaatgggttggaaggcacaggccaggggctggtggctgaaggggtctgggtattggccccacgccactcctgcctagcca

SEQ ID NO: 86677 - DNA, 1075 bp, Homo sapiens
accgtcctcgagcaactgctgttggaaggcctccctgggcctggcccccaccctctgccacccagtcctcccagctgccatgtttcaaagacgacctttacctcctgcctttggattgactctgcatttgaccacggactccagtctgtgtgtagggagagagctgagtaggaggcctccactccggatcgaggcctgtatagggctcgtttccccacacatgcctatttctgaagaggcttctgtcttatttgaaggccagcccacacccagctactttaacaccaggtttatggaaaatgtcaggccttccccacaactcctgtctaactgctgtcgcccccctacttgctggctctcagaagcctaggggagtccctgtggtcctgaattctttccccaaagacgaccagcatttaaccaacctaagggcccaaaggccttggacaactgcatggagctgcactctaggagaaggaggggaaccagatgttagatcaggggagggagcaggagtgtccctcccgtcagtgcctacccacctgtgaggcagccttctgatggcctggcccaccttccccagaaccaggggaggcctgaggcttcagttttactctgctgcaaaatgaaggcgggcctgcaagccgactacacctacggaggctgttgaggacaatttcattccattaaattaaaaaatactgactggctggcaggcaggtgccatgtctgggaacagggacgggggagcttcacctttttgtcttggcttttctttgggctgtgggggggcatccatttccagggtcggggaggaaataccaaatgcattgttgttctgctcaatacatctcacttgtttctaataaagaaagcagctgaacaaaaccttctgtcctggtattcctggtcagcaggtggcagtggaagaaatggagtgctggagcctaggctggagccaggacgacagggcttggacacaaagtccctcaagcccacagcaccaggccagcttccaaaggccttcctttaaggctgcccttcttccagggcaaacttggtgttgtcagaccct

SEQ ID NO: 86678 - DNA, 1134 bp, Homo sapiens
gcagctcattcagacctatgagctcaacgagacaggtggggggggtggcacggccaggtcgtggcacctgaaagggctgtgttcccagctaagcgggttctgctgcgggctggcgcgggcatcatctcgggcaggttacctcacctcctccagactcagcttccacatgtgtaaaatggcacaacagtttgtcttcctcccagggtctggtcgaaggttaagtggcatgacttacatggagtctagtcagtagattgtctagtcattattcctaagctgagtgggccttgggggcattggaagctggacatgggggatccctatgtggcctgatgccctctcctgccacccctgcagccaagcagcatgagctgatgacactggatggcttcatgatgtacctgttgtcgccggagggggctgccttggacaacacccacacgtgtgtgttccaggacatgaaccagccccttgcccactacttcatctcttcctcccacaacacctatctgactgactcccagatcggggggcccagcagcaccgaggcctatgttaggtactgtagcagggggtgaatgtttccgggagccccacctggggagagacatgggctggcttcctggggccttcctggcccagcctgcctgctgccctgctctgtggcactctggcaacaccttgcccgtccacccatctgtccacacacagggcctttgcccagggatgccgctgcgtggagctggactgctgggaggggccaggaggggagcccgtcatctatcatggccataccctcacctccaagattctcttccgggacgtggtccaagccgtgcgcgaccatgccttcacggtgagcccctgggatgcccagccccagccccacagccttcccaatgacctccgtccgcactcacatgccagctgccctccgtccttccagaggaaacccttgcccagagaatcattcattcaccaagtgctgctgggataagtggccaatggggtggcataaagctgaatgagatgccaccctcatatttgggaaatatgttccctctctcatatttgggaaatgtcctaaaaatcacagagtttccagaagaaaacctttgggggagggaaggacat

SEQ ID NO: 86679 - DNA, 1186 bp, Homo sapiens
gtgcctggcctgggtggtgggtaagctgggtggccctccagtctaagcaggggcatgccaggtgggactagggggctggctctgccaggccctgtggtccccctcacatctttccctgtcccctaccctgacttccgcacccaaccaggtttcatgcctgttctggccccagagaaaagggtgctgccacccccacttgctgtgtcccacccggggccaagggaagcaccgcctgcctttcctgactttgttgattctccaaggaatgttatggactctggcaccgagcccccgccaggctccagccctgggtgtggcagccagctgggtcacgggggacatgcttggtgcctgaggtgtggaggctgcctgctggctaaaggattagggtgggagggtctttgggacccctcgccattgtgtgtcctctcctagagcctcacagccccggccacctggaaacgctctttctctactccctgctcggccttggccacagctgctggctgtagcagttccctgcatgactcgcattcctgtggagccctgtgtgcacctcccgagtgcgagccgcctatttccccctggctggcccaccttccaccctctccacccatgaaccctgtacgcacacacacactcacacgcacacactcacacacattcactcacactcatacacacacactgtctcacgcacacacacactccccacctatgcatacaccccacacacaccctgccctgcctgcatgccacccctccgggacacgcctggacagaactcccaccctccctgccagctgccctggcgcctgtctccactgcacagcctctatatccatccctgcctgggggcgacctgcactatcttcagcacacagggcttgtcctctctgagctcagtggtgcacctgtgaaaagggtgggatttggggccccttccagctctgacatgaggtagtttctggtccctggtcttggctacccttacagaactgctcaggccccagaccatccacgccccaaaccgcccgggctgcaggtggaagttgagaaactgggcctgccctttcctcagcacgcctgacccctctctgaggctgagataagcgggcagcttgggaaggtgtctgagccccagctgacaacactgaattgggcgggaggtgccgctgtcctggtc

SEQ ID NO: 86680 - DNA, 1721 bp, Homo sapiens
ttttttgtatttttagtagagacggggtttcaccatcttggccacgctggtcttgaactcctgacctcgtgaccacctgcctcggcctcccaaagtgctgggatgacaggcgtgagccatcccacccggtctgccacagtcattcttttttatgctcagacagtcacaactttggccattcaagaccctttcataccggatcttatgttcttataacacgacctgatgaatctttaaaagcgaccttgctttcctggtacaaggcgccccacattcactcccaccttccctgccccaggcctggaaccagccacttctccaaggagccttggctcctttttagtggagaatgatacttggaaactaaaatctaggtacccagggtcctcatttgacatatgtggcacatccttaacaacacaggtcttcaggtcataccaagggtcattgctttgtggcccagagaagatggcatggaagccgctccctctacccgcagccccgccagcctctcttgatactgggattgccctggggaggaagatgtgggagggagttggcattcaacctgtcaggaccacctgggggccacttcctttctagtggtgcagacttaggggcagggtctttccaatcttccactgaattggaagcaggttcctagggaggctgtgctgaggcctggactggcctctgactccctccctcttggctgcagaggccgcagcccaggcccagtgctcggccatggccccttgggctcccggggcccgcgctgctcttcttcctcctgtggcccttcgtcgtccagtggctcttccgaatgtttcggacccaaaagaggtgactgtcagtggaggggtctctgcagccaactgagactatcttgctgtgccctgagccttcctagggtttagaagaacagcattcaaaattccccgtcctgtcagtgtttgccttcgcacctcctcccctaaagcagcgcggggggcaaataagaccccacccctccctgcagcttcacagggacgcttccttccctccccgcaaccaccccaggctcccctgggaggctgcagttgtggtacacgtccccggtgctgggttggccgtgactcgggggcggggcgatcgggtctcagcccctgccttccccagtctctgggtcacccgaattttcccacccctgcttctccccgaggaggttgagctcttgagcaagttgggacttgggccggggcctggaagaatgattggctgggaggccgcgggagggaggccaggaggcccggaccagttgggaggagtgagcaggccccgggggagggggatgagcgcagtttgctcgctttcctcccctgccggccccctccgcccccacacacactcgggacgtcttcattgaagattcacttacaaaggaatgtttcactaaataaaagaaaaccagaatcttctgctgtctggtcccctacggagggagcggggagcggggcccggcgcgagcgaggcacaagtccctttcctgctccccacccaatgcccccctgatggccctgaaagaagccagcggttggtgtttctgaatggggaatattttccctcctccccgggcaagcgaagggaaaacaggcctctgtgtggaggggagagggaggggaaccaagggtggcccgggctgggagcggggcgcccttgggaaggcggggccaatgcggggg

SEQ ID NO: 86681 - DNA, 1051 bp, Homo sapiens
ctcagagagaaattctctagacccaagcccccagccctccataaacagggactgagaggacccagagaaccctccataccagtcactgaggcctaaaatcttggcgccctttccacttctccttcgccacacacccagtgaccctttcttcttattgcttccttaatagcatccctgacattccagcacgtttgcactgtgtaccttttacgcacagagccatgtgacctcaccacagcctggcaagttagacacgataggaatgagtgtctccattttacagataaggcatctctaagacactggaaaataagtgacttgtccaaggtcacatgacaaccatggggcagttctggctagagcgctggtctttgtgaccccccccgtgccatttttctttctgtcacaaacacaaaacccattttttcttaaaatcggggaatactctggatttcgttctttttattcccaacaacttcaaccttattcagcccctatatcacttggcaaacaggagggtacaaagaggggtgggatgccattcttgccttcaagttgctcctggactgtggagaggccatcagaccacagccagcctaaatggcaagtgagggaaatcctggtgggagctgatgagccgagtgcatgggagctgggaattatggacaagtgtcaggagcaagtgacttcctggctggctctgaaggatgaagagctttcaggcaaagtggcacgaagaggggcattttaggaagcccaagcatcatgtgccaggaaagggctagtctgggacttcggtggctctgggcagtgtgagatatcgggggtgggggccagtggtgatgggcatggccaatgtagatgcctctaaggggagccgcaagcacgcgggcctctgggcacagctatatgttctgaaaatgaacaccttcatttgttttctctgggcttccaagaattcgggtccacctgaaaagttcgccactccgtgtggcttcatcccttaggaggcttcctgagagcaagaactgcccctcagagcactcctgga

SEQ ID NO: 86682 - DNA, 1716 bp, Homo sapiens
acgggcggggcgaaaaagcttctatataaaaggggcgcagaggactgggagacagcagttggaagttggcaggtggagaggcaggttgggagggaaagtcgggggaggacgcggaagaggagctgtgggaagggggaggagggagggaggaaaagaggaggaggcggaggagaactgagcagagcagagcatcgagccaaaggggagatgagtttgtctgtcctctgctgaggctacggccgggcctagggaactgggagcttgggtggaagcgacacccgtggaagtgggaggaggtggcgccgggactttaaccccttgtgggctctgcggcaggggatttaaccctttgtggatctggcccctcggaggcagcgtcatcggtagttttaaccccttcggggctgggtttcacgcactggacttaccctcatcaccttgctcaccaactcctttattggggtgctccgcttggaggtttgaggcccacctccgcccattacgtactgttcctgccgctgcacccccttggacccgctagctggccgcactgtgggcgcttaaccctttactgacttgagctccccagattgcagttggagtttgctgatagaaggactagctaaaggcgtcactgcaggaattacaaactgaagaggactctgttggactgttttttttttctttttcttttttttaagaaaaacccatttttttccttaaggacttactagccaaaatttcttaaacttcgaggactctactagccatggccgagccattcttgtcagaatatcaacaccagcctcaaactagcaactgtacaggtgctgctgctgtccaggaagagctgaaccctgagcgccccccaggcgcggaggagcgggtgcccgaggaggacagtaggtggcaatcgagagcgttcccccagttgggtggccgtccggggccggagggggaagggagcctggaatcccaaccacctcccttgcagacccaggcctgtccagaatctagctgcctgagagagggcgagaagggccagaatggggacgactcgtccgctggcggcgacttcccgccgccggcagaagtggaaccgacgcccgaggccgagctgctcgcccagccttgtcatgactccgaggccagtaagttgggggctcctgccgcagggggcgaagaggagtggggacagcagcagagacagctggggaagaaaaaacataggagacgcccgtccaagaagaagcggcattggaaaccgtactacaagctgacctgggaagagaagaaaaagttcgacgagaaacagagccttcgagcttcaaggatccgagccgagatgttcgccaagggccagccggtcgcgccctataacaccacgcagttcctcatggatgatcacgaccaggaggagccggatctcaaaaccggcctgtactccaagcgggccgccgccaaatccgacgacaccagcgatgacgacttcatggaagaagggggtgaggaggatgggggcagcgatgggatgggaggggacggcagcgagtttctgcagcgggacttctcggagacgtacgagcggtaccacacggagagcctgcagaacatgagcaagcaggagctcatcaaggagtacctggaactggagaagtgcctctcgcgcatggaggacgagaacaaccggctgcggctggagagcaagcggctggg

SEQ ID NO: 86683 - DNA, 1040 bp, Homo sapiens
agcaaaattcagacatacttgcatagcttaaggtaaattgatgtatgagagttatttgtaattagatatttgtgtatatatatatttttgagacagtttcgctcttcttgcctaggctggagtgcaatggcgcgatctcctctcactgcaacctccacctcccgggttcaaacgattctgctgcctcagcctcccgagtagctgggattacaggcatgtgccaccacacccggctaatttttgtatttttagtagagacggggcttctgtatgttggtcaggctggtctcttaactcctgacctcaggtgatctgcccacctcagcctcccaaagtgctgggattacaggcatgagccactgtgcccagcctagatatctgtatatttgaagactgggctgaatttgtcttctaaaacatactttttctgatgataaatgcatttatagtctttccaagattcattttctaaatatcatttttctaatactaggggaaataagattttcatagctgaatccctctttaagaagagggtctgggctgggcgcagtggctcatgcctgtaatcccagcactttgggaggccgaggcgggcggatcacctgaggtcgtgagttcgagagcaccctgaccaacatggagaaactacgtctctactaaaaatacaaaattagctgggggtggtggcacatgcctgtaatcccagctactagggaggctgaggcaggagaatcgcttgaacctgggaggcagaggttgcggtgagccaagattgcaccattgcactccagcctgggcaacaagagcgaaactccgtctcaaaaaaaaaaaaaaataaagaaaaagggtctaatatcagagataatcactgctgcatcttacagttcagtcaaaatgaggcttcagctctgcactgtaaagccagagggcactgttgctgcctttccaagcagctgtttttctggggctgctgcatgacgtcatagcagaagaaaaaaacacgaagaaaactatttcaaaataaatgtttaatataa

SEQ ID NO: 86684 - DNA, 1109 bp, Homo sapiens
tgagccgagatcgtgccactgcactccagcctgggtgacagagcaagattctgtctcaaaaaaaaaaaaagaaaaaatgggaataaaaccagcttattagtggcctcctggttatctaaggaaaacacaggactgtaggactgaaaattaggaactccgagctctgtttctgtgtgtgctgcccttaacttggttgacttggccagaggccaaatactgataatgaggccaaactggtcattttgctgcttagtctattgttcatctactgttcaaccagactttcaacttccttttcagctctcccctctcagatgagttgcattatgcttttatgacaaattctacaaactctatattcatttgaaaatggtatcagcactgtctccctcataaatacctagaggagtaactagtcttaagtcgctatgtaaacacttactccttgtaactttgttatatgagaacttcacaaggaatgcttcaaagatcattggggcagttggaaagcctgccttaccaaagtgtggccttagttgtccatagcatcacaaaagagccatccaagtaggctgaatgaggatcagtctctcagggtgcccactggttgtggctgtgaagtcctggacactcattttgcctgatggccaaatcctagggagcagtgactatgtgtgagtaggattcgttgacagaggtaggaggttttttttttgtttttttttcctgctgcctgtataattgcagaaaaggagtgattctttacagtaattccccctcttcgggatgaagatgcttgcttctgtttggtttccacagttaaatcaattttttttccttttcttttgagatggaatcttgctctgtcgcccaggctggagtgcagtggcgcgatttcgcccactgcaacctccacctcccaggtttaagcgattctcctgcctcagcctcccgcgtagctaggattacaggcactcaccaccatgcctggctaatttttgcattttatttttttctggaacggagtttcacctggttgccaaggctggagcgcgatggtgtgatcttggctcaccacaacctctgcctcctgggttcaagcgattctc

SEQ ID NO: 86685 - DNA, 1032 bp, Homo sapiens
cgcgcccggaccaccccccacggggtgctctcactgcgcagcgagtccctccgctgcctcctcccagcccaaaatggcggcgatggccgccgagcttctcgtcgccttcctcaaaggccaaggatccctccgcgcctgctgccccgcccaccttagccggatctattttctgccccgtaaagattaacgccatcaatgaactctttaattgagttcggagaaggcgggtccagttgtgcctcctcacagctaatcgttgccaaaaaagcgagaatattggcagaaggcttgaccaatcaaagaaggcagtgatgcgcgcgcggtctgcccccgcgcaagggtagatgggttttggagtctcgggtgtggctgttgacgttacaggcccttggatcgcttttcaggccagaagaactacaatccccagcaggcaccgcgcgtccaggctctctcttcccccccatcttagtggcctgagcggcttgaccagagctgctgcaactgcagcaagaggtagggctcaggcgttgggaattgcaccgacaggcagtcgcacagaaaggcacacagatgtagtggtgtgcatagcccttgacagcgaataggtcagttccacctttgcaaaacctctttccatgactgtctcccttcttccaagaaatccatccttatcctagttgggtttccctcccagctgcatgtagtgcaaagacctctttccccttttctcctgtttccctttctgagaggaaggagggaggcaggccaggaccttagaggaaaagtcctcagcactaggctggcccaggtcccagctgtgcttctggcctttggagcccagcttggggagaaggttgggggtgcagggctgcatcaagattggggccactggagacagtggggaaggactcgtgagcttgctccatgttctcccgtggcagcagcagccccgctgcactcccagcctccccaggcagtcctcctttgcccctttggtggttggggaaacaaaacttacacctggcttcctgg

SEQ ID NO: 86686 - DNA, 1043 bp, Homo sapiens
tgccctgggtgtgcactttagatattcctctgtacatcctgtgtgtgcttacatggacacattctgtgtacttatactgtgtgtatacacatgtgcagcccatatgtccatacataggtgtgtgtgtatactatgtgtgtactttgtccacttatggatgtgtgtgtgtaccattgagtccatatctaggagagagagagaatgtgtgtgtgtgtgtgtccatgtatggatgtgtggatattctatgtctgtatttagagtgcaggtatatggatgttcatgtgctgtgtgtgtgtgtgcgcacacacactctgcctctttgtgtgtgtgcatgtgtataccttgtgtgcccatgtatcgggggtgtgtgtaccctgcttgtctatgtatgggggagcacatgtagcctgtgagttcttattctgctgggcaggtgtgtggaggtggtgggggaggctgagcatgaaaggccacttgtgccagttggaggagggtgggcgctgctgcctgctgcctcaggacttggtgggcctgtgggaggccgggctccacccaccagccttccctgttctcggtccccagtttaagaggcgagttcaggagtccacgcaggtgctacgggagctggagacctccctgaggaccaaccacattgggtgagtgagggctcagatcttcctctctgggcctaggaaggctctgcttccaggcagctcctggagcttccccttcctactccccctgccccctgcacaaggctgtgcttgtggaccacctcctggaggtgtccaggacagcttcccctccccttcctgcccatgctctgactggcaccttgaggcatggctgggctgtgggacccacctgagtctcccagaatcctttggtatcattgggtctttgggggttgaaagggcaccccaggggtccttgctgtccctgttctgtgcccatgtggggcaggacctcctttctggctggagctcagggagccctgtgcccacaggtgggtgcaggagttcctcaatgaagagaaccgtggc

SEQ ID NO: 86687 - DNA, 1288 bp, Homo sapiens
aaaaataaaaaataaataaagagaggccaggcgtggtggctcatatctgtaatcccagcactttgggaggccaaggtgggcagatcacctgaggtcaggagtttgagaccagcctggccaatatggcgaaaccccgtctctactgaaaaaaatacaaaaaaaatcagttgagtgtggtggcaggtgcctgtaatcccagctacatgggaagctgagtcaggagaatcacttgaacccgggaggcagagactgcggtgagctgagatggcgccactgcgctccagcctgggtgacagagggaaactccatcttgaaaaaaaaaatagaaacaaggccaggttttggtggccacagaagttgcggttggatacaaagaacttcctaaactcgagggcagttaaagatccacgtggcgtgggtgcctgaagtcctggggggcccttcctggagacactgacctctcctctctccccagtctggcttcagccttgtcatgaaccacccagcctgtgtcaatgagattgctctgagcctcaacaacaagaaccccaggtgaggtccaggccccaaacctttctccgtatctagagtcttctcctacttagccccttgcttactctgtcctccaggtctcagaggctcattctgcacccactatgctcctcctagccaggcctgtgcccacccttgccgcgggtcctgcctgttctcaagggacaacctgccccttctctctccagaaccaaggctctggtgctggagctgctggcggccgtgtgcttggtgcggggaggacatgacatcatccttgcagcctttgacaacttcaaggaggtaccggagtccctcacccaaacatgcatttccccctatggtgttgcttggagtcttgttgttggcagttgtggcctttgctggaggcagctggggacattgggtgggcatttggggaacgcccaaaagttgaagttgagccacatcactggctcagcaatctgggatggggaagttctgaatggaaggtacagggtcaggtaagggcaccacctgggtgggggtagggacaactacagggacctgctgaacctctgactcagccttgccagatccaaactagccttggttcatacctccaggagttgcggactctggctaacaggcttgcaagaagtagatgtgtggggctgcataagatgcataagacaagatatcttcattcattcattcctttaatgaatatttattgagtgcctactatgtgtcaggaacagggcacttgggcacatca

SEQ ID NO: 86688 - DNA, 1093 bp, Homo sapiens
ggcgacagagcaagactccatctcaaaaaaaaaaaaaaaaaaaaagatttaaaccaatttctcatattcaactgttaattaaattgaccaacatattgtttgagttcctgtgcctaccattgtttctttttcctatttacttttttctttgcaaagtacatccttcagtggttctttcagtgaaggcagtgccaccttacctagaactcctgtttgtgtatgtgtgtattagatgtgcatttgtttgattgtttcaagaaaatgaaacgacctgttaaaaccatcaagttaagtcataacacataacataacaggatttagtggcgtaactgaactaaaagtctgacaaattgatggctgattcagccctgacttgacaagacccctcatcagtaagggatcttcgtctgcttcctgtctacctgggctaaggaattattaccaacagtagatgggcagatgctaggggtagtaatatccacatgggtagtaatactgctcagttcctggatgttctagatgcctctgccaaccagattttattctaggaaggaactagagatccttgggtcctaagagaatgggccaagagtgtcctggcttgagccctaactccatgttggatgctctaactgtataaattgagcctcatttattcctgtaggtaatgtacctctctaagccttaatttcttcatctgtaaaattggagataatattgccaaccttgcagggttggtgtggaatgcattaacaaggcagatagagttcctggcacagtgccccatacacagaagacatttatggacggtagtggctattacattccctggcacttgggagacactcattgaatgtttatagggtggatgcagaagcctaccataaaaggcttcattgagtagataggccttaaaggataggtgagatctgggcagacattgataagggaggaaggcaagcagccactccctatgggaggaacagggtgggcagaagaagagaatcagaggcttgcccagtgctgccctgctcgggcaagtgaaggaatcagtctggaacaaactgggggaagggctgtaggaagggcagaa

SEQ ID NO: 86689 - DNA, 1031 bp, Homo sapiens
agcactttctctggaaggtgagtcacccatgcaggggtgtaggtgacaggcgatttattccccagcacagttgcagagaaagtcctgagcagaccttcgtgaggagccctctgccacaaatcagcctcatcccagccccagggctatggaggcagggggcaggaggtaaacaggaggcttctggggccagtgggctgacagcggaggggggatcgtggacggggcacagagcccagatcagcagtgtcactgactcctaagtccagccaccctgagggtggaaaatggcctgcttccagtgacagtcagcaaagaagcaggaggggagctttggccctggggagctgggaaatcccttggcagagagcagagagacaagccctattttggtgtgaaaaaccttttaggaacgcttttccacctgcctccttttcagccacctgagttggagtctctgcagagctccagcgattgtaaaggctagattaaaccctggatttcagaaagctttaggaatcccaagcctgccaccatctcagttgtctacacttctaggaccaggatttgtaccaagaaagaagcagcagggggtactcctgagccatccctccctcccaggttctggttactacagcttctcctgacgctctttctgctaaagccactatcaggtgtccattaacgcagagattttcttcagacactgttctggactagtgcagttggtgttgaacttgaccgattatggtcagggacatctataagcaatgtccaggaccaactacaaggagggcttgactttaatgaagctgcagctcttgcaaataatctcgttccctgtctctggcagactaccaacccagcccctgtacccataccccatcagtctggaccaaccagtagtcacctcctgctggcatggctaaataaccttaacctcactgtccagaaagagctgttaggattatagcctggacatgatcattcacattttttgcagtgagaaaatgcagaagagaaaatggtggccc

SEQ ID NO: 86690 - DNA, 1046 bp, Homo sapiens
tgaagtatgagatttttttgttctgggcttatgactgcctgaatgacaatgcagaaaaagtcatttttcttcagtggccggtgtgctctttgtattctagtttaaaggagcctcttcccttcttgcttttctacatgtcttaatccctcagctccctgatagaaatcccttgaaattatgtggcatcaagaataattttatggccagtctttgtattttcacaccatactcatgtgaagaagggcagggacaaagatcagaaaagtgaagcctcataaggagaaacagacaggattgctcagaatctaaacccccttttcttgatatctaggtcactgctttttctactaccttgctcatgaaacgataaggattttcttcccccaaacatgtcaattttgaacataacgaaaccagggtagcagctttatttatttattgtaccaatcaattattaattgatattgatttttaattaataaaaggccaaaagatgaatagcctgctgcctggacaggtgtgcttgtgcccattttccagatgtagaaacaaaggcagagagcccgtgatttgtccagagcaacagaacaagtccttggtgtctccgtgtcacatgtggtggctgaggctgtcaggtcagagagacctgggtcaggtcgaggtctgccacggcctgcctgtgtgcccgcaagcaaatcacttcacttctctaatcatcaggtgcctcatctgtgaatgggatcagaaatacttcatggggctgttttgagtagaaaatgagaggagatatgtaaagtgctgagcccagtgcccagcacagaacatagaggctgtaactgttgttgttgttgttgttgttcttgttggtggtgtttggtggtggtagtaatagtagtagtagtagtagtagtaatagtagcagtagtagttgccaattactgcattgtgactaaacctgttttctgtaagatgatgtcaagaagggtcagactgcctgacaggccagagtcattttctcagtaggacctttagggggacagtccttc

SEQ ID NO: 86691 - DNA, 1034 bp, Homo sapiens
tcctgcagcagtgcgcggacatcttcccgccgcactgactgctggcctgtgactggggcggcggccgcggtcctgccacacaagctgggcggcggaggccacgcagccgggccttcttctctctgggaccctccgccagcgcatagccgcaggccggtgtgacttctgcaccctcggttctgagggtacggtgacccctagtgggcagtttgcaaaatgtgattccttcttcccaactccccatccccccttcccttcccgtcacgtcctgtttgggggttaattcggttttttctctgttgcatcgcgcctactgtgcgtgtgcgatagcgtgtgtgggggtgagagtttgttttctggaatggtaggtgctgggaggaggagtttgatggagggcttcctggctgcttctggccctcacctcgtggaggccttcacagagaccctgtgggccctggccctgtgctggcactgtgccagtcatgaggcagctctgatcacttccccactgtggaaacaggactgacccagccttcagtgtgggctgctgaagctatcctcctcaggcctcagggatgacctcctgcctgagcctctcacaggctggctgtgggccagtttcatctgctttcctgttgggggtcccgggcctctgctgtccttgacccactggtgttctgtgcaaggcttcttcccattcaccaagtgcacaccttgcatctgccgctcggcatgcaccagttccacacaccatcccattttacagacaaggacgctgaggcctgcagcagcagtgtgacttgctcaaggtccagtgagtgacctcattccccagaaaaggctcctcccacaccagagtacagcctgggtagggggaaaatcagttctttcagctaccacccatccaacctttgggcctatgtgaaaagaaaggaactaagctgggtgtgttctgtctggacctggggaggcccctgaaggcaaagagggaaactgtcccagctgttctgtcctaggggagggggacatagccc

SEQ ID NO: 86692 - DNA, 1124 bp, Homo sapiens
ccgagatggctctgagtacctgatccagcacgactcggaggccatcatcagcacctggcataaggccattgctcagggcatccaggagctggtaagcagagcccagggcctctaggggcagtggggagggggtggccattatgagtggggccctctgctcaggctcagggagctctaaggtaccagtgggtaatgcaaatgcagtccccactaatggctaggatggcagggtaggcggctgaagaaactgccttctgtaagtctgtgaatccagccctggggttggccctgcaggaagactctccaggtgagggtagggcacattctaaaggaagttcccatttcacgggaggcagaaggccaaataaatactctgcaagccaaccaatggcaggctgaaactagcagataaaattttaaaggattgatttcaatagtcgaccatttttttaaggctgaaaacaccaattgcataagtagagctaggacaggggccctctgacaactactgacctggaaatgacctggggctttttgacccttaattccctatgagccaacattgagtgaagcttttggctgtattaatagaggtaggaatccagagccagagaggtgatattggtgcagttgttggcagtgctccggccacagctggaggtgcaggctcagaactgggagccacgtattgaggaatgctgacccagttagaggagctgaggaaaatagagaaagaaggcaccaggtgggtaggagtccccaggataggaaggggtgtgggagaacaggatgactgtctctgcaccttaagggctccatgcagctaagggaggtgaatgttctcaggctcactggtggaggtaaggagagttaacctggttaagggaagagaggactcttcgctgagggtctccaggccatgcctgttgggagtgcatttcgggtcccttgccccatcctggaaggacccgcagctggctcaaggccccgcctctctgaggctatgggaatccagtccgcagagctgcccccagaggagagcgagagcagcagagtggacttcgggtcgagcgagcgcttgggaagctggcaggagaaagaggaggacgcgcgaccgaatgcag

SEQ ID NO: 86693 - DNA, 1053 bp, Homo sapiens
cgtgtgagttttgaatgattttgcagtaaagacctgatctttctcatcactggtctggcttctgaattctaacactgccacggccaggggggagaccaccagccatctgttaccatctgtcagggtcccctaccctcatgttagtccctggcacgggggaaggcttgggaggtccgtggcaaacacttgtaggcagagggcttgcatgccaggagtgggcagggagaagagagtaagaaaaccaccttgccaagcccagcagtcaggctcttcctggggtaggatctcagggtctctggggaggtgtacccacacttgtataacaactcaagctgatcccacgccggtggcttcttttcctgtgacttaaatgtcaaaacacagacccttgacactggatcatgtgaaacctcaggatacaggggacatttctcagaggagaaataaaggagagatggggctcaggaaagaagggttatttaagtggatcccccgattcagggctcatggttttagggctcaaaatgacttttacttggctgctgaccttcctcagaagttccaggagaagcccaggggacccctccaaggggaggcccacaccactgtccattttaagaacaggagcaggaaacagacttaattctcagggaaatcaggttgcagtaaaatgggatggaaacagacaacattcaggtctgagatttcctgtccttaaaggcccctttcagattacaaggtggcaccctctgccaatctaggtgccccagcttcccccaagggcttcacctccctccaggacagtagatggtaggcccggagaagagaagagaaactgggagagggaggcccagaggagggccacagcacgtgacctggtgctgccctgccggtgggttcaggccctctccagcctcagcaaagcgcccctgaggccacttgtttccccttctcccctcccttttttttttttttttttttggatacagtctcactccaatgcccaggctggagtgcagtggcgtgatcttggctcactgcaacctccacttc

SEQ ID NO: 86694 - DNA, 1029 bp, Homo sapiens
acctgaggtcgggagttgagaccagcctgaccaacgtggagaaaccctgtctctactaaaaaatacaaaaattagctgggcgtggtggcgcatgtttgtaatccagctaatccggaggctgaggtaggaggatctcttgaacctgggaggcggatattgtggtgagctgagattgcgccattgcactccagcctgggcaacaagagcgaaaccccacctcaaaaaaaaaaaaaagaaaagtacaatcgttttctaggcatatctgagatcaggaaatcctcagctcgctctccctctcaaagattgctggcctaggaaagacagggaaactcaagatagaaagtagggggcccacgggtttggggccttattgttcgccgttgctgttctggctgacccactggtgctgaggcctggctgacccactggtgctgaggcctggctggcactggcaggatgtcagcccaggagtggggcttctttctgtctcctccattcccgcaggataggaacagtcgctggggagcacaaagcccctgcccatctgcagtgtttggcagtgttcagcgcacattcctgtgtgttatttcactggagcctcacccaaggcctggggccaagtcatgggaagagctgagttaggactggagaacagcagcttgacccaagtcaccaggagtttgccattgggctgtccctgggctggggggctggtacctcagggccccaggctttgggaaaagaagaggttgtccattgctgggggaggtgagagatgctggtggagctgggagacaagaggtcagaggccccctcagcccccaaatacaggggcaggtctcctgagggccagtttagtcccccaaccctcaaggggacaacagggccacaccaggcactcacacagcagctgatagcagctcacatttactggggatgtgccacctgccaggccctatgccaggagctctcctggaatacctcttttaatctgaattcaaaataatcccatgaaaaagaagctccagt

SEQ ID NO: 86695 - DNA, 1524 bp, Homo sapiens
gggagaggcggggattccggatgtgtggaaggcagagccaatgggatttgctgatgtaggctgcgaaagaaagaaaacctggggtaacaccaagatttttagcccaggcatctggaaggatgaattttgctatttggtgagatgaggaccattcaggaggaagcaggctggcagcaggaattcatcctggacatgtcagctgagatcctagtggacatgtatggcacaggtggatatatgaatgtggatttcaagaacaaggtccaggctggcgataaaaattgggagctaaagcctgagagcaggtagagtggtgagaaagtggcatctacagagaggagacaaggacccaggactgacatctgggcactctaacgtgagaggccacagggaggaccgagccagagagatagaagggtgggggcgagggctgaggagtggccttggggtttggcaacgaggagggcattgaccatctcagaaacagtgtcagtagaatggggggagagaagcctacttggagcaggttcgagaaggaatgggagcagggaaactagagaccaagaggttttttgttttgttgagacggagtctcactcctctgtcacccaggctgaagtgcagtggagtgacctcagctcactgcaatcccctgccttcccggttcaagccattctcctgcctcagcctccctagtagctgggattacaggtgctcaccacacctggctaatttttgtatttttagtagagacggggtttcaccgtgttcaccaagctggtctcaaactcctgacctcaagtgatccacccacctcagcctcccgaagtgctgggattacaggcatgagccaccgcttccggccaagatgaacagttttgatgcctcttcaaacaggttttctgtaaaggggcctgagaaatatggtggtcattagggaagtgcatggagacgagaggtgtttctaaagatgggagaaatgacagcgtgcatgtgtgccgatgggagtcaccccatagagaaggaagaaagcagtgacagaggagaggactgctccttgtccttgagtagttggccaagggagagacctcctgcacaaatggagggtttggcctcacgcagaaagaagcacacttggttcatccctggcagcaggagggaaggcgtgggtgtagggaacagggcgtgtggaggggatcttttgggtgctcttattttctcagtgaaatacaggacgcaagagcagcagtggacggtgagaatggggatgttcccatccagctttcagggtcccatgtgatagtgccccgtggctggcctgtgttctggggacagtcactggccacatgcactgcagggcatcaggcagcagaggctgccttgggcaggacagagacaggcccgccaactaatgtgcccctttttgcctctgcctccaggactgtccaacccattccggggtctcatgaagctgggcaccgtggagcggcggggggcaatgggcatctggaaggagctcttctg

SEQ ID NO: 86696 - DNA, 1024 bp, Homo sapiens
gcctggccaacatggtgaaaccccgcctctactaaaaatacaaaaattagctgggcatggtggtgggcgcctgtaatcccagctactcaggagactggggcaggagaatcgcttgaacccaggagtcagaggttgcagtgagccgaggttgcgcgattgcactccagcctgggcaacagagcgagactccgtctcaaaacaaaaaaactttaaaacaaacaactgttgtcttctttcccaacagaaaaacaagagctggatctcagaggatgacttctaccggccttcccgggagcaacccctggagagtgcttcagaccacccaatagcttcttacagggggactccagggtcaaggcctggtctccacaggcatttttctcaagaaccaagaaaaaactgctccctgggggcgttagaccaagcgtgtgtaccttccccaggaagaaggcaagcccaggcagccccatcccaggggcataagagcttccgggtggtacaccggagacagatgggtaggttaccaggagggtcccgggtgggtcccatctgcagggaccaggcctttcagaaggcagctgtgaagttctgttttccattgctaaaggggtagtgtgttcccacaagtgttataaaacctcattccagaatgccatcataatcatgttcattcagggaagcatttcaggaaaagtagtatattgtctcaaaactgcctacagaggacaaaaatactgtttcaccagtcaaataggaaaatattttccctgaaaactatgcaatttatgattatagaaaactcttgattccacctgtagctcagagcacatccggccccatgaagccccaggtgttttaaatggtccttccaaacgtgtttaccctcagtagttggtttatgtaacagctctgggtggcttgatcaaatctgctatttgttttgtttgtttgtttgttttgagatggagtctccctttgttgcccaggctggagtgcagtggcatgatctctgctcactgcaacc

SEQ ID NO: 86697 - DNA, 1025 bp, Homo sapiens
ctgtggtcctcatctttctgtacttctatcagttagccacgtgctttttatttgatgttattttgggggagatgttggggtcgctgtcaagttttatagtgtagagacccattcagtctttcttttaaaaacatttatttttaattcattgaacccaaagcacctactataagccaagcaccatgttaggtcctaggggtagagtgatacaacaggacagacaaaggccctttggggacagacattaaattagacaaatgattatccacatcataattacacttgtgctaagcactgggaaggagaggtgcagggagtaggggcctctcaagggtgatgcatgtctgggatctgggggttgtgagttcgtttcagtttaactcccaaaaggcagtgtgagttctaggacttgctcttaatcactgcccccatggaccacctgcccatggtatgtggttccccttccacagttatgagtacaggcagttcctttgcctggcataatgaggactggctggacaaagtctcatccttctgaaagtgtcccagagaccttcgtctcactcctcagccacactcctcttggggattcagctgttgtatatggtgtcatgagccctttagtaacgcaaggtggcatttctctgtcttgggtcgctggtggcagttgcagctctggtatagatccttcgtcgatgatggtttctctccactgttaaagggcggggtgctggccagacatggaccctgagtgagcaggttgtcggaaggtggtgggaaaaaaggagagaagggggccgggtgcagtggctcacgcctgtaatcccagcactttgggaggctgaggcaggtggatcacctgaagtcgggagtttgagaccagcctgaccaatatggtgaaaccccgtctgtactaaaaatacaaaaattagccgggcatgatggcgtgagcctgttatcccagctactcaggaggctgaggtaggagaatcacttgaaactgggaggcaaatgttgcagtgagc

SEQ ID NO: 86698 - DNA, 1398 bp, Homo sapiens
caccatggaaagagcaccagcgttgggtggtgttacggactgggcttggagccgacctagtttcgagtcctgttccaccacttacaagcccaggaaggtcaggcacattgtttgttagtcaaacaatataggagattgtctcgtagtcccagaaatggcttctgagcatattaggtggagttttcaaatgttaaatggaggaatttagatagaatacattggggaggaacagtgtctgcctcctgtgaccactgggaccatggcatgacaggcctgcagtgtgacccaggcacagggcatgacctaggttcactcacctgtcttagcccttcctgtgtgtctgcctcctctgcagaccagccagccatcccttgtcatatgtctcgcctttatctcatgtgtcttgtgatggaaaattccagcttaaggtcactgaatcagtgaccatcctctctgtgcaggaagtgttgtcccggctattatggggaaactggagggtcaagggtcaggatgtatagacaaatgccggacagtggtgtgagtaactggcaaatgtaagacatacagatgcacaaacacacagccagcaccagcattcatagagctgggccttgaagttagtccttgagcatccacagagaccagcatttcttgaagtgtatatttcaagggtaaaatgttctcaccgacatttagagttcatcaaagttgttacattatttaaatatttgtaactttaaattagacataaattccttgtgcttatcattacacatataaaatcaaaacatccacaaatcaaacataaagaaaagcataaaagacacaacattcaaaatgaaatttattaatataaagcggttctgtttggcagaaaccaaattgcagttggcctagtgaattgactgtcctaaatagcttcttccgtgtagattggatctgtattataatcatcactgagtggcataggtatagtctggagggtttaagtacttagatttaagtacttagaatggtccctggcacagaggcatcaatagtgctcaattgatggtattgttgtattttattttattcaatattttatttattttttgaaacggagtctcgctctgtcccccaggctggagtgcagtggcatgatctcggctcactgcaacctccgcctcctgggttcatgcgattctcctgcctcagcctcccgagtagctgggattataggggcctgccaccacacccagctaatttttgtacttgttgtagagaaagggtttcactatgttggccaggtgaactcctgacctcaggtgatccgcctggctcagcctctcaaagtgctgggattacaggcatgagccaccatgcccagcctgggtagacatgtttttaattctctta

SEQ ID NO: 86699 - DNA, 1049 bp, Homo sapiens
catgtttttattgttctaaagcagtgtgggtgtttattgtttgtttgtttttgcctcttggcttattgattctctacagaagcttgtccatgtaaaaaaggtgggaagccccacccttgtcctagatggatttacccaagctcccatcactgcagctatgatggggccaatatttaaacacaagattatatggctctaagttcacttaagtttggtctaaaaaacaaaaagtatctatactaaaggacatatgaaacaaacaataacagtaattatctctgggtagtgtgtgtgattttccttttcttctctatgctttatctttctttgctgtagttaacaatgtgctaattttgcagaaggaatctacagacacacacatagatgtgtgtgcatgtggttgcacacgtatttggcaccagctaaaggattacactctagggactctccataggattttccgctaaaggcctgtgttctgtgtggtgctgcctaggtcatcaagaagaagctggtgggatccgtgaaggccttgcagaagcagtacgtgtccctggacacggtggtcactagtgaagacggagatgccaacaccatgtgcagcgccctggaggccgtatttatccatggcctgcacgccaagcacatccgagctgaggccggaggaaaaaggaagaaaagtgcccaccagaagcctctgccccagcctgtcttctggcccctcctgaaagctgtcacccacaagtgagatttagctggagaggttttgctttgcggaggagcagcagactatgggacacttggcttttcctccccagctgttcaggaagccaacagaggtgccctgtgttctagcatagagagagggtgaggtaggggttgaaagtgtcttctagaaaggcttatctctagaccaagcttcccagccagtgtgccagcagatcttgagaccctcagcactcaggcaagagcctgtggctgctttgagactggtcacaaaaagcaggtgagactggccacctttagcaggaacagccttttttgccaca

SEQ ID NO: 86700 - DNA, 1080 bp, Homo sapiens
ctgtgttgatcaggctggtctccaactcccgacctcaggtgatccacccacctcggcctcccaaagtgctgggattacgggcgtgagccgccgcacctggctgattgcagttttaaagagccccaaagaacactgtctctgcttgccacttatagtcgtattcctttgaaaagtgaatgctgtttaccttcaatgtcctcccattaatatgcagtatatttaagttgttttcagccttattggcagcttggcttaatgacaggagctccacagttgccccagcacttaagagttgtataccccaacttcccacagtgtgtgaagtggaggtacttaccccgtgccttgtttttattttattaatcaattcattcaacagcttattttttgagcaccagtgtgtgacaaacactgttccaggtactagaaatacaatggtgaatgggtcaggcaacggtcctgttttcattcattcagagtttggtccttgttagaatcctctgggatatgggacaagaatacaggaaagctgggtgatactggatggaaggaaggagggaggaaagaaagatagctagtgttcactgactccacaattctgccctcatccactagccctgagtctgggaatcacaagctaaaagtttctcacccttcatctggtatttaattgcttcaaagctccaacccccaccactccacccatcacagaaatccagctttcctcaggtggacagaggtgcagtttcctcagtcagcactcacatgcctgaaagatcagctgcctttctgaatcagaggataactttgtcattcttttccaattgaaaaaacatgactcatcaattggtacagcagttggatggcttaaagccaggctgtggctctgaacagccagttacacaattcaggcagtggagagaaggccgtggggagtggctgaggagtccctcaagagaagaggttgctgttcactgatggtggagtgttttgagagtggtggaaccaggttatccctttcttcttttaacgtaagtctcatccaagtcattctctttttttgcttccttgatctctgga

SEQ ID NO: 86701 - DNA, 1028 bp, Homo sapiens
acccccatcccccgtctagctccccaagatctgctcatcccaaacattctacctccgccctctcatctaagacccacccccaaagtaggtgccctgttgagctcaccgctttcttctggataactccgatctcagccttattccaagtcttaactgtgtcttctcgtccttagtctcctagccactgtataccttcctttgcgtctcctgccgtactgaggacagcccatccctaagtctttgccaaactgtcccgaactcttgctgcctcctttcctaccaccctcacccaatcttgttaaaaatgacatctccatgtcctttcacccccgctgacccaccgcaactcttcaccccaactctgcgtccattgcttccctcgacccaactcccattcaacctgagaacttagtgcagagtcgcctgccaactccaccagctgcccctcaacagccaaatgtaggtgctcactcagacccgcagttacagactgagcagcatgattggcgggtgcaggggctcaggtggtaaataagggtggaggagcagtgggctctccccaactcttgggtggggccggggtttttcctggcatctggtctcctgcacctgtcctcagggattgtgtttttggcattcatattaaatgacttgtgctggctgctggaatggtaggtatcattcaaatatctggaaggtgagagacggccactcactcagctcacttagcacagaatgatggaagctgtcacttccttctggttggtgttctcgccctggagagcttctgggaagttctgtgtggtgttggctgtggtcacagaatattgttcgtgttccttttcttggcacttgtaagggcctctccctgccagagctgatggcagatcagtcctgatgctgaattcaggggatatgatgggtgccagaggcaacgttacctgttgtgaagagtataggtgagtaggtcctggggaggctgaggcctaggtgggtacagaggctcttgaatcgctttcttttctttt

SEQ ID NO: 86702 - DNA, 1034 bp, Homo sapiens
ttgttttttgttttttccgagacaggttctcactctgtcacctaagctggagtgcagtggcaccatctcagctcactgcaactgctgcctcccgggttcaagcaattcttttacctcagcccccccagtagctgggatcacaggtacgcgtcaccacgcctggctaatttttgtatttttagtagagatggggttttgccaagttggcctggctggtttcgaacccctgacctcaagtcatctgcccaccttggcttcctgaagtgctgggattacaggcctgagccaccacacctggctgacagattgttgttatcattaatgtcacatgaactactgccaaaggcgtctccccttcttgtgcttggagggtgtgttggatgccacctgtgcccctccctggagatgcttttggccccacagcttcctccagccaatgtagcagtgactgggtctgtgcaggttttggtcaccttcactcaggtgtgatggggtggtgcctttctttggcctgccccaggtatcttttactttttgggatgtatttgatgctatagtatggaatgctgcagagacttccggcaccaaccccctggagttggactttatttcacaggttgagggcaccatcctccacaagaatccccaacttcagccaccagctggcaacaggtttgggggtcctcagcccaccctcacttctggccagatggctacaaatttggcgatttccactaccccctcaggtttgatcacttgtcagaatgattcacagaattcagggacatgctatgcttacaactacagttttattaattgatcaataaagcaaaaggatataaatgaaccagtcaaagggaaagacacatagatctgggaggacaccaaacgcaaagctttcattgttctctccccgtggagtcaggggctgttacctttccagcacatcgatgcgtgacaatgtatagagtattgccaaccagggacgtgctcctgagcttcagtatttgtcatttttattggggcttccttgc

SEQ ID NO: 86703 - DNA, 1034 bp, Homo sapiens; identical to SEQ ID NO: 86702

SEQ ID NO: 86704 - DNA, 1034 bp, Homo sapiens; identical to SEQ ID NO: 86702

SEQ ID NO: 86705 - DNA, 1034 bp, Homo sapiens; identical to SEQ ID NO: 86702

SEQ ID NO: 86706 - DNA, 1120 bp, Homo sapiens
attttttttgaaacagcctcccactctgtcgcccaagctggagtgcagtggtgcgatctcagctcactgcaacctccgtctctcgggctcaagcaatcctcccacctcagccccctgagtagctgagactatgggtgtgcaccaccacacctggctaatttttgtattttttgtggagacagggtcttgccatgttgcccaggctggtctgtaactcctgagctcaagggatccacccacctcagccttccaaaatgctgggattacaggcatgagccactgcgctaccgagaaatcgtcattctttaccaccactgctgcagctagcagctcactcttcagtgctttaagcaaatgatcctcaggaaagaaaaggtatttgcttattgcaggtgcaaagaggctcagattggaacttttccctgaaactatattgtagcccagagttcctgatgtaagacgctttatttaaagacatccgtgagctttttcactggcatatcaatacttcataacactaggaaggtatccagccttttccttatgctagttccttcccttatttgccagatggggaccctgtggggaggtgacccagtgtgaggccgaagctctttcccagagccccacaggccagtggagggtcgtgtttgtgctctgggcatcaccgtcttgggtctcggtcccctgcgactgcagctgctacatccctccctgctctgagataaatgttcttcccatgaagcagacggttcacttttgggatggcgctgtctccaggtttggctgtctcagtccagatgatgtttggttagtttccattcccagaaccacaagcctttgagttctgaaagtttgtgacagaatcaagaggctaatttgggagatgtgagattcccagcccacctggtattgccctcgagttagtggtaaattttgctatggaaaatatctcttgtcaagaccaagctccggcgcattgcctccctcttttggatggccatggcatctcatgaaccacttggaaatgtgttttatgttgttctccaaatattaataaaaatatcccggagaggaggttcactaagtagcctagagctcgtttgtccagacaattgtt

SEQ ID NO: 86707 - DNA, 1154 bp, Homo sapiens
gtttccctggagatatcttgtccaagtatgaacagcagtgctggccacaaactcatcagcattattattattattattatcattatcattattattattattattattgagacagagtttcactctgtcacccaggctggagtgcagtggcacaatctcagctcactgcaacctctgcctcctgggttcaagcgattctcgtgcctcagctgcccgagtagctgggattacaggcgtgcaccaccacatctggctaatttttgtatgagtagtagagacggggatgcactatgttggccaggctggccttgaactcctgacctcaagcgatctgcccgccttggcctcccaaagtgctgagattacaggcgtgaatcactgcgcctggccacttttaaaacatttctatcaccctgaaaagaaaccctgtaccctttagcagtcactcctcatttcccctgtcctccgcagcactgggcaaccactaaccactgacctacttcctgtctctagatctggtggagatgctttttaaacttttttttactaccctgtggtccctgaggagcattacactgagaagttttctcctattttgtctttcattctccacatcctcttttgttctagtgcatggcatgggaagccctctctaggaggatgctgtggccacacaagtgctggacgaaccgctggagtaggtgacttccaaggtgtcctgatgtagtagctattagacaagctcctgcatttggccagtaattagcatgctgctgcacattgccactaggtggtgctgctgctccattcccaagtaacccacatgcatccctggctggggtcagccttggggtttcccaagtgtagaggaatccatctctgtgcctgtggtaatggctggacaccaggagagacccagaaaacagggatatcctagaagagaaaggcaaaataagcactcagagcagaggacatttgagtgtcaataatgaaggtggcagcagtaatcatggctatcatttactaaaaatagtggatattggccagacatggtggctcacacctgtaatcccagcattttgggagaccaaggtgggtggatcacttgaggtcagcagttcgagaccagcccggccaacatggtgaaactatct

SEQ ID NO: 86708 - DNA, 1030 bp, Homo sapiens
ttataagcctatctgattgcagatcaacctcagacatacccatctgtagtttctggaatccaccttctctctctcacaaacctgggcgacatttgctcatctctaatttttctccacccttctcagcttcctgacttctcaatatttacagtaggagtttgcaatcacacagtaaaggtcttggatatatttagttggagttaagagcgttgggctcccataaagcagtagggctctccttgagtttagtttatatatatttagttggagttaagagtgttgggctcccataaagcggaagggttctccttgagtgctgcatcatctgtcttagatcccgatttccccataatcatgtttattatcctttccaggttgaagattattctctcttctaaagaaaatagaagaatattaggagaaaagacacttgaaaatgttcactcttttattcacattacatcatctgtcttgaataatgggtctatctctttcctgttgctctggccctgaaaaaaaaattagctttttaaggctgcttttgttacgtgtgcattttcttgtaatcccgtcattctgggatttaataataatagtattaataccacctaccatttgttggttacttactgtgttttaggcactgtgctaaacgccttccatgtattcatctcattagtaaacatttctgaaactattcttacaatttgtcttttagtttttcttgttcttgtcctcttaaaatctgagcttagccatgagctctcagtgaagctgcttgtatttctttaaaaaccctctttgcttcctccaagtggagtgggttgtacttctgaggtcaggacaaactgggcaccggaggagttcagccttccgaggctgcaggaggggtgggtcccctgaggcgagcaagatgatgtaaggccttgacttggggtaacagacagccacagatgggaagagagaagccaacatttaaccacggaaggatgtgaagggcggagaggtgggttgagcactgggccccggg

SEQ ID NO: 86709 - DNA, 1059 bp, Homo sapiens
tccagcagggccactgcaagagtggggaatgcagaccacctccagtttcggggtgggctgggtacccaaaggaagatggagactcaagccccaggatgtcgtttccctcacaaggtccatccccatgctacctggacagtagtcaagacccttctacggatgatcccattcaaagcacctgtttggcacccctgatgaacctggcacttgtggggaacatgaggaaggtcagacatgacccttgtcagcctgtatggcgctcctagtctagggggctggggaaacaggcacccagagaaattacagggtgctgtggagtgtgctacacatgaaggtaaaataaccgggcagcacggagggaaaagttagctcagctcattcgggaagctggaagccacccatggaccttagagtgaaacaccagccacccatgggccttagcatgaaacaccaggctgtgtgacttctgaggacctcagtttccttattagtaccatatggcagtaactatttatggagttgggagagtcacatgaagtcatgtccacacagtgcatccatggattggaccttcaagcggaatttgccttgtggaaagatctagaaggacaccaaaagcagcaagggcaacatggatagaggcatggctcggcagggcactttgtgccgactcagcgatgggtccatgctgtgacttggagagactcacttttgatggtccagcagcgttcaggttcaatgactcagtaattcttgattcaatgatgtggtcatttgaagatttgtgggtaccggcgattaagtaagcagagtgtttataaatctaggctgctgataatcataataataatcgctgctaaaaaatgattgagagcttactatgtgccaggctgcgcacagcatttatggattaactcacggaatcattaggtcacgctaatggaagggacttgggtaatccctttgccaaggagccacctgtcacctttagtttcagtttattcctccccctcccattcttactcaggcctccccacccttacctccccataagtcatg

SEQ ID NO: 86710 - DNA, 1001 bp, Homo sapiens
actgtcttttccccctgtttggtttcagtctccattcctgactatggatttctgtgtgtctcaatgttctcaaaagagaaagcatttctaatgcccttgaatcagcctatggatgggagagtcacttgctcacctctcatccatctcctgtagcctagaggggacaaagtcgcatggtacatgacgggagggcttccctcttcagtgccagcagaaaggagtatggatctaggaaggcagttgggcagggaaggccaaatggctaggactcaggcacaagtcctaagaccatcctgcagaccagggctcccagtgtggattcagggagaaaaataaaagggctgtttccacagtgaccctgcctgaactttaggctgtatcttatttttttaaatttctttttctcttttcccccctcattcttgctgtcatcttataagctttatctttgtggtctcttcactccagcccgactcacccactcaccagtgcctacttctgctcatgtcctctccctggccaactcatttccattgattcaaatcctatccatccttccaagctcagctctgccccatctcctgccggggtactgccttgatcactccagcccttccatctcccctcctctcttcctctcattcttatgtctcttcctggttattttcagcttccctgacccttcatgtaaactgtctggtgatagatggcctttgtagggtcgtcttgtattgccacttatttctggtaatttttcatgccttgctttccaattggtcaacaggacaaacatcacacaccccctcaggtctttcctgggcacataaagatccttgtagacatgcacagccatttgcctttggggcaagaaggctttaaccaccatcaggtcaaatctgagagatgaggaaacagaagtctagagaagaggagtattttgccccaaatcacatagtcaaggtcagcgtggaattcaggtctcttggctctttacccaggca

SEQ ID NO: 86711 - DNA, 1030 bp, Homo sapiens
attataatatatattatatattatatattatatatatttttatatatataatatgtataatatataatatatataaaaacatatataatatatattatatattatatatatattatatatattatatatattaaatatattttatatatattatatatatatacacatatatatatataaatgaggccaggctcggtggctcacacttgtaatcccagcactgtgggaggatcacttgaagccaggagtctgagactagcctgggcaacaaaacaagatcctgtctctacaaaaggaaactgtaaaaattagctgggcatgatggcatgtgtctgtagccctagctacttgggaggccgaagcaggaggatcgcttgagcccaggagttcaaggctacagtgagctatgattgtcccatagcactccagcctgggtaacacagcaaggccctgtctctaaactttttttttttaattctatttatatttacatgtatttaaatgtgaatattcactacctatttgttgcatgcctgcattttttatactgggcttgccaaaaacccgaacagctttctactttgacaatgtatcagaatttaaatcagcaatatgttaataagccaagcaaaggttatatatgcaaataaaactgttgtctataacctcctgttacactggggcacagcaaaagtcatggtgtagtcgcatgtgaacctgtccctttcatagctgctcattgccaggaaacatcaggaatagccatttggaagagtcatcagccctcccaccatccgttttctgtcttgtcttttccctatgagcaggggaaattccacgctggccccaatccccagtgcagcggctcagcctctgcctctgctgctggtccccatgaggccagcttagaaacggaggattttgcagaacatccctaaatccgcttgaataatgaagtgatcattcataaactcacctgaaccttattaaaacctatttaatatttttcctggataatcctatagggata

SEQ ID NO: 86712 - DNA, 1088 bp, Homo sapiens
taatccaaaggtggatgcttggggagacacttgggccagtttttcaccccaagacacaagatccaaatgaacgtgcagagcctgaagaagtactgagaaaggaaccttgaaactccatggggaggatggaaagatagaggggcagatactgccaactagtgactcaaaagccactattaacgttcttcccccttggtttattctgctaaagaggttggacggcaaaatgctcaatgtcccagccttgctcgcagcaaggggtggccgtaagacccagctctggccaatgagacataagcagaagattgccacttgcaagaaaactcctgctttcctaaggggacacatttagtttcagggcccttttggccactttactttgcaacttgttcctgcttcaaaggcagatgtgatgcctggaagtgcagcagccactttgtaaccatgaggcaacaatccaaccactaaagatgacagaaaataaagacaggagagcatcaatgacccttgaggtgctggccaagtctagacatctgattatgtgagaaaagtaaacctcttcatgtaaatgccacagttagttggggtttctgtttcttacagccaaatgcagtcttgactgacacagatgggaagcaagagaagatggtcaaaatcaggactgaggagcatgtcagaaagtatgcgaggtgctaataacctagatgccgagtgtctggaaaggacaggttaggagaagggctggaacaaacaccgtggccaaagtccagaggcccaggccacacccagagcccccaaaatgaaggatactaaaccaagatcagatgtccactgacctgccccttccctcagccaaatggctgctctgggacctactggcccctgaagaaagagagaggagggggcttttgaagggggtgtgggaggacaatcgtatggagcggggctttgtggagctgtgcgcgggactgtccaagggtggctgcctccagagcacacacgggatgaaggtgcccacactcagcaccagcaagcaaggcatcgacgcaaggctcagctcccaccacgctgtcctgcaaagcaccgaa

SEQ ID NO: 86713 - DNA, 1803 bp, Homo sapiens
ctcttaaacatgatctgaggctcccatgcactctgacctgtgcccacatggggcccacgggaaacacgctggcaagcaaactgtgggtgtgcagacggttctcagggctgcagcacctgtcctttgctctgcccccaaagcaaggccagcccatcttccatcctctagtgttccttggtggggccctgaccacagtccaccaggtccctaaccagaggggacacacaccaggtgtcctcaatgtattgccttgaaacagttgtgctgggactgtgatggggggtggccatgtagccacccccaccacccccaagccactctctccaaggaaatcctcctaaagatccctttacatcctccatgtggtggggaggttctagagttgggtgcatgtgtcttcagctactgacaatgcagaccttagttggcacctcgctctggcctatcctgtttgctgttcttggcgctccagtgaaactccccatgggccatccagttggggtgcagtgtggccacccccttgcaggttcctgccttgctggagagcacagggccctcctggctcttgtaaaacactccccatggtacagagaggccagcagtgatgtgaggcccaacctccctccatggtgttcccaagcagctccctttctggggtcaaggggtggcaaagacagtgcagcgtccaatttctgactcaagccgggcctggctatcgcagctctgcactgtgtgtgacagcaaggcaactcacccagtgccgtggcagtgaccgtgtccgaggaagcctcctcacaccctctgtctcaaggactctggcatttagctggacttgctgtagctctgagcctttctgccattgccatcaccttgtcagaaactcaggccgaatctgcactcagagttgtgcccaggcagttgagccaacacttgctcagcgatattgtcacatgacaaggcactgtcaccactgggcatcgtgggtagcgcagtgtcggctggatggacccggagggtgtctgtgtcatgctagtgctagtgatgggagccccgtgagcccattgcccgccctcccatgccctcagcagctgcctggggacagccaatggcctgggtgtttctgaggctaccacatggcttccaggaaactcgagaacctttctctcccttgcctacactcttcacacaggcctgtgctggccagcggtggggatccggcattcctatcttaggtgcagagagtgactgactcattgcaggcctgggagataagactgatggcccagccagcaagatgtatggatttctcagaggcagtggcctctgtcattgtcctcaggaaatgctggtgattctggtggcctgaggtcaatgcatgtcaacgtggccaacttgccttataaactttttttctggacaattgcgtgcactgtcctgtaacagtgtcctgttgtttatgatgcagaaataggtgtttttaaagcctattgattttggtactattaatgtggtcaggaactttctcagtctttcttgtttggggtgagctgtggcttcctaaacaggaacccaagacacccccaaaagctgctcaccagcactgccagcctccctcttaccaagtagcacccgttcaggacattctgcgaaaggcatttgcccagaagttgggaggaaggaaatgtaacattttggggcacctaccatatgccaggcaccaggctaaacgtgttcacacaaattctcttactaaccctcaccatccttctacaagacaaactagtatcttcatcttggggttca

SEQ ID NO: 86714 - DNA, 1057 bp, Homo sapiens
ggcaggacaatcgctcgaacccaggaggtggacgttgcagtgagccgagatcgcatcattgcactccagcctgggcaacaaaagcaaaactccgtctcaaaaaaaaaaaagaaactcaaatatgtgtgacaggcgattctcactgcaggctgccctgtggctgatccaggagcaaggccttaaccatgtcatccccaagcgattgcttgtaaactttcttctgtgcagccttcaacccttattatgattttcttctcaggaaccaaactgctgtattcaagaaaggcagctttgtgtaatcatttatcataaatatcttaagaaaaatcctagagattcctaattttaggaaatgggagacctatggtactgatataatgtgggctgggcttgttttctgtcatttgctagataaatgaacttgagagcctactgtaaaatgtggaagcttctagattgcagaagggctggaaagacactgttcttttctcccgagtgatgggatctgtccagtatttagagctgcctctgaggccatctgattctaggagactctgcctcgttgaggatattttgaggcctaactacacattcctgcccccagagaggtcacagcctatagcaggctgatgtttctcatgtcacatggcacagaaaggcacattttcgttctcaggctaacaaagagcttcaaaaactattagaagggacagtggctataagagaagaacctcagtcaatgtgtgaaattaactaggaacctggctcctgtttcttttaggtcatgtttttcagcttaggtaaaactagaggctttgataaagcatgacctctagaaatcattgcttttcataaatggaagtgggtttgagttttttctactgattgttagtgcaggtgatgtctacatgcccccagaacatattccatgcaacaaaaaaagcccaggtcaccgtctttgctgggaacttgacttttgtgctcactgaattttaagctttctgacagcagcctggaatcatggagggataaagtacctattagtaagatggaaaaa

SEQ ID NO: 86715 - DNA, 2248 bp, Homo sapiens
caaaatcccccacgggcaggacgaactgtgggtgtcagtcaccatctatcctgcatcctggttccagggccccccccagccccgcctccatagggacaggcgtgcagacacccgtccctggctgcttcctcttgtggaatgggttcaaaagtaagcagtgttgtttacactgacaaactgaaaaaaaaagaaaaagagataacattggaggcttggcacagtggctcatgcctgtaatcccagcactttgggaggctaaggtgggaggatgtccccagcccaagagttctagaccagcctgggcaacatagcaagaccccatctcaaaaaaaaaatttaattggccaggcagaggtgggaggatcacttgaacccaaagggtggaggctgcagtgagccgtgatggcaccactgcactccagccagggcaacagagggagaccctgtctctaaaacaaacaaacaaacaaacaaacaaaagagttaacattggccagattaggattcaccagatagtgttaatattagtttgatttgagactttaatcagaaagcacatgtgtggtgggggtgggtgtaacctaagtcaggtagaatctttccaacttggggggggcacactcctgattgtagccatatgagtctgtcagtgtggtggaagaggccatgggttaatgggcaggtaaaaaagcaccttgcctggaattgagtagaaagtaaggcccttcagaccccgtgacacacttggggacattttcttgagtaacatcctaagattcatgtaccttgatgatctccatcaacttactcatgtgaagcacctttaaaccagtcgtctccaaattcaggggcacagtaacatccaacaggctggagaaagaacgtactagaacttccattcctttttcatgtcctcttctaaaagctttgtcagggccaggcgcggtggctcacgcctgtaatcccagcactttgggaggccgagacgggtggatcacgaggtcaggagatcgagaccatcctggctaacacagtgaaaccccatctctactaaaaatacaaaaaaacgagccgggcgtggtggtgggcgcctgtagtcccagctactcgggaggctgaggcaggagaatggcgtgaacccaggaggcagagcttgcagtgagccgagattgcaccactgcagtccagcctgggcgacagagcgagactccgtctcaaaaaagaaaaagaaaaagaaaaagaactgtgattggggaggacggtcactttcctgttcttactgatcagaagggatattaagggtacctgattcaaacagcctggagatcactgctttcaaccattacctgccttatttatttttagttactgtccttttttcagtttgtttccctcctccatgtgctgacttttattttgattttatttatgtttatgtttaagacatccacacgttcctctgctaaaaccttgaaaaataggccttgccttagccccaaacaccccactcctggtagctcagaccctctgatccaaccctccagccctgctgtgtgcccagagccaccttcctctcctaaatacgtctcttctgtcacttcccgaactggcagttctggagcaaaggagatgaaactcaaggtaaggaaaccacctttgaaaagaaccaggctgctctgctgtggtttgcaaatgtggggtttgtttatttgttttttagcctcaaagacctttcttcaaatgagttctggcatagaagcaccgtgtaaaatagttagaattctgggcaaaggggaaaagagagctgggggccatccctctcagcaccccacaggctctcatagcagcagctcctaagacacctggtgggaccttggtttcgaaatcgctactctaaggctgggcacggtggctcacacctgtaatcccagctctttaggaggccgaggagggtggatcacctgagatcaggagttcgagaccagcctggctaacatggcaaaaccctgtctctactaaaaatacaaaaattagccgggcgtggtggtatgcgtggtggtaatcgcagctactcgggaggctgaggcacaaggattgcttgaaccccagaggcagaggttgtagttagctccagcttgggcgacagagcaagaccctgtcgcaaaaattgtttaaaaaacaaacccaaaattgctactctcattgggttcctttgcccattcctgattttggcaagagaaatgcttcc

SEQ ID NO: 86716 - DNA, 1097 bp, Homo sapiens
gatgtgaagacgtgaagcagcacagagcctggaagcccaggatggacagaaacctacctgagcagtggggctttgaaagccttggggcggggggtgcaatattcaagatggccacaagatggcaatagaatgctgtaactttcttggttctgggccgcagcctgggtggctgcttccttccctgtgtgtattgatttgtttctcttttttgagacagagtcttgctgggttgcccaggctggagtgcagtggtgcgatcatagctcactgcagccttgaagtcctgagctcaagagatccttccacctcagcctcctgagtagttgggaccacaggcttgcaccacagtgcccaactaatttcttatattttttgtagagatggggtttcactgtgtcgcccaggatggtcttgaactcctgggctcaagtgatcctcctgcctcagcctcgcaaattgctgggattacaggtgtgagccaccatgcccgaccttctctttttaagggcgtgtgtgtgtgtgtgtgtgtgtgggcgcactctcgtcttcaccttcccccagccttgctctgtctctacccagtcacctctgcccatctctccgatctgtttctctctccttttacccctctttcctccctcctcatacaccactgaccattatagagaactgagtattctaaaaatacattttatttatttattttgagacagagtctcactctgtcacccaggctggagtgcagtggtgcaatctcggctcactgcaacctccgcctcccaggttgaagcaactctcctgcctcagcctccctagtagctgggattacaagcacacaccaccatgcctagcaaatttttatatttttagtagaggaggggtgtcaccatgtttgccaagctggtctcaaactcctggcctcaggtgatctgcctaccttggtctcccaaagtgctgggattacaggtgtgagccaccacgcctgcccttaaaaatacattatatttaatagcaaagccccagttgtcactttaaaaagcatctatgtagaacatttatgtggaataaatacagtgaatttgtacgtggaatcgttt

SEQ ID NO: 86717 - DNA, 1053 bp, Homo sapiens
cataaatgttctacatagatgctttttaaagtgacaactggggctttgctattaaatataatgtatttttaagggcaggcgtggtggctcacacctgtaatcccagcactttgggagaccaaggtaggcagatcacctgaggccaggagtttgagaccagcttggcaaacatggtgacacccctcctctactaaaaatataaaaatttgctaggcatggtggtgtgtgcttgtaatcccagctactagggaggctgaggcaggagagttgcttcaacctgggaggcggaggttgcagtgagccgagattgcaccactgcactccagcctgggtgacagagtgagactctgtctcaaaataaataaataaaatgtatttttagaatactcagttctctataatggtcagtggtgtatgaggagggaggaaagaggggtaaaaggagagagaaacagatcggagagatgggcagaggtgactgggtagagacagagcaaggctgggggaaggtgaagacgagagtgcgcccacacacacacacacacacacacgcccttaaaaagagaaggtcgggcatggtggctcacacctgtaatcccagcaatttgcgaggctgaggcaggaggatcacttgagcccaggagttcaagaccatcctgggcgacacagtgaaaccccatctctacaaaaaatataagaaattagttgggcactgtggtgcaagcctgtggtcccaactactcaggaggctgaggtggaaggatctcttgagctcaggacttcaaggctgcagtgagctatgatcgcaccactgcactccagcctgggcaacccagcaagactctgtctcaaaaaagagaaacaaatcaatacacacagggaaggaagcagccacccaggctgcggcccagaaccaagaaagttacagcattctattgccatcttgtggccatcttgaatattgcaccccccgccccaaggctttcaaagccccactgctcaggtaggtttctgtccatcctgggcttccaggctctgtgctgcttcacgtct

SEQ ID NO: 86718 - DNA, 1097 bp, Homo sapiens
atccacaggtgattctgatgcccggcaggcttgagaacagccgcagggagttctctgggaatgtgccggtgggtctagccaggtgtgagtggagatgccggggaacttcctattactcactcgtcagtgtggccgaacacatttttcacttgacctcaggctggtgaacgctcccctctggggttcaggcctcacgatgccatccttttgtgaagtgaggacctgcaatcccagcttcgtaaagcccgctggaaatcactcacacttctgggatgccttcagagcagccctctatcccttcagctcccctgggatgtgactcaacctcccgtcactccccagactgcctctgccaagtccgaaagtggaggcatccttgcgagcaagtaggcgggtccagggtggcgcatgtcactcatcgaaagtggaggcgtccttgcgagcaagcaggcgggtccagggtggcgtgtcactcatccttttttctggctaccaaaggtgcagataattaataagaagctggatcttagcaacgtccagtccaagtgtggctcaaaggataatatcaaacacgtcccgggaggcggcagtgtgagtaccttcacacgtcccatgcgccgtgctgtggcttgaattattaggaagtggtgtgagtgcgtacacttgcgagacactgcatagaataaatccttcttgggctctcaggatctggctgcgacctctgggtgaatgtagcccggctccccacattcccccacacggtccactgttcccagaagccccttcctcatattctaggagggggtgtcccagcatttctgggtcccccagcctgcgcaggctgtgtggacagaatagggcagatgacggaccctctctccggaccctgcctgggaagctgagaatacccatcaaagtctccttccactcatgcccagccctgtccccaggagccccatagcccattggaagttgggctgaaggtggtggcacctgagactgggctgccgcctcctcccccgacacctgggcaggttgacgttgagtggctccactgtggacaggtgacccgtttgttctgatgagcggacaccaag

SEQ ID NO: 86719 - DNA, 2180 bp, Homo sapiens
aaatagatttggcttcctctaaatgtccccggggactccgtgcatcttctgtggagtgtctccgtgagattcgggactcagatcctcaagtgcaactgacccacccgataagctgaggcttcatcatcccctggccggtctatgtcgactgggcacccgaggctcctctcccaccagctctcttggtcagctgaaagcaaactgttaacaccctggggagctggacgtatgagacccttggggtgggaggcgttgatttttgagagcaatcacctggccctggctggcagtaccgggacactgctgtggctccggggtgggctgtctccagaaaatgcctggcctgaggcagccacccgcatccagcccagagggtttattcttgcaatgtgctgctgcttcctgccctgagcacctggatcccggcttctgccctgaggccccttgagtcccacaggtagcaagcgcttgccctgcggctgctgcatggggctaactaacgcttcctcaccagtgtctgctaagtgtctcctctgtctcccacgccctgctctcctgtccccccagtttgtctgctgtgaggggacagaagaggtgtgtgccgcccccacccctgcccgggcccttgttcctgggattgctgttttcagctgtttgagctttgatcctggttctctggcttcctcaaagtgagctcggccagaggaggaaggccatgtgctttctggttgaagtcaagtctggtgccctggtggaggctgtgctgctgaggcggagctggggagagagtgcacacgggctgcgtggccaacccctctgggtagctgatgcccaaagacgctgcagtgcccaggacatctgggacctccctggggcccgcccgtgtgtcccgcgctgtgttcatctgcgggctagcctgtgacccgcgctgtgctcgtctgcgggctagcctgtgtcccgcgctctgcttgtctgcggtctagcctgtgacctggcagagagccaccagatgtcccgggctgagcactgccctctgagcaccttcacaggaagcccttctcctggtgagaagagatgccagcccctggcatctgggggcactggatccctggcctgagccctagcctctccccagcctgggggccccttcccagcaggctggccctgctccttctctacctgggacccttctgcctcctggctggaccctggaagctctgcagggcctgctgtccccctccctgccctccaggtatcctgaccaccggccctggctcccactgccatccactcctctcctttctggccgttccctggtccctgtcccagcccccctccccctctcacgagttacctcacccaggccagagggaagagggaaggaggccctggtcataccagcacgtcctcccacctccctcggccctggtccaccccctcagtgctggcctcagagcacagctctctccaagccaggccgcgcgccatccatcctccctgtcccccaacgtccttgccacagatcatgtccgccctgacacacatgggtctcagccatctctgccccagttaactccccatccataaagagcacatgccagctgacaccaaaataattcgggatggttccagtttagacctaagtggaaggagaaaccaccacctgccctgcaccttgttttttggtgaccttgataaaccatcttcagccatgaagccagctgtctcccaggaagctccagggcggtgcttcctcgggagctgactgataggtgggaggtggctgcccccttgcaccctcaggtgaccccacacaaggccactgctggaggccctggggactccaggaatgtcaatcagtgacctgccccccaggccccacacagccatggctgcatagaggcctgcctccaagggacctgtctgtctgccactgtggagtccctacagcgtgccccccacaggggagctggttctttgactgagatcagctggcagctcagggtcatcattcccagagggagcggtgccctggaggccacaggcctcctcatgtgtgtctgcgtccgctcgagcttactgagacactaaatctgttggtttctgctgtgccacctacccaccctgttggtgttgctttgttcctattgctaaagacaggaatgtccaggacactgagt

SEQ ID NO: 86720 - DNA, 1041 bp, Homo sapiens
accacgcccggcctgaaagggttcttatttagtgtgcattttgacattcaatttaattccaaggtcttgtggggtcatggtttacaggatgttgatatagaaaagacttcacttaatgggccgggcgcagtggctcatgcctgtaatcccagcactttgggaggccgaggcaggcagatcaggaggtcaggagattgagaccatcctggctaacacagtgaaaccccatctctactgaaaatacaaaaaattagctgggcgtggtggcaggcacctgtagtcccagccactcggttggctgaggcaggagaatggcatgaacccgggaggcggagcttgcagtgagcagagaccatgccactgcactccagcctgggcgacagagcaagactctgtctcaagaaaaaaaaaaaaaaaacagactttacttactggaagccaaccaatgtatatttagagtaatttttcctgggctgagctgtcatttacttttgcagtatctcaagaagaagagtttacagtgtaaatatttgatgcacactttgattatatagatgaagcaaactattttcaagagctttgcaaggacttacttgtatccaaacaccattctaaaggagtcttacctacttctaaaggctggtctctacttggaaccacttgcttggccctggttcaagtcctgctgcaaacctggaagtcctgtcattgtcttcttccctccagagcagtggcacccaatctaatttttgctgtgccccagcagcccctggcactttgccctgtagactgcagacctcatgtaatgtatgttaagtccacagaaccacagaagatgatggcaagatgctcttgtgtgtgttgtgttctaggaggtggccaggtggaagtaaaatctgagaagcttgacttcaaggacagagtccagtcgaagattgggtccctggacaatatcacccacgtccctggcggaggaaataaaaaggtaaagggggtagggtgggttggatgctgcccttgggtatatgggcattaatcaag

SEQ ID NO: 86721 - DNA, 1525 bp, Homo sapiens
tgctggcagataaattgaaaaggcacgctggcttgtgatcttaaatgaggacaatccccccagggctgggcactcctcccctcccctcacttctcccacctgcagagccagtgtccttgggtgggctagataggatatactgtatgccggctccttcaagctgctgactcactttatcaatagttccatttaaattgacttcagtggtgagactgtatcctgtttgctattgcttgttgtgctatggggggaggggggaggaatgtgtaagatagttaacatgggcaaagggagatcttggggtgcagcacttaaactgcctcgtaacccttttcatgatttcaaccacatttgctagagggagggagcagccacggagttagaggcccttggggtttctcttttccactgacaggctttcccaggcagctggctagttcattccctccccagccaggtgcaggcgtaggaatatggacatctggttgctttggcctgctgccctctttcaggggtcctaagcccacaatcatgcctccctaagaccttggcatccttccctctaagccgttggcacctctgtgccacctctcacactggctccagacacacagcctgtgcttttggagctgagatcactcgcttcaccctcctcatctttgttctccaagtaaagccacgaggtcggggcgagggcagaggtgatcacctgcgtgtcccatctacagacctgcagcttcataaaacttctgatttctcttcagctttgaaaagggttaccctgggcactggcctagagcctcacctcctaatagacttagccccatgagtttgccatgttgagcaggactatttctggcacttgcaagtcccatgatttcttcggtaattctgagggtggggggagggacatgaaatcatcttagcttagctttctgtctgtgaatgtctatatagtgtattgtgtgttttaacaaatgatttacactgactgttgctgtaaaagtgaatttggaaataaagttattactctgattaaataaggtctccattcatggattccaaggacaagaaagtcatatagaatgtctattttttaagttctttcccacgcacccttagataatttagctcagaacaggaaatgatagtattaataaaagctggacatcaggattaacagctctctctggggccctgaaggtgagagttctcagacttgctcatttgcagttgcttctttgtgatgctggcaaaccatcctagtcccattcaaagggcaatacaaagccttgtggctgacctcacgatgcagcactcagtttgcaagaccggcaccagtgtatgcaaacctgagaaggttggggatgaggatatgggatctttcatccctggaaatttagtccagaggcctggggctggagcagaacaccaagccaatcagcttaatgaatggcttagattcctgctaggtttgcagagctgccttctttcctttggtaccttattatagattgaggagtat

SEQ ID NO: 86722 - DNA, 3898 bp, Homo sapiens
cacagtctctcagcctcagccttaccctaggccgcttctctcatttctggccttcttgggcatttgagtaggtggccaatttcacaggccttgacagggtagggagactgagctgtgatagggcagagcctacccggcagagagcagtgtcacccacaggtgcaggattctcatccttgcatggacactttgaccctgcccccagttttagcctgcttgccatctcatgattgtctgttcttggttttgcagctggcgggaggttgatcttcagtctctgaaggggagtcctgatgaggagaatgaagaggtaatggcctggttcttctgttagaagaacacgtgtgtacacatgcacacatacatatgagtgcacacaccctaaatggcctgaagacttgtgggtgtgaagtgcaagctccttgtattcctgtcgtgaccgggaagaacctagaatggggtgggactggttcttaactcctggagaaaagaggggatcgatgaagctgctctattgcagattgaggacctatccgacgcagccttcgccgccctgcatgccaaatgtgaggagatggagagggcacggtggctgtggaccacgagtgtgccaccccagcggcggggcagcaggtgatggggcaggcttgggtccccagggcctgtggagagagggtggacagggagtttgggccctacttgagtccatggaattgctactgcctcttggttgctcatcatactcatctactggcagtggcaaatagctcagaatttccttggtgtttgttggaactagtggagatacatggaactagtggagatataaggagccaagtgctagatccttgctgagaagtcactatgtaattctgaattcccatgatctgtggcatttggaagacagttggggggtcatggtgattcaacccggggagcttggaaggcctcgctacaagttaaccttcctttggacagtggctttgtgatgccacttgaagaaactgcccccccttaacgtccatcactaccctgtctccatttattgttaacagtggcagaaaccctcgggattctcaagtagaaagttttgggagctcttacttttacttttttttctttgactacagttttcaaagtctacacgaatctccctaacctcctgaattcactaggcactttgctatggactcacctggcattgttcagccatgcttttttcttgggatggtaaatgttgtatacctacccctccagagaatagtgggaagaaatgggagttgctggatcctaaggaaaatctgttggtgtttgtttgcctcaactcctccagtggggatgcttttttcatgccctctacccccataagtaaacatttcccaggcactcagatttgcattccttggtgtgcaggtcctacaggtcatcagacggccggacaaccccccagctgggcagtgccaacccctccaccccccagcctgcctcccctgatgtcagcagtagccactctttgtcagaatactcccatggtcagtcccctaggagccccattagcccggaactgcactcagcacccctcacccctgtggctcgggacactccgcgacacttagccagtgaggatacccgttgttccacaccagagctggggctggatgaacaggtaagggacgcagcctttgggtggggttggcatggttgggggatggaaccaggaaggggcagcatctgctgaagagggacctagccatcccctcccccttttgaagggacaaagggctgcacttaaattgatctcctcaacgttcagtggaactgtattgatcactgctaaatgatcaatacagttgtctgggtataccctaggaggggtgttcccagactgtcgcaggaacactagatagactggtcctaggctccaggccacaaggtttgtggcagggccttggagcaggaagcaggctggctgggactgggtcctcaaagagcaacttgtctgcctacagtctgtccagccctgggagcggcggaccttccccctggcgcacagtccccaggcggagtgtgaggaccagctggatgcacaggagcgagcagcccgctgcactcgacgcacctcaggcagcaagactggccgggagacagaggcagcgcccacctcgcctcccattgtccccctcaagagtcggcatctggtggcagcagccacagctcagcgcccgactcacagatgagcgggagacagccatctaaacagactcactaactattggcattaaagcttcagaaatctctgcgtttgatattcaaacatcatatgccggaaattttcacagtttttagtgaacttaaggaatttagatcctactttggtatttttttttcttgttttaatttttgttttgtttttgtttccatgttttcttgtcacacacctgagcacttcctcccgttggcaaacagaagttcaggatgagaccctgctggcctggtcctggcacatcctctgcactgttgaatcactggacttactgatcttagatgaccaccccctccctcacacctgtgggcagggcagaacagcctggcgggctacagtttagcatggccttcttgagctagggtggaatggggcagggtgctctggactcttaccccctcccctcccatctgtggcttggctctgctgtggccctcctggctgggtccccttggtttttcgtgctggaacatccccaccagagcctctctgccataactgccagctgctctccccgagtgctcagctggcagaacacctttcctttctcacccagaacttaagagactgattttttgtttcatctgcatttggtcttctctgttttgactctttcactgcagtaacctggctgtggctgctcaggttcccctcctcatgccccttggtacccttccctgtctgctctcccatgccatgtacacacccacaacccgtccttccacttggaatatttttaccacctatcctgatctttgaaggtagggttaggactacttaacctctattcccactcccctgcaaactgggggttgtgggaagtgagcagccatctccctgtgtgattttttttttttttccctctgattcactttgccatgtttccttcacatccagatccctgtcggtgttagttccactcttggtctttcacgctccccttgcctgtggaacattgtctggtcctagctgtggttcccattgttcccccttcacccttctctgttaaccttgtgcctgtctcctgtatgatcacatcaccaaaaagggggaggggggagaagactctttttttttggccattttgtaatcgtataaaaatagtagacaactgcttaatggttggggttttttcacaattttcaacattagtgatttttttttctgtttgcaagttaaagggtttgtcattgtttctttaaaaaaaaatacaataatgcaccatatccctatgcataaagtgcttcttctatttataaggttgaaaattctgaataacccttttagcattgaaaaaaaaaacaaaaacaaaaaatggaaaaaaaaaaccttgtattttgtaaatattttcttttcctgctttggagctgtgtaatggcagcgaaacatgtagctgtctttgttctatagaaatgcttttcttcagagaagctgatctttgttaatgtcttgattctgttcgcaaagcacagactagtgcttaaaaaaaaaaaagaaggaaaaattgaaaaaaataaaaaaaaaagttacagaatgctgtgtaccaggcctttcttgacttactgaactgtgtatgcatggtagtgttggcagtttcggagctggctctctgccgccgttctttggggtactctg

SEQ ID NO: 86723 - DNA, 1049 bp, Homo sapiens
atctggcagtggcagaggtctctgggtatgagatcactaatcctcagctacagaactcaggcaagatccccaaaagtctgtttaaccattttggttaaccagatatcctaaatttctgaggtcaatggcagtcatctgatttgatagagaaagaaattgaagtgaaaagggcattgtggtcatctgaagttataaatgacagtgactgaaactctggcccaggaagtgctgacttttaacattctctgagaatgtcctaagatgataggatgaataaagggtatctcaccgtccaggaacagaggatagaggggttagttataggggacttcttactcctccaaccccttccctgtggactgaccacacttggtggtttaggtataaatgcagcctcttaggtgttttccagctgttttgttgccatggcagcgtgtttgttatgccactgtttccttctggcctctcacagctcagttgctagtctctgtttcaggatagggtattaactatctgggcagcagcagctagtagacttcttcctccatccaagagactaagccatttagttccctagtctcccagctactgtagatgcttacctctgcctctgatattcgatccttggaagtcttatttttccaagagtttggtcttctcaactatttcctatagaagcaaatttcctttcaccaggaatgtgaggtatagtcaggttctcctctttagtttccctccattcatctcctttgatacagctagaaagctctcagctctttccccaagaatcatcaaaagaggggaaatcacataaagactgggcagatggtgggtgcagatttagctgaagagttcagatctttgagaaggaggtgcattcatgacaaccaaggttagatgatgtattgagatgggcctatcctttgggcctctttcagcataagctttcaagcattgcttttaggggaggggccactatgagtcttaagtcataaacggggataaaggaaggaaataaagattgtaaaaggagaggaggttaatagagg

SEQ ID NO: 86724 - DNA, 2411 bp, Homo sapiens
tgtcccatcaccaaacccggcctgacaggacccacaggcagcacttagacgatgtgggggccgtgcccatggtggagcgagtgacagcgccaaaagcagagcgcttgctcaacccaccaccacccgtgcatgacccaaaccacagcaaaatgagattgcgagaccattcatctgagagaagtgaaggtagggccaggcccatggcacctctacctgcaactgcacctgctcagggctttctggggcagcctaggcttctcttaattacccccagctttgtccttcactttctaggaaagcagagtagagggacgctactgcttctaaatggaggtcacttcttaactgctacagcaacctctgccctgcccctacttcccacagctagtgtgcttcacctttttatcctctaggcatagaaaacatttttgcctttagtatgtattgctgccattccaagcttgtgttagaagtaacgctggttaagatagccatgtatttctctcttttctgttgacttctgcagtgttgaagcatcacacagacatgagcagttcgagctacttggcagccacccaccatcctccacacagtcccttggtgcgacagctctccacctcctcagattcccctgcacccgccagctctagctcacaggttacagccagcacatcggtaagtacctgtgtggggttggccggacaccccctctgcaggtcacagctcactcaagtggctccagaggacagtgtgagggtgggttataaagcccagggcatttataggatctcagctcatcatgacatatgtatgtatgtctgtaccatttttaagtcaaagtcatggtacttgaccttctgttgtttttcttgagttgtttttcatagcagagatggatttatgctgagccatccatagaaagcttgatgcagggacaaactcttaaggtgatctgtgactattcaagatctgttggactaagtttcacacaggactcaacagttccgtggccctaatcctgttggcccaagaagtgaacaagagaggaggggtgggtagaggggagattcccatgggcgttggaagcagtgtttgatttccttggttttactctctgggtgagtggaggtgaagtactaagaataaacactaggcgtgagggtaccagaagagaagggaagggagaaggcagagtccatgctttttaggtatacagagcagaattacagatccagcaggcccccatggcaggacatttggcatgcacacaccagattttacgataccacactccatctggaagcagtttgcacagctattccagacacatttcctttaatttcattctaatattttaattcctcaagtgtgccctcttggaacatacatacctgtagctgctatggacctactcaaagggtcctttttgtataataattacaatgtaatgtaatggtaaatgtaaaagtctgcaactgtaatgtttattgaacacttactacataccagtgatcagtgatttacatgtgttacatgttataatgccttttgagatgtaggttggtactgtggatttcattttatatgcatgaaaactgtcaaggcaacttgtgagggttataattatgattcaaactcaggcagcctgactgtagagccagctcttttaccattacactacacaggctaagcctgggtgagggtattgcagaggcaacttaggaagttccttcagagcctagatcaggaaacttccaagctcataaaatggactcactaggctcctgtgatcaggtaggaattcacattgttctctctttgctgttacaaatcaatcttttccaaatggtctctttgctcttcgactttctttacccccgtaacccacaaattttatctaaataggtgtgtagtgtccctcacatactcagttatccagcagcaaagggtttcagataaccaaagtatttataaaaaagagtctaaactaattctgatagaaaatctgaactcagagattcaggacttggtgagcacttcaatatttctgtgtctggagaatgttaacttaggcctggatcacttgaaatttttaccatttattgagtaaaaattttgtgtatagcactatgctaacccctgaggctctctcattgccaagttttttcaaagactctggatttatgtaaaagaagataggccaggcacagtggcgctcacctataatcccagcacttggggaggcggctgaggcgggtggatcacttgaggtcaggagttcgagaccatcctggccaataaggtgaaaccctatccctactaaaaatacaaaaattaactgggcgtggtggcatgtgcctatagttccagctactctgaggcaggagaatcacttgaactgggaagcggag

SEQ ID NO: 86725 - DNA, 1058 bp, Homo sapiens
aagaagaggtgtgaaaagaagagaagaggtgtggttggtaattgaaggctcctaggtggataaatttgctgaagaaagcaagtaatgtcccacctgggaatcaagaaccaactgttcgtcttagcggaccatcaaggtcgtgaaagcatgcagagtttataaagtgttctcagaaagcacagttttagtatctttttaaactgtcagaagtttgatacctaggtaagcacttagagcttcaagtagttagatttcatcaatgaaaaggaagcaagtttccttacccactttgaaggtcagtgtgttagacaaatggaaatcttttaacaaactaatcaaacatccttttagtagtgtcacacaagtatctagaaaggtcttcgcaataacaaatggggagctaacttctcaataacaaatggggataacaaatgggtagctggctttttatcagatgctgaattgtcagttttgtttggcttttttcacaggttcaccggaacagcacaatccgccctggctgtgatgtgaatccctcctgcgcactgtgtggttcaggcagcatcaacaccatgcctcccgaaattcactatgaagcccctctgttggaacgtctttcccagttggactcttgtgttcatcctgttctagcatttccagatggtaagaaagaccacagactagaaagtctaatgaaagaaacttgagagacttctaggtgaaagaaaatcagccaaggtgcagttacaactcagatactttcaaggtacaactttcgtcaaccaagtcttctcttagaattttgcaaaaagactgtaacagatccaccaaaccagaaggtgccactaaaaggttgcaacttaatatgagatttccttctaactcttcaagtagctaggagggatctgggctcagttgcctctagccacagtaatctggtccaaaatacgcttagtatatctttaaaaatgttttgtctgggccaggcgtggtgggtcacgcctgtaatcccagcactttgggaggctgaggtggacggatcacctgaggtcaggagt

SEQ ID NO: 86726 - DNA, 1585 bp, Homo sapiens
ctgacctcaagtgatccacccgcctcggcctcccaaagtgctgggattacaggcgtgagccaccacacccagcccaattactgtgtttttaaagggctatcagcttagttgaattatggctggaatatatcttaaaattgagatgcacgtttagtgcagtaactcttttgcccttaaaaaggctggccaggcacagtggctcatgcctgtaatcccagcactttgggaggccaaggtggggcagatcatgaggtcaggagatcaagaccaccctggccaacatgatgaaaccccatctctactaaaaatacaaaaattagctgggcgtggtggcacgtgcctgtaatcccagctactcgagaggctggggcaggagaatcgcttgaaccaagaagtcagaggttgcagtgagctgagatctcgccacagcactccagcctggtgagagagtgagagtccatctaaaaaaaaaaaaaaaaaaaaaaagctgttgttatatcacttgtacttcttaaaatcaatgactaaaacaaagtgttcagtaagttaaactcgttgggaataaagagaaatgagatctatcagtaaataaataggaagccttgaatgcccaaactgatgatttgggtttcagtctataagttttaaatttttgagcagagaagtgttgtaagctattttgggggaggtaaatctgctgtaacatgttttttttttttttttgtttgtttgttttttttttttttttttgagtcggagtcttgatctgtcacccaggctggagtgcaatggcacaatctcagctcactgcagcctccgcctcccgggttcaagcaattttcctgcctcagcctcctgagtagctgggatcacaggcacccacgacgacgcctggctaatatttgtatttttagtagagacaaggtttcaccatgttggccaggctggtctcgaactcctgacttcagctgatccatccgccttggcctcccaaagtgctgggattacaggcgtgagccaccgcgcccggccaatctgtaactattatgtttgggatggattggcacaagagactggaggtggaaagacagactaacagtagtaatcctggaggagataatagtctaaggcctctacaactctgaatgtggaatattttaaatgtaatctaaggaataaccactagggtgtggtaagtgaatatcagagtaaggctcatggagaacatggagtacttcctaaatcataattttattataaaatgacggaattactagttgtaattactgaatagcctatattgctatttattgtgtgtttcatcactttaggggtctagtatggtggatgttagtaattatctaagtgaatgaagaagcactccagtggaaagttcttatatgccattatgttcttttcctggcccagtgcctaagtgaagtaggtgtttataacttaacctaaacgtactaagatttcagatcaataaagttattaaaataaaattggtaccagccaattttcaaataaggttgctttttattttttaagtaaaattatgtttataattaaaccataagacaaa

SEQ ID NO: 86727 - DNA, 1620 bp, Homo sapiens
ctgctttgagctgtatttgtgccactgtacttaagcttgggtgacagagtgagaccctgcctgagaaaaaaaggaatcttcactaaagtttttaaattgatattactaaaaaaaagtttgtcttcacaaaggaaatggagattaattcacaactgtagggaattttagattgctgactcttcaaatagcagttgcctttattccaaaactaatgagataataatattccagtaaaattggtactgtgcaggaattaagagcattatctttgaagatgataaccttgggtttgaatcatggtactaccacttagtagtttggtaatttggtgcatgttaaccaccctgacttccactcctctccaaagcctcagagatctcatagggttgtttgagggttcaatgaaatatatgtaacatgcttattgggatgtctggttgataagttcctcgtacaaagtggctgttattgttaccacttttgttgttgttcattcattctttcaacaaatatttattggcttcctgcaacgagctaaatctgtctagtcactgggtatacaacactaaacaaaacagacaaaagtgcttaccctatgaaatattctagttgttaagagaaagaaaataataaatgaactctgcagtgtgtcctatagcattaaatcttggagagaggctaggcacagtggctcatacctgtaatcctggcactttgggaggctgaggaaggaggatcacttgcgttcaggagtttgagaccagtctgggcaacatagtgagaccccatatctttaaaaaaaaaaaaagcctgctgtgggcgagcgtgtgtagtccatttgctcaggaggctgaggcgggaggatcatttgagcccaccaggttgacactgcagtgaaccatggttgtgccactgcactccagcctggatgacagagtgattgagactctgtcttttaaaaaaacaaaaaaacaaacaaaaaaaacacacgtatacatatgtaactaacctgcacgttgtgcacatgtaccctaaaacttaaagtataataataataaaaaattaattaattaaaaaaaatcctggagagagaaatgcaatagaggagggaatagagagtgctggagagctcagataaagaagaggtatatggattagccctttgatgtattccagagcttaggtattcctcctcattcctgtgaaagatgaggaaaggattgggaagggagtgacgaataaagtagaagaaaaaccaagagagtgtggtatgtgaaaggcaaggggagaaagtgttttggagagggaggaggaggagggattgtctgtgtcagttgttacagacaggatcagtaagatgaaggctgagaattgagaccattgaatttagtggggtggggttgttgcagacattggtgagcagttttggtagagggagaaaggtgaattaaagcatggttggagtggtttcaggagacaaggccacagaaggaattgagggaaccattgtagataacattttcaaagaatgttgctgtaaaagagagcagagaatgggaatttttcttaagagagccactagcaacatatttgctaatgacaaataagggagatgagaga

SEQ ID NO: 86728 - DNA, 1750 bp, Homo sapiens
atacctgaccactgattctcttattttctttttcttcagtcattcaagttgtgtttttcaaattgatcatcagaagttttaggtgctttgtgcaaatgaagtggtggtgcttttcaggcaggggtgcgcttgggtacatgttaatttcttttttcctttttcttaatcagattgagtctgtttctcagccattggaaaaccatggtgcccgtattattggtcatatttcagagtcactgtctaccaaatcatgtggagcactcagacctgtcaatggagttattaacacgtaagttttagctcttctacttcctacacttagtagacttgtaaaggtgttttggagctcttagttctctttagccaggactgaccctggtttaaagaagcggaagccttatcacttagtaacatttttaatcttcactgtataatgaagcagtgcattttaattaattgtatattttccttttacctactaaaatggagtgggcatggagtaaaataaaagacactacagttactgtgaattattattgttttaatcttgcaggaattcctcagaagtgcttatattaacctcctctgcttaggacagattagatctccaagggctatgtttgtaaatctgtatttatgaagattcaagggagaaaacaaaagattcagggagattctgtacaagtgaatgatgtgtacaacacccttaaaattcgggtttcatagaactgattctaaggaagcccattaacatttgcaaaattcatcattttctaaccaactgtagttctctagactttatttactcgtgtgtttgatgtagaggagaactcaatcactagaacttgagtttatttattgacttttatctttcagacatgatgtagttaatgtgcaccaagaaccttacacataagcacacacaggtagattaacagacatcaagaggagacctgcttctgctctagaatgcttctttgtgtctgaacattagcaaatagaggttgaactagtataagaggctttgtttctttgtgttttcttgttgtttatttattttgtttctttgtgtgttctgagaatactcttccttccccttgtatagtcttcagcctgtcttggcagaccacattccaggtgacagctctgatgctgaggaacaattacataagaagcaacgactgaatctcgtctcttcatcatctgatggcacctgtgtggcagcccggacacgtcctgtactgagctgtaagaagcggaggcttgttcgacccaacagcatcgttcctctttccaagaaggtcggtacagatgagagttggtcattgtcaagcagtgagccagatgctcagatagagttagtctcttgccaactttggtgttttctaaacttggctaaccaccaaggtcttctggggagctttataaaatactaggttcctgggccctgtttgctctggagttggatgttggaatcttgttttcagaaaacacaaagctcctcggtgactctgcagctagttttgaaaaccactgtcttgagctttttaatagaaatgggagagactgaaagtttaagtactgcccttaacactttgaaggagaatagtgtgccctctcaccttcactgttatcactgaaaatggcagtatagaatcctttgccctaaaaaagaatcttggccatgtgcagtggctcatgcctgtaatcccaacacttcgggaggccaaggcgggaggattgcttgagc

SEQ ID NO: 86729 - DNA, 1013 bp, Homo sapiens
aaagctatacattcttctttatatccttttctcactcaacgtcctgtaggttagcaatttcagtacgttttggcttatctttcctgtatttttttgcaccgatgagcagacacatgtatatattttttaaaatctccttcttggataaatattttttaaaatactagatttgacgttaaggagggttttgtttagcgaaaaacattgcttctatggcaattaacaagtaacacattatttgtgtgttagtttctgtttgtaaaatgatcctgctcctttaccctttccttgctcatcctactttacagaagtgatgagaaaaacaagtgtactattaagtgaagagctaatgctttctcagaagaaaggcatgctaaaaatgtaagctattgctgtttctttttacacagtccaagatacatcttcattccattggtgtaagtaggaatactcttcctttctttgaagttttgcagtctctagggacagtgagtagttcattggcctgacaagggttttgggatagaaggtaaagggacagatattggccaagaaatatttgacccacagtgttagaaaacactgacaagttaggtcttttataataaattgggctatggataaataagttgaacaataagaatttaagatgcatttttgcatttgctatatttctttaaattctagatagttattttcaagtgttggtaaacataaatcttaggcttaggaaccattggattagtaacagcattatgctaatcaaaactttaaaaaaatgagttcaaaattgttataatgtaattttatagattttcttttatcctcaacctgcagaagccggaaagtgaggcacatagccccacataggcagaaattaaagcctaggcaataacttagtgaaaatggaattttcagaacattccacttcttgtttagtacaattttatggccatggtgctagctaatggaaatggctagtatactatttataggccagcaatattttggtg

SEQ ID NO: 86730 - DNA, 1020 bp, Homo sapiens
aatccttccttgtctttttccagcttctgatattgtgctagtccttggtgttcttggcctgtagctacatcactgcagttgctgcctccatcttcatatgaccatctttctctttgcatctgtgtagatttccatgtcaggaggacaccagtcatattgaatttagagcccacactaaatggctcttcataacttgattacatctgcaaagaccctttttctaaacaaggtcatattcacaggttctgggtgaacataaatttggaagagacaatattcaacttgctctaacaagccatggaattttcccccaatgatatattcacatgcatttagtctttatgtaacactataattaatagaagtttttgagcacttgtgatatgtcaggcactgtgctaagcattttactctcattcacgattttcaagataaacaatggaagatcagagcagtcaagtagtttgttcatggttacacatccaagtgagtgcagagctattgctcaagttagtaatcactttaagtgcttgggttttttttttagttactgaaatggaagaaagtttttcctatgtgttttggttaagtgggttggtgttcatattttccatgctgcaccaagatttcccagcacttcctgggttgcacaggtcttttttttttttttgagatgaacctaggtgataggctgaatcttggtgataggctgttgagttataatttgtcttcgggtgggagattggagggatggtggggcttttctttttaaggatttactttgttgcttattaacattaattttatttaagtggcgtattaccaaaaaaaaaaaaagtatttgtgactactgctaggtgattctaggatccagacaccagtttctgttctgtcagaaggtaggtattaccttccaagctgtgaagtgagtagagtcccttttgggaataatattgctctctggagaaagaatataacttctaggaactcctctgtactacttctgcatgctgttgtact

SEQ ID NO: 86731 - DNA, 2200 bp, Homo sapiens
ggcgcatgcctgtaatcccagctgctcgggaggctgaggcaggagaatcgcttgaacctgggaggcgaaggttggtggtgagccaagattgcgccattgcactccagcctgggcaaccagagtgaaagaaactccatctcaaaaaaaaaaaaaaaaaaaaagaaaaaaaagccaggtatgtagtatgctcctgatcctagctgcttgggagactgaggtgggaggatagcttaagcaaaggaactctaggttacagtgagctgtgattgcaccaccacaatccagcctcaatgatagagtgtgagaccctgcctctcaggaaaaaaaaaaaaaaaatacagtatcatgatggttgggtatgcacattttacacctcgctaagtattttcaaattatttttcaaaaatggtggttccaattttaactgttaccagcaatatattaattgctcttttccatttctcaccacctgttggctttatgagactgtgcgttttcccatccagatttcaaacagcatcttaatgttttacctaatatttatattttaaccaaattttaacgagatgacacatttttatatatttattatttgccttttatgtgaatttcctatttctgttaagattgtctttttttcttttatcctatttctgagagttctgttacatattctgatgtttaatcgtcagttatatgtgttagatatcttccaccaaaatgtagttggccttttaactttattagattttctattgtatgttgaaaagtaggtgaaatctttgtgtattatctaagaaatgctccctgctctaagtcccgaagatattcttttaagtttggctgttcatatttagcaatttgaaatgccaaaattttgtaattatatcatgaagaagggaactaattttactttttcctttaaagaactggccagtttagtactatttattgagtagtttgatcgtttctgcactgatctgattttttaaaaatttcccgttatcttttatgtatctagttctacgttttgaggctctctatagttttgcagcaaatctggctgtctggtaatgtgtatttgcatcatgccttcttgcaaatttcttgctgttggtcctttattccatgtgaacttttagatctgtttctcagctttcattaaaaatactgtaggcaatttgattggaatttctttgaatttatagatgttcatgagaatcgccatcctaaaaaaatgtgtcctaccatttgtatagatcttcatgctttcaggcgttattttctctgtaaagatatttaatatatcattagttttgttggtgttatgaatggtacttaatgatattttctactttattagtttttaaatattctttactgaacacttttgctgaattctttattagttttaataattcttagtgtcagttggatttcctgtatagattattcttaatgtatgttttattttggcatggacaataattttattgtcccagagaaattaaagggatttcagagaaactgtgtgccacaggatcaggatgctagaacgcagttccacttaatttgggaaatacctatttggaagtttatatccatgtgcatcctgatgagcgggaggtgtcttgtctctctcttgggtttttcttgacactagagttagtctctgcaagggcctttaaaagttaaattccactccccaccccccaatctggtatagatattactgctactcttggatttcactcagtttatttccttttaggagacgcaggtcagaatggaaatgggctgcagaccgggcagctattgtcagccgctggaactggcttcaggctcatgtttctgacttggaatatcgaattcgtcagcaaacagacatttacaaacagatacgtgctaataaggtaagggataagtatctgatgtttttaaatgctgccgaaaactatcaatatcgcttttctcacatcccctcccacctcgtaacccccataaccctcttcttaactattgcaaagtaaatggtttaatgacctgatatagtggtttaatttaagaacctgatgtggctgcgcgtggtggctcactcttgtgatcccagcactttgggaggccaaggcaggaggatcatttgagctcaggagttcgagaccagcctgggcaacatagtgagaccttgtctttacaaaaa

SEQ ID NO: 86732 - DNA, 1085 bp, Homo sapiens
ggcacgatctcgactcactgtaacctctgcctcccgggttcaagcgattctcctgcctcagcctcctgagtagctgggattacaggcgcgtgctactaagcccggctaatttttttttgtatttttagtagagacggggtttcactatgttagtcaggctgatctcagactccttatcttgtgatctgcctgcctcggcctcccaaagtgctgggattacaggcctgagccaccgtgcccagctgactaaattgttattcttatctaatacatacattttaggttgcagttaggattacatcattgtatggctatcacaactttgtgaagcagatgttgttcttatttgcagaggtcaatttatatgtttaggatcacataaagtaagtaaaagtgagaacttgtctcctgatcttccctctgtttcacactgcttttgagctaggtagtgagtacttgtgagtggttttttgtttttgtttttttcatgtgactcagcaatttcaagatttctcattcctgccccacagtgaccctaactcttaccctgaaaactgttaatctggcaattgtacgctctgggatgatctcagttttatttgaatcttttggtttttaaaagttatctaaataacctggagatttcagaacttagatgtctcaggatttcctgcacacttggaagtagcacataatcctttgtcaatttatctaccagtgtgaatgtagcactgtgtagctcactgtgaacagtcattttactttagttggctaatagaacctttgtttcattaaaaggaaagaatcgagatgggactgaaatcagaatcaaagttgaaattaccaccattcgggtttttctggcatgtttgttgccttaatgagatttaaaaaaatttatgttaatacatcagggaagagaagcataatccaccagccctgttctactggattgacatacaaatttcccatcttagaatagaattaggtgacttaattagaggcactaggcctggtagtcaacatgtggtgttccatgtggttcaatgtctagcttttggtgctacttatctaataaatacaaa

SEQ ID NO: 86733 - DNA, 1933 bp, Homo sapiens
ttacatggctccatgaaagagggatgtgatgtttcagtgttcagttttggtagctattaattatcccttgtagccttccacttagaagtgatactttcagattgaacattgtttcttaagttttttcctttccacccctctctcttcttcttcagaaataaagctctgcatgtgtgttggtgtgttttaagtataatttttaatctgtttgtggaaccacagaaatggatccaagaggtaggtaaggtcttaaattgaatttgatgttaaataagctggcctttgacccataggcaatgagtgaggagcaccgttgggtgtaagactagaagcagaaatactaggcattttagaggccaggtgaagggtgaataaggacatttaggtcaattgaaataaaaagaaaaagacagatgtgaaatgtagaaggacttaattatggtaggaacttagtgatttggagcctggcagcctgagcaggaaggtgaaaacattgacagtaggcaagtttagaggaagagctagttttagatgaaagattggaatttgtacaagttgaattttagatgaagtgtagtggttaaaattcaggactctgggccgggtgtggtggctcacgcctgtatccccagcgctttgggaggccgaggtgggcagctctcttgaggtcaggagtttgagagcagcctggccaacatggtgaaacctcgtctttactaaaaatacaaaaattagctggacgtggtggcgtgcacctgtaattccagctacccgggaggctgaggtacgagatcagttgaacctgggaagcggaggttgcagtgaaccaagattgcgcctgggcaactgagcgagactccccatctcaaaaaaaaaaaaaagaaaaagaaaattgaggactctggagccagattacccgtatacagatgtagattttacctgtgcttgcttctctgacaaatgacctaaccccttgacaaatgacctctttttctccatctgtagtatggggatagtaggcaccgtttcatagagttgttataatgatgaaatgatgaaaagtcatgtaatgttgtagcacaatgcccggaacaaaggaagcattcagcaaaagctgctatgtataggatccagctggagaaagcaaattcagtagaaaatattaaggctggtgatacacatttgttagtcataaaatattggagctacgtgggatcttttaccacaatttttgtttacccctgttattttatccatgaagtgtagaagaggtcattaaaccttgagaaatggataaggcccatgagaaagaatgtagaatagaaaatttggactagcaacttaatctaggattattcttaaatttagtgtagggcaatggttttccacctctgatagagggaagcagtgcactgactattggttgtttatccgtcggcttttctactcttccttgcctccctcccccattaatggaatctccaatattgtttaagtatcctgtaattgtgtaattcaaaggatgctaggcctctctctggcttcagcaaggaaagttcatcaaaatgtggtctctagaccatcaaagtgtagtctttggaccatcacctagaaatctgctagaaatgtaaattctgggaccccatttcagatgtcctgagtcggaaactctgggggtggggcccaccaatcagcgtttagcaagccctgcatgcttaaagtttgatctctagtgtagggcttccaactgagataactttagaagataaagcatctaatgtaaatgaaccaagctttcagattagggatgattttgaactgtgtatcatgtgccacatctgaagggattggctactgtttagctaatagtcattaagaggcttgcagacccagtgctggcagatcttgtgtttgtgtgcaatagattttaaaa

SEQ ID NO: 86734 - DNA, 1775 bp, Homo sapiens
ctctggaatgtgaatttcctcctgttaggggctttgccttgttcactgctgtaacaaaggtaccttgaaacatatgaggcatccaaaaaatgcttgaatcgagtgaataaaattgtaactgacaagtatggtaaggcacaaggttctgtgagagggcctatcattgaactctcctttggtctctgccagtgtggctagagccacagagaaagcagaggctttgagtctatttactagagatagtgatgatatagtgggggccaagatcaagcagaatcttttgtgggacatgttaagaattagggaagcgaccaggcacagtggttcacgcttgtaaccccagcactttggaaagcccaggcaggagcatcacttgagcccaggagtttgagatccacctgggcaatatagcgagactttgtttgtaccaaaaaaaaaaattagggaaggggtgtttgggtatcttcgtagttattgtgatgttctattttaaattcatacatacatgagggtgaagtattaagttgctctcaagtcttattaggtgctgccactggtaactggtgtaggaaatgctttatcacattgaagaatttacagagaattgtgttctattcagtcatcagcatttaactttttttttttttgagacagggtctggctctgttgcccaggctggagtgcattggtgcaatctcggctcactgcacccttgctgtcctgggctcaagcagtcctcccacctcagcctcccaagtagctgggactacaggagtgtgccaccaccatgcctggtattttttggtatttttttatagaggcaaaattttaccatgttgcccaggctggtctcagactcttgtgctgaaaagcaatctgtccgccttggcctcccaaagtgttgggattgcaggtgtgagccaccacgcccataaaactgtttaaaactgtttctttttttgttgttgccggagcgggatctggtaaaaaccagaaaacctgccagattctaaaggagttgtaacattgctttaaaactgtttctaacttgatgttgttttgaagatgatgaatgtaggttttccagctcattttttattgttctttttttccctttcagtttgatttataagtgaaatttaatacccccattattgggaaaggaagatcctgaagagaacacagaattcaattccttttcagaaaattttgctgcttcaagctgtgcttgggcttcttatccttactgtaattgtgaggggtgaaaatagtcctttgaactttttatgaggaaagtggtgatgttctgtaaaggacatttatttaaatatgattgttattggcttccataatcccccatgtcatctgaccttggattagacccagtctgccagtctgatgagagagccagttgtaaattacctgttgaatttcctgtggatcccctctgttgttctttattagctccataatccagctggatgttactggttacagtttggctaatgatcatgaccaatttttgaagaaaggattccttattggcgggcaaatttttgttgagtggtacagccagaaacattttcacattattctttcctactttaggagctaaacttgcgggctgtttatgtatttgtttttagggtaatcaaattttttctttataacatttgtcacagtgacatttcttatgcacacataaagagtaaccagatattacactgtatgttttggaggaaactgttctggaagacctaggcctaaaactcact

SEQ ID NO: 86735 - DNA, 1032 bp, Homo sapiens
tattcccattcacccattgatttgaacaaccatttttattcattgtagaagggacttaaataaatgtaaaaaccaggcaaaatttcttctcttttataatacatccttgatcatagatagaattttgtcacttctctgatatttaaaaataagacgggtggcagtttgagtatctataatgaggtgaagatcagcttgtgcttgaaaaccaggacagagggtttcaaagtgtaattgaaaaagactgtggcagtcttcttcatgtgctgggagaatgggaacatttgtcagtttactaaggttttgctttcctcttgtgctttatagaatttcttaaagaaatgtgtttattttacagtgaggactggtaatttcattcctctgtacccctgtaagtggtacagtgaaccacagatgtgttcaaagttagctgttgatatgtgatgagggaggggaaagaggagggacaaactgggatgttattttctatcttctatgtctagatttccttggctggagatgtatttagctgtgcagcagtgactgctgttctgtagagttctaaggcagcattacagggagaagccgtcttgaactgactctctaggtttgttgctattgtagtgttcggttaaaaaattcaagcccttgggaaggaatgtggtggggttaatcaaggtttcttgtttttgttttcgttctatcctttcctgaactgtttgtatgtatgaaacagccttttacaattccaaagcaggtccttttatctgtgctccaaaatgcccactgtgacccccacgtgttaacatgaaggctcaagtttgttgacttctgaaagtgttgtttctttaaaagacttttatttaaatcctctactttaaactttattgctgtaaattggtgattctcaacttgggctgcacattcagatcacgtgggaaacacttaaagggaaaatcccaggacccacccccgattaaattttgatttaatttatctggtgtgggtctccagcattcatgttttaaaagc

SEQ ID NO: 86736 - DNA, 1244 bp, Homo sapiens
tttagaaataaccttggacttccatctttttagaaatagctggaaggttagcactcagtatgttgtattacttctctgtgaaaggatctacagtagactgaacttgtctatgttatgagactgctcatgtctttattctttatattcataatgctgaacacaagatactcgtgttttttttttttttttttgacagaatagggatcttgcagttaacttagctgttcttaaatttctgtttataaaagccataatgcataataatttactgtagtcgttattcctagttttcccaggtaggcagtggtaacatctgtttcacaagataaggaagcagaaatttaacaacaatggcagaatcaggatgtcaatcttgtccttttttccttttcccactttgccatgctgccctctgggtaataagatggagactaatttttgaaggcttaatttgttgagccagtgtcattagtttttaggtaacattttaatacagaataagtgtgtcttggtcttattaacagtgctatgttatgtaaaggaatttagttgtaggaatattttctttgaaacaataatacctgtttttttatctcttgattgtaaagtgctgtgggaaatacagagatgacttgtaaataaattctgcccacaggcttaggggatctaagatataattcactgtggtaaaagatacaaagcaatcattgtcagaaaagatacagattaagtgccatagaagttctgctgaagaagaatttctgggtaaagggaaggagacttcttagaggatagatggattttagttctaggtggtagtgtgggaagcaagggagatgtaggtgtttagagggaaagaagaaaggacattctgtatacaaattgagcaaaggtttggaattagagcagtataagcagccacaatcatggaatacaatttggaatctagtatgagaaaaaggaaatgaccaaggttaatgaagattatactcatggaggaagcctttgagtatcaggccaaggaatgttaagttctattttttttttttttttggtaaggaaagtgacttttattttttatttatttatttatttttgagatggagtctcgcactgttgcccaggctggggtgcagtggtgcgatctcagctcactgcaagctccacctcctgggttcacaccattctcctgcctcagcctcccgagtagctgggattacaggcgcccgccaccacacccggct

SEQ ID NO: 86737 - DNA, 1210 bp, Homo sapiens
gttgaatacttcattgattcatttagttgcctttcatagaattttactccaataacaaaaagatctggggtttttctaaaattttcttcaggtcttgagagtttttagctgaattgctacaactattctttctctagatttccaactgggcgaaaatgtttttctttttaaattggcactctcccagcatatttttccagcaagtattctttgggcacaccctgtgcgtagtgaatttttcaagatccttattcaaaaggctgggaggacaggccagtcttttctttgtaagatgaaaacagaatgaagcttgcttaagactcattttgcttctgcccaactgtatatgaaattgatctcatgcaaatacactcaagcattaccagaagtaatttgacttgatagtgtaagtagaaaagctaatttagtatttgcaggcggtttgcttagtgcaacaggtgacctctcaattgagaattcttaatttgttctcaatgataacttgatagtaagcaggtctcaggtccaagagttgagaaatgtgaggtgactttgaaattttcaaggtaattgtacattcaagacattgacatgatatgtatatatttggttttacattttattaggtgctgaggttgtcatttccataatgtccaaagcaatgttagattatttaagcttccatggtttactgatggtattactagatgagataaatgcctttaatttcatccttgaatggtaagattggctgactaatttagggaaggataaggtacagaattgctcttgggtgtttcctagcaggctggccttccaagagcaatagcttaatgtttgttcctttaataagtagtacttaaacagtgatcaggggagttaccataattggtaatctgaatggaaactaaaatgtgtcatcattgaggatagtcagaagtgtccttgtggcagtcctagaaaaggggttccagaattttccgagcagagaaaaatataaacattttcaaggttctaattatttggagactagcctttcaggatcatttatcaccaagattaaccttgccaccaaagggcaaggaaacacttctctggtggttagatcaggaatgatgaaaacacttaagaagaattgaaaacttggttcctgtcttcaatgagtaatttatgtgactgatttttttttttttttttggagatagagtct

SEQ ID NO: 86738 - DNA, 1092 bp, Homo sapiens
ggcacatagctttgctgtttgctgtaactcctttagacagctctctgaccacacagtacgtgggtggacaccagcattgaccaggagggatggtgggaagtttaaatagttttcctttactgtaataaacactctagagaagtgaactattaaaggtttttccccatcaaatggctaaattaaacatttttgacattcgaaagggatgatttatatcttatgtggaaaagccccaaacaactatttccccagttgctggaaaaggagctcttttgagttatgaaggtattttatgttctttctccattattcttaacttgtgcttacaggtgaattgtaagcatgtgctttgtgtttagtattttcctcaagaaaactcttgctggtaaatctagttaccatagaacttgaaaggatattgaaagaatagttgaggactatcctgattggttttcatctacttagtctgtatttgtgtcatttcagtgtctgagtaggtggtttgtgattaacatttcacatgttatttttattgatttggcaagtaccagaaaacttgaaggatgaactagaggttatttttcttagcatttgtggtattagtactaaaaggggagtaagagagtagaaagaattctggacaactgttaagaattgttacattttgtctacctaggctcgagttcctcacttttaaaattaggactgtactttttggaagaatattgcttgttgttttgtggtgggaccaggctgtgatgggaaaggctgttgtcataggcataggcaggccttttgctttgctgaggtatagtgagcagcccggtgaccctccatgtagcctgcattgcatgcagtttccacagggtccatagagttagtgcaaagctccagcaggcctactcacctgcttttctcatgaggcaacctgggaccagtgtgtccctgtagtaactgtaattttttgttgtgttcacttattgcagtgaaaaaaaaatctgagcgtaaggttctgagtggacctggaaaggggtgggtgttgtagtgagagactgaagacaaaggcctgtaacagatgggtatctttttagc

SEQ ID NO: 86739 - DNA, 1336 bp, Homo sapiens
tcatttcataaagtggtgggttgggaggaacatcagccaggatacccaagtcttctcagctaaacccttcttctgctaaaaactagctataggactaatgtaaccatttttctaattaaagtgagggagctgaccctacgtgacctttaggtctcaaactactttgaaatgtgactgtttatctttaaataacatgaatgaaactattctcatcaccatttttttgcattgggggaagctgaggcaaagaacccagcaaagcactggtataagttgaaacaaaacaggtttcttgacttgtgacttaaagctttggttcttctaatgccttcattcatttctttggttgatttacttttcatagtccattaaagtgattatcttatttcttgatgtatgggatagaaatgtgggaataatttcattgtattcttacagaatttacttcagagctgagtaaactttcatttgttgaacacctttgatttaatgccccttggcttttctcctaatctgcacatgacgtcaagtggcagaagtaggaacttgtgtttttttcttctattctcttctcatttttttcctgagaagaaacgtaggtagtgaaaatcattcttagtgcttgttgtgggattctgaagaaaggaacttaggcatcaggaatttgggtgttacccatttaccgtagatatagttgctatagtgttttctgccaccttgtgattgttgtttttgttctctgaagtgaacgtactcttttatggtagtgttaaagtcatataataagtacttatggagtaagtaaatgtgtaagacacaagagataacagatgaataagctaagtttgtatcctcaagaagtttaaagagtgaagggagtgaagaacttagtaagacaaagatgaatgtttagaacagtgcctggcacttagtgatgttagaaatgaaccttgaaggttggcaaagattttgatagacagttttcttttgattgtgacctactgagaggtcagtataggcagaaagcacagggcacacagagaagacaagttgaaaggtatagggctttggtggcaccatgggaatgggatatgttgaagacatagtattataggtacagatggtaaatgtaatgtgagaagaaaaagagataattccagaaatgatgtagaggtaaattgaatgggacttaataactgtgatgtgtgggggcaatgacgggagggatcatcataggtgattgaagttttaagcctggctgactacagcaatagatggttaccagaagcatttcagtactcagtttgcaaaataatcttaagagctcatgagagtc

SEQ ID NO: 86740 - DNA, 1029 bp, Homo sapiens
tataaacttctatatagtaactacttgttaaaataatattttttttccagaaattctcttaattgtgctcttaaatcagcagtgttctgggtacctggaccacattatgtaggtctctctctcctaagtttttttttttttcctttctttttttctctctgtccccgaaattttttttttcttttttttctcccaaccgttactctaggcttatcttgaagttcagtataaaaataacctcataaaacatttcattgtgattactgaaatattgttgaggatattctctgtattctgcaatgccttctttataaagacctcagggagaaagatgtgcagccaagaataattgtatgtttgtctaagcttttagtctgtttttattacctgggtgctgtaattgttcactaggtttcttttttcctattgacatctggaaatttagagctaagcttgtacctttttaatagcttcattttgtttccctattttcatgtttttatttctggttgaatttatgctaacctgtgttttgtctaatagtctcctgaagtctgtttcagatcagggttgggtaaaaatagactatggatgcagttcagtgacactaaagcgcttatttgaattttggatggtcttgattgcagtgagttttctcaccctcaggaattttttttttttttggagaccgaatgttgctcttgttgcccaggctggagtgcagtggcgcgatcttggctcactgcaacctctggctcccgggttcaagtgattctgctgcctcagccttctgagtagctggaattacaggtgcctgtcaccacgcccggctaatttttgtacttttagtagaggcagggttttgccatgttgctcaggctggtctcgaactcctgacctcaggtgatctacccgccttggcctcccacagtgctgggattacaggtgtaagtcactgtgcccagccctttttttttttttttgagacagagtctcactctgtcgcccaggctagagttacagtggcat

SEQ ID NO: 86741 - DNA, 3629 bp, Homo sapiens
agaccacactttaaagaacaactggcttagttctttacgtatgtttcctttggctcccagaccacatagatcaagggggatcaaacagaggcaaatgactgagatttttagcttggttactaaataaaagcagtgtcattacttaaggtaatgaaacaggatgcggaatagtgtgctggaaggagaaagtgaattctgagcttcagggggcttgaggaacatagaggttataggaatcttgattagtgcagctcagaagtttttcttatggttaagaaacctcaccatactagtggttgttgagagagaagagggcagaagggaccttgtgcagcaccagcatttaagggtccaggaggaagagaagaggatgatagtacaaggacatcaggaaagaattagaagaaggtcggtattgtccagtgcttcagagaagtcagatagaatggggactgaggtttgaccattggatttgataataagattactggtcacctttgccagagcagtagggggtgaaatccagattatggaagagtgaagagtgcagagacagttatttatactattcttagagaagttttggggtaaagggaaagagagatatttgggcaattaagtatgagagagaggctgtactgagggcagaagatacttgagtaaattcctaggctgagaggaagaagccagtagagaagatattgatgaccactttgatctgaaagaaaagaaaactgatgaaacaagttggtattacagatgtggtacagttagctttgtagtataatctatacttctagagaagtgagaagctgatgaaaactggattccctggccagaaaaatgcacagacctgtgatatttggcatactttttttagtgaacacgggaattccttactaatttttttctgtttaattattgcttagtttgatgtgtcttgctttaaatccatttatttcaacaagcttaaagagatttttttttaatggagatgatttaattttaacaatctgtgattttctctgaatcgaacttgtgttttggcacctttcaatctgtggtaacaaatgacaagaagggtgcaattcttccttcccttgtgcagggattttgcctccccctttctcccagatgaaagatatttgggtctctagaataactgtggtacagttagctccagagtgttttctttctggaggcagtttagacaacagcctcaagtagtgcttttgttaaaaatatacatgtttttaaaagtgcttgtatttctaatattcttttctcctttctcttctagtctgttctctggggaggcagtaaggggccgtggagctggcctcggcctcggcatcgggagaggctggacttcctgtctctctgtgctgaatggctgcgatggcgcccgctctcactgacgcagcagctgaagcacaccatatccggttcaaactggctcccccatcctctaccttgtcccctggcagtgccgaaaataacggcaacgccaacatccttattgctgccaacggaaccaaaagaaaagccattgctgcagaggatcccagcctagatttccgaaataatcctaccaaggaagacttgggaaagctgcaaccactggtggcatcttatctctgctctgatgtaacatctgttccctcaaaggagtctttgaagttgcaaggggtcttcagcaagcagacagtccttaaatctcatcctctcttatctcagtcctatgaactccgagctgagctgttggggagacagccagttttggagttttccttagaaaatcttagaaccatgaatacgagtggtcagacagctctgccacaagcacctgtaaatgggttggctaagaaattgactaaaagttcaacacattctgatcatgacaattccacttccctcaatgggggaaaacgggctctcacttcatctgctcttcatgggggtgaaatgggaggatctgaatctggggacttgaaggggggtatgaccaattgcactcttccacatagaagccttgatgtagaacacacaactttgtatagcaataatagcactgcaaacaaatcctctgtcaattccatggaacagccggcacttcaaggaagcagtagattatcacctggtacagactccagctctaacttggggggtgtcaaattggagggtaaaaagtctcccctgtcttccattcttttcagtgctttagattctgacacaaggataacagctttactgcggcgacaggctgacattgagagccgtgcccgcagattacaaaagcgcttacaggttgtgcaagccaagcaggttgagaggcatatacaacatcagctgggtggatttttggagaagactttgagcaaactgccaaacttggaatccttgagaccacggagccagttgatgctgactcgaaaggctgaagctgccttgagaaaagctgccagtgagaccaccacttcagagggacttagcaactttctgaaaagcaattcaatttcagaagaattggagagatttacagctagtggcatagccaacttgaggtgcagtgaacaggcatttgattcagatgtcactgacagtagttcaggaggggagtctgatattgaagaggaagaactgaccagagctgatcccgagcagcgtcatgtacccctgtgagtagacctcatgcatgatagcattcttgagaaatgttggcacaaggaagaatgaatgaatcgccattatggagagaatgtgattctttgtacataggtgtctaggttctgtttgttttttccctgatgttgggtagatgagtgcatatacatgctagtgaagaaggggaagatacttttgctgtagggttgtattgttgtagtctaaatggtggtaatttccttttgaagtctaagaaaaataactaggagacatcttatgtgtaaaattgtactagtacctctttaagagtgaatttagatttcttttgaaactatatataggacatgataagttaatggcctgattgttgagattttgttgtttccagtaagcagggacaaatgctgagttgacctagttacctttgtaggaaattacagttgcttttgattgaactttcagcagagagcacacccagtcttcaattttaacacttgagattttcttacattttaaggactgacaattagaaaatgcttcagaatatttaatacatcgcctccaagcacagtctagtttcacaacctgactctcttcctattaaaaaaaaaaaaaagcccattttaagcagatttgttaagctgagttaaatgtattgatgtatttggaataaattcttactgggttgttttttttgttgttttttgttttgttttgttttgagacagttccgctctgtcgcccaggctggagtgcaggagtgcagtagtgcgatctcagctcactgaagcctctggctcctgggttcaggtgattctcgggcctcagcctccctaagtagctgggattacaggtacccgccaccaagtcaggctaatttttttcttttttcttttcttaagtagagactgagtttcaccgtgtcgaccaggctggcctcaaactcctgacctcgtgatccgccc

SEQ ID NO: 86742 - DNA, 1021 bp, Homo sapiens
tatctagcccaaccttttatagctaaatgaccttgaataggtagccttttcttttatctgtacaagcttactgcagaatctcaatttgtgtgagtgacagcaggtgtagcagctccatctgtatttgtcagattatagtttactaactgaatgaactaaaaattgggatatttggggcttgaatttttattctgaatgtacagtctgactttatccccaccggtaaattagaaattataatctcagccctaattctactgcccaggttgttatgaggattaatcagttaattatagcttttaaggctttgtattctttggagaaagatgatttatcagataggctgttgtgctgtttgtgtagaactgcttcctttttttgtttttcgtttttttttcctttagccctgagcttctctaagaactgcttaaatttgacagtctttccctgctttacattgtcaaagattgaagctttttgaattttgtaggggtcaagtgggataggaatcattgttttgctctgtatattaaatttaagaatgttactatgggccgggcgtggtggctcatgcctgtaatcccagcactttgggaggccaaggtgggcagatcacgaggtcaggagatggagaccatcctggctaacatggtgaaaccctgtctctactaaaaatacaaaaaactagctgggcgtggtggcggacgcctgtagttccagctactggggaggctgaggcaggagaatggcgtgaacccgggaggtggagcttgcagtgagcttagatcacgccactgctctccagcctgggtgacagagcgagactccatctcttaaaaaaaaaaaaagaatgttactgtgattttgttttacttagttattggctctttaagaatttccattgttttctttttgtttctctccattttattatagaagtaatacatgtttatggtggagactttacataagccaagaaacaaaagacaaaagaatcttaaccaatgactttttaaagcaa

SEQ ID NO: 86743 - DNA, 1028 bp, Homo sapiens
aggcatgagtcactgcgcccggcccaaattgttcatttcttttaaccttcagaatgtcgccttttcccacacagcgttgccttttcttatgccatttcctctcactagaatgccacattaccattctcttgtcctagccttttgcataatgacattttagctaattttcaagtctcagctaaaattgcggcaacttcatggacacttccctaatcatccttcctgctgtttctttccgtcctttgtgtagagaaatgaggtaatggtgaaggaagaggttagtagaagccacattatgggcaaacttttcttccccatctgatttttgcttttgctttcagtgcaagtgtggttgtaatacttgttggccacctggatgacctattccttcccctttgttctctgcagctaaatatttttgcaaggtggatgcttccaggttattcttgtgtatctggagtcttgtcttggaaattgactgggaataaatgaggttttcatttgtgggtgtggagttagttctgacttacagtatttgaagcagctggatacgttttgcttttgaaagagtatatatatgtgtgtgtataatctttaggatatggttctctgttgggaggtgtgatgttgaaccccccagctcccatatttgacatgtctggagacatttttgattgtcataattttcagaagggcactactagcatctagtgggtggaaaacagagatgttgctaaacatgctactgccaggatagccccctgtgatagattactcatcgtgagatgtcagttagtggttaggttgagaaactctatcctagaagtatatttttgcttcccaagtgccacttgtgttaggtagaagtttgtccttggaccgatggtgcaatttagaataatagaattaacataggaagggaccctagaggtcacatatttgaactttatcccaacttgtatttctcacaatgatgtttctgcttgatattaatagatgtaatggaaaaaggtgcttgttaaaaaagt

SEQ ID NO: 86744 - DNA, 2029 bp, Homo sapiens
cttccccattgtattccacaacaaatctacttttgttcatatgtaaaataaatactttgcagtgcattccataatgtagcttgcagtacttcatcacaaatcactgttcttttcctctctttctcttgagaagctgtacatataccacctgattcatgcaagttgttttgtggatcatgccccacgtctttcccattattttgattgtgtcaattttttgattcgtgtttcctcctttttctcttcttagtaaaatcttacacttgagggcaacccccacgaggcctttttgacttctctagtccagtcatttagggcttacagcacttactatgtaccaagctctcgataaagttagcacgctaaagaagggtgctgttaaggaattttgcttgtcttggaaatagaattagttaacaattagggaaaattcagataatttgaactgaatgacagtgactttaagtgcattatacaattcaagcaggaagaaagtgatatgaattggaagagtctaagaagtttttgtggagatgctatgtattgaaaaattagtaagtttggggacaaaaaaaaaaagtagaagaaggaccttccaggtagaggtagcaacataggcaaagatacggagttgggaatctgtggggagttctgggtccgtatcaattgatgtgcttgccctgacgttaagtttcatcttgaagaatttgaactcattaaaaaggtgtgaggggctgggtgtggtggctcatgcctgtaattccagcactttgggaggccgaggcgggtcgatcacctgaggtcaggagttcgaaaccagcctggccaacgtggtgaaaccccatctctactaaaattacaaaaaaattagctggctgtggtggcaggcaccggtaatcccagctgctcgggaggttgtggtaggagaatcgtttgaacctgggaggcggaggttgcagtgagcggagatcgcgccatcgcactccagcctgggggacaagagcgagactttgtctcaaaaaaaaaaaaagtgtgaggaacttgttcagagtaggaaagtgagatgataaaaaggtaaaggatagtttggggcactgaggcactagtcaggaagctgttgtgataatctagacaggagctgatgaggacctgggctagactgatagtgttagaagtatagagaggacataccaaacctgaaaagcttcgtgagaaaagaaggatttcgtcacaaaggagatgaaattatgaaggaaaagagagctttctttccattctttataagccatcatgtttttgtttgtcatatatttggcctttttgttagactggccccttcacatttctggatttaagctttggtagagactttgactattattttctggttgaagttctcattgcatcctatctggattattgtggtagcttttttattggtctttgccatctatagatgcctttttacttactttcaatccatcctacccaactgatctctctaaagcacagtctgatgtttcactcccatttaaaaagtgtttaatgatactctgctgtcattattttatatatacatatacatatatatgtgtgtgtatatatatatgtatatactttttatttttcagagactcgatctcgctatgttgaccaggctggtctcaaactcctggcctcaagcaatccttttgccttggcctcccagagtgctgggattacatgtctgagccgctgcacctggcctctgctgtctttgtttgtttgtttttgtttttgagacagagcctctctttgtcgccctggctgaaatgcagtggctcaatcttagctcattgcagcctctgcctcctgggttcaagtgattctcatgcctcagcctccctagtagctgggactacaggcacctgccatcatgcccggctaaattttttatttttatttttattatttatttctttttttgagatggagtctcacttttgtcacccaggctggagtgcaatggtgcgatctcggctcactgcaa

SEQ ID NO: 86745 - DNA, 1877 bp, Homo sapiens
ttaacattttattggcattggaaaaatgtacttttaaaagtcattaattgacttttctctaaaggtataaggtaggtttcagtgggaactcaggaatttggccatggaccctcccagaataacctgtttcctttagaattctttttttttttttttgagacacagtctcgctctgtgccccaggctggaggtgcagtggcgggatctcagctcactgcaagctctgcctcctgggttcatgccattctcctgcctcagcctcccgagtagctggaactacaggtgcccgccatcatgctcagctaatttttttttttttttgcattttagtagagacggggtttcactgtgttagccaggatggtctcgatctcctgaccttgtgatccacccgtctcggcctcccaaagtgctggtattacaggcatgagccaccgcgcccggcctcctttagaattcttaaaatcttccagaagtcgctgattttaggattgttcaggagcacttacaccaaccattagggcttgttggaaagagatatgataaaaagtatgatttttttttcctctgtcttttgtcagctaaagagtggtaggaaatttgaattcagtgctagcatagaagtaggattaacaccattaatagtttgatatatagacatccttcagaaaaaaaagttttcttgagatggtatcttgctatgttgtctaggctggtcttgaattcctgggctcaagcagtcctcccaccttgacttctagagtagctggtattacaggcatgagccatggggcctagcctatccgtgtgtgtgtgtgtgtgtgtgtgtgtgtgtgtgtgtgtgtgtatatatgtgtgtgtatatatatgtgtatatatatatgtttaatgggatcatacttgttatatggcttgatctttttaattagggttttttttttgtattccagttcttcagtgaaagcattgtgtatacatctttgagtacctatgagaatatttctgttgaatagatttctagaagtgcagttgctgggtaaaagtttgagcaattacatttgtgattttgatggctattacctttataatgctgtgtaaccacatttaataatagcttaaaaagtgtagttaaaaagtttcctagtctgggtacaggtgcttggtcaagtaaataactggaacttgtagtgggtgaagcctatcctaggttcagttgatgcctcttcttgttaggtggttgatcacttcagacatccccattaacgtcctaatggatcttcatctgatgggtttagcatagaatgctcaggttgcttaacgtgtgttggtctgctgtctgccaggcattgtgctgcttgtaggggacagagataaaacaagctataaccctccttttttaagaagtacatagttggccaggcgtggcggctcatgcctgtaatctcagcactttgggaggccgaggctggcgaatcacgaggtcaggccaggccaacatggtggaaccctgtctctactaaaaaagacaaaaaattagctagatgtggtggcgggtgcctgtaatcccagctactcaggaggctgaggcaggagaaacgcttgaactcaggaggtggaggttgcagtgagccaatattgtgccgctgcactccagcccgggtgacaatgagaggctctgtttcaaaaaaaaaaaaaaaaaaaagtacatactctggggaagaaagagacaagacaaaattgtgagtttatattgtaccatgagcaatagccagggtgtcatgggggtgcaggtaagagcctagagggagggaccccacctcaacctgggagtaatggggaatacttgaaagagcatgtaaccttgagctgaaccgtga

SEQ ID NO: 86746 - DNA, 1076 bp, Homo sapiens
caaaaagagctgcaatatatatttttttttattaagcattttcttgtctttggtagaataaaggtaaagctaaaatagagtgcggaaactgacttgaccaaagtagaaaacacagctcatgtttatgaatcaaaaacaaatgagtttgggcagtctgaaagaaaaaaatcaaacattttatatgaagattttaaacctttatgcaaagagtccctttaaggtggaagagaccttttaaatagagtagaccttccccatttagtagcacaatgcggcaaaatagttgtttaataaatgttactttctgcaagccttgcttttccaagattttaagctgcttccacagtgttaacatttgaaagccctctaccaggaaattatttagctgtgtattttattgttgctgactgtgaacttacccttttttttcctggctgtaatttttttagaattaaagtttctttccaagattttgagggtcaggaaatgcaaagtggaggtagattgagtgcagttttatctaaatgttattttaaaaactctggttcttgtaacctgaaccaggaatccaaaatgagatcttactctgaattttaattacagcagattctgctcttatttggaaaaagttgcttgagtgacatcaaacttaatggagtccctcaccttttaattcctttttaaaaaggggagagcttaaggttagacttggttaaattcagttggaaggtaagtattagggaataaaaaagaggaataacaattttgttgttaggatgttaaaccaaaaattgctaagaactcatatctagactttcctcttgctgcttgttatttggcctttgtgactgtttgttagcacctccaccagagggtgtgaagggaaagaggctcaaagctaagtactgtagctagtttctggtttctagtataggagagacacttcatagaaataccagcctgggctgggtgtggtggctcatgcctgtaatcccagcaccttgggaggccgaggcggatcacctgaggtcaggagtttgagaccagcctggcttaacatggtgaaaccctgtctc

SEQ ID NO: 86747 - DNA, 2518 bp, Homo sapiens
cgtcggggggaggagagcggcgggcccgggccggagccgccgtcgcgcgcccccgcccgccgctggccctcggcgcccaggccggggggctgtttgcaaactgcgcccattttgtggggctgaatccgcccgggctacgctcctccatcacgtggtaggtgctgctgctgctcctctcctcctcctcctgctgccctttctccttctcctcgctctccctgtggctcccatttctctctctctttgttagttgtaactagaaaggcagggcagggtagaaaaatcccccggaactttaaatggcctctccgggcttccctgctgcgggtccgggctgggagtcgccccaagggcgggggtgtgcgggggcccttccccaggagctgccgcctcgttcgccagcttttcctttggcgttctatttaaaaaggcggcctgaagaacatgatttattcccgtaaaagaaccccccaaacaaactctggctctcgccttgaacttctcttgactgcaaaaggcctttctctgctcgaaacacacatcttggcgcgttgcacggtttgtatcacaactctgattgtttcatttattatttttgttgcctgtaaattcaggtcacttacgttttcagatgtagtctccctcaggcggactttttttttttttaaactaaagaggaagagggatttatttgcttttaagtgagttggaatcttaactgcctttttgggggcctgttttccggctgacggtcttttgattcttagcaaatagtttgttttccatacgataaacagcgctactcccgtgtcttacttaaaaatcctcgttttccaatgttggaatcccaatgtggatttatagagaaacgtgctacttaactattgcttactgattgctttaggggagaaggggtgacatgatggcgccactttaaattgctctctttccttttcctcggtcccccccacccccctttatcctggaggtcactggagcattttctgtgacttattaataaaactgtacttgagggtgttagaagcacaactcgtaggggctggagtttagtgctcctagggtcggcagaccgactgccgcggtccccaaagttccgagaaatctctcttcctccagcctcgcctccctcccctccattcacaatcctggtgttgccatctcctttgtcacgtggctagcaatcattgtgtttttttgtttgttttggggtgtgtgtttatatttttaaattgcagctcagaggaacctttccttttcgctttggagagatcaaaacgttttacttgttttagttttagagtcggagaacattttaaaataaacgataaaattacataatctttgccttgcataatcatgatatagttatagattgctactgaacttcattttgaaagtcctttcaagtatggaaactagtacgttagaatatgttttccatttgtcaggatggtctgtaatttctgttttctctgctttttgggtcagttaaaggaccactatttacaaaggcttaagtgggtgtgttttccctttcccctttcctataggctctacttggttccttttctagcatgctgtctgaccaatttagaaaatttcaattgtctacaggcgttgtcagttaaaactatttttttaacctatcaacagtgaatacttttgagtagtaattgttttgtgcctaatgctaagtgtatttattagcatttcggtgttgatctagaaaatttttacttttaatcctgtagttttagaagtatgttattcctttatctgtttctttatatcagtttttcccataattgggtaaactcctattttataaaatacgaagtacatttctggttttttctacataggttactagacattttttcaatttgaaaaaacattttgaattaagaaactttttttttaaagtaaatacgaaatgtggttcttgagtatgcattgatcctgatttaccatgtacattgtcaatggtttggaccattttctttgctaacagttacatcatgtcatgtgatatgtgcagtgtgatgtgtagttctaaaaataaggcaaggtaaaaatgctcatcccttgggaatttaaaaaatgtattataaatgtggaataactaccttcagtcatgaaattctgaattggatttccactaggtttatgcaacaaagtgtgccgttccttcgacctttagcatatttggtgtatttgttagtacctcataatttgaggtgattgactttttattttttgaactacttggagggaaacattaaatgttacaaaggttcttaatgtctatattatggtgaagatggttgtcactgatggccacctcatttgagtatataccagtgtctgtgattgtgaccagttaaaagaatgatcagttaagaattattagagcctttatggtagggtgggattttcggtctttccatctatatgagtccactgaagtgaagtattttagaagttttcttgcatcttt

SEQ ID NO: 86748 - DNA, 1764 bp, Homo sapiens
gctactcaagaggctgaggtaggatcgcctgagcctgggaggctgcagtgagtttgattgcaccactgcactctagcctgggcaaccgagcaggaccctgtcaaaaaaataaaagtacaagtggatgcctaataagaaagatgtctgattttagataagaatatacaacaggttgactgatttaagtgccataaaccctgtgaactcttgactcttgcactaagcaatgagagaaaggggaaactggaatttatagttcccccaaatacatggttttaaaaatgagcattttccagttttctcctaatccattagaaaaatatatttcatataatcttgcttatttggttgcctaattaaatctgacagttcagtcttaaaaatttggagcagcagtaagattattttgttatggtgtgtctgaatttaatatttaagtatacgctgcaaagggctttgccttatttggtatttttcattctgctaatttagatttcaggagcctcagattggggctctagttcgccatctgttggtccaatacccttctactgtattttgtggaattactatttatgtgtgtatgtgtgtacaataaaaaagtcaaagtttttccccagggttgtaaattaaaaatccaagactaaagacctcttttggatgtgtatacaaatattagtttattctttgtgtaatttgaccctatgactccaaactgcctgcctttggtatttgagaactatgactatgcttgagagtgtgattttaggagtacaaatggaaattcgcagaaacctaggtgcagatgttgcaggggcaggtgagttagtgtaactttgtgggaagactaaaaccgttctgtaacgactgtgagggtgttttttgataagcagaagtgacgtataatgccggatattggttctggtaagccacaaaaaagtgtgaagcattttgcgtcttcctttttggtagtagagcatacatacccttcttatctgccgaatttgatgatttaatgatttgaacgattttttcttcagtcatttaagccagttttgatgaatcctagattagtcttttaaatctcaagatactccactcatcttttggcaactttaaagggtggtagaattacactttgtgtgacactttgtattacattatgtttatgaattctttaagtctaggaaaggttccattattttaaaggtcctattttggggacaatataaagttctgtactgataaactggtcatgagaaatgataaggtgccaccactttaaaccaactctggtaacgaggtgggaagttggctttttgttgtgagacttgtgtttctttatggagttctttgttaaacttttagcatggcagtgaacttccttttggtggcggcaggaagcataaatactcattgtgtaatgccatttgcctgttttggcggatctgccaagccatgacacccaaaacaagacgcgtgtttcttcacgaaaactacagttcccagcgggcccggcgccggcggggccatcacttcccctctggctcccggctgtcccttcccgggctggcccggcgcgggccctggctggggcctgcgcagtgactacgtgcaccctccccaccccgcccaactctggtggctgcggagcgcggtgctggggctagtgcccagccgtgctgcagtatacggaggctggctgctagggacaaagggcgggcggcggaagccgcttcactggtcagggagctttctgcaggg

SEQ ID NO: 86749 - DNA, 1005 bp, Homo sapiens
tctgtgctgaaggatttctttctttttttttgagacggagtctgctctgtcgttcaggctggagtgcagtggcgcgatctcagctcactgacactgcaacctctacctcccgctgggttcaagcaattctcctgcttcagcctcccgagtagctgggactacaggcgcatgccaccacgcctggctaattttttgtattttagtagagacgggttttcaccatgttgcccaggctggtctcgaactcctgagttctagcaaaccactggcctcggcctcccaaagtgctagtattagagatgtgagccaccacgtctggcctgaaggacttcttataccaaagaagatacagtttcatttaactattttattttattttttctgatgctggttaaagttggttcatttgggacacatttcattagataaaattgtgtttaaatgtgatagtgagaatttggaatatggtggaaaatattgaatattatattctataatttttgtcagtctaattcagaaacaaaaaagattgcagttgagaaaatcatacatgatttctttgtaaatgagttacagagataagacaggacctttagcatttcctgaattccagtcatgttctcggtaacttatggtctcttttataatattgtacccatgacaatttatacgttagatttcaggttttatcttctgcctggaaggattacattcaggggttttagccatgcatatttatctataaatggtctaaaccagtacctctttatctttccttaaagtacttttcagggtctagggctgtttggagctgtttgttacaagcaggacatatctctctgaggactccttttctatcttgaaacagtgagaattctgccttttgctctgtatacattgaatatcccttatccgaaatgcttgggaccagaagttttttggatttcagatttttcagattttgggatgtttgcatgtacataatgtactatcttggagatggga

SEQ ID NO: 86750 - DNA, 1023 bp, Homo sapiens
agctaatttttgtatttttagtagagacagggtgtcaccatgttggtcaggctggttgcgaactcctgacctcaggtgatccacccccctcagcctcccaaagtgctggcattacaggcgtgagccaccatacccggccatcactgcttgctcttgatggcacttagtaaatgagtgttaaagactgtattgctggacttgggacatgcatctttaggagggtatcagtggaaaagctgagagtcacatgcatttgccagtcttggccttactctttggatctattggtcccagtctgataagtgcaagcaactttggaataaggattgccaagaattaagatttttaatactctttctttgaatgctaaagggcaaaagtgtttttgttgtttttgcttttggaaaaagagaactagtttgctgaccacccagtgtcatttggtaatttagagtgttttcacatagttaaagtatagggaaatgaatatttaggtctgtgatgtttatatgtgccaggtagtatatttggcagggaattgatttttagaattgtttgtgacattagttcttgcatattagtttttttttttttaaatggagtctcactctgttgcccaggctggagtgcagtggcgcagtctcggctcactgcaacctccacctcctgggttcaagcaatcctcgttcctcagcctcctgagtatctcggactacaggcacgtgccaccacacccggctgattgttatatttttagtagagacagggtttcaccatgttggccaggctggtcttgaactcctgacctcaggtgatccacccacctcggcctccacaaagtactgggattacaggtgtgagccactgcaccccgcctagttcctgcacattagaaaacgtttgggccgggcacggtggctcacgcctgtaatcccagcactttgggaggccgaggcgggcccatcatgaggtcaggagatcaagaccatcctggctaacatggtgaaaccccgtctctactaa

SEQ ID NO: 86751 - DNA, 2406 bp, Homo sapiens
ctccattttaagcgaagcagtaactggttaagctggaattgtatacaggcccaggacttgaacgaggatcctaccagaggtcatttagtccatcctcctgcctccaggcaaatttaccttcctcccaccctcaaaattaagttgctcggtctgcttttaacgatctctggggaagaagggtcttttatttgtttctagtacttcagtcaagaataggttttacttttcatgtggaattgactctgaaacttaagcataatcttgggacagtcgggatgattagagaagttttactttactaaatataattaaatgtggcaagggtctttctttagacggttagttaacaaatcacgtttagtgtttatgaagtaccctggaaaattactttattctctctgggattttggctaattgtttgataagcaattttacattatctaaaatacgtgttacatatttatttctctttttatgtaaagtatgtttctacacacatatatatggagacacacatttgcccttttctaaaggggactgtattttctatacttttttagtgcgatgaggcaaatagtacttcaaaatccctgcccaggtagcttaaactatttgcattgtcttgattattttttagtctaaatgaaaatcctctctttcagataccttctcgaaacaaaagattttcctacctgcttatacttggtaaccgagggaattactaagacttcttgctcatttctgagtattgtctttatatcctgacactatgaatgctacttggatgcctcttaaggtaagatgtgttattttttcattaccagcctcattttattcatttttctttagaattgggaatattgtagtttttgaatttgctattcttcacttcctttacctgccatttctcttgcctcttgtgtttgcttcctaggattgattggctatattttactttgtatctctactgttctttgattatcggtgtgaatgttttaatgaagttctcaaattaacttccattataatgaaaggcagtgatctttttaactttaaattatggcaacttacatagttgtaaaattatgttccggtcttaggatgggttggcaattcaaacatctaggtccacttttcaaacaggtactttagagtcataggtactagggtgtgtcccactcttgcaaatcagtagctgattcatgtgttacaaaagatgtgtcattaaccatttgtttactctgaaacttcatatagtatattagggcattctaagacctgctggtttacacgtatgactctttcagagtcctcctgctgcaccccagtcctttgtgtgacatttcatactatttttctcagcaggtagcacttacaccaagttttatttcacagggtaaacctcatttggacagtgtggacagatgacctttagatgaaaaagctcccattgatgtggttctccagtctctttggctcctctaatctcttgtacatagatggccaaagaactctccattaggactaagcaaagggcagagcttaagacttaagtaggtggcttctttgattttcttgtgactaaaaatacattaaaaaaaaaattaaataaaaacaaacagaaaagacgtaaggaggggatgggaggaaggacagagaaggataaggagtcttggaaaccctccaccagcttcgcctttcttcagagtaggatactagcttagttaagattgttgggtgctaatctgctctgtggacttccagattgatgcagaggagaaatcagacaatagtgcagtgtgtgtaacctaaatatctggacttgtgggaaatcttaggtcatgtaggctgagttctcatcttcatttatgtttcagctgctattgctggataagagtgcttatattaatatacaggaagccaaagtgacacagtttttccagcattctccctgtagagttggaggggttgcatggggaatgcaaccagaagttctgaacccgttaagaatcagaggacctgtgtaagagtgtttcgacttagcaagtgttgagcaccagtgttggtggcctctgtcctctttaggaagcaggcaaggggattgagatcaatacattggatttcattttatagtttcctaggttttaacgaatgtatttggtacacaaagccctacttttaaagatatttccagtgtttaaggttttacctctaaatctctctgaacctgggttgtaatacagtaacctcagaagttctactagaggtctctggcatggcaggaatagagaaaggaaatcagctccatatcgtgagttaccacctgttactacttaagaatgcagttaggtggttgccttaatattatgttccttaccaatcctttgctcagtgggaaacatcttc

SEQ ID NO: 86752 - DNA, 1404 bp, Homo sapiens
gggtcgcggtcgccgaagccccctctgacgggctctgggggtctttccgcacccccttgcgagggcttattagggggcgccggagtaactgccgggagcacctctgctgcattcggggcaaggggtgtaggaaggatcttcaggaacccatgtctggctcttcacaaattaaaggtcgttgggaaagaggagggggtgccaatgacttttagtgttaaagcccggccatctgggggacctgtcaactgtcgggtcaggcaggaattggctttagcttggagtgaggatggatttggggtgtcacgttttgtttttatggatgacactcgcttcgaatgcagcaggatatgctgtagtttcagggttttaaatttacttcctcctttagcctttaggatcgttgggtaggatgggtttggcgaggagagagagctggttgagtgctgtattgcagtctgccttgagctaaaagctctcaagggatgagtcctgcccggagattacactggtcataaacctgaggacattaactgcgtcattgggggtgaaagatgtgattgactgatctatttataacagaatttttgaataagtttgcatagatttatgcatatatgcaaatgccctatctgaagggacttgtaggtcatgagattctagagtaagaagggatcttaaaggtcatttagtttggcttctttctcttccttttccccatggcctctccttttaaggctagtccttctgccagtacttcagaccctatctgtatattcacctgctccttcttaacataatcaagcttctctatcttaaacccttcccccacccccacagctgtcaccttttcccgtcccagtttacagcaggaaatttgatagagttgtctatatttattgtcttccatttgcttaccacctactcacccttcaacctactgcagtctgatttctgccccatcatcccactgaaacctgtccctcaacttaattgatacctttcaatccttatcttatttgatatctcagcagcgtttgacgttgttgaccatggcttccttgacggaaagcactcttcacatgtgttctggaatgcctcgctcctggtttgactcagacctctcttttgcggcctcaccctcctctactttgttattcattgctggtattcctcaaaggccgtcttctcactctcaatttcccgctcaggcaatttcttctaagcccatagctacaactgtctatatgccagtgattctcaatattttacccccagtccagacctgccctttaagtttcaggttaatatgtccaactgcttatttaaaatcaaggtcccgaaacgcagctttttcaactccgaacccaggatcttagcccacctaacttgtgtagatactcctcg

SEQ ID NO: 86753 - DNA, 1404 bp, Homo sapiens; identical to SEQ ID NO: 86752

SEQ ID NO: 86754 - DNA, 1404 bp, Homo sapiens; identical to SEQ ID NO: 86752

SEQ ID NO: 86755 - DNA, 1031 bp, Homo sapiens
tcgactctattccgtttcataattctttttgtccatatttgcatcaataacactgttttaattgctgtagctttaaaattattcttgttatttcatagggcgtactttcattacctttcttaatttggcatttcttggctcttttccgtatgaattctgggaacaacttaatccccactcctttaaaaaaaaaaaaaaagacactttggcctggcatggtggctcacacctgtaatcctagcactttgggaggctgaggcgggtggatcacttgaagccaggagttcaaggccagcctggacaacatggcaaaaccctgtctctaccaaaaattagcgggcatggtggcacacgcctgtaattccagctacttgggaggctgaggcatgagaatcagcttgaacccaagaggtggaggttgcagtgagttgagatcgtgccactgcactccagcctgggcaacagaacgagacagttttttgtttgtttgttttaaagacacttttaaccttccgctatggatttttgacctacatttttcctcttgtattttataagagtagacacagagagcacttcaataaaattcagctcaataactttattaacctgatctccttttctttgactttaagctgaaagtgttaatttctcacaacttgtgctctatagatttgaaaccaaatcaattagcatcagctgtttatgagtaatgcagggtattttggtcttttgctaaattcagaaagaaatgttaaagtgctgatggatttgcactagctgtatagatctttggtggaggaggaaatgggaaaattattaatttcaggtaagaagtcatttttgaaatgcaagattcatttctttttaaaatcaccacataataaaaactttaagggctgcattggtgggtttttaaaaaaaattgtgaagtgtttttagtgttatgtgctgacaaatatttttgtagttgctttgacaagcaatgaaactaccaattatcactaattctgagtcttccaatgaacctc

SEQ ID NO: 86756 - DNA, 1031 bp, Homo sapiens; identical to SEQ ID NO: 86755

SEQ ID NO: 86757 - DNA, 1031 bp, Homo sapiens; identical to SEQ ID NO: 86755

SEQ ID NO: 86758 - DNA, 1061 bp, Homo sapiens
tgccgtaagccaagatcatgccaccgtactccagcctgggcaacagggtgagactctgtttcaaaaataaataaataaataaataaataaaagcaagcaaacaaacttactgaaacaacacaaaatccagctataattttcaagagagatagctaatacatatgaatgtagaaagatagaaagcaaaaggatggaaaaagtctatcaggcaaactctaaccaaaagggaggtaaactaactatattagcatcagacaatatgatctttcagacaaaagagacagctagagataggtccctcaacaatgagaaaaggtttatttatccataaaggtaaaaacaattccaaacttgtgtgaacctaataattgcctcaatatacaaagaacaaaatgacacaattataagatgaaatagacaaatctaccatggtgaggagtttcaaaactccctaattgaaaaattaaaaagacaaaatggttacagctgaaaattaaaattaaaaattcattttctcggttgcaatagccatttttcaagggcttactagtgacatgtgacaatggctgctgtattggacagcacagaaagtacttttgcactgcattaatttagaagacttaatataattaacaatattaataattgagtattgaacaccacatccaaggtgcagatctctgaataatatctgatcataatgtgggcaagttagaaattaatgacaagaaaaggcagaaacatgggagacaggtgaagatttcttaaacagaatataaaaagcactagatacaaaggaaaaaagtgattaattggatttcatcaaaagacactgacttagtttgcttaggctgccataacacaatactatagacttggtggcttaaacaaaataaatgtattttctcacggttctggaagctggaagtttgggaccggggtgccagtatgactgcgttttggtgagcactgtcttcgtgacttgcacacaggcttcttgccacgtgtctgtgtggcggagagacagcaagatctcaccatctctcttccttttcttataa

SEQ ID NO: 86759 - DNA, 1061 bp, Homo sapiens; identical to SEQ ID NO: 86758

SEQ ID NO: 86760 - DNA, 1061 bp, Homo sapiens; identical to SEQ ID NO: 86758

SEQ ID NO: 86761 - DNA, 1089 bp, Homo sapiens
atagttggggtgggggaagtgccttgactaatgaattttgttgggggcagtggggagtgcacatttcactccatagtagacaccattgaggagaaagaccagagtggaagaaggtatttgaaatacatgtatttgacagccaggcacggtggcccacacctgtaatcccagcactttgggaggccgagctgggcggatcacgaggtcaggagatcgagaccatcctggctaacacagtgaaaccccgtctctactaaaaatacaaaaaattagccaggcgtggtggcgggtgcctgtagtcctagctacttgggaggctgaggcaggagaatggtgtgaacccaggaggcggagcttgcagtgagccgagattgcgtcactgcactccagcctgggcgacagagcaagactctgtctcaaaaaaagaaaagaaaaaaagaaatacatgtatttgacaaggacttgtacctggaatatataaagaactacaaatcaagaataaaaagaaaggacagaaagccaatggaaaaatgaacaaaggattcaaacagggatttcacaaagaacttacctgtaacgtatgttaaatgctcaacctcattagtcatcagagaaatacaagttaaaacctcagggagatattactacacacccaccagaaagttaaattaagaacacatttgtcatgacaattctgggtttgattttgttttgttttttgagatggagtcttgctcttgtcgcccaggctggagtgcagtggcataatcccagcttgttgcaacctctgcctcctgggttcaagtgattctcctgcctcatcctcccgagtagctgggattatgggcacccaccaccacgcctggctaatttttgtattttagtagagatggggttttgccatgttggccaggctagtcttgaactcctgatctcaagcgatccacctgccttggcctcccaaagtgctgggattacaggcatgagcccgcgcacctggcctgtcatgacaattctaagtggtgatgaggatgtgcagcagctggaactgatgaaaatgcatgagcacaacctctttggaaaactagc

SEQ ID NO: 86762 - DNA, 1089 bp, Homo sapiens; identical to SEQ ID NO: 86761

SEQ ID NO: 86763 - DNA, 1029 bp, Homo sapiens
aacatagcaagaccacatgtattaaaaaaaaaaaaaaaaaaaaaaaaagatactgctgctgcataacaggatttgaagcttctatcttacacatagtactttttagttacctggtataggagattatcatgagaggactgtttttttttttatttacaggtaatttctgaacagggaattagcacaaaattttttaaaacagtaaatattgatatctacatgaaagctgatgtattttaggaattttttaaatcttttttttttttattttgtaggttgtttttgttttagcctgttgagagagtctgcaaataaatttaatgagtagtctaaaaactaacttttttttgattgctatatcctagctcttttatctttggctctcttctccttattaggatgtgaagtaattctcaggagaggaaatgcatctagtttttacttgatatcaaggactctaaatcactggcttcagttttatgtaaactggaaatgtaaggaagttggtattttggatggtattttggctggattctacttgatgagtgtttgacccaaggtgctccttatatctggaaaacatttgggattgctgatagtttgggaaactaaatttgtggttctatttcttcaagacacagatagtgtcgtttccacctgatactcattaaatatcagtttgacaagaaatacattttgaaattatgttcttcatttccttcaatgtggagtactaactgtgtttctgtcctttaggcatgtgattgtgaggacctctcccaatcacaggtacacatttacactgaagacacatccatcggtggttccagggagcattgcattcagtttacctcaggtaactcagatgttaatttgttctcttctgtttttgaaagtcatagaatatgaataatctgttcattttaagcaagcatcaccctgtgactgtattgattcatattgaagaaaaatatctaagtattatataaggaatttaaagatacagtcttcttttttttttttttcttt

SEQ ID NO: 86764 - DNA, 1028 bp, Homo sapiens
gtgactattattttttaaacctgtacctgtgtgtccctccagtgaaggccatttaaaccccatttttggtgaagtagtttatgattcatttatgtgaaacttttagttactagaaacactacaggtattttgtactcctgtgatttttaaaaaaatgcttctttttttcccctagtctccttatatacatttgacaaagccaaacagtgtattggcacaatgaccatcgagattgatttcctgcagaaaaaaagcattgactccaacccttatgacaccgacaagatggcagcagaatttattcagcaattcaacaaccaggccttctcagtgggacaacaggtagtttttaattttctttcattcctttaactttataggtattctaatttctgcagttttccaaaattaattccaccttttaaaaagtgagaggggctttgcgtatcaactcgtatatccaaggtgagtgataaaagtgagggagatgtatttactgaacttcaaggagtctgttcagaaaaattctaaagtagcttttagattaaaatgtcatgtataattatagcagcttttccctcagcaaatttgggaaccctgtggacatatatatctgaaattcctttttatatcataggacatttgttttgcctctggaatgtctgtctctttcactaatatagttctgtagaaaatgtagctcttggccagacatggtggctcatgcctgtaatcccaacactttgggagactgagttgggaggatcgtttgagcccaggagctcaagatcagcttgggcaacaaagtgagaccctgtctctacaaaaatttttttaaaagtagctgcgtgtagtggtctcaactactcaagaggctgaggtgggaggacggcttgagcctgggaggttgaggctgcagtgagccatgattgtgccacggcactccagcctgggtgacagatcgagattgtctcaaaaaaaaaaaaaaagttcttattttggttatgggcttatttgagaatcttaaa

SEQ ID NO: 86765 - DNA, 1082 bp, Homo sapiens
taccattataccccagcacatagaagaagaccaaacttttagaagggactcagcaaagatttggtgaatgagtaattgagcattcagaagctgtctctgcacttgtagggcaagcattttgtactagtgatagaaaagcaggaattgtagagtcacagacccagggttgacttctggcgctctcatttactgtgactttgagccttgttgcatagcctgtttctgcatctcagcttcctcactagtaaaatggagtcgtagtttctgcttccaagagtgtttgtgaatattatataactggctgtagtgtttgaataaaatactaagaaactttattctttgttagaaatagtaaatgtggtactcttgaattactttaggtggcactctgacatttaaattagatattttttatccatgtggaagaaattttaaacatgagttttgcagtcattttgtaaacactgatcgtaagtgctaattcccttttcttcattggctgtgagtagtttgtttgaggagcagattggagaggagtatataagataaactggttttctgcatttgaaaaacattggtgatgatctgaggatcaaactattatattatgaagtgatttttctccccttacctcttttctacatagcttgtctttagcttcaatgaaaagctttttggcttactggtgaaggacattgaagccatggatcctagcatcctgaagggagagcctgcgacagggaaaaggcagaaggtagcttttatttctgatcatctttactagatcatctttataatgtaatttgtgcagattgattataattttcctatctgttgcttagtgatttttttcatattgtgtacccttttaagatagtagggagaaaaaattgctttcatagccatcattgttattaaaatatagcttaaaatgtatttatttgcagacctaatattaatgtaaaatgtagacgtatatgtacatataatttgcttgaatgcagatatttattgtaaataaataataagaaacgcattattggaaagatataggcatggaaataaggcatgtaagaattgta

SEQ ID NO: 86766 - DNA, 1179 bp, Homo sapiens
tttcaatagttttgaaattatttttcagacccattatttttgtctttttctttaaaaatgaacagataaattttctgaaaaactttataataccagaacttttaaaattacattttaattttatggggaaatcatagaaataagacttgtggtggctccattttgtttatttatttattgaagaatgcttttctatggggcatatttagaaacttcccctgacagtaataatactagtagtgactccattttatttatttatttgcgtaagaatgtttttctatagggcatatttagaaagttcacctgactctaaagatcactatgggtcagatgtaccctgctgaataataactatctattaggctgtgtgcattgttctgacattagctgccgttcctttttattgtactgttgcattacccagttagtacatcttcatacctaataaatgggtacttgcatatttttaaattaaataagtttgatccaaaaagacaaatgcaggatatacattggagtttctatattgcatacaaagaagtgcactattcgtttaccactttcttcttgaaggtttatttaatttatctgtgtgaagtgactttatttgcccagtggaaatgctgtcatgactgttttcatgtccatatcattcgttggattggaatgtgagcaacagaatatctgagaaaggaatgtataacataacagcttctggcagactattagtgtaaaaacagcatccaaaaaaaaatggaaggaatatgaatatattactccgctcatccccatcattctttatctttaaattgctactggaagataaaagtatatttattatagtggggataagaactgctttctaggcactaagtgcttggattgtattagccttctattgttggtagcctttctgcctggtcgctcactctgataaattacaggcacggcacacacctgttcactgagtaaaggtcgagtttggaattggattaagagaaaatgacagagaccctcatcacctgagttttatacaccttgaaatggcaatagcatactttttatctcaaagatacaaaggccacgtccattaaaagcagaattttaattgggaaaatattttaaaatgtggtagttcactatcttggtaatgtgtattttcgatcaagacatgaa

SEQ ID NO: 86767 - DNA, 1005 bp, Homo sapiens
taggccgggtgcggtggctcactcctgtaatcccagcacttagggaagccgaggtgggcggatcatgaggtcaggagatcgagaccatcctggctaacacggtgaaaccctgtctctactaaaaacagaaaaaattagccgggcgtggtcgcgggcgcttgtagtcccggctcctcgggaggctgaggcaggaggatgtgtgaacccgggaggcggagcttgcagtgagccgagatcgcaccactgcactccagcctgggcgacagagcgagactccatctcaaaaaaaaaaaaaaaaaaaaaaaaaaaaaaaaagaagaagataatgtatgcctttctgcttttgtagttttgttatatttttgtagaattaaaatcaaggaaacccttaaaggagaaaggaagtcacataaagctctctagactgagggataaaggaaaagggattatttaggggaatatcaatttagacttttgtttttgttattgttttaatcagagcaactgttgagttttccccttgtctgaagcagttgagctcacccaaacccaagtggggcagcccttccttggaaggatatgagagcaacgagcgaagaaaactaaacctataccttgcacttagtaaataccaaatagatatttagttagaatgccttccaaccccccacaaaacagatttttaattaagaattaccttaaatccataattttatgggctaatagaagccacatttgagtcccagggtagaaatgtgaacatcaaagctggtatctggaagtatgggtgaataaattcaacagctgattgctgtctttcagcatattcaggtgttaactgaatagatactgaatacttgtgttcggacatttaccacacttattcccctgtatgcagttttgtggacagtgttcaggataaataaatgattgattacctcagttctcactgtagctattttgttagcaaagatagcgtttctgccaagaaacttcattttttca

SEQ ID NO: 86768 - DNA, 1061 bp, Homo sapiens
tttttaatttaaaaatttaatttaaaaattaaaaaaagtgtttacttccatggaagggaagctaagatggggaataaagggaaagttttgttcttttactcaattttacctttatgtctgaatgttttattgtatttctaatgtgtgattttaaaagccaacagacaaaagataatatcacagtatgtttcttggggtgactctaccatcagcatggaaagtcagcaggaaacaggtacatccttccgccttcatgaagttttctgtggaggaggagagtgcagggtaaaaggcctggattccaagggctttgctggcagccccttagagggtagacagaacacctatcctatttggtcaagaagagaaaaagtttctccatatataacaaactgctttcccccagaatgttctgcattatagtaatggtgtaagtagtctgcccttcaaacatgagaacatttgcatccaggcctttaggcagccaaggcagcattaaagaagaaagagtgggagcagagcgagctgagggagagcagagcttctgacatttgaggaactgggcgtgaatttgtttttagtcttcaaaaaccattctcttgaggaatcgaattcccatgactcctgaagtgaagcggttggtgttttctcctgcgttactcccatacgtaagttggtgattataatgagggtggtggctaatacttatataatgccagacgctgttctgtgtgctttattattgtgtttattaatcctcacaacaaccttcagaagtagacactgtattgtctccatattatggagcaggaatctctgtctcaaaaaggtgaagtaatgggtccaagacacacagctagtaagtagtagagtcagatttgaacccaggcagtcgagccccagatttcatttccttaaccattacatgttattctcccatgaaagcccatcgtgtaaaaccattttaatgggctttctagcttcacttttttggggacctttgaagcaatcattgaggcagcctttgttctagccaagggccaaccatggcaccattgaga

SEQ ID NO: 86769 - DNA, 1251 bp, Homo sapiens
ttttaggctggataattcttagttgtagggcgcctgacctgtgcatcataggatgttaagcgccatccctggcctctacttgatgtcagtacttcccttcctcaccactccgagccccagtgacgattaaaagaaatgtgatgaaactgtcctgtgttgagaaccattgctcaaaggcctttgaaggcacaactgtaatgtcttcttatccatgtattatcaacatcaggggtgttgggatgtaggttgcaggtcattgttggaccatgaaccactgttaccagtccacaataagacaaatattggaaattaagaataagtaattacaaatgtttatagcaatttgacattatcacaatttttttaaaattatattttacaaaaatgttggtctgcaatggattggaaatttaaaaggaaaaaaaatacagctggaccttagcatacatagtttgagaagcactggcctatgtaaatatttgcaaaatgaatgaaattttttgaacagatgccttagagaaaaggtgaggcgaatagtcttagagaccagtagactattgctgtccagtgtgtggtacttagaatctggattggggtgaaggcaacaggaatggaatgggaagaaaatacatgaaaaaattgcagacatgaaactggcagaatttggcaatagttattgtgggtgacagaattggaggtgagactcaggtcttgtgagaaaatgttggaaatgagaaactcaggagaacatagttttggaaaagtagagaatatcattgcacatattttcaatatcgtgaaaggaaactggaagctgaactgaagagaggaagaattactggcatttcaatttattgaagcctagcttcaatcagtctgcacgtgtttaggaaacacactgttgactacttttgcttgaaataccctctttacttggcttttctcactccaagcatttctggttttccttttacctctctggctgtctcttttcaacctcttttgtgtcccttaaaatgttggggttcctcaggagtctgtctttgacctattatttttctctaattattctcctccaaattaatcacatctgtttcatagcttcaattagtatctttatgctgctaactctcaaatatgcatatgccacctcggtctcagtttagaactctggatttgtaccagcataatgtgttgggtatttcatgatcacatagtaagcttgaaattaaacacattcagttgccccct

SEQ ID NO: 86770 - DNA, 1162 bp, Homo sapiens
ttgttacttagagcagtctacctttaatatgtttaatatggtcatactttaaaaaaaaaaacctgcaagaaacttgggtttcacgtttttgctttttaaagaattaacataatgttatttcaggtttgtaaaggaagttacagaagatagcaataaatcccttccatataccattttagtcatagtgcaaaattaggcattgaaaattattatgggtactgtattagatattcaaagatttatttgtggctttgacttctttaccaacacctctggctttaatacagtatcttttatcagagcaagtaatagtttgaatccttttcttacaaatcctctttttactcaagtgactgcaaacttataaagatgcacacatctgtagcttgaacgtctatgctatttgctcaagtatttacttgaatttatcctcgatgatatgattttttgaagtgctttgattttaaattctatctagaatcccatcatgagggagaaatcttagcaagacttaagcaccttttcataatgactggttactgtaggataaacctataattagtatgttgctaatccacacgttagatatatcccatcaaatttcaaatatacacaggagaattatccacattgaaggttattagtgcattccagggacatttccatgttgattcacaactacccctttaccttacactttcctgtgttactagacgtctctttctgtaaaacttctctttgttgttactttttacttttgtatgtgttacctgattactttggcttcctctgtgactactgagggagccaattgtggctgtgatgagcttagagaaagggagatggggaagactcgcttaaatgagttacaaattctctgtagtctgatctttatctggctattgcagtatgaccatgggtgatactaaatgaaatagaactcaactccccaaaatttggatttgtcttataagtcgtaatggctccaggtgggatactgtgtcagaccaaggataggcagatgatagtttattgccacagtcaaaagatcgaacccttttttttcatgttatctagaaatgaatctttaaaaaaaaaaaaaaaggaatgggttgaacttataatattttagcaactcataaaataacttgaagaaaaagat

SEQ ID NO: 86771 - DNA, 1061 bp, Homo sapiens
gtaaatattcacgatacattttcttatcttttgtggggacaaaaatatcttaaaaaacaaaatggcaacaggtctctggaaatgcatattggcaggtttatagttaaatactgtgttcacttaatacccaatataaaatgagatacaaagcagtcaagtaagtataatgcttcttagatagttcagtatgagatctgcactattaaaatattaccagaaatgatgtttctacttaattatttaacaattcatatagtattcacaaagtataccaagaaaaaagcacacatatgtcagtggttataatcagattgtaaatatggacatatctatatatatctcttcccttacctttctttctgccccttccttagcaatccagtacgtactgatgtatactgctcataggtggtttaacattgccatttccaagatgcttcttttctaatgaaattaatttactatctagttaattcactagctctattttatacattgtcacctcataacatctagaaagcttagtgttgtgaagtaaggactgataaacagaggcactttactaaaaaatcacttcctagaactgtggctacaatatgaaactatcttctagatatgaacatacttgcaaagaaccttccttttgcctttcttcttccttcttcagctcaatgaataagtacagaaatgcatatagctctacgagatgggttaacaacagtcactcccagacaacaagccttgctaaaaactctaacaagaggacatttatcaaagaatcattttacttcttaaactttcagcatactttgggcacttctcagcattggggccttgtttgtcctttgcatactcaacaatgctaagtaaatgcacttgcagaacgacgagtagataatctgcatttatctcaaaacacactggcacagaactcttccaccgtcacttcctgtctctcccacctcctttactacccaatgagcaaagaatatgtagctcaaagagataaaagtttaacagttccattctaaagacagtcattcctgttaattgacataaac

SEQ ID NO: 86772 - DNA, 1011 bp, Homo sapiens
tttgccattaccagcaaccacaccactttggggatctcagatgtaagcatcttgctctcgcgctgcctcccatttttccttgcttactcctagcatttctcctgttaccaactccagcaacttggaccccactggaacctccagtataatttattctatcagttcccaatctttttgttctctctctcctctttccccagcttaacctccatggtctatcacatatatcctctttgtatacacctttagcagccttgctcctcatcttctgttgtcaaatccacaagtgtttctcagctacctgcctactctgtgccagtattctcgctgttaagcatggcttaagaaaaacacaaaaccacagtgtctgatctcactttaaatttatgaaccaaatctcaagtgagccctcagtatttcttggaacagatattcctagtattccttctgtatttccctagtccaatccatttattctcctattctctgagatgactagttcttcttctctatttggctcaacccccaagcaccacctcttccatctttaccagcagctgatgacctggaatctttacttcacggaggaaatagaggcaaacagaagagaacttcttcatcttcttcatcttcccaccacaagatgtatgattggttgaatgagagaaagactgtgatgtcctagaacttcagttgctcctatatccaatgtaattagcaacttaaattccaaaaccatatataaaaatcgatttttggccatttgagattatactctttactaccactttcctttctcttattataaccaagagttgttactatgtttgtgcctcatccaaataaaaagtaggtattttttagaaaatgattaacgggagcaattagtaaaacaagcagtaaaatacccggatacaggaaattgagccaggcttgctggtatgtgcttgtcccagctactcgggaggctgagttggaaggatcgcttgagcccaggagttccaggttata

SEQ ID NO: 86773 - DNA, 1005 bp, Homo sapiens
ccagaaatccttaacaaatatgtgggagaatcagaggctaacattcgcaaactttttgctgatgctgaagaggagcaaaggagggtaatgtgaacataagtgtgatttagtaaaagtttatcactcgctatacgatgaatgagacccagagttatggagacaaacttgttgctttgatttatattttgaagcaacttacaggtaaatttacctagtacctaggttatatatggcactgcaccagggactgtggaagatttacgtgatgagcagatgttgttgcccacatattcctataaacaaaggtaggtgattgtgtaagccagaggttttgcaaaaataggtcatgaatatattttcaggtgacacttttattccatattgcttccagagacttgtgctcatttatcctttggaagaaaaggggaaattaaatccataaatagacttatgaaatcgtattatgtaaggttcatatgcaaaaagctatcttacttaacactgagtcttgctcagttatagagtgacaggattgagttgtcagagctcaaaggaaagcttgatttgcgtctcagaaatgaaattatttaaaaatcaagctagaatttactaattctgatagttttacatgtcaacttgactaggacataaagtgcctaaatatttggtaaaacatttcggttgtgtctgtgaggatgtttctggatgaaattagcgtttgagttgatagactgaataaagcagattgccctccctaatgtgggcaggccccattcaatcagtttaaggcctgaacagaacaaaaaggcttactttcctgcaagtaagagggaatttcgacttgcctggttaccctgagttgggacattggtttggatgcacaccgaaacatcagctcttcctggcttggaggcctttgggctggaactaaataatgcgtattagctctcctgggtcaccaggttgctgacagcagatcttgggacttgtcagcctctgaaattg

SEQ ID NO: 86774 - DNA, 1084 bp, Homo sapiens
ggatcataataatctcctctaggctgggcgcagtggctcacacctgtaatcccagcactttgggaggctgaggcaggtggatcacttgaggccagttgttcgagaccagcctggccaagatggtgaaaccccttctctactaaaaatacaaaaaacttagccgagtgtggtggtgtgcacctgtaattccagctactcggaaggctgagataggagaatcgcctgaatccaggaggcagaggttgcagtgagctgagatcgtaccactgcactccagcctgggaaacagagcgagactctgtctcaaaataatagtaataataataatgataatctcctctgatggtgctttcgagactaggaaaatgcctattttatttttaatttcatcaggcttgccagatgagaaaggccgactacagattcttcacatccacacagcaagaatgagagggcatcagttactctctgctgatgtagacattaaagaactggccgtggagaccaagaatttcagtggtgctgaattggagggtctggtgcgagcagcccagtccactgctatgaatagacacataaaggtcaggaaaatcagctaaacagattataaacattatgccagtattctttctctttcctttcaagcatatcaaggggtagggaaatgctgacttttggtggagaagagatggtaaaaggaataagaattaattgtcaactgctaaatcttcagagtagcaggaaggaagataatgtttgcatctgccctgtagtaaccactgactcatctaccttaggtcatcaccatctgacacagacacgtaaagtgaaaattttgaagaagtgtttttaaatctttgtattgtattaaaagttgtaatatggccaggcatggtggctcatgcctgtaatcccagcactttgggaggctgaggcgggcggatcacaaggtcaggagatcgagaccatcctggctaacacggtgaaaccccgtctccactaaaaatacaaaaaattagccgggcatggtggcgggcacctgtagtcccggctactcgggaggctgaggcaagagaatggtgtg

SEQ ID NO: 86775 - DNA, 1025 bp, Homo sapiens
tatgaggaaccaccatatttttgttttccacagtgactcaaccattttacttatgttcccaccaacagtgcataagggttctgatttctccgcatcctcaccaacacttcttattttctgcatttttgtggtagtagccatcctaatgagtatgaagtgaaatctctttgtagtttggatttgcatttccctaatgattagtgaggttgaacatcttttcatgtgcttatttaaggccatttgtatatcttctttggagaaatgtttgtttaagttctttgcccattttttatttagttttttgttgttcaattttggcagttctctatgtattctggatattaatcccttatcacatatatggtttgcaaatatttcagatttttttatgtgtgaaaatatgcttttaaatcctcaagagttacgttcttaaactgaatatattcttaactattcttaaatcttggaagtccttacattttgtttttatctcttcttaggccagtactaaagtggaagtggacatggagaaagcagaaagcctgcaagtgacgagaggagacttccttgcttctttggagaatgatatcaaaccagtgagtatgcccattgagtgatatataggccaaaaagtaatgataataataactcaggcgaaaagtaagtgccatttactcagtattatggaaggttatagcatatgcagtttcataaaatgagaaaattttagtattggaaatgttcagtatgagaaacatctgtacaataatcctagtggctggtgatattatttactgaaatattttcatgataggaagcttaccatcttgtaaggcaggccattcaattttgagactttccagttattgttttactttatattgaactagaactaattttcttattggttcttatacaatcccaagctacagaaacctaacttcagtccatcttccatatgtcagttattaggatatttaaaattaactctcatatcctcctctgtctctctctctctctctctt

SEQ ID NO: 86776 - DNA, 1037 bp, Homo sapiens
attatgatagctttccgaccaccaccaacttcagtttccttggctgccgtaatattcagctccctgagctgagccttgaggtccgagttcatctccagctccagaagagcctgggagatggccggactcgaactcgtccggcttctcgccattgggcttcacgatcttggcgctcgaactgaacatggctttctcctgggagaacttgcagcgcctgcttaggaagagacccaaatctcgcgagagcacgtcaaaatccctacattcttaagattaattttggggggagtctgtaagatacggttcttaccttcttacctccagcctcagtcctcctggcatcttctgtgttggggcatctttggatctagagcaagcactgtgtgacctgctgtgtgctataactcacggtgagtttggcacttcagttgtactagtctggctagggcagtttgtacaattttacttttctcgcatctttctttccagtacctctcctcctgctgggatttatctacctaaagttgtggtgcagcttcccggcttagtatgtaaatatctcacttggattttcctgtggcagctaacctcacgtacttgccagccaactctgagtatcttcttagtgagaattctgctggggcctgggccagaaagggtgaaagggactaagggactgaggagactaggcagaaatcgtggatcctgggaagagttatgagcacaggttacactagtgactagataaggaagaaaatgtacgtgtgagaagaaaaagggatgtgtgtgtatgtatgtatttaaattagagcagagtagctacccggaggagtttcagttgactggttacctgaaactagtcaagttacaactggaattgcacagccttcgtcatggtcggtgtgttaatagagcttgctgtgagtgcacctctccctctgatagtaattagcacagagaccgactgcaaaaaacaagaacgtcactacttgatattaagtgactgctgcaggtatttttcctctcaaatgttatgt

SEQ ID NO: 86777 - DNA, 1004 bp, Homo sapiens
atctgattccatgatagccaaggcagggaaaggagtatggtgaatcatgcagtgactcctaaggcttctttcagaaaggggtgtatttcccctcatatttcattaaccaaagcaagccccatagttatgcctaacttccaaggcactggggaaatactgcctaccctgtgcccccgtatcatcttgtatttcccctagcctaataatgtcatgctttgttataattacatgtgacttgcttccccaactctaacttttgtgaaagtaggattatttttgtcttatttattatcctctgcagtgccttcattaatgcttgatacataataagaattcaaaaatatttgttgagtgagtgaatgaataaggcagcactccaagactcaatccttaggcctttttttcttcttcttctgccatttcttcttgaagatggcttcctctgtcatggtttcagcagtcactgccctgagagtgatttccattccctgacttcaatcagatatctccaacttctcacttaatatttctacttgaatttaaaatgtgtaaatttattcttttagtaaatacttcttaattactctctaataaggcattatattaaatgatatgaggatacagaggtaattaagacagcacttgccatctgagggcttgcaatctagtataatacaaaaatagtacaatgaatcaataatatatatacgtaatatacaaaatcctgtgccaaaggagaagacaagtgatttatggcaagatggaattggaacttgtgttgtttcaaccattgaacctacagagcagacatcattactgaattctgttctgtgctgggcactacacataacatgaacagaataaagcttttatccacctcacagtccagtggggagacagatagcttaggacgaaaggatagatggggtttagacagagtgtgggagggtaattagggggtaaagggatggtgcataggaaaacgttttcaccagaggggttga

SEQ ID NO: 86778 - DNA, 1050 bp, Homo sapiens
acatgaatgaactttgaaaacatgctaagcaaaaggagccagtcaaaaagaccacatattggatgattccagttacatgaaatgtccaggactggcagatctataaagacagaaaatatatttgggatggcctagggctgggaggggagaatgagaagagtgagagggtcactgctaatgggtatggggtttctttttggggtgatagaaatgctctaaaattgattttggtggtgttgtgtatatctgtgaatatactaaaatactgaattgtacactttaaatgggtaaactgtgtgctctgtgaaccatatctcaagcgattacattttttagaagtggtttaggagctacttaaatgatgaaaggagacatagagttagaagtgaggggtgagcatccaaggtacgtggcccagcttgggagaaagaggaattggatcatttaaaaagaacatggagtgaatttatctaaggactgaagaggaagaatatagaaatatgtaagaagtaagagatgtggttgccttagtgattggaaatggcaggggttctctctgaagggaataccatctggtcattaatctgaatttggtgactctgacctggactgccagattacctgcagtatacatgaatcagtaacaggataaattaatatttgtagtatttctagttggcatgtatttaacaaaataaaaatgtgctttgtcataccaccttgctttttaaaatgtttatattctctcaagaaaataaggggaaattttcaggctgatccaagtgttaagaatattagtcattgtaaaatggaagcattcactttgtcaaaccattagcatatagttttttcagatgtttttaattaaatattaaaggtatattcagctaaatattgtagaaatgcatagagtgatagaaaaatatttattactggtaagaaaacaaaagttgtgagcatttttctttaaaaggaggaactatacttatatacactacagtaatcatatcagtcacagaatcctcaattttgcatttgttgtatttccag

SEQ ID NO: 86779 - DNA, 1023 bp, Homo sapiens
ttaaatttttctaagtaaatgcatagatttttaatgaacctggtattcagtggatttgctttaaatttagctgcagagttaatttcatgattgatttattagccctttgaaagtataaaaagtggtatctgcagttcgtgaagagtgaaaaacatcatcacattttgtttagcatctttttaaaaccaattaaaagcttttctaaaatggattgaacaggagaaaataaaacatgttccctaggtctttatttcaatcaagtttccctgtgttctgcaggagaagagatcgagaggggatagaaaaattgaaaagggctgtcccagcagggagccaagccggaaaaaagggcttctctgagaactcagcagcagcagctaagaaagctcccagcctgcttcatctacatgcagagtcacacaaggcatgggggtgctcactgtcacacagaggtttcacatgtgcttccctgctgattcctgtgaaaagctaacaattggcttggagggtaaaagaccactgcagttcaccctccctgagctggacgtacaatttgtccagtgttaggaaatgtccggcttagcagtgagaggcttgaagacacccctccttccagtgagattcctaacgccgtctcttttacttgatgacactggggctcttttcaagttttgcagatttatggaagttgaggggaatgtgcttttcaagatcaggaggatgaaagccttggtcttaatgtcaaggaggaagcggtagtgagtggtaaggccaggtaactcttcctgcagcctgcaggaccagtggcttgatttttcctcatagatctcttctgccaccttcttttttttttctttttgggagacagagtgtctgaaaaggaactccttgggctgtaaaatgacatgattccccagtttcctcaacaagtgtgagagtagttaagcctattaacctcactgtttaatgctgggtttgacacttttgtgcatcaaattggaaaacctcatctgtatgtaacag

SEQ ID NO: 86780 - DNA, 1192 bp, Homo sapiens
tttacaaaaaaaagttagtcgaatgtggtggtgagcatccgtagacccagctattcaggaggctgaggcaggaggatcgcttgagcccatgagttcaagaccgcaggaagctgattcttaccaccgcactctagcctgagtgatagagcaagactctgtctctaaaaacaaaaccaacaaaaaacagtgaagtaaattattttataaaacattgctacagatatctgctgaataaaatcaaattttcaaaatagggttttgttttggttttggtagagcacatctatagtagatattaataccagaataaattataagatatatatgccattttctgataactcaaaattaaatatctaaattttaatcatcagagaaatgctaatagtgttgagacgaaatattttttcattgctagaatgtattcttccagatccattgccttaaataagttactgtggcattacattagcttttgaaaggtggggattataacgtcgtagtagtccatgggtgccatgactctagttaagagcaccctttctgtagaacttactctttgtattgaacttgaggtttaaaaaaaaaaaaaagaaacctatgtcttagctcagatatcatctggcattatagccttgaacgtcccttaatttcttggtgtctatttcttcatctgtaaaatagagataattcctcatgtgttacctactctgttgagggtcagctaagataatgtgtagtgaagccctttgtaaactggtggactacatgagctgtccaggcgcagtggctcatgcctgtaatcccagcactttgggaggctgagacaggtggatcatttgaggtcaggagttcaaaaccagcatggccaacatagtgaaacccgatctctactaaaaatacaaaaattagctcgacgtggtggtgtgcacctgtaatcccagcgactcgggaagctgaggcaggagaattgcttgaacccaggaggcggagtttgcagtgagctgagattgtaccactgcactccatcctgggtggatggagtgagactctgtctcaaaaaaagaattgcctttggatagtccacagaaccttttcagcttgtaagataggaaaactgaagaacgtataataactgctatatagaggaagtttccataggaagtgagttcagagctcccactttggaatg

SEQ ID NO: 86781 - DNA, 1410 bp, Homo sapiens
ccatcggggagttgacaggctagaaacaagattcaggcttgaagataaatgcagagaagcactatggcaaggtagaatttttctaagggtctctgttgaataatacaagctaagaaaatatgaaaaattattcctatttcaagaatgaagccaggttaagtgatagaccaaaggacctctaccaggaaagcttcttactcttggctctgagccaatttcctcctcagaagttgctgcctctccctgaggccccacgctgccatgagtccttctgactctctgtgagtcaccccactgccatgactccttcggagggggtgtctgacctcttgcttcaggcctcttctgggcctcacagtaacccttgtgaagctgaagatgggagctctcatcttccctaacccagagccaaccttggcctctctgcgtcatttgctgccagtgccctgtgtttgtttttgggaagagagggattttcaggcatcccgtccctcacccacctgacctaaccgtatggattcctgacaccacaggcagaggactattcttcaggttcctctgaagcccacctgttcagatgcttgcttcttttccttcttgcctgttctgactgtgatgacagagaccccgcctcaggaatctccacctcacactctattctcataagtaggtagaattttctcatcgcatatttatggttgaggaggagatagatgctgagaagttaaataatctaccccaaatcacacagctgtgagtgatggggcctctacttctgttgcaccaagctacctgtccatcaggggacttgcctcaccattgctttctgccagccctgggcttgccttaaaaaggacatcatatgcataagacactggttaaaaggtgcagcatggtccctggagatgctcactcttacaactggcctgtccttggggcagcagctcctcacaggcccctaagaggtagacctcctgcctgtggctgccagaaccctcttctccatcacaggtcttcctcctcaagagccttctctggtttcctgttgctttttatattaaatatttcccttagtttagcatcccgagtctgccttttgctgattgttccctccctgtgtctgcagacaacttcgttttcagccttggtgctctgtctcagctgcttctaccacacacataggatttaggcgcattcaggacctgtcccttcttttcaagggccttgccagtgcctacttgttgtcattgtctttgcagtactacggataaccttcctagataacccccctccaggaaactgtccccataaaccgggtgccctccgccatgattagtttgtatttgcgagtgtgttacttggttgtgttccctgaatatttatttggttttcccagctaagttgtaactt

SEQ ID NO: 86782 - DNA, 1033 bp, Homo sapiens
atcccctgttccagcaaacgcacaagtgagggccggtcggggagcgggcaggggctagacgaggcgaggccaggtgagcctggcttctggggctgaggcctcggacgtcagccagggtagaggccgagtttttccgccagggcactgctggggatgcctccgaagtgcttaatccttggcgggactcccaggtcagccacagacagtgggttcaggctggggcctggagacgtggggcagatgactcctggggtctgcaagttcgtgactacctgctgggtagactgggtgacgggaaactggcacctgcaggttataaaactttgtccagcacttgtcaactcggtgctcctggttggtagacctcgagaggagacacggagtaggagacacggcccctggccgtaggagtgtactgtttaattggagagtcagggcacgtacgggaaagtatttgtattcttattcgatttatactaaagaccacatttttatggtacaaagaaattgctgtccacgtagcattcactattattacttgttaatcgtatctggttacaggttatcgctaagaaaatcaaattgtaatttagtttctcataacttaaattccttggtagtgtcctttattcgcatcgtcctgcactttcggaattgctgagatacgtagttgagtattaatggggccatacttaccctatttttgggggcggggggcagaattatgatttttaccctgttttggagggacggaattttatgatttttattttttattgtaaaatatacacaacataagatttactgttttaacaatttttaagtgtacaattcagtgacattgagtacattcacaacttacatcactacgatccatttccagaactttttcatcatcccagtgtgcctgttaatcagtagcacttcatttcttccttccagaacacctagtaacctctgttttacttctctctatgagtttacctattctagatacttaatataagtggagtcatacagaatttgtcctttt

SEQ ID NO: 86783 - DNA, 1010 bp, Homo sapiens
ttcacttaatgttttcagggttcatctatattgtagcctgttaccagaatttcattctgttttatgacggaataatattccgttttatgtgtctaccacattttgttatccattcatctgttgatggacacttgagttgtttccaccattgggctgttgagaataatactgctatgaactctggtgtagaagtatctgttttagtttctcttctcaattttttgaggtatatacctatcctattgagaactttcaaacttatgctgtagttttgttgattaaaacacttaaaatcacactcccaaggcctggaaatgaaatgccctgaagcatgaggaataagagggtgatgatcctctttctctttcattttctaagtttatgggtttcttttattttggcgatgaggtgtttcatttggacaggcgaaaatacagaacctactttgtaatgacagaattttcttttacactggggagccctattctcacataaacgttataggaagggacttaaaactagtctgtgagtaatttagagaaagaatgaaacgaaattatgttcatgttactaagaaagggcctatctttcacaatagcagggcacaatgggcatagtagtgccttgaagttaatctgttatgtatggtcttatctagttaatttagttaaaggatgttgccaagaaggccatgacccattttatattcaagaataactttatttagagagtcttagactacctgttttcagtgcagctaatcacagagaaaactgcatggctcagaagaggaattctaaatggtaccccaaacaaggtgtgtggagtgtagatgctctgtaggcctccaacaatgcacccttggactctagcagcttgccagttttttctattaagggccagatagtaaatattttaggctctgtgggctatacggtctctgtagttactactctgctgttatattgggaaaacagccatagacaatatgtaaactaattgatgtacct

SEQ ID NO: 86784 - DNA, 1028 bp, Homo sapiens
cgtggggctgtgtctaggctgtttctttcctcttgggccagctgtagggtttgcctttccttgtctgtctgcacctgcactgccgccatattgtttccattgttactgctttgtaagtcataatggcaggtgggacaagtcattcctccccctccttcttcagagtggtcttggctattctttacctcccccctttttattatgtcactgttcgtgttgatcatattaccaactttcagatttttctgttaaatcagcattgaaaatttacctcacagcctgcgtcaggacttccttagagtcctaattctcctttctgtccccgttaccctccggtcccctgtacctgttcccttggttgccctgcttcaggtgtcggctacctcaggctgcattcctacatcagcccccatacctccacacccccgcatcatcccacaatatcccagacttactttccggaagcaacggcctggtctcggactctagcagtgatttctagttgcttctcagggccacaggtcttgcctaggagcaccctggggagtcatttgacagctcacccagcttcttttggtgcccgagggcatatctggaggccatagggaagccctggaaaagactgggcacaagctgaagccaaagttgggtgcctggctggcattggtagatttggggtcctggtttgcattgctcacgatgcagaatggttgctgacctttcctccagcgttggggatgatgtgagagtccagcaggcccccttcatgtgggccctaacttggggaaatctccaccgtgagcaccgggaagtggatggtggggccagcataagcagtatcccgaggactgatcatggaggaccattaggaagggggtcttaaggatgaccttggccagaccgtgggaagcctccagagagtgttacccagatccagggtacagtgttgcatttccaaatgagatggcagttccttcgttccttgatattgtcggagaaggatgtttaccaaacagaaggtccctgtc

SEQ ID NO: 86785 - DNA, 2167 bp, Homo sapiens
actatagggaattcaattggcagcctttttctaggtatttataatccacgtctgagaatcccaaaggaaaagagacctatatcagaaaatttagcttaaagtatttatttggacaacctttgcatgtttattttctaaaggtaggaaatttatttctacagatttaccttcagcttttttaaaaaattggcattgttatgtcattaacagctatatacatgtacttttttcaaaacaacatttacggcctaacttgaattttttctgttattcattagtgtatacatttttctccttttgaaatatgtagttctagtttattggatattgaaaaaaaaatctgtgatttatcattgtaatttaagttcactatctcttttccagcaattattcttttttcttttttgtacagtagtagaaaacgaaatccaagcaagcatagaccagatattcagccgtctagaacgtctggagattttgtccagcaaggagccccctaacaaaaggcaaaatgccagactgtaagtgctgacctctgacatggctctgatactccaggcccatcaagacaggcttttctccctgggggaggtgatagaatattctgaaaaccaacgtacatgttgaaaaactatgactatgcaaagaaaaagccccctcaaagggcacaattctatctgagtgatgccgctcaaaataaatagcctgtgaggtttgtgactcagaaaccttgtgaccccttacctctttggtgtcattttgaaattttgcctccagttctgttttttgactagatccatagccacctgaagcctaatgttgccatggagttttgttctgctctttggttcctgctgggttcttcttgggttgaaatgaaaaatcacttcaatcagtccacccataatgaaatgctgatctaatgtttgatactccagcatgaaattaaaatgaaaccacccttgccacctccacccccagcgcctgtttccaaaagttttatgaaactttgtggatgctttacctcaaagatgcccttgggcttcttccaggagagccatataatccatagaaggtcaagaagaggtcagtgagcctgcttcctgtcccctgttctctgtcatgcatccagaatcagagcaacagattctgaagtcaagctgctggaatcttgtgtgctaccatctcactttaaccacaagtttcttcttgactttcaacatcgttgatcaaaattagatcttgtggtgagggggtatagtgtggggtggtgtagggagaagtaaggaaacgccgtctttcctcagtacaaagcctggccccctcagattctgctgccctgagttcctggaatttaatctctctctccatcaattccagtcgggttgaccagttaaagtatgatgtccagcacctgcagactgcgctcagaaacttccagcatcggcgccatgcaagggagcagcaggagagacagcgagaagagcttctgtctcgaaccttcaccactaacgtaagccaggcccgtggtgagggtcggcctgcacttgacagatcgtgggggctggagttcagatctctgagcgccatctgttttgggggtgtctgaagaagactgatgatgaggaaaccaactggaaatgacaggaactttgtgcattgccacagagactagacctagacagagaatccctttttctaagacaaaaacctgaagaggaagcagttaaattgaaggggaataggcagaggtgaaaattacctggttgggctggtctgagacagaaaggtggaagttcacatggtggaaacgtttttctgatcagatagagacagatgattagaacttaggccatttgtagagaaggcagcatttcaaagctgcctgcgggcagttgccattgtgccgagtatgtgtgtggctccagtgtcaggtgcattaagatgtttttgcccctagtctgagcagcaatttggaggaatttgttaacagatgtttagggttagatggactgcttgcctgagtctgtctgaaagtgtgttggtttgcatgtttgatttttcagaacccattgtccctgccctttagtcttaaccagatcatttcctgcacatggctgtagaacatactggccttttctgtgtcctgcataatatattccactaa

SEQ ID NO: 86786 - DNA, 1008 bp, Homo sapiens
tttccaaggaaggagcaatctgtgactcctaaaatgggttggggccctgccagagttaaagcagtgactggagggtggactggggggttgcagcatctttagacctagatctgtctaactctggggaggcacattgacatttccattacacacagcactgctgcggtgccagggacctagcgcaggacttttggtaatccataaaatggattctgagactgcgacggcaaggctgtcctgtcccccaggcacccaaggatcctgccagacagcacactttggaggaaggtctgcagggagcagctgagccatttgttcttgaactctgggaggcagaagtccccgcacccatcatgcgtggactgataggacatcttttcgtggtgtgcaccagtgctttccacacttgacagtggttggctttgatgaaccctcatgctgcaccttcagagccagtcctctagtttggaataaaaattgcagaggtggtttttgggtctttaccacctgcggctggtggacagcagccagtgtgtctggacacccaggggcattgagactgcatgttgtcacatgaccacttctcttcacacatctgctttcagtgcctggtgaaaaatagaccttggcctaacagtgtgactctctccaccgcctcagtgtagggaagggtccaggccagggaaggagcaccctctagtggaggcgggggtgaattcttaggtcgagctgatgcaagaaactccggtagccagcctctgtgaccttgtacatgagtttggtgtgcctattgtgatttaaaacaggtgggttatcaagaggaacttgagatctctttattacatggacatttacttcagggggaccactgtaagaaaagccaaactccaagaccaagtaagttagaggagtcttgattttttagacttcactgcggagttctgtacaccctttgccctgatgaatttgaatgggtttgatttgcaaatttggatttacacccattgt

SEQ ID NO: 86787 - DNA, 1035 bp, Homo sapiens
acgccaaaggcttctccagcttgagggcatcatctctccacacccctcagttattgacagaaactggcacacgcactgccagaccacgctgtccctaggaggaggcagacagaggtggacgcagcccacaggcttggctggaacggcgggttccagaggtgcccgctggccgcccacagtgaagtctggtaggggtggcactctccccacaggttacccattggaccagagctcatccacccagagcccatttccatgacaacagcaagctccttacccatcaatttcatccttaaagattcccaccccagctttctgagcctgggctcctcgcccagctgccgcgccagcccacgtctccagatcacaggtttagcagtgacttgtcaagctgccagagagagcctcctgggaggtgccttttaactggcgtagcccttgaaaacgaccatataatcacctgctaattggattaggaacttgttcccagggactttcttttgcccccatgttgaggccaccctactccattcttccggaacttagcattggagagcttccccgttcccctctgcacaacctcccaggccagggtaatgctgacagggttgccccaaagtcagatagtgacacaagaggaaaaggaaacctctaattttctggggcccaggtacactcagagaggaaaaatggcccagggtgggagaacacacagggccctctcttcccccactctgcccgcctttcagccttgcaagaaaatctggcttttccctcggggtgtttgcctcgctgcttctcccccccagacatcacctccctcacagcccagctccatgttcacccccaccaggaagtcttcctttctaaaccgtttttctctgcatcctctcagagtggctatatttggttcctgcaatataacttcgtatatattgcatcagggagagggggagattcctgaagctgggttgttattttttgtgaagctatttttttggtgcattttctttctattccagaaaattcttatag

SEQ ID NO: 86788 - DNA, 1120 bp, Homo sapiens
agttagcaggagggtccatcttaaccttcagggaaaaaccgattcacagcacataaagctagttctggatcagaatctgttattcaacaacacttgcaagggtttaactcagatcctgtcccctctggggtagaaatctctacccgcctaaggccaggattctgccttgccagtccttttttttttttttttttttttttttttttgagacagagtttcgcttttgttgcccaggctggagtgcaatgctgccatcttagctcactgcaacctccacctcccgggttcaagcgattctcctgcctcagcctcccgagtagctgggattacaggcatgcaccaccatgcctggctaaatttttttgtattttcttagtagaggcagggtttctgtctctactggttggccaggctagtctcaaactcctgacctcaggtgatccacccaccttggcctaccaaagtgctgggattacaggcgtgagccaccgcacccagcccttgccagtgtttcttatttctcttgtcccttgatgattgtgtaatgatgaatcccttcgttaggaagcttgtcaaatgcaagtagacgctgagggggcggccatgtgtctactgtctcgtggctcctgttggatgggagtagcctgcgtggctgccagtgctggctggagaggataccaccatctgctctcgtcagcatgctgccctgcctttgagtcccctcactcccgccccaagactaaatccttgaaagagcagctccacagcgagcatgtggcaagaaaggatgctaatggagggaagaaagtgatgaatccccaaaagagtcagggaaagccacacaagaaggaaaaatagctgcataaaggttgcgggggtgagctgggcgaggctgcccgctgacaggtgaatcaagactccagagagctgggtacggtggctcacacttgtagtcccagcactttgggaggcccaggcgggtggatcgtgtgaacccaggagttcaaaaccatcctgggtgacatggtgaaaccccgtctctacaaaaaatacaaaaattaggcacagtggcatgtgcctgtagtctcagctactttggaggctgaggtgggaggactgc

SEQ ID NO: 86789 - DNA, 1050 bp, Homo sapiens
tcttctccagggctgtagaatgtccaatctctgtagtgggctctggagttatggcaagccctaggtctggaggctgagttgaggtctcctccgtggttggagatggtttaacctctgtagtaggtattgtagttatggtaagctccaggtccagaggttgaacggtggcttgagtcaggtgtgaatgctgagcctgacccttgtctgaaggtggaagtgtcacctcagggtgtcctggaggaggagctgtagtcatcagggctgtagaaggttcaacctctgtcatggattttggagtgatggtaaaccccaggtccaaaggttgaactgtggctcgagtcaggtgtgaatgctgagtctgaacctggtctggatgtggaagtgtcacctcaggatgctttggagaaactatagtcctcttcgggggtgtagaatgtccaacctccgtagtgggttctggagtgatggtaagtcccaggtccaaaagttgaactgtaacgctgggtgacactggatgctgagcttgatcctgacctggtgttggatttgttaccccttgatatattcgaagttggggtacaactttcttaggaggctgagttggggtctccttcatggttggagaaagttcaacctctgtcatggattctggagtgatggtaaaccccagatccaaaggttgaactgcggcttgagtcaggggtgaatgctctggaggttgagctacaactacattaggaaactctggagtctgagctggggcctcctgatgggttagggaagattcaccctcctcagcggtctgtggatgctcagctgcagcctcctgctgggttggagaggggttctcattattaataggttccggagactgaaatgaagtctcctgttgaactgctaaaggtccagcttcttccgatgactctggaagcagatgtgggcccccgtgctggatggtgggaggttctacatcattacctgaccctgagagctgagctgtagcctgctggtggactaaagaatttcccacctctgcactaggctctgctg

SEQ ID NO: 86790 - DNA, 1030 bp, Homo sapiens
aacatggcgaaaccccatctctactaaaaatacagaaattaccccggcgtggtggcgtgtgcctgtaattccagctactcaggaggctgaagctggagaatcactggaacccaggaggcagaggctgcagtgagccaaaattgcggcactgcactccagcctaggtgacagagactccatctcaaaaaaaaaaaaaaaaaaaaaaaaagaaaagaaaagaaaaagaaaacaaaaaagaaaagcatgcagagacttctggggccggagaacaatagcggtaacctcattgtaaatctgtccctcactctcccaaaacaaccataaaatcaagtaggacaaataaaaattacacagggcagaatactgcaacttcaaattacctgtaagtagaagaaaaggtttgcaacagggatcctgccaccaccataagcctgtgggtgtgtggagtgaggaaagggaggttaaagcattatatggacaaagcagaatggagtttaggacttagaggaagcacagacacaatctccaggggggaaaatgtgacataacaagtgtaaaatactgaacacaggttagtacttggtagatcacagccctgtctttgggacacagccttaaaaatgtgtggtaccaggagtggcagcctcatagaaagtgtttctgggagagaatcggttataaggaagggtggtgaaaggaaaagagggaattgaagaaaaagagaagagaaaatgccaagtttttcccccaccccatcaacaaatatctttaaattgcacaaaagagggcagaactgacaaggccactcaagaattttatgaattgggctgggcgcggtggctcacgcctgtaatcccagcactttgggaggccgaggcgggcggaccatgaggtcaggagatcaaccccgtctctactaaaaatacaaaaaaaaaaaaattagctgggcgtggtggcaggctgaggcaagagaatggtgtgaatccaggaggcggagcttgcagtgagccgagatcgggccactgcactc

SEQ ID NO: 86791 - DNA, 2836 bp, Homo sapiens
ctccatacagtgtactcttattcttggcaagaatgctttaatgtctaaccaagaattttaatttattcatcttgcttcaaagtgttgatcattgttgtcttggtattgcaaactttaaaattgtttcttaccatattgcctcttctctttgagctctgtgggatcacctttaacattcagagatgatagagtggttccccactgagaagccaaaacaaggcccttaataaccccttaagttcaccatatgaatcagaaggagaacactaaagtggagagacttttaagagatcatgatagtgaaagccttaatataatcagaattgtaccataaccttgaatctatatttgttcaaaacatccctttgacttttctaagtgtttgcttaagcagagtgtaagaatgtgtggttacctttggttgagatcctttccattctttttgactctctgcttcagattttttcagtagtgtgagtcaccaaaacatttactaagagtaattgggtttaggatgttggaaatttttagcttgggggaaaaaacattcttatgaaggagataggttctcttctgagtttgtcataatatagattggtgtctttggaaaatggccacaattttaagaattcaattatgcatataaaatgataattattggaattccacagtaacagatttaaacagtcttaaattgtttatctcctttactgtaatgtattgaaatttttagagaaattttagttgttaacattttattaagtgccagtgtcagaatataacaaattatagtttcttatgaatgacaggcctacagttattattctggattatttgatggaggacaaacttacctgtatttgttagtcaagctgtgaaaataaggtggattacaaaagatgtgaaaaaaattttagtctgtagactcagtaattttctataatttactgttaatctcatttgaacatggattaggtacaatttataaattaattcaagtcagggtctttaggtatcaggtgccagagagatatttaacagatttccctacctaaatttatgtatatgtactgtctaaaacaatacttttttaaaaaaaaggaacagttgggagaaaataaatataatgaaaaattcccagaggctagcacttggattctaacacgtatgctattgtattatccattagttctgtaatatttaattttagattcttttatttttttaattggcaaagcacaaggtgctgtataacagtgtcatttagagttttatagaaagcttcaacctgagttctgcgttataaagcctggagaaagctaagcttagaacataacttgctgaagtataattatctttttgtagcaggaatttatgtgccagaggtgagagtctttctggtactgattttttgagaccaaggataaaaggatcgttttgtaagacatgccatggcaatggctggttgggggacagtttccgcccaagcttggcctattttatttttcctcatacctactttcaaagtcatttaggtatttgaagccttatttcccacgtagtaacactttctggcttttgcagtttctttttttgtttggttttgttttttgcatggaatggggatcaaacaacccgaagaagaacacattttgatcaagcaaaatgtttgcttcaaatttcagaagtttattttacagaaattaaattaagtagtttgacatccttttctctgtttcacacatatattaggttggtgcataagtaattgtggtttttgccatgacttttatggcaaaacctgcaattacttttgcaccaacttaatacatctatatacatatatatatacgcgcacacacttgttcagaagttatgttgtggccttggatttgtttttccccttggaaatggttcttaactctgggattttagaaggttagaatattttttcaagagaacagtggtactcaaaagaatgaaaggtggtccctacattttctgtattcatcacttaaaatttttaatttttccgagaactacaagtaacatttgaaccatgctgctgttgtaccttaaacaaaaactcagtgataaccagtatttagtctattaaaaatgctctttttgaagaaaaaagtttggaagtctctgattagccagagtatagtatgagtcttcactgagaaatatggtgacccattttctttgtgaaaacctgggaaaatgcaagtgtgggtatgaagtgtgtgttctgtttgcattgaaacaatgtaattttgtgtcttctttttgctttaactgacttatttcagaaattgtacagtgttgagggggaaagtcttttctgttaatatatttgcaattcattaaaggatatggaaaatccaaataagttacttttgaaagcaatttataatcaagttgttaaagctatatgaaagctgtgccatctgtattttaataagaaggcacagaaaaacagagatacagttttatgtttcacaaaaaactagagcaatgtttatctaattttttaaaacttacactcttaatatatttatatttttaaacggtcatactcttttttagtattatttggaatatcaaaataaatactatgacaaaaacaatggtaatttttagaataccttttttcaaactacagaagccccttaccaaccagcagctgcgaatttgcaagtcaactgcttattctttgatcacgtgatttctgaaatttcttcaaaagggacacaaaggtttttttgttccaattagaatctatttaaaaaggtcaggatctgaaagaagtaagatgtagaaactaaatttt

SEQ ID NO: 86792 - DNA, 1060 bp, Homo sapiens
ctagccagtgagaccctgtctctaaacaaatttttaaaagtagctggctgtggtggtacgtgtctatagtcccagctacttgggaggctgaggcaggagaatcataccacttgagcccaggagtttgaggctgcagtgagctatgattgtgccactgcactccagcctaggtgacagagcaagatagatgattgattgattgattgactgatagactgaccccataaaccttttgaaactgaaggttatagtctgtgtttctgtggactagcagggagtattcttaaagtggagtcagtgattggaggttgggggaaatgtcaattttttttttttaatgtctcagagaactagctagttgtaattcctagggcaggaataaggaactcattaggaagaggcagttttggtagttaaaacttaaaggtaaaatgcagtaagctaatatcagacctattataaagttaggaaacttgagttgcattttattaaaggatatgaggatttttaagggcctttatttagggttttatctctctgaatataatacaatttttcttacttgttttcatgaaccaacaggacatatttgtcagaaaacttactgtggacttctgttttatttttaaagtgggaacagatgaatcccaggagagcagcatgacagatgcggatgacacacaacttcatgcagctgaaagtgatgaattttaacttctggaaatcagacttttacaactggatgtgtgactagtgctgacgtgtttcttgtccctctgtatactgagtctttactcttgagctggcggtgtcatcgtccgtcacttataccatgagtgtgccactttcattggaccctgactgtatacagaatgaaaggcagtgcaatatttagctgctaacaagactggctcttttaccagtatgaatgacaatttatggggggtagggtggggaactttcttttctgtttttctttaatctccctttgttggaaagtatcatgaaaggaagagttatgctttatcttgaaggaaccattagatatggaaaatagtga

SEQ ID NO: 86793 - DNA, 1024 bp, Homo sapiens
cttaaaagtgccagcagtgggattcaaattctgtccaactgtccccagagccaaagcttcttgcactacactaaactagcccacagagtttctgtccctggtcatctctgcatgagagctaaaacaagaaggtagagtcacattattcaacctcaaatgagaacataccttttgatgactatgaaagcactgcaagtattgattttggttttacaaataaattttagcaatcagacaaattcacaaatatggaatctgtgaataattagaattgagtatctactgaagctcctccatttttgtctttctgttctaagttgaggcttgattttagtcatagatttggttttagaaaaagtaaaattttaattctgtttggtttttgttcccatttttttaaggcctggtgtgctgcagggaactgtttcagtctgcaacgggaacatgatattgcaattaaattcttccagagagctatccaagttgatccaaattacgcttatgcctatactctattagggcatgagtttgtcttaactgaagaattggacaaagcattagcttgttttcgaaatgctatcagagtcaatcctagacattataatgcatggtaagtggtaatgaagtacaaagacaaagtcgtattgatggtgctggtacttactaatttttcttgttagatagctctttattatcatgaatttggttacttatacttagggatggtacatactggtcaataacttctaactaaaatgttttcttatgaaatgtacgtctttaacaaactcttaaattaactaatgataatagaataccagatccttatactcaacagtttcagccttctaccaaacttttgcagatactgtagttgttttttgtttgtttagttttgttactttgttgctttttcttcgaacaccgaaatggtgattgggatgaaaagtgcttgggaaattggaaaggaatagcataattcacttattggataataggaaaaaaaattgaaaaaatttactag

SEQ ID NO: 86794 - DNA, 1022 bp, Homo sapiens
atccagtctcttccaaaataaaaattaaccgggcgtggtggctcatgcctgtaatctcagttacgcgggaggctgaagcaggagaatcgcttgaacccgggaggcagaggttgggttgcggtgagctgagaattacatctacttattttcttacttttaaataataaatgagagtttgatatactttcacaagagggctacacttaatgctgacacaccttagtcactattagttaatgtaatttatgttcagaattactgtgtttaaaattaaatgactttgaagacctttgtttttataaactctcttctgaaaaaaatatagaattaatcaagattgtacatttattttatatctaatactggagaaagggctgaggagaaatctaaaatacatgagtataacaggtgtgaaatttcttcccttttacaggagaatagcaaaaaattaaaaatgaagtttccacctaaaatcccaaacagaaaaacaaaaagtaaaactaataaaggaggaataactcaacctaacataaatgatagcctggaaattacaaaattggactcttccatcatttcagaagggaaaatatccacaatcacacctcagattcaggcctttaatctacaaaaagcagcagcaggtctgttttaaatgcttaatattatctttgtattttattatgtacttattttaagtaaatttctttatgttcattacagtaccttcattgttttttatatagatgttggaatttttaatagattagtttgtaattaccttttctagagaagcagactagtttattgcgttttttcctttgtttactatgttgttttctcctagaaggtttgatgagccttcttcgtgaaatggggaaaggttatttagctttgtgttcatacaactgcaaagaagctataaatattttgagccatctaccttctcaccactacaatactggttgggtactgtgccaaattggaagggcctattttgaactttcagagtacatgcaagtaag

SEQ ID NO: 86795 - DNA, 1148 bp, Homo sapiens
atgaccaggctctcctagggaaagaaagagtagctaaggagaacagagtaaacctaatttaaaaatagtagaaggataaagggccagcaaatgaagtggcaggacaaataatgtaatgttttggaagtaacacaaagtttcaaaaagtagggcatgatcagtgatgttgaatgcaggaaaggctaaaataaggttttaatatctgatgagacagtgattattagtgattatttataatatgcagtttgaggattgtgtacaggacatcagggtaacagtaagttttgaagaaaattctctggtagccaaaggggaaaaacagtgcactgatacaatagtcatagatcatttaaagaagctagatggtggaaatgaatagaaataagggaataaattagagaagactgaagagccaagcaaagatttttttttctccaagggaacagaaaccaattaatgaagattagaaaaactaagcaatattaactctaaagaacaatatccttaggttttggaaagtaatcagatggttgtttttttaaaatctactcctctgaactcctttagaactgttaccaagtgccaaaggagtataaaatcttatcgtattattatttttttctgtgtataatgagataaatcataaatcttgagaatttagctgtcttaaaattttttagtacttaaccccaaatagagaaggtatgtaataaatggaggatggtcacaatgagatgaaaagaatagcttctggggatttttagtctttgaaacaaaaagcgaaagatgaaaagacattatagaggtaaaaatactgtgagattaaaacagggaaatagactgatgttcatactaatacaacaataattaacaatatgatataaatagtttatctttaaggtgacagtatattatggctgcttgtattgagaaaatgtagatgggagcgttgtgttgtcttttatcatttacagtgcagcccataattcacaaaccttagacttttcgtgttttacagtctgttgccagaatcggccaaactggaacaaagtctgtcttctcacagagtggaaatagccgagaggtaactccaattcttgcacaaacacaaagttctggtccacaaacaaggtatttatcattgtaat

SEQ ID NO: 86796 - DNA, 1454 bp, Homo sapiens
gtttcaagaatcatataactgaaaattacacaaagattaaatccagtagattcttctgttgaaccaatctattttcaagtatctggtgtcctctagaatgggttatattgtgtgtttaacactagcaaaattgctttctgaataagaaaattaataaaatttctaatgcaattaataaatgcctgaaacttacaagacctgaacagtacagggagagaatttctcagtatatttggcctaggatacataaaggaccatttttcagcattgttgcatctatgtatatatagaagggcttcaacctttactgtaaaatatgatgggttttaactcttcaacctcatctcctactttgagaaaaatgagatctagttattttcagctttaaaacaaacacagaaatctgcatttttctgcgatttgttatgtttaaaattagtgttcttgtagtttattttcatttacagctttatcttactggtaaacttttatgatatattgatagatgggttttttgggggtaaatttgattagcagaagtggacaggagatttttaaagtttggataaggcctatttcctgtttccactgatttatgcatacttgaaaaacatgtattcctcacttcctcagagacaaactttttttttttttgtcttcacaggtgaaaagccagatcctgaccaaacatttaaattcacatctttacagaactttagcaactgtctgcccaactcttgcacaacacaagtacctaatcatagtttatctcacagacagcctgagacagttcttacggaaacaccccaggacacaattgtaagtgtcttatattctagtgttcaaaatattatgaaaactacaaagaatgatctgaactaaataatatattgtgaatgacttggtagaaattttctgtttcaggaattaaacagattgaatttagaatcttccaattcaaagtactccttgaatacagattcctcagtgtcttatattgattcagctgtaatttcacctgatactgtcccactgggaacaggaacttccatattatctaaacaggttcaaaataaaccaaaaactggtcgaagtttattaggaggaccagcagctcttagtccattaaccccaaggtaagtcaaacaagatactttcaaatgtgctataataccaaatgatcttatgataactcatattgttagtaatgcagattattacaacagcaacttctaaatcactgtggaaacaggggcattctgttttcagaaaatgaagtaaaaactggcaaatagtgatgttgccaggtgcggtggctcatgcctgtaatcccagcaccttgggaggccaaggcaggcagatcacctgaggtcaggagttcaagaacagcctggccaacatggtgaaaccctgtctctactaaaaatacaaaaattagctgggcatggtggcgg

SEQ ID NO: 86797 - DNA, 1547 bp, Homo sapiens
tttacggaggttttttttattttgtcttgtatgagagggtggagggagcgtaggatcggtctttttaatactaatttctattttggtaacagacttcctatcccacgtttcctttctcggtgaatttcccaccggacaatgatggtttgagaagacaactccaagcctcagtgctgaggcgcaagcaccaataccaggggaggaggtggaaagggcacatttgggttgttttcatcctctctgatggggatcaggagcattttgttgtgcatgtttataaggcattcaggaaatgaaacacaaataatggtgtttctgtccatttcactgcctttacaccagggtatgctttgacgcacagtgctgtgttgcattaaaggaaccctattggattttaagtgtgtgatgcggtgccaagtcattttcccccctgacatctggagaaactgtatcttttgtgccttggtaatggaccaggtctgggagacttcatcccactatatgatctttaacttgatcagaattgacctctatcaactgctgtcattgagtcatggactttattttgaagttataaagcaaactgatttttagaaattccttcatattgcccttaaaaggcttgaggtatcaaacagtaaatattttaatatatcactactttcatatttatttcatttttctaaacagcatgaaatactcatttcttctagtttggtttttttctccagctgtttacatatagcagctattagtgtttgaattaataaaacgtaagattatatcttatgaaatttacctgtctgtaagttgtattagtttttctagagctatttccatccaaattctttttaccagtatagtttcttttaagatttttttttattctggctgtagatgaggtaattatatatatataattttttaaggcctaacatgaacttaaatagataagcagattactcaagttatttaatttctgttgcatattcttataattttgttttaatagttaatgatttttttttttttgccttctctggccccagaagtcttctaaagtgataaactagttgcattgatagactataaccaccatttaataataatttcagactttataaaagcatggaaggccgggcgtggtggcttacacctgaaatcccagcactttgggaggctgaggcgggtggatcacctgaggtcaggagttcgagacctgcctggccaacacagtgaaaccctgtctctactaaaaatataaaaaattagccaggcgtggtggtgggcgcctgtaatcccagctacttgggaggctgaggcaggagaattgcctgaacccaggagatggagtttgcagtgagccgacatggtcccgctgcactccagcctgggcgacagagtgagactccatctcaaaataaataaataaataaaaaataaaagcatggaaaagaaaaggaatatgtagcctgtttctagatagtacccatcaggtttcctgtttgtccttaaagtactctgagcagtaatacactttgatattt

SEQ ID NO: 86798 - DNA, 1004 bp, Homo sapiens
gaaggatcacttgagcccaggagttcaaggctgcagtgagccatgatcatgccactgcactatgggctgggcatggaaagaaatgtctgcttcccaggaaggatggcggacataacccaagctgccccagctgccaagtatatctggaaagtagagatgttgggctgccagaagggtggggaaagcagaaaggctgtgtcccgaggctaggttccctagaagtacagcttggatgaggatcttatttaagggactcgctgaggatgtagagaggagggagggaaacaggacatggcaagaggcagagctggcaggaatgtggtctcagccagatgccctccagcctgatcctacgtgaatggcaccacaaagccaggcccaccctgaggcgaagagtctagccttgagtaaccccttctccatcagtcattggccaacatctaggggcaagacagctcctgtcagccgagggcagttcttcacagaaggggcagctgtgagctgctatcggccaacctcacagcagctgggggaggagtgcgccagccagcagagctgcccccccacccgccccccggcctttcactacaccctgcatttggccacggctcctggatgggaaagaccgacaccacaggggcctggcagcactcagaggcctccgcctcctcagaaactcttgtcccatagtgtttcctttgtgaggctaaacaaagtgatctttgacaagatgggccagccagggagtgaggttgggagtggaagtgacaggtcagagccagcaggctgaccccaagccttggtagggttagcccttaaaaggtagccacagtgtggtaatgtcacaggactggcacccttccagcaaaagggaggctgagtccgggttcatcggaaagtcagaggagtaaagtaagaaatgaagagtggaagaggagaaagggaggggagccagaaaagggagggaggaacgggtgcttaaggtcattgggaacacgagcccc

SEQ ID NO: 86799 - DNA, 1050 bp, Homo sapiens
ccctgtgcctacaagggcctcatgcttgttttaatgctctgccatcactgtcttgacattcttagtaatctttgaacaagggagctgacattttcattttgcactgggcccccaaatgacatgactggttctgactttatagttctcagaaatggcatagggttcaccatcctggcacagccctggatgggacgggaagtttaatgaaggacctgggaggcttctggctgccaggtgctgcctacaggtgagggggacactcccacccctgaactccacacttgccattcaggtccccaggattgtcttacaggcgcgcgcgcgcgtgtgtgtgtgtgtgtgtgtgttttaatggaggtggagcagctttctgaatgcatggagatcagagctggactgggatacgcttaggcttgctccttctttgccttaatcactgtgtcctctctccttcagagaatgtgtggagtgtaagaagtttgaccggggagccctacatgacgaaaatacctgcaaccgttactgccgtgacgagattgagtcagtgaaagagcttagtaagttcagcacatcttagagttgcacacacccaggttctaaatgtttctaattcaatcccagaacctatccaactcccacctgtaaaatggaagcgtgacttctacctcagggaatgttgtgcaggcttgaggaacaatggacacttgatgtgagctggtgtctctgagagttgtcctcctctcttactagtgtgtgcagccatccaccacttctgcttcccagagcccacagactcagcaagagcctgcaaagcaaagggagcaagtgcctccctaaggaagggaagagaatgtatcccattttacagatgaaaaaactgaggcacagagctgggaagtggttgcctgtgatagtcatcatcttagctcagtaggctagtaagcgtttaccaagtttacttaactaaaagtgttatgcagtgcccaagattttgcttaaagctttgcagtttggagggaaaccttcaaccttatggataggcaaccaaaa

SEQ ID NO: 86800 - DNA, 1029 bp, Homo sapiens
aaattagccagacatggtggtgtgtgcctgtagtcccagctacttgggaggctgaggtgggaggatgtcttgagtcaggggaggtggaggtttcagtaagccgagattgtgccactgcactccagcctgggcaacaaaatgagaccctgtctgaaaaaaaaaaaaaaaaaaagaaacggtggcaggatggcattctacctcatctcctcctgttatttcctatcaattcccatgccaagaactaaagtgtgagcaaaatgaacattattctgtttcattgatgatgtattccagagaacggtgccttgggaaaacttctgagatgaattttaaacattcagggtagggaaggacttaaggaagtcactgtaagatgctattctgtttcctccacaggccaacaacccactgtataaagaggccacgtctaccttcaccaatatcacgtaccggggcacttaatgataagcagtcatcctcagatcattatcagcctgtgccacgattgcaggagtccctgccatcatgtttacagaggacagtatttgtggggagggatttggggctcagagtggggtaggttgggagaatgtcagtatgtggaagtgtgggtctgtgtgtgtgtatgtgggggtctgtgtgtttatgtgtgtgtgttgtgtgtgggagtgtgtaatttaaaattgtgatgtgtcctgataagctgagctccttagcctttgtcccagaatgcctcctgcagggattcttcctgcttagcttgagggtgactatggagctgagcaggtgttcttcattacctcagtgagaagccagctttcctcatcaggccattgtccctgaagagaagggcagggctgaggcctctcattccagaggaagggacaccaagccttggctctaccctgagttcataaatttatggttctcaggcctgactctcagcagctatggtaggaactgctgggcttggcagcccgggtcatctgtacctctgcctcctttcccctccctcaggccgaaggagga

SEQ ID NO: 86801 - DNA, 1045 bp, Homo sapiens
gggttatttttaactattagagctacaaatagaaagctattggagtggagaaaactattgaagtagagttatagaaaattatcagagtggagaatggaccactctaaatatttaaatggccacatgtgactggtgactgccttattcgacagtgtagatctcaaagaggccatcaattttattgttatgctcaaaagacttagatccatggactgaattacatgttgtatgtatattctctgtttgtagcattgaatgagactatcaatacattggactccacgaaagaaaattgtcagtttgacaaagacaaaaatccagatgtacttgaaaacactgataggctttcttttactgatgacatacttcaagaagtaatggatgactcctttgttgaagatgagttgatttgacagacaaccagcagcttgtataaaaaatttcttctgaattttatttagttttttgttttttgtttgttttttgttttttaatttagggaggtcagccatgggctttctggtccaaatgtttgatattactgttcttctaaatttttatccaaggatttcaaactattttaccaagtattatttaagtcttaatacttggcccctaaatcacaccataaacttgttggacactttactgtagaccatattcaggtctatgtgttatatgtgcccacagagatttagtcattacagtatcaaatttctgggtgatctgatgacctggattgtaaaattgatctcagagtatttatatatttgtggcatggctttgaagaataattttatttcaaagttaatccttttccttttatgtgttttagagaggtcttaatggttttgtagctttctgtttttggatgaaaggccctttgagaagtgcaaggtattgttgaaaaattaatgtttatttctatagccagttgtaagtgtcgagttgttgtttactttatttacaaagaatttacctgatccatctatatagcctcagcttggatgtactgagatagagtttaccccatatttagaaagcc

SEQ ID NO: 86802 - DNA, 1067 bp, Homo sapiens
gaacctgggaggcagaagttgcagtgatcttagatcatggcactgcactccagcctgggcaacagagcaagactccatctcaaaaaaaaaaaaaaaaaaaaaaaaagccaggtgttgtggtgtgcacctgtagtcccagctactcaggaggctgaggagggaagatcacctgagtctgggaggtcgaggctgcagtgagctgtgattatgccactgcactctagcctgggtgatgaagtaagaccgtatctcaaaaaataccagtttttatgatagaatttacttagttgcagaagaggggtggcaaggggaatgttaatttggctcactgtttcctgaacctgaaagaaccaaagaattagcagtgtagtgtcaaaagttaaataaaatttcttttttgtttaggaaaataaaaatataaacattttagattatcattgtttatcttctagaggatctctgggaaagtttagaaaatgctagtggtaaacctatagcagctgtgatgaatacctggaccaaacaaatgggatttcccctcatttatgtggaagctgaacaggtaaacatataaagtctttccatttgtctgatattgtattaaatgaagttcagtacagtgtatcaagtttgcttttctgtactttaagttttctagtgacatttaaaccagccctgttactcttttatcagtaattttacagcttgcatcattaaaattatacatgcttaagagagaaaacaaaatgttacttgcttgtctagtctccagggaaaatactgtaaaatttgatataattctaaaaccaccaaatatggtttattctacaaatgcaaggttggtttaacattttttaaaaaattaggccgggcgtggtggctcacgcctgtaatcccaacactctgggaggccgtggcgggtggatcacttgaggtcgggagtttgaggccagcccggccaatgtagtaaaaccctgtctctactaaaaatacagaaattagctgagcatggtggcacacacctgtaatcccagctactctggagacttaggcaggagaattgcttg

SEQ ID NO: 86803 - DNA, 1026 bp, Homo sapiens
cctgtggcatcaaagtggccattgctttctcacttaaattttttcttagtttttcaattctatttcttgcagtaagtttatccatgaaactcattagcccaattttacatttgatttaggtgatcttaagtctgtgttatttgaaatccaggatgtggtaactaataaatgacacaaatgactgcatattgttgaagtattttgtaaacacatgtacttaccattgttgcctctggctttttagttatttggacttttctctttagtattaccgtcttcatcacaattgcattttgtatactcatgagacatttggttgtgctcgttccagcatttgtcacagaaatgttgtctccctcctcttcaaaaacaaaaaccaaaaccccagatggtgtcagtactattatagcctttgttttgcttctttaggtagaagatgacagattattgaggttgtcccaaaagaagttctgtgctggtgggtcatatgttggtaagtaaatggctgtaagtgagatatgattgatgaatttggatattaactaataccagtagtattccaactaataggaaatttttcttttttttttttgaggagtctcactctgtcgcccaggctcgagtgccatagcgtgatcttggctcactgcaacctccacctcctgggttcaagcaattctcctgcctcagcctcccaagtagctgggattaacaggaacatgccaccatgctcggctaattttttgtatctttagtagagacagggtttcaccatgttggccagactggtcttgaactcctgacctcgagatccgcctgcctcagcctcccaaagtgttggtattacaggtgtgagtcactgtgcccagccatagaattactcttttaatgaatatatctaacaaagctgggcacagtggttcacgcctgtagtctcagtacattgggaggccaaggtggtcagattgcttgagcccaggggttcgagaccagcctgggcaacatggcaaaacctcatctcaaaaa

SEQ ID NO: 86804 - DNA, 1038 bp, Homo sapiens
cttttaggtccatgtacttctttaaaattggaatctgaaaattgttattccgttcagtctctgtgcttataagatcaatgtttgtaaaggcctaagctttcttagagattccactgtccaggtgttttcatatatattaagtattttctgtaaacctaaaattgaggttagaaatagaaacccacattattttgtcccttccttgttctttctactgtccctcactttggccctcacaatttcaagtttcccttttcttttgtctgtgcattcattctgtcttgatgtgttgtcttgttttaatccattagttggcatagatggtcttaattgtttttcatccagatatatctaaaaccagaactccttttaaacatacaaaaggttgatttaaaaaattaatggagctgtttaatagtacttactggatatctttgcagttaaacttaggaacagttgggttttatcggacccagtacagctctgccatgctggaaagtttattaccaggcattcgtgacctttctctgccccctgtggatcgacttggattacagaatgacctcttctccttggtgagcatctgtgacttaagtaatatgatggattttgctgattaaaagattctgtttttcctggagtgtctgaaacataattagaagaatatgggtcttcatgatggttaaaaacacctttgggactagagcaaatcactgtttttaatatgacaagattgaggctatataatttaaatcccatttcactactcctaagccagctttctgaaactcttaattaaactatcctttgtaaggcaaaaaattcctttcttttcagtagaaataaatataagccttgaagaaatgaccctactgataggtttttaaaataattaagtcagagtgattttatgtttttctaaatagtggttgtactttgctgggaaagccataatttttaaacattgtgttcttatttcaaattatatcccattagctttagaattatatttatatttggctttcttccagaaaggat

SEQ ID NO: 86805 - DNA, 1023 bp, Homo sapiens
acagattctctccgctgatctgaggagtcctgtaggttttcatcataaattcccttgacttataggtaacatcattttgtgaagcatggaacttttttttttttttttttgagacagagtcttgctctgtcgcccaggctggagtgcagtggcatgatctcggctcactgcagcctctgtcccccgagttccagtgattctcctgcctcagcctcctggctagctgatattacaggcgccgccaccacgcccagctaatttttgtattttcagtagagacgaggtttcgccatgttggccaggctcgtctcgaactcctgacctcaggtaatccacctgccttggcctcccaaagcgctgggattacaggtgtgagctaccatgcctgtaactttttttaaaaagcctggaacattttttaatagccaaaactgacctaagaactgacccacaaaccacgtctaactctattttaatatatactatttaagtggtttatagtcctcttcttatttgtttaaagtttctcagtcagtgttgcagtgctgaaaggtgattagctgtgcacattcccctgaaagctgctgtgctctgctggtacaacatgccatttacctttgtggttgctcacaggcactgctagctccttaactacagtttgtaatattcacatttataatatttacttttttttttttttttttttttttctgagacggagtctcactctgttacccaggctggagtgcagtggtgtgatctcggctcactgtagccttcacctcctgggttcaagcagttctccgtgcctcagcctcctgagtagctgggattacaggcacctgctaccacgcccagctaatttttgtatttttagtagagacagggtttcaccatgttgaccaggctggcctggaactgctgacctcaggtgatccgcctgcctcggcctcccaaagtgcagggattacaggcgtgagtcaccgcagccggccaacatttacaatattgtttacttgcttt

SEQ ID NO: 86806 - DNA, 1021 bp, Homo sapiens
gcataatcccactgatcagaaaccatcattaattaatactaccattttgatgtatttccaggggttctcccccaccccctttttttggaaacacagtcttgctctgttgtccagactggagtgcagtggtacgatatgggctcactgcaacctccacctcagccttccaaagtgctaggattacaggcgtgaaccactgtgcccagccatatatatatatatattttttaggataattctgctttgtctgctttcttcacttaaatataagaacatgtttatgatatattcttaaaatataactttcaataatgcatttttataagtacagtattcattttcaatttttcactattataaattaatttgatgatctggtataagaacactaatgattagtttgttcttctaaaacagaacattagccagatatcaatgatgtaaagaatttggctatgatagattttacctcttagatcttgatgttaaactggtctgaactaatgacaggctgttcatctggtagcatttacatctagtgatttacttactgtaacagcagatgacaaatttagtgccaaagcatcattttttttttcttttatttttgagacagagtctcgctctcttgcccaaactggagtgcagtggcacgatctcagctcactgcaacctcccaggttcaagcgattctcccgcctcggcctcccaagtagctgggattacaggtgggcaccaccacgcccggctaattttttttttttgtatttttagtagaaacagggtttcaccatgttggccaggctgatctcgaactcttgacctcaggtgatccacccgcctcggcctcccaaagtgctgggattacaggtgtgaaccaccgcacctggcccaaagcatcttgaaaagtattctctttctttaatataatgccctgccattcttacctagtgagaatatagaacctaagttttaccttactggggaagaagctcatataatcatatgcagaacatccaag

SEQ ID NO: 86807 - DNA, 1030 bp, Homo sapiens
gagtagcttgctaatcatggatattatttagtgacatccatgattcactacacccatacattgtggtctttgctctttaaatgtttcctgtggccaggtgcagtggctcacgcctgtaataccagcactttgggacgccgaggtgggcagatcacctgaggtcgggagttcgagactatcctggccaacatggtgaaatcctgtccctactaaaaatacaaaaattagctgagcgtggtggtgtgtgcctgtaatcccagctacttgggaggctgaggcaggagaatcgcttgaacctgggaggcagaggttgtggtgagccgagatgaggtcattgcactccagcctgggcaacaagtgtgaaactccgtctcaaaaaaaaaaaagtttccttaaatagttactggctttatttaaggacttctccatctcccatcacacatcctttataacagactgaagttggcagagaacagaatgatttatttttagggtaaatggaagtttgttctcagcctcttggtttcacttactgtttaaaaccattgttttgcagctatcagttgagggatttgcagttgataaaatggctggagaggttaaggtaaggaaaatactgtttactcttcacttttcagtctagtaagtaaaaacaataacctggttgtaattatagtgttgggataatgtactgtagcatctctgtgtttttgtttagagaaagacatcatgcagggctgtataggccatattaagaatttcctaaaaatggccaggcatggtagctcacatctgtaatctcagcactttgggaggccgaggtgggtggatcacctgaggtcaggacttcaagaccagcccgggcaacatggtgaaaccccaaattagctggacatggtggtgcacgcctctaatcccagctactcgggaggctgaggcaggagaattgcttgagcccgggaggtggaggttgcagtgagctgagatcgtgccattgcactccagcctgggtgacagagcgagactcctg

SEQ ID NO: 86808 - DNA, 2060 bp, Homo sapiens
gtggcagtggtaaattctcatgcctgaagattatgcatccttcatatagaccagtgggtattttttcataacctgtaatattaacttcttattgctagtaatgatcctgcattctgggttgttttataccaggctttcttcgagagtcacccagctccttcagctgagcgtaccatccagcagtgttgtgaaaatattctgctgaatgctgcctggctaaagcgagatgctgagagcatccaccagtacctccttcagcggaaggcctcaccacccacagtgtgaatcctgaggtgccgccattggcggttctgctgcttcgctgcagggataaggtggagctaccgaacagctgattcatatgccaagaatttggagtcttctttcaaaccagtgggggttggacaatgaatgtagttaactggttcctgctcacactccagaattaaattctattgaaaaaggaaaatcagcaattcagcaaaaaataaataaaaaataaaaatgtaaatatgatagtaataaaatagagcataacgaaactgtgaaactttctgaagccttgtcagtggttaaaagtatttaacactctactgttaatgacagatgttctgtttttataacctaccaaaaggaaactagaggcttcttggtgaagagcatttttgtgaagtgggttctgcaaggagcctataaagccaagggtggtgtccatttctgggaatggttaaacacaaaaggctgatagctggtatcacatagttggagtcagtgcataattccaagtggctttttttttttttggcacggggactgatcaggaagatatattcctgcataactcaatctgaaccaaggattgtagtttagttttcctccttgccttcccttctgtgtgaccgaccccttggccaaaaaaaaacaaaaagcaaaaaacaaaaacctaccctgttctggtttttttcctccctttagttccacccccaacccccattccctggtgtccttcttagagatgaagaaataataaggaaacatctttcatagccacattaaataagagaaactgatatacattatttttttctttttaaagatgacttataagaaccctgaaatttatataggtgagacaatagaaataaaaagatcttcagccaggcctttctgaaggagttattctgctaaaaatggtcttagttgtctgaaaagccagctcttgaacctcttcacaacagtatcaacactggcttctcccggttcattttatgcgtgcgagaagtcagtggtaactgctgcagggcttaatacattagtggtaactggtttaaaaaacaaagactgtaagcctgtgtgtgccactgtttgcttcaacagtatatcctaataagcctcacctatttaatccaatgagttttaaatctaaatctcattcccttcttctttccctaccttttttttctttttttcttaaaaaaatattttgtgttattaacagaaattcatatttggtgtggcttaacggtatttcagaaggtcatcagattgtgagactgcttccttgaaacatttttgtgctattgttttaaaaaaataattaaaaaacagttggcgttaataaaaatgtcaatgtgaaactgatgtcctgattcactttattctctttctttgataagaaactaaaaactttcctatcattcagtaggcttatgcaaagttatactatcataggatttttcaaattcaaaaaaaatccagttccttaattcctaatttatagatcttaacagaaaaatcctgagattcattctaaatcagttctacattctcaaaactctctcagagactcttatagtcagcattcaggaatgaacttgagacttcctcagtccctagttttgaggcaccctagttcaggcaccatgctcagggctgcccttaggctctcaaatgttcttaaggcaccagtgaagcaggggcaccaaaaagactgagaaaaatgcaggtttaattgaagaactcagaattttgcaatcagaaattctggaaacaggttattt

SEQ ID NO: 86809 - DNA, 1046 bp, Homo sapiens
cacgcagcgccgcgcaacctaacttcccttccctccctctttctccctcccgctgcaccgccgccctcaggccgcgcaacgattgggcggcaggcagctcggcgcgccaagccattggccagtcgcgaggcccggggcgggacacacccaccggcttcccgatggcggggttaggttggaccgggttggggggggagggggaggggggagggggacgggatggggcggggtaggttcccgaggcctgggcctccgggagggcgggaaggccccgcacgcaggggatggggacgcggcgggatgggcgcggcggggtagcacgcaccaggttctccacggccgcacgctccaggaacttctgcgccgcttccagctccagccgatctagggggaggaaagtgggagacggagcggggtcagaggggccgggcctcccctcccccaccccaatcacctcagccctacccccggctcctgcgtcctaccgggagacacggtcttctcgagaatggtgatcagctccatggcggaggtggcggcggcggcgactcctcctaagacgacggcccggcctttcgggcggcggctcgaactggggatgggggttgggggtcgggtgggaagggagggtggggtggggggcgggggtcaccacaaacccattcaccggctctgtctgggtagtcggtccggctccccttcctctcctcttcccttacttcctccctccaaatgggctgctggcggcgggggagggaccctgggggcagctcagagcgcgctggtgctcgggaggcggagggagaaagaaggaagggaggctgtgagtgagaggcggcgcgcagggagggagcgagggagggaggaaggcggagggatattcggaccggacctctccgcggaggcgccgcgctccacgacgattggccgttgtcctggccacgcggaatccctaactggccaggcgctcagcgtcgaagggccgtctcgcgcccattcgcctgctggtttcaaggcccgggttggctgggcgggcagcggaatgg

SEQ ID NO: 86810 - DNA, 1061 bp, Homo sapiens
gggagggagaaagagggagggaagggaagttaggttgcgcggcgctgcgtgttcagcaggggtgggggcgggggagtcgggcctaggggccatgtggaagctccgggcccggccgcccgccctgtctgaccccggccggcttctccttcctatcccgtggcccctgtggctctccccacctatttcctagagctctgccctttcctagctaccttggtctgtactcatggccaggcctggcacccgactgcctcttaacccatttccactgatatttttccctctttgctcggttattcctctcttggggttttttctttttctttctttcttttttttttttcttctgacctggatgaatagagacctaatcactagggatctgcacccagaaaacagactgaggctcatctttgagatggggcctgtttgctgatgaaatcacaggggaaagttcctcgtttttcatattttaaaatttaaggggtccggagaaaatgaagctaagtccgctagagactggtcctttgtataaaaatgtgggatggattggttgaaacagcctagatgccagttaagtttctctttggtgtccatctcctgttgggggatggggtcagagggaaggattggatgatgcttgacatctttgagaaaggtaataggaattaagtctgagtaacactaaccatatgtgttcctttgtgttatataggcaaaatgtcaacatcaacaaagtgacaaggcttattttatacagactgcctttgaatgatttttttgttgtttttcatatgtgccaatttttacaactaacctgtttatcctttcctagaagagatttttccactagtataggctgataattccatttagggtattattcctgtttctgcttttgcaaattttgcaaaaagctttttatcttattcctaacattcttaacattctttagtggtacataattaataaaacttttaagaattatcttctgctgtgattgcagagcttgttagcagtaagaaaaatgtgtctgcttttgacttttcctgctaactttg

SEQ ID NO: 86811 - DNA, 1933 bp, Homo sapiens
accccccatcataacagccattcatttaacaaacattgagtaccagacattattaaaagttcttgggacacctcagtatacatagaagactgactactactaccatactctgaaaccttgcaattcgggggtctaacatgacaatttgggcactaagaatgatcttgatagggaaatctgtaattcctcattaagtgctaggctccacgagaaaagtggaagacttcctgttacactaagtaacatttttatagaagtcagtgaagtaaatattttgtggtttcctgaaatgcttatatcaaaaaaaaattagacattagttccccccctcgccgcccctctggtggttcagtgctctataaattatcctcagttgtggaaattcctaagatatttttatttacaaatttatcttcccttaacagcccactttccttgtggaactgtccagagtgctggcaaatccaggaaacagtcaggttgccagagttgcagctggtctacaaatcaagaactctttgacatctaaagatccagatatcaaggcacaatatcagcagaggtggcttgctattgatgctaatgctcgacgagaagtcaagaactatgtgagtaacgcttatctgtttggttatattgcccagagaacaagaaatcgctttctcagatcttttgctatttgcatgggatagagctaacagtgtgataggtttctgggacctcaactttacctaaagataaaaattgtctttgtcttaaatctttctcaacacagcttgtccattcccattgatggattggaattctttttagatgactgaggtaggctgcagcagtttgggaaactttaattacgtgccataattggtaaaatctgtttggcaaatgggagtagtgtacaaattggtgctacatttgtataaaaattagggaatttgttaataggtatttccaagctctccagaaattccgattcggtacttctggagtacagctcagggaatttttttttttttttttttttggagacagtcttgctctgttgcccaggctggagtgcaatggcatgatctcggctcactgcagcctccgcctcccaagtagctgggattacaggcacccaccaccatgcccagctaatttttgtacttgaagtagagacggggtttcaccatgttggccaggctggtcttgaactcctgacctcaggtgatctgcctgccttggcttcccaaagtgctgggattacaggagtgagccacctcgcctggctgttgttgtttttaaattaagttctttagtgatctgtcttacatgggtaaggcacaaagaggagtgagttaaatatctgtgcagtcatcattttgtccttggtatttgagtggaaactagtggggaattcctacatatgtacttgtgcaggacatggttatgcacatcatacttgctatttcctggttctagatatcagcattaggtaaagtagtgccctgtaaggcagtaacttctgtatctggttgtgtacctccttctgtcaccaatcttgcatacccatgataaggagccgggttattaaatccaacttggtttcaaatcgttttggagcatgtagagctgtttctattcatgttggttctgcttgtgtaataacaacattttaattccttctccctcagctaagtgacataaatggaagtatattctatcactggaaatctcgatactgatagtgcccattcagtttctcatcttccttaatttacacactagtaaatgggataagatgtaattggaattgtaattggcttattttttggcacatcactcttaacaccaaccctttaaaaaaaaattagacaataatggctgggcgcagtggctcatgcctgtcatcccagcactttgagaggccgaggtgggtggatcacctgag

SEQ ID NO: 86812 - DNA, 1056 bp, Homo sapiens
tttgtccattctagctctgctagtcctcgagagcaaagcctttcatttaacatcaatcagaactgtttgtagttgggtagagctgatgggggtgggggccagggatgatgatataccgtataagaaggaaagggggagttcattattggtgctagctgcaaagcaggatactaagtgatccgacccagtcagcagagctggcctgaatatctggcagctattctttgtcccgtgttcatgccagaacagttaactgtttgcctttgagtggactactgattcttagtgagttcattgactgaattagctgatcacggtaataattagctctaggtcaattgtggcttcatcttttatcatacctgtgcctttactctttacataaatggtggcgtggttaccatgtcaagcgagacatgtttaatgacaagtggatcttgttttgacatctggctagattttggtatctgtcagtgatagaacagttctttgattcttgggcaaacagaacaaatcctttcagattggaagttatataaagattagttcataggtgttattaacatcagcaacgttgtttttgtatttagtgatgttgttacttgaccaaggcctttctatgtaagtcaccccgaatgctgagttgttagtgattagaaggaaaaagttttgtttcagcccacgtctcatgagtaagatctccttggatcagattagacagtgatctactgtgaataagacccacctgaatgccccagaactagcttcattctagtgtccatgtctgtctacaaaacgagggtgtgaacatcctttccttataacagcaacaatgagcctggaagatgagttttgtccccatctctctcctttgccatttactgctacctcctcttgtaacttctggtttcccacctcgtgttgaaggttgaagtgaggtgggatgactggttttgtttctaggttctagggcagtgttgattatgctgatgttgctactgaggctggttttttctgacagcctttcctacttctccgtattatagataagaattc

SEQ ID NO: 86813 - DNA, 1023 bp, Homo sapiens
ctgggtttttaccatttcttgactttggaaaggtctgaaaccccagagcaaatggcaattctaattgattagaaaactggatttttccttaatagattttggaagatttaggagggtagcacataaagttcattctcccttttctcaccacatttgatgtgaatttgctacctctcagaaaacaaatttggtctctgaaataaagcagatgttttgaattctcttatataaggaaactgattttcctacatgtaaatttttatcttttaaccatttttatttaaaacttgtgacctacatttttctgtttcctccctgaagtctttgttagtggtcattttggagattaaaagattagggacctcattggagggcaagtcacatagcagacaccgaaggtaaactctttatagcctttatagtgctgtaccatctcaagggagagtggcttgattgtaccaggcagggctgtgtggggccctgagggggagtgagaggttttccttgtagagggagtctggaaatcttcctacgtacaggttatgctctcctaattctctttatttttattcctcctacagtctgaaaggcactttattatgcaggtggtctgtgaagccacacagtgtccagatacgagggtaagtgtgaggttatatgaaaaatctgtcttacatctttcttaggaaatgtcaaatctaatataagtttgaaatactgggaatcagttgacttcagcaataaggtttgattaatattgttactaataattaatattctggctgggcatggtggctcacacctgtaatcccagcacttagggaggccatggcaggcagttcacctgaggttaggagtttcataccagtctggccaacatggtgaaaccctgtctctactaaaaataaaaaaaaattagctgggtgtggtggcacgtgcctgtagtcccagctgctggggaggctgaggtacaagaatcgcttgaacctgggaggtggaggttgcagtgagccaagatcatgc

SEQ ID NO: 86814 - DNA, 1020 bp, Homo sapiens
gtgggaggattgcttgagcctggtggttgaggctgcagtgagccgtgatcatggccactatacttgcaccagggcgacagagcaagaagactgtctcaaaaaaaaaaaaaagagaaaaatggccgggcgcagtggctcacacctttaatcctagcactttaggtggccgaggtgagtggattgtctgagctcaggagttcgagatgagcctggtcaacatagcaaaaccccgtctctactaaaaatacaaaaaattagccgggcatggtggcgggcacctgtagtcccagctacttggaaggctgaggcacgagaattgcttgaatcggggaggcagaggttgcagtgagccaagatcatgccactgcactccagcctgggcaacaggagcggaactctgtcccttccccgaaaaagagagacaaaatgggaaaataaaggaacagataatgagggaattaaagggagagaatgaattttagggaaatgataacgtatcccatatttacctcaattaatccttaggattattggcccatttgagtgaatctaactttgtcagattgcgttgttattttagtaaactatctgatctgctgttcataaaaggtacgagtggctgctttacagaatctggtgaagataatgtccttatattatcagtacatggagacatatatgggtcctgctctttttgcagtaagtatttctatttatgtgatttgagcttgtggctaattacagagcccatcatccttagtcgctattttgccaattctgtaatattttacttaatactatggaatcaaggaaattcctcgagactgttcggtttaagctcatcagtggtgtgccaagaaaactggtgctaactttgtgtgggtaaaagaccttcattttgaggtcaggcccggtggctaacgcctgtaatcccagcactttggaaggctgaggtgggcagatcacctgaggtcaggagttcgagaccagcctggccaatatggtgaaaccccgtctata

SEQ ID NO: 86815 - DNA, 1945 bp, Homo sapiens
tggtggctcacgcctgtaatcccagcagtttgggaggctgagactgacagatcgcttgagtccaggagtttgagaccagcctaggcaatatggtgaaaccccgcctctacaaaaaatacaaaaataagctgggtgaggtggcatgcacttgtggtcccacctatggaggaggctggggtgggaggtttgtttgagcctgggaggtggaggttgcagtaagctgagattgtgctgctgtactccagcctgtgtgacagagtgagaccccatcaccaaaaaaaaaaaaaagaaaagaaaatctttcttttcctatcttttctttcaagcctagcttcctttttatagttacatttctgaaatttgcatgtctgtggttaaagccgggttggggcagggactcacttgaatcagtacttatttggggcctggggtgtttttcttcttaagatcacaatcgaagcaatgaaaagtgacattgatgaggtggctttacaagggatagaattctggtccaatgtctgtgatgaggaaatggatttggccattgaagcttcagaggtgagctggggagaactattactctgaatacgctttgggacatatctcatttgtggatgatgttccccttctaggagaactttattctgtctgggtttagagggtatctccattggcagagattttgatttttctgctagccagagcccttcatgaaggaggcacatcagtaatgagggctcacgttcttgccaagcagtcaggcatgattgatcgtaaatagtggtattatcactgtgaacacaagggggcagcaggctgtcgcagtttaccaaggtgatgcctgatgctgaattatttccttttggaagtcctaatgcaagcctaggatgtataattgatactttactaactctggtgaaagagtcagatatggaagagaatggggagttctgtacttgggatctttgaattcaagttttgtttccagcttggtctttacacacttttatttcaggacaaaaataaaaaggttttttttggcatctttaggcaaactgagtgtgtgttgatccaaggaacactgaaatatcaggttgtccatatgaattgaacttatgaaaaaaaagttatacttaatgttgccttggacctatattatatggcctaaaagattctcactgaagtagaccaaaaaattagcactttccaagatcacattgtatgttaccatttgtccttgtatgtttctgtttctgttaagagatccctgttcggctctcattgtatgcctttagtatacagagctcggttgcttttgtctagaatttgctttgtttctcctcaggcagcagaacaaggacggccccctgagcacaccagcaagttttatgcgaagggagcactacagtatctggttccaatcctcacacagacactaactaaacaggtgagttaccttccaaatataggtaggtaagctgtggaaccttactaagagtaaactgtggaaactttccatggaaggaacttcgcagcccatcaactatttgatgttctgttgttgatgacttagaaacagctaagctgcatctataagatcccctaggctctgacttctttgtgaaggagaactgagtcttaacatctcagatgcatcttgctcaggaatgagccacatgctgctctgatttcctgagtgctccattgtccaaactcataaaagaaaggtgctctgtcaaagcttcagtgaagcaaggttaggagcaaagatgtgctggttttaggccacttgcgtatctgttgtaatatccaggatactttcgtgagttcacagggtgtatgtttttaaaattctaaggaagttggatataagttattcagatgctaatgaaggaccccaacccaagaaagaaacccttctactgatcctttaagataattaact

SEQ ID NO: 86816 - DNA, 1229 bp, Homo sapiens
gagtagctgggactacaggcacgtgccaccacacccagctaatttttgtatttttagtagagatggggtttcaccatgttgaccaggctggtctcaaactcctgacctcaggtgatccacccaccttagcctcccaaagtgctgggattacaggcatgagccaccgcgcctggccgattttggactttacataactggaatcatacagcatacattctagttctgtattttgttctaaatgtttggaattcattctttttggatgtagttgaaattttttcattcttgttgtgtagtactaaatggaatcttcttccatctgaatcttgtttaacaaaggctatgctgtgatgaatgtttgtggaagagacaaaatataaaggtcttatattttatttccctggagtttaagttctaaagacattcaagagtagtcagaggacctttagagttaaaatgattctttggacaaaatcttaactagtgccatattctttcaccaggacgaaaatgatgatgacgatgactggaacccctgcaaagcagcaggggtgtgcctcatgcttctggccacctgctgtgaagatgacattgtcccacatgtcctccccttcattaaagaacacatcaagaacccagattggcggtaccgggatgcagcagtgatggcttttggttgtatcttggaaggaccagagcccagtcagctcaaaccactagttatacaggtgaaactgagggatttttggagtagaaagtaggatatttattgtttaaacttaaagcatatctttatttttcaaaacaaaactgtaaattgtcatctacaaagattatctctagatacttgtttacttttaatgagggtaaaatatatttcttaggtttttaattacataagtcagcatgatccagagacatgtgaaagaagccaaaagagaaaagtcatctttaatttcattgcccagaaataccactcttaactctgtatttatccttgaagctttttcctatgtgcatgtgtgtgcaacaggctcttcctgtgcagattgttttataacttgtttcttcatttaatactatgttgtaaacatttcccaataatttttttttgcacctagcactgattccccataatttttaataatggcattattattctattctttggacaaaatgtcctttatgtaatgaaaatgttcttatggaaatgttgtgcttgttttgct

SEQ ID NO: 86817 - DNA, 2135 bp, Homo sapiens
atctaggctcactgcaacctccagctccccagcttaagcaattctcgtgcctcagccccctgagtaggtgggactatgtgccaccatgcccagctaatttttgtattcttagtagagagaccgggtttcatcatgttggtcaggctggtcttgaactcctgacctcaagcaactcctgacctcaagtgatctgcctgcctcagcctcccagagtgctgggattacaggcatgagccatcatcatgcccggcctctatctgagtaatttattgcagactactaaaagcatttacaccaaattcttaatataaaactctaaactggagttttgaaagatattttcaaatattttgaaagatgtttcacaccatgtcctgtaaaattacagaagtatcttggtgacttttttgagttaagccatccatcagtatttctttctctggggtagtagttaacatgaattttaatctttgttttgctttgctaataactgttatattttcaggctatgcccaccctaatagaattaatgaaagaccccagtgtagttgttcgagatacagctgcatggactgtaggcagaatttgtgagctgcttcctgaagctgccatcaatgatgtctacttggctcccctgctacagtgtctgattgagggtctcagtgctgaacccagagtggcttcaaatgtgtgctgggtaagggattttcttgctggtgagaaaaggagcttgcctgcgccactggcaagaaagtagaaggtgtgggagagaaatcaatctgcctcactggaatgctttttctgattttctttctaatttattcaattaaaatgtgggggagattccaactgcaagagccagtgggaacacttgacttatggttactggttcctgaaccacttagaacagtcatggtaacccagtggggaaactatctggacttgggttgctttcttgaattgcttggggacaagaagttttgattaaggtagagagtttttggctgtaagaagtatcattgctgagtagagggcaagagggaaggaaggtaggcagcctaaatgctgagtcagtataggctaatgtaattggttaaggggaggaagttcaaataaggaaggaatggggctaaacgtctttctgtgaaaggaaacagaaatgaaatggcaggtatggttgaaagtactctgctgcttagagagttgtcagattatcaaacaggatgatgagagatgtcagattatcagacaggatttctgtgattggaaacagaagaaatggcaggtattggtgaaagtactctgctgcttagagagttgtcagattatcagacaggatgaacaggaagtacaaatcaaataaataaatagttagtttaaaagatacctgtaaaatgctgtcttgagatgaccttggcagaaaaagttggaagttcactgacacggcccaaagtatcttaatgaaaaatgagataatcctaaggtgtggggttctttcaggattaacattgaacctatgtgcatttcaggctttctccagtctggctgaagctgcttatgaagctgcagacgttgctgatgatcaggaagaaccagctacttactgcttatcttcttcatttgaactcatagttcagaagctcctagagactacagacaggtaactgatatttcacagaaatgagtgacgtctttgcatccaagttctattgccttctgtgtggaggatatctagcttaatcatagaagcataatgagacaggacaagactctaccttctctagaggaattaaaagaaacccgctgggcgcggtggctcacgcctatattcccagcactttgggaggccaaggcggctggatcacctgaggtcaggagttcgaaagcagtctggccaacatggtgaaaccctgtctctactaaaaatacaaaaaattagccgggcgtgctggcgcatgcctgtagtcctagctacttgggaggctgaggcaggggaattgcttgaacctgggagatggaggttgcagtgagctgagactgcgccattgcactccagcctggacaacaagagtggaactcgtctcaaaaaaaagaattccatgattgattgattggtttgtttaaagatggagaaa

SEQ ID NO: 86818 - DNA, 1022 bp, Homo sapiens
ctgaggagttctgcatatgaatctctgatggaaattgtgaaaaacagtgccaaggattgttatcctgctgtccagaaaacgactttggtcatcatggaacgactgcaacaggttcttcagatggaggtgagacctaagagtgcccctgactatgggtgggaattgggtagtacttttgacacctaggtctgttttccagactgttctgtctttttagtgtttaagtatatattttctcagaaagataataaagcttatacaaaaaacattgcaccttaacgttagcattgtttgtcatggtttactcatatatgtgttacactatatgtattatgggttttttgttgctgttgtttactttcctatgttagtattagggaagattattaaatggtcccagcaaaagtggaaggttttcatgtagagtatgttttcttattttctttgtagtcacatatccagagcacatccgatagaatccagttcaatgaccttcagtctttactctgtgcaactcttcaggtatggtggtgccttatgacttaataactccaggttggagaattattagtatctcagtataacaagttcgtgtacacacagaactcgaaaatggtatagatgatgcggatcagaagctgttctcagaaggctttggtctgtgattggttgattgggagaggaattccccacctgccttacctgtctgtctagaaagattcaaatcctacttatttacagatggtctagatgtaatcttgataaaatcaaaccaacttgacttctcctaattcaacatacactcctcagacctctcttcctcactcgtttgtttcaactaatgtcactgtgtagagaaggaaactacttaatgtgtgatggttccttccagatgtatagctcatttgtgttggcagcttgaatggttttggtttttttattttgaaaaccaaaaaactcttggtttttcattaggttattcaagcctagctcagtcagatttggttcccagctatagttca

SEQ ID NO: 86819 - DNA, 1050 bp, Homo sapiens
cattagttgaaacaaacgagtgaggaaggaatgtttgatgggagaagtcaggttggtttgattttatcaagtttatttctaggtcatctgtaaataggtaggatataggaagggttgctttttgtttgttttatgaataagagctctaaggtgatagggccttctctaaagctgaagtaatttaactatcattccagtaagactggactatggcggctaccagcagggatttgtcagacagtaagacaaatgaaattgagaggacatgaccttctgcacaacggaggatcagctcacgtttgttctgaattgagaaacaggagaaatgttaaaatgtattgctgatgattggtactgtcaatgtttttgtgtataaaatacatttggcattcccaaaattaaaaaatatcaagggacttaattgattttaaaaagaaaaggtatagtgttctgattgggagatttggaatcaactgatcttgaactcttactcatttcacagaatgttcttcggaaagtgcaacatcaagatgctttgcagatctctgatgtggttatggcctccctgttaaggatgttccaaagcacagctgggtctgggggagtacaagaggatgccctgatggcagttagcacactggtggaaggtcggtgagaaatactgtctggtcagggaatgtctttggaatgtaggcatttcagtggccttaaataattgtcacccaggctggagtgcagtggcacgatcttggcgcactgcagccttgaaatcgtgggctcacatgatccttccacttcagtgcccccacagtagctgggactaacagatgcacaccaccatgcccagctaatttttatatttttggtagagatggagtttcgccatgttgcccagactggtcttgaactcctgagtcaagtgatcctcctgcctcagcctcccagagtgctaggattatagatgtgagccactgggcccagcttaattttgtttgtgtgtgaagatagggtctcactatattgctcaggctggtctcaaactcctgggcc

SEQ ID NO: 86820 - DNA, 1850 bp, Homo sapiens
gtgggagacttgtgccgtgccctgcaatccaacatcatacctttctgtgacgaggtgatgcagctgcttctggaaaatttgggggtgagtatctacacacaatctaattaaccagtcttctttgaagaaaacaacagttggaaagatagttaaatatcgaccaggctgggcgcagtggcctgtaatcccagcattttgggaggccgaggcaggccaggagttcgagaccaacctggacaacatggtgaaaccccgtctgtactgtagatacaaaaaaaattagccgggcgtgatggcaggcgcttgtaatcccagctactcggaaggctgaggcaggataatcgcttgtacccgggaggtggacgttgcagtgagccaagatcacgccattgcactccagcctgggcaagaagagccaaactccgtctcaaaaaaaaaaaaaaaaaaaaaaaatcagtgacagggagctgtaagtttctagaacattggctttgggcttataaagaggggagttgttcatttcacagatgactctgaagaaagattgtaaagttaaaggaatgtgtgctctattagagatttttaaaacaaaacagtaaaatgcaaaggaaaagtaaatacagttgttccttgacttatgatggagttaggtcccaataaacacattgtaaagtggagaaatcatcaaaccatcatgagcaggggaccatttgtatattatacctctctccagagatagccatcattaattattgtacatgtgtgttctcagacaagtcacttgattcttaagtcagtctcctcatgtgtaaagtgggaataccaatacctgggctagcttcttagagttggtgtgaggtgcaaatgggaaaggttttgtaagctataaaggaccatccaaatatttaaaatcaatagttgcttgttagaaatgaaattttcatgaatctttggaccaaacaagttttgacttaattcacttttccttttgttccttgtcagaatgagaacgtccacaggtctgtgaagccgcagattctgtcagtgtttggtgatattgcccttgctattggaggagagtttaaaaaatacttagaggttgtattgaatactcttcagcaggcctcccaagcccaggtggacaaggtaagcttaaagctatcttggctgttctttaagtctagctctaattggagggactattgacaaacatgcagctaaaagtgatcagtgtgatgtaggttctgttctttgtgtcttacagtcagactatgacatggtggattatctgaatgagctaagggaaagctgcttggaagcctatactggaatcgtccagggattaaagggggatcaggagaacgtacaccgttgagtatacaacccagttcccttcgtccgctcgccaatgtgcacttagccaagtgggctatgtctgtcattctgtagctcgcttgtgaacctagtgcctgttgcttaaaaggctgggagaagggggagcagtgccctaatgaagagagtggcttggggaaaactgtagactactgtttttgctctgcttcttctttcttttttttgttttgagacggagtctcactctgttgcccaggctggagtgcagtcgtgcaatctcggctcactgcaacctccacctcccaggttcaagcagttctcctgcctcagcctcctgagtagctggaactatacacatctgccactatgcctggctaatttttatatttttagtagaggcaagctttcaccttgttggtcaggctggtcttgaactcctgatctcaattgatccacccgccttggtctcccaaagtgctgggattacaggcttgagc

SEQ ID NO: 86821 - DNA, 1633 bp, Homo sapiens
gtcgacttgaggaacgacacattaatcaaaggaagaataatttgatataactatatgcatctagttatccagcttggaccttgtatgataggggtataatagttggaaattttgaaaaaggatgtagtcctgccatatgagggacagctgcatcagaccttctctctcttttttttttcttttttttttgagatggaatcttgctctgtcgcctaggctggagcgcagtggcgcaatctcggctcactgcaagctccgcctcctgggttcacgccattttcctacctcagcctcctgagtagctgggactacaggcgcccgccaccacgcccggctaatttttttgtatttttagtagagacggggtttcaccgagttagccaggatggtctcgatcttctgaccttgtgatccacccgcctgggcctcctaaagtgctgggtttacaggcatgagccaccgcacccgaccaataccttctctctcttttatagcggatgtgatgctggtacaacccagagtagaatttattctgtctttcattgaccacattgctggagatgaggatcacacagatggagtagtagcttgtgctgctggactaatagggtaagttataccctgcttctaagagctgaatagaacttctcacagaaaatgagaaaacatggagtaaggagttttgagagtatcgcggatggcaacagttcacttttttggcacagagatttctttgcagaacgcttcatgtcctgttttgagtgttcacatgatagtttattccagaccctcaaggtgtctgtattacaccccattaaactctgatgttggtcaacaattgcctctgtctagtgacctctactgagggttttatttatctttgaaatttgctaagaaacccatagcactggtttggaaggctcaaaacattatactggtatggggctaggagctcattctcagctgtgtttgttttgcacagggacttatgtacagcatttgggaaggatgtactgaaattagtagaagctaggccaatgatccatgaattgttaactgaagggcggagatcgaagactaacaaagcaaaaacccttgctacatgggcaacaaaagaactgaggaaactgaagaaccaagcttggtaagatcttgcctccactgtcctctttcttctacttcctggaggaggggggtatgttttctttaggccattctggcaagcactgccttctggcattttttttgtttgtactttttcccatgtaggtgcttctgagtcaggcagcctcagtttttccttgagccaaatgtttgactcctcatagtgatggagagcagaacttttaaaactggaattcactgaaattccctgagtattttgggtcctaataaaatcatcagtaatgccatttccccctaattctcttctgttttctattcctttcctcatgccctattctttctttacagcagtgcttttagacgttgcctagctctagagaagatttccaaagtcaaatgtttttttgtgtgtgtgtgtgtgtgtgtgtgttttctttttgagacagagtctcactgtcgcccaggctggagtgcaatggcacaatctcggttcactgcaactgctgcc

SEQ ID NO: 86822 - DNA, 3495 bp, Homo sapiens
gtctcccaggtgtgcaccaccacaccaggccttggctcctactttgaaatgcaatcttgtttgtttggagacagagtctcctctgtcacccaggctggagtgcagtggtacaatcacacctcatagaagcctccagctcctgggcttaagtggccctcctgcctcagcctcccaggtggttgggactgcaggcaagcacctccatgactggctaatttttttttatttttagagacaagatctcctgttgcccaggctgggtttgaactcctgacctcaagaagttctccctccttggcctcccaaagtgctgagattaaaggcttgagccactgcacccagactgaaatacagttttaatttctttcactcttaattagttatcttactccacagatctcagtaaaattggctctttgagtttccctcgcaccctctgatgtaggtgttaataagagcaggtcaatggcacataggacaagaagaaagagtgtcaatccttgaaatgttgacaaattccattcaggcctaggagcatgtaattgtaggagtcagcattattggctctgttgggtatatgtgatctcaaagattgacctttttttccatctgttttcagatctgttaccattgggatgataacctgaggacccccactggaaatctcccatcttttgaaaaacctggaagtgaggagtgtgcacggatgctgaatgtttgggaatgagaggatgagtgagtgaggcttgaaaacacaccacattgaaaatcctgccacagcagcagccgcagccgccaacagcagcgctgttagtgagctaagtaagcactgacttcgtagaaaaccataacatcggccatcttggaaaagagaaaaacaatggagttacttatttaaaaaaaaagaaagaaagttatctcttcccaggagaggctagaagtagcttttctgtcttttggccagtgccgagtggaatgcctggtttgggggaggaggagggactgggttcagctgtggtgctttgttgtaaaaggcagcctggcctttgctactgaggagaaagatggagcctgggtctcaagcccaccttcgctgtacctttgccacatggtactgtatgcttgccagctagaaggagggtcagggattttttacagtctgagaatgagtgtgtgtgagtgaggcggtatccacattttcaacttcaagtcattgcagtttctttttcccagaaaacaaggggttagatgttgcatttcataaaactaaccgaagttttgtttactgatgcagcacaagagatgtaaaaaaaaaaaaaaaaaaaaaaaaaaaaacacacacacagaggaaagacgctctttaggttttgttttgttttttttttttggttttgttttttgttttttttactctagggaaaacactgacgaatggtcagagctcctatcctgatcttttcatcaaggcgcctttcctaataatatggttcaactgtgaatgtagaagtgggggggaggggggagaaaaagaaaactctggcgttagaggatatagaaaaatataagtacaattgttacaaataacgcagacttcaaaaacaaaaaaatcacaacccaaacaaaccaaaatttaaatgatcagaattggcagcacaaagaaaacgccctctcctgacttgtattgtggcagtctgaacgcccccagaaaattgtgccaaagagtttagaaaaataaatatacaataaaagtaaacacatacacacaaaacagcaaacttcaggtaactattttggattgcaaacaggataaattaaatgttcaaacaatctgataaaataaccatttggaaactgcttggccttctgttcttttatttgattgactacaatgcggtattggtctcttgctgcacttcaaaagcaaccaacaaaacaaaaacaaaaaaaagtgtgtgttgtgtgaatacacacacacactaactagaagtcttgtgatgaaaatggcacttggaaaaggttttatttttccactgaagttgaaggttaataaaatggtgtcaaacgtcccctggtcacacacttgaatatttttttagaagtgtgatgtggtatgattaccataaatcagacttaattattttcccttttacaagggaacagggcatcctgaattttagagcctttcagcaataagaagggatgttggtgagctttgatcctcttttggttttgcagttgttaggagtttttgctggcattttgaatatgctgctttcagaaaaaccaaggaagttttaaaattgcttcctggtccttagaggactaaaaacaagaccctcattcccactttcatttccactctagcaaaaactgggcttgcgtttttctccaactcctcgtttatatcctcccttccatgtccaagccttccattcctaagtgggattggctcagttttgcccatccatatggcagcatctctaatagctcttgtacagggtatcagatattgtgccttttggtgccaggttcaaagtcaagtgccgatctatgaaccagtgtacaaaaaaaaaaaaatccaggtatttgaaggagagacgctccattgtgaataaagagctcataccagctcctaagccctattaagaagaggcctggtcctctaatgccttgtttccatttcagttgttctttgagagacagaatgatgtactaaccattcgtgattattaagatagggttgggtcagggcttagggagggggcagaaatattggggatagaaaaaaaatctgatcattcctcagtgctacccatttctgtcctgtgtgggctgcttagctagacagcaggagaataaagtacaccgagaaccataatgaaaaaaccttccgtgtgttttgtcatgttttgttccagggaagcagttgatgagtgctgttactaatgctttctcccagatccattcagtggtggagaggaggaaaatgggctggttggatgtggtcttggtgccttgcagttactctgcactggttatgcatttaattctcctcttttctagttaaccttttgccagtgggttttccatagtctgggtatttgtccttatatcagttataccacctaaggcaactgggtgcaaaatgcattctgttcactcactgtctgggccttccccaccctagtcttggcacattccttcaagaatgtagttaccgtctgcttgggaagatgtcagtgcaaatgtgaagataatgggcatcggactaggctttggtttgccacaagtggcagctgcctgtatcaattacatttattaattttgcttttcatttttcccagttctcctcaccccccctttgttgaaatgttggacttgctgtcagaggcaactgtaatattgccttagggacttgtggagaaggggaattgctcagtgtagtgttttaactttcagaaccaagcaatctatttactcttacaaatatttaag

SEQ ID NO: 86823 - DNA, 1064 bp, Homo sapiens
tgtttgggatctgggacattccctttgctttcctctggggcccaaacccatctcttctggagatgccagggctaagtgacacttactcggctgctttgtcgctgtgtccagtgtaatgtcccctgctgagcttttgggcctccgtagggccccattttctattccagtgacaaggcccggccagttgggttcaccctcccctccctagtgaggaagagggaggtggtgtttcttgggatttgttgggccttgtctgctgatctcaggagagagaagcctgaggcttagagacaggagaggtttccatgggttcacacagccgtggggtggggagttagaatctgctctgctagggtactcccttgaatcctaccaagaaaggggcagcagagagcggcaagggagctgtgttggtggggggcccagtgctggggcctccaggggggcactggacagcaagggaggggtgagcagccacccggcaacagtggaacctggtgcctttcacatccgcactgaactcaccctctcccactttctgagaaatagagctcaaacctctttccgcctaagtcctctcccctaagatgagctgtgtggcacagactccctactctaattggaggagaagactgaggcccagagaggggcaggaactaaccctccaccgcatagcatacccagctccggggctccggaggtctcctgcccagcaggcttcttccttatctgcctcccagcttctggccaactggggatacccctcgcctacctccctacctaagagtgagggcttgggtggagctgtgatagctggggaggtggtgagaacccagtttgtgggactggtgggtgggacccctcagctaggcctttgtggagagggtccaccctagcttgtggctggagcttggggcccatcatagcccatgtgcccagacctggaacacacagacacacacagacacacacacacacacacacacactctctctctctctctctcacactctccaatcctagcttgccccagaagtcatgatgtagggcccttcatgggtcac

SEQ ID NO: 86824 - DNA, 1102 bp, Homo sapiens
gtccagcccactcttaggcgggagtcttctgtatggtgaactctgtatgtatgtatgcccacctgtcttggtctagacacctccggggcagccagttttattgcgggagtcctcaaggttaaccgcccccacccccatctctattaattcccttctctggatcctagccccagccccagggtttcccagttccttccctcccagcccctggcccacaagttctggccattaacgttcccacgaaaacagacacccagaccagaccgaggcagactactaccctccaggtctgaccccctgggaaacccatggtttggtttgcccagctcctggggacagagcccagggagacaaattgccccagaggaagagccactgggggtcacgcagaggccaaaggcagtgatgagggaggcggtgggagcagagcccaccctgctcctgaggatgcacagggaggtaaagaccctgacccttggggggttcccagcccaggtggaaggcgcagcacccacaacccccttctctctgggcccagctccccagcctggggttccagagtggggccttttggagggtatggccgtgctgagggggaggggaaatgcgggggggggaacttcttgaaggggatgagggctccgaagggacagggggtctgtgaggggaataagggcccggtaagggagggtgggctcatctgtgcggggtccatctgggagaagatggggactcagtatgggcgatgaggaaaaaactataggcctttctttcttcccaacgttgggggctcagcgctgcagcccgggcccttttccgcaccacctccccccccacccctctctccacccacaagcctctgcgtgggctgcggttagtggtgggaagaagtgtgaactcgagagagaggatggaaactctgcacggaggtcaagggcagcgtggggtgggtcaggacggaagtcggagacccccgcataccctgagcgtagcctcatgccccagaaccagcaggcccagggcctcccccttcacgcttctcaccctccctacttcctttctttcaagtctccttcggccagggcacccgcgctgcactcac

SEQ ID NO: 86825 - DNA, 1680 bp, Homo sapiens
taataggggtcagggccaggtggatatattaagagttttctgagggaagagtgaagaagtagggatcgatcccaagcagagtgggtgtggtgtggggcacagtggaacccaggtcctggggaaggcaggattttgagaagggcaatggagagcaagttactagggtcagaatattgttttcagagaagaaaggcaatctgcaaggagcctaactgaccctgtgttcttccaggtggctgcattgatgacaccatcctcagcaggcagggctttatcaactactccaagctccccagcctgcccctggtgcagggggagcttgtaggaggcctcacctgcctcacagcccagacccactccctgctccagcaccagcccctccagctgaccaccctgttggaccagtacatcagagagcaacgcgagaaggattctgtcatgtcggccaatgggaagccagatcctgacactgttccggactcgtagccagcctgtttagccagccctgcgcataaatacactctgcgttattggctgtgctctcctcaatgggacatgtggaagaacttggggtcggggagtgtgtttgtcacttggttttcactagtaatgatattgtcaggtatagggccacttggagatgcagaggattccatttcagatgtcagtcaccggcttcgtccttagttttcccaacttgggacgtgataggagcaaagtctctccattctccaggtccaaggcagagatcctgaaaagatagggctattgtcccctgcctccttggtcactgcctcttgctgcacgggctcctgagcccacccccttggggcacaacctgccactgccacagtagctcaaccaagcagttgtgctgagaatggcacctggtgagagcctgctgtgtgccaggctttgtgctgagtgctgtacatgtattagttcctttactgctgaccacattgtacccatttcacagagaaggagcagagaaattaagtggcttgctcaaggtcatgcagttagtaagtggcagaacagggacttgaaccaagccctctgctctgaagaccgcgtcctgaatttcttcactagagcttcctcatcaggttacccagaagtgggtcccatccaccatccaggtgtgcttggatgttagttctccaccctcgaggtgtacgctgtgaaaagtttgggagcactgctttataataaaatgaaatatattctacttcctttattttgtggtttacacggttgtcctccctctaaacttactctcaggggcttctctgtcatctgactttcctcactcttgcttcccttcctaggaaaatcctcttcccctatacctgttcccacaaatggcatcccgcgcatgcttgccctattaaaggcagctgacagctgtacccactagctaacgtgtctctggtggttctggacaaaaggcctgcgggaaaactaggattctctattaatggggaattctgagagctctagggtaggaggcctcatgcaagtcttcatgaaccagaaattcctaataaaggagacgggatgcttaactcagagtccaccatcatccttgactggagcacattctgggtggatgcaggggtgacccggggaaggtggctgttcaacattccttctcggacttgaagcaatgccaccgct

SEQ ID NO: 86826 - DNA, 2109 bp, Homo sapiens
gaggaggtggcacccgggaccgagctggggtcttggaggaagagagggtgaggggaatacagtactgggggtgagagaagggttggacagaagagggtcgggtatctgggcatgcgcagggccgcaggactcttggtggggtagcgagggggacggtcccacgactgctccgaagggccgggactcccagtgggggcgggacccccggagtgcccgcctgcggactcccaagcctggagcctggggagagggtgggcacctccgttcccgcacacccgtccatggtgtgtgcgccgagcgtccaggagccacggcggtgtcttccttgcgcgtcttttacacgtgtgggggtaggctgctcctcggggctgagccgtggccagggttatggagaggcccgcctctccccagatggcgtcgtcgagccctgactccccatgttcctgcgactgctttgtctccgtgcccccggcctcagccatcccggctgtgatctttgccaagaactcggaccgaccccgggacgaggtgcaggaggtggtgtttgtccccgcaggcactcacactcctgggagccggctccaggtgggttagactttatggggtgctgggaggtgtggcagatctctgcattcttttaagaccttcttccctgctccccacacctgggaggctgccagaagtagtggaagagcatgagctttaggtctaccaacctggacctgagctcattatgtagcctcagtctacctcagtttcctcttctgtaaaatgggaatgagaccttcctcaaagggatctataaggtaattggcagagtgccacactcgaggggccgcccctctatgagtggacgcttcctttctcctccctcacctccagtgcacctacattgaagtggaacaggtgtcgaagacgcacgctgtgattctgagccgtccttcttggctatggggggctgagatgggcgccaacgagcatggtgtctgcattggcaacgaggctgtgtggacgaaggagccagttggggagggggaagccctgctgggcatggacctactcaggtgcagaccctgcccttcctcatctgcctgacacaccagaaatctaggggctgagttttgacctgggcccatccatccctcccccagcctggttcacaggggcctcctcctctctgcagactttgcccttgtgccttcgtgaagaaggctgcagcagcagccacctttgggcctctcctggcccagaaatagagcagtggttatttatttattttcagttgaaatcttacatagagtcccaatttataaaaccagtaatagtggatggagcagctctgggtggagagaggttaggggctcaggacacttctctctctgaaactgtgtttcaggccttttcatggaaccctcaaagcatagcacatggaaccagagcattgaaagccactggcataattgcatttgatacgatcagtgccagcagatttgctgtgtgacttgggcctatcaccaaacctctccgggcctcttctgtcccctggagcttctgccaccagccattgatccctctgtcacccttctgtcccttggccctctcttttgccaggctggctttggaacggagcagctctgcccaggaggccttgcatgtgatcacagggttactggagcactatgggcaggggggcaactgcctggaggatgctgcgccattctcctaccatagcaccttcctgctggctgaccgcactgaggcgtgggtgctggagacagctgggaggctctgggctgcacagaggatccagggtgaggtgttccctttctcccagctttgggaagtgggagagatggtaggggcagggaggggcccgatccaggtgcaagcctgtcaggacatccagggagatgggagatgagcccacttgggaattctcctccccttcacttggttaagtcttccgtgtgctacagcctgttgcttcctctgggaagccttcctggacttccctgggtggtcaggtttcctgcttatatgcaagcaggtacttctttttcatcgcattcaacacagttgcatgcttacatttatctctgtgattatttt

SEQ ID NO: 86827 - DNA, 1048 bp, Homo sapiens
ctggccacttttttctctcagattctattaaagtttgggcctctggagaggcctgtcagagaggagaaaagaaattataagatttgggcaaatgtctggggtaaagaagctttatggcatttcagcaagtagagtggttggttcatttggatattttggccttgaacttcttatttcttctggtggttaataccagctttttggagaagttgaacagtcctttgctataggtctgtggcagatcccaagtactgtcagcaagtatagtattgcccaaccagggcccttatgaagacattttaaacttgttgcagccaaccagtagaccttagtattggcttggtttcagccatcttctaaaccttgcccactcatttctgtgatagatatgtataacatgttttttttctaatacttattttttcacacacaccccccttttctgtatacacaaaaattggaaaccctgcttccaaacactgaaaaacttaggatattttggatcaggtggacaatggctatggaatgaaagatgcagagaaacactgctttaaagagtatgtagagagttacagagtttagggatgcagtagcgtgaacacttctgagtttacaagatttaacctcatggccccatcttaaatcttgcgggctgcaaacctggagtaaaatctgttcagggaagctcatatgctttcttacaagttcattgggtgatatgtctggagttttccctttttgcaactgacttggatttgtcggaatttcttcccagcacctacaggctgaactaaaccagtatccagtacatttctgggctgataaatggacatcattttggaatgcatttgttgcttttttgcttgtttttgccttgcttttgttttggatatgcgtgcaactccttgtatgacgttgtctagacctgttgtaggaggaaaaaaagttctttctctttatttcttcccttgtagagccaacacttagatctttatgtttctgaaatgtagttgagtgtctttttaaagatgctcttcctcaattatca

SEQ ID NO: 86828 - DNA, 1037 bp, Homo sapiens
gcagagcggggccaatgtggtgaagctgacaggtgggggcggcaatgtgacgctcactctgcccgtcaacaaccttgtgaacgccagtgacaccggggcccctactcagctcctcactgaaagccccccaaccccgctgtctaagactaacaagaaagcaaggaagaagagccttcctgcctcccagccccctgtggctgtggctgagcaggtggagacggtgctgatcgagaccaccgcggacaacatcatccaggcaggaaataacctgctcattgttcagagccctggtgggggccagccagctgtggtccagcaggtccaggtggtgccccccaaggccgagcagcagcaggtggtacagatcccccagcaggctctgcgggtggtgcaggcggcatctgccaccctccccactgtaccccagaagccctcccagaactttcagatccaggcagctgagccgacacctactcaggtaccacactccctgtactgtcctccttctcctcctctggttatctctttttggcttgctttgaagatgatgctggtcatctcccagcttgatctgaccttgagagtcagtatcttttggggtgggcagtaagtggccgtttctacctgacaaatgggctctctttagttcatagggccaagtacttcttatctttagaaattgatgaaacatagggatattttggcaccttttccttataggttgttttttttcaggggatggtgaggggatagatacatacttgttaataacttatttttgattatagaattactcaaaacattagcaagaatgaaaacattccagttcatagaattttatgtaaagtaagaaaattaatgagaaaaatgctgatcattattaatgacaagaaaaaaacaggaagagcagcctagctttatagcaggaatatttaggctagattcatctggaatgtttgtttgttttagggtgttttttttttttttgagatagggtcatactctgttgtccgggctggagtgcagtgatgcggtca

SEQ ID NO: 86829 - DNA, 1310 bp, Homo sapiens
aggagccctgtggctgccttgggcctgccctcagccccactcctgttctgcaactgtccccacaggaaggggctctgttccctgtattgtcctccttctgaagccccttggctctgccttggcccttcccctcaccacgagctcccggcctgcccagactgtggacactggccgtgcccaatgagacgttctaaaccaggacgcgtgggaacccttatttccaaaggaaaaacatgcatttcactccgtcgaggagcaaagtgagcccctaccccccaccccgatccccgctcccaacactgccggagtcgcgtcatgccatgccccctctcctgcacctccctggccctgccggccactgtggacgccctggggcttggcacccacctctggagaaactcggggccacctccactccatgtgcccagccccgccacaacctctcctccagcacattccagctctatttaaaaagtaaagacacccaccgactcctgatccccctctttttctatggagaacgttgccttatactctacttcagatgatgaacactgtgtactgtgtgtgctttaaagaagttttatttaattgctcccttcttcctttccttgttattcacctccctgatgcctgctttcagttgagggttgggggcaatgatgagcatatgaattttttctcactctagcaattcccttttctaaatgacacagcatttaaactcaaatctggattcagataacagcacctgcacatcctgcacctcctccctctcccttcacctcacccctgcccggcccaagctctacttgtgtacagtgtatattgtataatagacaattgtgtctactacatgtttaaaaacacattgcttgttatttttgaggcttttaaattaaacaaaaatccaactttatttttagttgtaactgcttgaggtatgttttatgaattaagtgacagatttgttatcctttattaacgtactttgttggtcagcactgggctgacaaaaattttttcttgctaataaatttagttgcctgaggcaaaatcttcaacttggcagttcggcttcctttgtcttttcccttggagagctcggagaggggactccagaggagggagctgtggtctctcagagcgatccacactgggaccaaggtaggaccttgccctcctgaccctcggcaaacccaagccacatgcccaaaaggggccgcggccacatatacctcatgacactggcacgagcccccagagcacctccaagggccagggcccaatgcaggtgttcctgccttttt

SEQ ID NO: 86830 - DNA, 1117 bp, Homo sapiens
cacaaccagattacccttttctctatgtgtccccatcaccttgcctcagagtctggcccctaattccattttccatttttcttttcccattccactagtctcccttcccagggggtacttcctgccctaagctcacctacaggcacctactatgggccagccacttaatactgactactcccctcaagcccccgggacacatcctccgccccgcctgagctgcaagagatcctcctatacctttaaccaacctccacgtgcgtgttaaccgcggtgacagcatttccttgtctctctgctcccgcccccaaaggcgctacccattggccgctgggttcctctgttctcgctctaattggcctcgttaccgaaaagctccaaccaatgacctctccgtgtctgtctccctcctccgatcctggaaactcattggctccgaggacttaggacctgttagcttggttgggcgactggcaaatccttccttccccggggtagaagtccagggtgagaaattggttccgaactcaaaggaacccagtgccgggccacagccgggtcacgtggccggcggccccccatgacgtgctggctgcggggcgtcacggcgacgttcgggcgacctgccgagtggccaggctacctcagtcacctgtgtggtcgcagtgctgccatggacctgggacccatgcgcaagagttaccgcggggaccgagaggtgccgccgctagggccaggcctcctgcaggggcgggggaaaaggggtccccggagtcatctacagcggggaggggagtagtaggagcccctcggggcttctggggccacccggtggggcaaggaggtttgaggatcaccccccgtgggaaaagggggcttcaaagacatcccaccaggggaggagttccggggaaacgcaaatgaagatgggttcaaaaggcagcctttcgtaatgggtaagagctcgaactttggagcctgcctgggttggaatgtttaatgtatctgggcctcagtttcctcatctgggaagtgatagtatctgcctcacggggatgttatggtctaagatgtttgtaaagtgcttagaaccctgctactcgacaggtagcaaggt

SEQ ID NO: 86831 - DNA, 1098 bp, Homo sapiens
gtcccactgcctctctgtctggcgagtggcttccctgtcttgaccttgactttgacccttttcttgtctcacactctccaaaagcattgtgtcaccccactgacctgaatcttgggtttattcagccctaccttaaattctttctttaattcttcttcttcttcttctttctttttttttttttttgagatagtctcactctgtcacccaggccggagtgcagtggcatgatctcagctcactgcaacctctgcctcccgggttcaagtggttttcctgcctcagccacccgagtagctgggattacaggtgcgtgccactacgcccagctaatttttgtatttttagtagagccgggatttcaccatgttggccaggcctgtcttgaactcctggccttaggtgatccacctgccttggcctcccaaagtgccgggattataggcatgaagaaccacgcccagccctttatttaattcttaaaacagcccatgattaggagtctgcagcaagctggtccaaaggcacccacccccttttcccactgacccctttgtctcccccaccctgctccagcagaaagccccatccttggcttagggagcgccatgacgactgaaattggttggtggaagctgactttcctccggaaaaagaaatccactcccaaagtgctgtatgagatccctgacacctatgcccaaacagagggagatgcagaacccccgaggcctgacgctggaggccccaacagcgactttaacacccgcctggagaagattgtggacaagagcacaaagggcaagcacgtcaaggtctccaactcaggacgcttcaaggagaagaagaaagtgagagccacgctggcagagaaccctaacctctttgatgatcacgaggaaggacggtcatcaaagtgaagggctgaggagggtgctagcacctcttggctccctgccatcagccagatctgagacaggaccttgccacgctggcctctttggccatagctgaagctgtggggccagttgatacctgctggcaggaaatggctgttttttaggtttgtatttatgtgccgccacttttgtaaggcct

SEQ ID NO: 86832 - DNA, 1188 bp, Homo sapiens
tgaccaccattcattgagggtttttttttgtaccaggtgctgttttaggcacttgacatgataaaaatgatcactgtcattttttgagtccttgccgtgtctcaggcacactgttcagtgttttacctgcattcccttttctagtcagtgtcttattattccccattttacatgtgggaaaactgaggcacagaatagtagacttgctcaagaaacttgataacgagaacccaggaccatctgaccacaaagctcagctcttagctctcactgaggaaatatgcatggctctgaagccacaaatctgggcccagactttgagaggtcagtcccattggtattcacatgtacagggtggtacttcactgttcacaacagagtcatgttatctagtccttagggcgctgtaggtattaggggctttgcagctgttcattcatccagtacttggcataaccatcttgtattttccattgtcatggttaaccccagccctgaggaaatggaagttgagcagcatcctcttgtcaggaagaaagatataattacccatagaagcaaaaatattatggggaattgagaatggtcaaaagtggcactttcaggaccaatttaaactttttgttatccctgtgttgaggcaattgctctataaaaatcacactgctaatgaagtcagattgtcagagcctggtttagccccaggcatctctttgggcttgtctttattcccatcttcccatgacccccatactttaaccaatgtaaagaaaacttttagactaatttcagtgtatttcactcgaattagtgatggaattttggtgatgtgaatgggaatgctctaatttgggtgcttctcatgtagattggctggtggacagaaggcactgcagcctgaaatggcagagtctggtgctgacgatccgcgagaagatcaatgctgccatccaggacatgccagagagcgaagagatcgcccagctgctgtctgggtcctgtgagtgcttaggggctgtcactggagtcccctctttgctgaggtagtatgtatcagctgagctactctcttgttatttagccaccagggctggcctttagagagggagcgatttttatttgaggtatagatgctggcttcttccactatgaaatgatttagggaaaagctacacactaaagttactg

SEQ ID NO: 86833 - DNA, 1902 bp, Homo sapiens
tgtcttcctctgaccccgtctgacccctcagcctggttgcaccccctttgggccagtgtcttacttttcttcggtctttggatgttttcttcaatctgttggactccacctcttctcccctctctagggcgaaaatgtccgaggagaactgctggccctggtgaaggacctgccgagtcagctggctgagattggggcagcggctcagcagtccctgggggaagccattgacgtgtaccaggcgtctgtggggtttgtgtgtgagaggtagagaggcctcagcttctcctggtgggggtgctttgcctgtgttccccagctcatgacccttctccagttgtcttgttcccatataacatttgaactctttacacacctgaacctgtgggggccttgcccatttgaccatgtggcccaggccaaagcccagtgttggccttacgcatggtcggcaggagagtcagttgtgtgctctgttgaagccccacagagcaggtgttgccaatgctgcggttcgtgcagaagcggggaaactcaacggtgtacgagtggaggacagggacagagccctctgtggtggaacgaccccacctcgaggagcttcctgagcaggtggcagaagatgcggtaagatgggccttgtgatgagctgtaggagtggagtgggagctgcttgtcccctccccacccccaacagcccaacccaagacccagagagaagaagggaggatttctgtgagagtgactgtaggtagaagggcccaggaggccctactcctttatttttctgagtataggtgagtgagtgccacagaggctttgcaaggtggttcgctttgaactcggaacctccatcatgtgagctctctgaagatgggctttctttggggtagcttagaggccactgcatttgaacagtgtgctctctacagaagcagctgaggcctgtgggaaggcagccccaccctcctttttaaattaatttatttttgagactgggccttgctctgttgcccaggctggagtgcagtggcatgatccttgctgactgcaacctctgcctctcagcctcaagcgatcctcccaagtcagcctccaagatagctgggattacaggtttgcaccaccactcctagctaattttttattaacatctttgtagggacaggattttgccatattgcccaggctggtctcaaactcctgggctcaagcaatccactatcctcggcctcccaaagtactggggttacagacatgagccaccatgcccggccctttttaaatccatcttccatgagctaacactctctttccctttccagattgactggggcgactttggggtagaggcagtgtctgaggggactgactctggcatctctgccgaggctgctggaatcgactggggcatcttcccggaatcagattcaaaggtgaggaggccttctcagtctgtctctctctgatcactactctaaccataagaaaagtgtcatttgtgtctgtaacggcatcacttgaagttcatagctctaagaccaggtatagtccaagggaggcagagtttcacacgtcacatgtcagagttttgttttgttttttgagacagagtctcattctgtcgcccaggctggagtgcagtggtgcaatctcggctcactgcaacttccgcctcccaggttcaagtgattctcctgcctcagcctcccaagtagctgtgattataggcgcccaccaccacacccctctaattttttattttgtttgtttgtttgttgagacagagtctcactctgtcgcccaggctggagtgcagtggcatcatcttggctcactgcaacctctgcctcccgggttcacgccattctcctgcctcagcctcctgagtagctgggacta

SEQ ID NO: 86834 - DNA, 2359 bp, Homo sapiens
attggtgttgaacatggaggtaagactccgcagactagcagggtatagaggaggtaagtggactgcactctggcctcaacactcaggagggatgctcttggcttagggaactgcctgctgctcttggtccctctccctctgggagattgccttctagctcctgccccacctgttcagctgctggctccgttggccatctggccagcctcttgcagtagcagtcagttcactgaggcatactacccttgcccactctaatgtcctttgcccagtcaccagctgttacgcagactccattgcttacagcaatggagcttcagggagaaaccccgtggaccaggtgaccatggcagaccgggttcaggcctccaaagcttctgcccctgcgcttgcagatgagcacctgacctgctttcccagccctgcctaaggtcagcgaggggaagcagtgctcactgaggtttggctattttcccaggaagggaagtgggtttagatagagttttctcagctgattttggcccccttggtaagcagtgtggttaggccactgctctggatcagagatactaggtgactgcttaacaggtgacatcaaggcccaccctgatccccaggctgaggcaagtggtttcatgaaagcctttaactcgataacattgggtttgttctccagaacctttagcctccctttcctttaccgccgcctgcttcctgagtccagccctcctggccatgctgaaggcactgaagggatccacccggctggttctccctggcaagagcagctctgtgtctttcaggtctgcctccagcttccctgagcttcactggttgtatttgggttcctgcttgtgtatctcagaatgccctcagaagtcgttgtagggacagaatgagttaagatatgcagagctcttagaacgctgcctggtgcggaggaggctcttggtggacatgtgtgagctcttatttttggtttggggaaccatgatgaggactctccatcctggcctaacttgtcttcttggaaaggagaggtgaggggctttaggggagcttgagaccaagtttcaagcagtcaggttgaaacttccctctttcagggaaagagggaagcggtgcaccaagattacaccctcagaatccttagtttgatgtgaattatgctgccaagagcacactatacttttgtgttgacttttatcccacctctttccagagaggatttaaggcaacgcctctcactacttggctaagactcctcacccggcttcagataaggaagcagcgagtcacctttccaaaattctctgcttgctaaatccagccatggctcagccccactcactgcctctctgcccaaacattgcctctctccctgcgtcagttctaccgtgtcctctccggtgtggttctctttatagaccacaaaagtaggatccctttgcactgcagcctgcagtggctgactgtgaacatgggataagtggagtgctaaggctcgttcatctgggccccagcggtccaccccctgtgcccctctgagggcctgccagtatcatggggagtctggcacatctagaattcctttcctattgccagttcagagcagggaacaagctgcatcattcagagtgaacatctcctcacccatctaaagaattaacctgctctggagacctggccgggagttgaggacaaaagaaaggcacatccccagcctttgggagcagaagccaaccttgctggagctcctcacatgcacctcccaaccaccattaattccccagaattaatggttgcgtacagtttctccccagaaacccaggtcctgtggctcttctctgccttttcatacactcctacctgttctgttaatgatttttatttcatctgtttttaaaacttattatttttgagacagttttgctcgtcacccaggctggagtacactggcgcgatctcggctcactgcaacctttgcctcccgggttcaagcgattcttctgcctcagcctcccaagtagctgggattacaggtgcagtagagcctgggtttcacagcattggccaggctggtcttgaactcctgacctcaggtgatccacccacctcggcctcccaaagtgctggtattacaggcatgaaccaccatgcctggcctaaacttattttatttatttattttttttttgagacagaacctcactctgtcacccaggctggagtgtagtggcgtgatcttagctcactgcaagctctgccgcccaggttcaagcgattctcctgcctcagcctcccgagtagctgagattacaggcacctgccaccacgctcaactaatttttgtattttt

SEQ ID NO: 86835 - DNA, 1125 bp, Homo sapiens
cccgtctccgcctggacgtggcactgtgggcgggaactctcatggcatgacagcggggagacaggctgctgccacacccacgctgcagatgcaggagccagaggtctgggcaggcttgggcctgaggtgggagctggctgcagccggtttggtctgcgctttctgacttggagggttggccgcgtttaagccaagtggagacaagctgctgccacctagtgaccggtggttgcaggggcgcttcggcaaggtgggctgtggacctccccatgactgtgtatggaggcatttgacattctcaattctctctcaacctcccccaccccaccccaggttcttcagtctgccaaggaacaaattaaatggtcgttattgaaatgaaggctgtggattcaaggctccctgccccccagatcatttccccaatcctggcaaaagcccaaagatcccagggtcaggagagacccctctgtatccccaggtccctcccagaactgactcctaaggtctccagccagggcttctgagatgcaaaggtttggcctcaggagagtcaccttttctcacggccctggccttaactcatatcttaggcattcctggccccagggccctaataaacctgcttttgtcttctgccaagggtctccttctctcttggcctaggaagtgtgtgtgtgtgtgtgtgttcatataagggctcctgcactttctgtggctcatcgtggggatatccagtaccagggtggggcgtgtccctgtggttgtgtgattgggcagagatgtgggacaagggaaaggggactatttaacaccatgagggggtgcgacgctgataccacggagccccatgtgtggcgcatactgccaggtaggggagagcaaaatatggtacccctattttgcaatgcagtacatacatggtagctccgctggggattccttgagtcattttttccattcccaaactccagaagggaagagaggtaaggcttcctctgaacaaaccgagaaacagcatggctatttttcttggcatgcctggaaccgtggaattcctatcctggcatacatcctgggcactacagctctctgcaagcttgcgggtggtgggggcgaggaagc

SEQ ID NO: 86836 - DNA, 1023 bp, Homo sapiens
gtaaggaagcagaactgccctttgctcagaaatgccttgcatgggctctgtgctcactgcccttcacattctccttcccagtccttgtttggtgaggggtgaatgaggcagtctttggagagtggggtcagcctcacctaggcagggactcagttcctcccagccacagggaggctcaggagcttgtgtccaccttcaggaagaacgtggagaagcgctggttgctggagaacatggacggagccttcttggtgctggacgagattgtggatggcgggtgaggaggggacagtcagggacactcacagcaggagtgcctttgataatcatcagccccagatggcacccagcatggctagaactctgaccaacttctcactcccttcccccagcatattcccagggatcccattcccctagcccttccccttactagcgccccactcatgaagatagaagttgatttcaatgttagccaaagtcaagccaaacaagagactaacctgatgtcaaactatgggagactgttgaataggcagggtttggggaaaatccagtttggtctccaatgcccaggggaagcactggcacagatgctggccctctctggaaggacttcagacagtcccaccagccccacatgtcctgctcttagggctcaattccaacacaagctagatgcgtgacctgggtcaattactgaccctccccgaggcttactttctccatctttaggatggaggtaataagggattgtggggattaaatacatgtgtgagaagatacatgtgaagcttgtggttctcattcaatagatgttgcctcctattggtatgctagtatattcttaggaagctaggagctcttttgagaaaagttggcttgtgaatttccatcaggggatcaatattcagagagaaaaagaagttctggctctggggcaaaggataataaaaatttcttttttttttttttttgagacagagtctcgctctgtcacccaggctggtgtgcagtaagtgg

SEQ ID NO: 86837 - DNA, 1889 bp, Homo sapiens
gcggcgatacaccttcctattccctgacctaggccttcattcccccgccacagaaagcgctggaagcgcccaacctggatacttcacccaacgcccaagcccactaacatcgcccgccgcgaaggcgcggccgaggggcccagaatgccagacactagggccttcgccctcctcattggtgggtccataccgcggggcgggcctaggtactcattgggccgggaattatgtcagtcttgggaaatcaggtccggggatgaggaggtacactcagccattgggccctctctgctgccaatcagagggacatccgtcgacggccccggcctcggctcgttgattggagaaactgttcctagggtgtttgcggcgggcgggtttccgagtgcggtagcaggagggggcggggaggtaagcggaggctccgagctctaggccggccggcggtggcggcggcgaggccgggactcgggcttagggcctgctgtggaggcagcggcggacgccgagctaagcagtgggtatcgggcacattcctttcccagaagggagggttgcagcgccgcggggccgaggcttatggggcgacgggatggtgctgaggtgcaggaggcgggggccgagcggggttcccgccagagcccggccctgggcctgacagggaggggccccgcgcggggccgagaggaaagctggctccggggtgggatggactgggcagggttgagggcacgagaaggcgtggtgtgaggcctggacttgggagtggggtggggccatcgggacggagggcggggtggggtttgctgtaagggtgggtcaaggccagggaagtagcacttgttcgctggccgcccctggaggctagaagctccggcgccgagagtgggcatggcgacttggtctcagccggactcgggtatccgggcagggtgggaccagcctcaggctatgggccctgcacctacttgatttttaagggactttgtccggttcctcgaacttaattggctcctgggaggttttagtaataaattgcgtgagaacgggagggtagcgtaagcaggaattctgggtcgcaattgtgtttactctgaccagagagagggagtgtgagtgtgtgtgtgtgcgcacgttcgtgtgtgtacgtatagctcgctctccccctgtagaatgaagttggtagatgggtcacaacgcaggagaggagaggcggtatgtcttggtttgtgacattaatggaagctcaaaagtggagaccagaaacagatttacttcctctgcactgggcagtctggctagagaacgtggccatatccttctgctttggctcagaaggtcatatgaatgaaaataaaacctgcctatgcaaattctggacggaatagtcctgcgtagtagggcccccaccatccctctcctttttttctttccttttcttttctttcttttttttctttttttgagacggagttttgctcttgttgcccaggctggagtgcagtggcgcgatatcggcccaccacaacctccgtttcctgggttcaagcgattctcctgtctcagcctcccgagtagctgggattacaggcatgcgccaccacgcccggctaatttttgtatttttagttgagatggggtttctccatgttgttcaggctggtctcaaactcccgacctcgggtgatccgccctcctcggcctcccgaagtgctgggattacaggcgtcggcccttttccttttttttcttttgtaagttgtgaggataggaaagggaaatcagatttcaaagttcagaaaacaaaaggcattcttcttctgggtgaagtggtggcctgaacattgtccttttgtccttccacactctcactgtttaataatcttgcc

SEQ ID NO: 86838 - DNA, 1829 bp, Homo sapiens
tgggcgacagagtgagactctgtctcaaaaaaaaaaaaagtgaaagtgtcctttgaatgtgttttctaccttctactgtgaaggttttcctaccctgatcatgatgtgaaaagtatggaatcttatcctgttgcttttgtgattcccatttcaggtttctctggaaacccccctggtaagtgtggaggaggcgggacactctgacccaagacgaaaggcctgtagctccagccaaagaaaataaaccttaggagggagaaggaaaaaaaaaatccatcagctgttcctgagaacagcctgcattggaatctacagagaggacaactaatgtgagtgaggaagtgactgtatgtggactgtggagaaagtaagtcacgtgggcccttgaggacctggactgggttaggaacagttgtactttcagaggtgaggtgtcgagaagggaaagtgaatgtggtctggagtgtgtccttggccttggctccacagggtgtgctttcctctggggccgtcagggagctcatcccttgtgttctgccagggtggggtacggggtttgacactgaggagggtaacctgctggctggagcggcagagcagtggccttgatttgtcttttggaagattttaaaaaccaaaaagcataaacattctggtccttcagcaatgctttctctgaagaaatacttaacggaaggacttctccagttcaccattctgctgagtttgattggggtacgggtggacgtggatacttacctgacctcacagcttcccccactccgggagatcatcctggggcccagttctgcctatactcagacccagttccacaacctgaggaataccttggatggctatggtatccaccccaagagcatagacctggacaattacttcactgcccggcggctcctcagtcaggtgagggccctggacaggttccaggtgccaaccactgaggtaaatgcctggctggttcaccgagacccagaggggtctgtctctggcagtcagcccaactcaggcctcgccctcgagagttccagtggcctccaagatgtgacaggcccagacaacggggtgcgagaaagcgaaacggagcagggattcggtgaagatttggaggatttgggggctgtagcccccccagtcagtggagacttaaccaaagaggttagtggacctgtggtgggtgtgtggggcctggggcttgggggtgggctggtcccaaaggattgtggtcagaacactgagccctgtaaagagccagacaggtttcagcagggcctcaggcactgttcttgggtagggatgggctgaactttctgactttaggattgggggctgggagcatttccctgtgttgaaccattgacctacctctaaatgtactgtcagggcagtgggaggttcctacacatgccagggtgtttactgcttggatttcagcgtgactgctggaggcctggggtgggggaggagtcatgttgtgatgggctttgatgcagtgtacatctgttgctaagacacaaatactttttggactcttgttttgtacctccccccacatcagaacacagacataccctgaagttctcctttgtggcgaggcctgttgttgtattgtcctgataattcagacctcctgggcctgagccaaagggtagatttggatagttattcttggccaggagagggccaaggcttccaatctttgcaaaaggcccactgcagggagtagggaagagaagtctgggagctagaaagagaaactgcattctgctgcccaagtcaacttgctttgagctgtcagaagagatccttag

SEQ ID NO: 86839 - DNA, 1011 bp, Homo sapiens
gtgaggggcttctttcctgcttggatgagatatgggccaggaatcaggcagagaatgctcttgaataaagccggggtgaaaggggaggggggacatttgtggccaggagaatgcagagcacctgtctccctaagtatggggcttcagggttgtgtctcccctcctcttgcttggggctaggcttggccagcactgtgacattgctgcacgtgggcaaaatggccttccccttttctctagtctggcctattttggggtgacaaaacttacggcttatggtgggcctgggtgccctgggttcctgcccagcctggctcgtgatccctggccttgagaactggccactgccttcctgaggaatgggataactctttccacttccagcaaataatttagattcccagagaatctgcgggagaagtgtctgcccagtcctgagtgggctggatgagcaagatgcgacaggagggaggagagtggcaccccttcccccagggctctcactgcgccaccccagctgactgactgggctgggtggggctgcccgcccctgggcgcatctcctcaaggagacggaggcggcccagggatgggctggttccttgcggcagcttctccagctgccctgatgcagagattggctcccgtctgcagctaggtaacaggcggtgggaggggattggctccttccgcatctccagcggagacttgggggaggagattggctctcggcgcagcctaggtaacgacagtgggaggggattggctctttgcgcagcccagctgctgacctgggggaggggattggctctctgcagcctcagcagtgacctgcggggtgggagggggtggggattggctccctgctgcagcctaggtaacaagtttggggggcgtgggggggaggagcgggaggataggcccaggagggagcttgctttcctctgcagcttgagcacggagcatggggtgggagtcccatctcactgcagcctctgcggtgagctcagg

SEQ ID NO: 86840 - DNA, 6967 bp, Homo sapiens
tcccggcaccggctgccctggggctcatctcgcagaccatgacccgcctggaccgcagctctcacagtggtgggggccatgccaaaggcagccggccccttaactctttgctggctggtcaccgggtggcccagcccgcctctgctcctgggtccagggcttctgttcaggttggtgtatgtggggagactaaagtagtacgtctgggaggtcttagggtcagggggggttaatgggagaagaataccgacttagaggtagggaggagggtctgatctaaggaaattgctttctggaaagtgtatgtctgcattttaacccctggatggaaggcaacactttagggtttcttcaggcttgtagggagggctcgactacaggggggtgccatgtataggaagcccaaatagctctatttattggggttatatgctgttagtgggggtggcagttggtgcagcaactgttcacgagccaccagggtagagcgggagggaagcatttttggtgcccaaggtggcagttgtagctgagcagtgatggggtttatgtccttgagggggttgactgatggggatttggtgagtcctggggtatggtgagggaatgagagcactggtgtaggggacacagtgaggctggcccgagcagggggtggggtgcacccctggggatcatctgactgcctgagcctccctggaatggaggcagcagctaggatcagctgagagggaattctggcggggatgagtcttgaggtgagcctgggcttgaggagttgtgggtgttcagccttactcttgctgccagctggggaatggggaatggctataggaagggctggagacagcatggcgttgtcattggttgcatcaggtggttggaaatgcagggattttcctctctagcccaccccacccctttatgcaaatgaaatggtaccacaggctgatgcaagcctggccactgctaagtaattctgcatgacaattcgctcttgcttgccatggccagcttcctccaaaccaagttttaaggggtccaatccccaaagctagaggtgtctcctgatgttccccttctttcttatgtaggggggaggcggccctgccttttgtctgggtgtgtcttggtccagatcctaatcctttgcacccttatggtgatagtcacactaatggttttgctagtggctctttttttttgtgggaaggggatagtgtctggaagtagatgaatgaacacttgctggtgcagggaccagggggtaaaggctggcaggtgaagagctgggaggggccccacccaggactaactggggtgacactaggagggaactctgaggggcaggacaaggaagggaccttgggatcttagagctaaagtcatgtgatctgtctttcaggacatagatctgattgacatcctttggcgacaggatattgatctgggggctgggcgtgaggtttttgactatagtcaccgccagaaggagcaggatgtggagaaggagctgcgagatggaggcgagcaggacacctgggcaggcgagggcgcggaagctctggcacggaacctgctagtggatggagagactggggagagcttccctgcacaggtaccatcgcccctgctcactgggctctcttcttgtccctactaccctgacacaaaccaggctggagttcttccagaaacttcctttagagaagacaggtggtgtgtggggtggacctgaatttctgttttgggttggggtctgtaagtcacagtggctgagccttggaaggggggagtggaaagcagcagatgcagaatggccaggccgtggcaacagacagtgcaagggaggcagagcatgtagcatcttcctgcttgcttcaggactctttcactctcttctgttgtttctgggagtttgggactcggggccagccattagcctgggaatgggagggagactgcagggcttcagccattctgggaaagaagcttcagccccaggcagccaaggcccaggtcaatcagacttacagttcctgttgccacaggtgcctagtggggaggaccagacggccctgtccctggaagagtgccttaggctgctggaagccacctgcccctttggggagaatgctgaggtgagcaggactccagtgagagtccaccaagtgagcagggcagcctgtacctggtgtgtccctccatggctgaggggccagctgttggttctggccttattctggctgctgggggtaaatgcagaggaaggaagaacagaaacaggtccaggtggtaatctctgggaggaaagcacaaggtttttccttcccccttgttaaagcctctgtgttttgccctagtttccagcagacatttccagcataacagaagcagtgcctagtgagagtgagccccctgctcttcaaaacaacctcttgtctcctcttctgaccgggacagagtcaccatttgatttggaacagcagtggcaagatctcatgtccatcatggaaatgcaggtaggattgtcggaaccgggcacaaacctattggattttgcacagattgtcttagcactcagttgcttttccatctccaaggagagaaagtgtaatactttccctgaatcatagagaagtggggacaatgagaagaaacctgtccaggtgtgtccttggggcaatgggagctggagacaggtagggtttgggttaaataaaactcaggactcagccttccaaatcagggcctgcctcctgggtgtgccttcttcctttccttcaggcagataggcacttggctgaatgcttccaaggttgtgcgttaataatagctgacattcacatggtgcttcacagccatcgttcgctcacttggccctcacagtcatctagtcagcctttatctcaaaggtgaggaaattgaagctcagaggttaaatgatgtgcccatcgtcacacagcaagtggtgcagctaggttttctgacttaagtctgggtgttcttttcactgtgctgattttgcagtaacaaggtagtgttttcttcctctccctccaagatgggggagtctggccaaacatgaggaaaagctgatcagtcctatattagggtggagcctacatggaagaacccatctctgccaggcctggtggacgaagctgggtcaggagctgacactgtgggctttggtttatagtattttgcctttacacccatgcagctgtgcctctgttgggtgcctgcagtgtgtgagccccaggggagggagtcagttcctagtgaacagtggtgctcttctcccctcccaggccatggaagtgaacacatcagcaagtgaaatcctgtacagtgcccctcctggagacccactgagcaccaactacagccttgcccccaacactcccatcaatcagaatgtcagcctgcatcaggcgtccctggggggctgcagccaggacttcttactcttcagccccgaggtggaaagcctgcctgtggccagtagctccacgctgctcccgttggcccccagcaattctaccagcctcaactccaccttcggctccaccaacctgacagggctcttctttccaccccagctcaatggcacagccaatgacacagcaggcccagagctgcctgaccctttggggggtctgttagatgaagctatgttggatgagatcagccttatggacctggccattgaagaaggctttaaccctgtgcaggcctcccagctggaggaggaatttgactctgactcaggcctttccttagactcgagccatagcccttcttccctaagcagctctgaaggcagttcttcctcttcttcctcctcctcttcctcttcttcctctgcttcttcctctgcctcttcctccttttctgaggaaggtgcggttggctacagctctgactctgagaccctggatctggaagaggccgagggtgctgtgggctaccagcctgagtattccaagttctgccgcatgagctaccaggatccagctcagctctcatgcctgccctacctggagcacgtgggccacaaccacacatacaacatggcacccagtgccctggactcagccgacctgccaccacccagtgccctcaagaaaggcagcaaggagaagcaggctgacttcctggacaagcagatgagccgggatgagcaccgagcccgagccatgaagatccctttcaccaatgacaaaatcatcaacctgcctgtggaggagttcaatgaactgctgtccaaataccagttgagtgaagcccagctgagcctcatccgagacatccggcgccggggcaagaacaagatggcggcgcagaactgccgcaagcgcaagctggacaccatcctgaatctggagcgtgatgtggaggacctgcagcgtgacaaagcccggctgctgcgggagaaagtggagttcctgcgctccctgcgacagatgaagcagaaggtccagagcctgtaccaggaggtgtttgggcggctgcgagatgagaacggacgaccctactcgcccagtcagtatgcgctccagtacgccggggacggcagtgtcctcctcatcccccgcacgatggccgaccagcaggcccggcggcaggagaggaagccaaaggaccggagaaagtgagcctggggaagaagggggtttgaagcccaccaagaccgaaactggagaagggctggacctggacctggacctggacctacagcggggacttaaatgccttcttatccaatatatcttctcagatgggatgactgcgggtcagtgtacaggaagaggcaggcactggctggctcagctccactcgggtggagtggaagtggccagaccatttagacggacagggtcctcaccctacccctttcctgtgaggcaggggtggtggtggagttgctggaggtagaggagctatgtggagcaaaggccgacagaggggaaggaatggacctgtgagaggaagggaaggtggcagaaagtctcatttcaggaaggagggatagaaggaaggaaggaaggaacccccccccccccgaaaaaaaaatcaaagcgggaagaaaatcagagggaaggttaaggttggctctggccaggattccaggcagcaggttggagtgactggtgggcctagatcactggtgtgataaaccccaattttcaccccggggggggtggggtacacagacacagggtgggggtggggagggacggtgttaactctttctgctccttgcattttgacatccctgaaggggagctcttggatatcattggccatgtttcaatcgaatggagccactgggccccaacactggctttgagatttagagtcaaagggtagagtgaacaggaaagggtcacgtggtcccatgttgcaacagccccaacatcacgcatgtcattcactgccttgccactccatctccctccgtgctccagccacccctgagctgaggctcccattgtctccatcagagcctgcatgtgtatgccgtcctcccctggtccggtgtttgtgttccccacccctcacagactgcctgagctcttctgtaagctggggtagggtgatggcagtgctccgggaactgggcctgcagccttcctcttctgggactgctgtgaggcagaggaatgatggagaatctagtgtagcagcctccaggcaggattcagcacaacactggggagtcacccttccctcgggcctctgcctaccaacaactgggcttatcactgggaaaacacaaaaaattacacaacccagcaacaacaaaagaactagtcctcttagaatttcttgcgctttgatttttttagggcttgtgccctgtttcacttatagggtctagaatgcttgtgttgagtaaaaaggagatgcccaatattcaaagctgctaaatgttctctttgccataaagactccgtgtaactgtgtgaacacttgggatttttctcctctgtcccgaggtcgtcgtctgctttcttttttgggtttctttctagaagattgagaagtgcatatgacaggctgagagcacctccccaaacacacaagctctcagccacaggcagcttctccacagccccagcttcgcacaggctcctggagggctgcctgggggaggcagacatgggagtgccaaggtggccagatggttccaggactacaatgtctttatttttaactgtttgccactgctgccctcacccctgcccggctctggagtaccgtctgccccagacaagtgggagtgaaatgggggtggggggaagcactgattcccagttagggggtgcctaactgagcagtagggatagaaggtgtgaacctgggagtgcttttataaattattttccttgtagattttatttttaatttatctctgtgacctgccagggagaggggagagagagagagatgctgttgagcacatgacaaaataaaataaaatggatgattcattcttaagtgcactttttccccactttgaatttaaattgagaataaaggaaatggactcattgtagggaggactggccattgcgtggctaaggcagagctcacatgggaagatgggtggagaactggggaggttgacagtggggaacttcaaaaggcaagtcttaaatattgtattaaaccttgggggcaggcattagacaccatgtacttcatagggttagccagctcaatcctctcaggaaggattcggagtttttttattctcatacagctaggataggtggaggtgtcatttaacccagctctttacctgtccacctgctacaaactacatttttaaactcaactgtgctgttatttttctattggcctcacctgccaaaggggtgcagagaattggagtgtagttatgatgttgaaaacctgagaaatccatggcagcgactaacatgtgacaagcactact

SEQ ID NO: 86841 - DNA, 1076 bp, Homo sapiens
taactggggtaataacagttgacttgaactttccaattctcaattaggggctgaagcagtaattgaaatgggctagtgtcccaaagccaggcgtcaaagttgcccagcctgaccctaactatgcaaatagcaaaaagggcaggcttggtcaaagtcaactaggatttaaaaatccatttggggtaaacagtggctttggtactatcacaaaccaccatacaaaccaacaaggtcacaaggcagacccaattgtgctgctggtatattgtaaaacaggttatttaatacaaccaaaaactacagaagctgaattgtcagcacctattctaaacttgatatttagccttccctcacttttgccacttcattagcctaagaaaaaaaaaacaaaacaaaaagcctttaaaaggcactgctctgcttgcccccacaaaggagggccaactgtgcttttcatcccagcaggatggttttatttcacatttcatttgttttcaacattcagtagtttattcaacagtcaacaggaaacttacaaggccaaggtcaattaagtcatccataagagaaacaagtaactttaaacttcacacactagataggaaagcagtaacttttggggaaaaaacctcagtgctggacatcgtcaaaacaaggtgatgtgcagatccacagattgacaagttgtcttgggatcttaagctctcctctatcaaactcctgtaatcccacaccaaaacactaggatgcctctccctgatcattgtttcctagtgctgaaagccaagactcctttattaagttgaacgctaatactgagcctggacttagttcagttctatcagctttaaattataaataagaacatatcttcatcagaagacccaacttgcacattaatccaagctatcattttcccttttactatgagaaataattgctttataatgcagattcccaatgccacagtccataaagatgtgccaagcacacagacaaaccccaaatggcgcaagtttaacatcaaattgagccaagtctatggccaccacagaattgagagttctggaatataa

SEQ ID NO: 86842 - DNA, 1059 bp, Homo sapiens
gtgctgaggaataattgttcctgcatttaatatcatttgaaaattttgacgaccaattttaagtgatttttagtaattaaatttttatttatttttttgaggagagaaatggtctctgtcacctagtctagagtgcagtggtgctaccatggctcacggcagcctcatcctcctgggctaaagggatcctcccacctcagcctcctgagctgggactacaggtgtgtgccataatgcccagctaattctttttttcttttttttttttttaacttagtagagatggggtctcactgtgttgcccaggctggtctcgaactcctgggctcaagcagtcctcctgtctctgcctcccaaagtgttagaattacaggtgtaagccactgcaccttgcctaattaaatttttaaatacctgttttcagatatgaccttatattccagaactctcaattctgtggtggccatagacttggctcaatttgatgttaaacttgcgccatttggggtttgtctgtgtgcttggcacatctttatggactgtggcattgggaatctgcattataaagcaattatttctcatagtaaaagggaaaatgatagcttggattaatgtgcaagttgggtcttctgatgaagatatgttcttatttataatttaaagctgatagaactgaactaagtccaggctcagtattagcgttcaacttaataaaggagtcttggctttcagcactaggaaacaatgatcagggagaggcatcctagtgttttggtgtgggattacaggagtttgatagaggagagcttaagatcccaagacaacttgtcaatctgtggatctgcacatcaccttgttttgacgatgtccagcactgaggttttttccccaaaagttactgctttcctatctagtgtgtgaagtttaaagttacttgtttctcttatggatgacttaattgaccttggccttgtaagtttcctgttgactgttgaataaactactgaatgttgaaaacaaatgaaatgtgaaataaaaccatcctgctgggatgaaaag

SEQ ID NO: 86843 - DNA, 2416 bp, Homo sapiens
atgctttttggggccttgcccagatgttcagatgtgattggttaagtccattgacctggcttttgacatacacgaatccccagagggaattttcaacaggagagttaactctgaggatgtcacttgacatacaattgccagtaaatgctgcttgggccacgttttcattgttccctagcctatttttctaaaattaccatttttaaagcactgtcccctgggttatccaacttaggatagaccaccagcacctggtctcaaagtctctctttgctttattctgcaggaaaaactctgatgaggctgacctggtccctgccaaggaagccaatgtcaagtgcccacaggttgtcatatccttctatgaggaaaggctgacgtggcattcctacccctcggaggatgatgacaaaaaagatgacaagaactaacgctcctgagtaccagcccctgtcacatctgactgtgggtttcaagtgggaagggaaggagttctacttgtcttgacaccatagaggtggcttgagaagatgtcctttgaagagccagtatagtttctgtgccctgcagcagcccaagtgctttaaagccgtttcaagctgtatagtttgcacacccatcccagtggaggggaaaggggataagtgtttcaaggcaaccttttctgcactttgctgcgaaaagcaaagggccttctatgaaggacaaaacttgcagaattgggtgtgtgggagagcaaaaaaatactgtagatcttcaaagagcatctccacaacccacagccttcttcccaatagtgttaactctgcatttttacagcgtagcatgtgtgtagtttttggctattactggtgtattatttgggggagggagggatggggaggggagaaagggagatgggtagcatcattttgattaacatttggggcctgataggggaaatggtgaagcaatggaaaagaacagacaactaatgatttgcttctatgtccagaatattttacctttaaaaaaatgtcattggcaccataaataaggactgtgagagactgtttaaaagctgtgaaagtctgaaacctataagccaaggtgttccctgcctaaacttattgctgttcccacaaaggactaagcctgttcataagttaccaaagttgccattttggagatggaaattgacgaggagggaaggtcttttattggagagtatacagtacaagcagatcattctgccttagaggtgctaattcccgaaattagaagaccctttcttttccagtaacgaagttataaatatcagcttgttcatccaagccactggctgaggtgttaggaagaggaagagggtggtagaggaggtaagacagtagggaaagacaagggcccatgctcttagtggggaaaactcttggagccgtttactttgagctttgaacactgaaaccattgttggcagggttcagtcactgacagcacaagtttcactgaattgatccaagagtttagtgatttcaaaagccttggtctcaggagaagattaaactttcatattgggcagtggttcactttaaaacacacacatacacacacaaaacaattttttaagaaatcctaataagtaacatacccaaaatgctctgtcttgagtcatgagaaccatcagttcttgatattgtctagacttgcatctagagctacgttgtaaaattcttttaggcatgtgttagatttctgtgtaaactttgtttaaatgtaaacttcatactacattgtcagtttttgtcttaataaaactatagatttataatccctgatttctgtcttaagtcttaccaggaacccttcttgccttataggttcagcctgttggaaatggcttcctcacttgaatggttttatttcttgaacactgtaggcttgaaaatctagtgcctggcctgaatctttaagtggtcacaccatgttaatttagtaaatacttactgggcatttatcagttgctgcagaggttgtaaagatggtcgcatcatgctgtcttcagtactgccaaaagtttattgagcactctgacctgatagcacttccaaactatggtatatttggaaacatgggtttttaagttaggtttagatcctgcctatggtatgtaatagattatatgaccttggctaaaatctacttctccaaaattttccaggaatttggccctgtgtttgcgcactgatttaaaacgtcattttctgcctatgattttttttttttttttttgagatggagtcttgctgtcacccaggctggagtacagtggtgtgatctcggctcactacaacctctgcctcccaggttcaagcgattctcctgcctcagcctccagagtagctgggactacaggcgcgtgccaccacacttggctaat

SEQ ID NO: 86844 - DNA, 1141 bp, Homo sapiens
ggagtgcagtggcacgatctcagctcactgcaacctccgcccctccgggttcaatgattcttctgcctcagcctctcaagtagctgggattacaggcatgtgctaccacgcctggctgatttttgtatttttcatagagatggggtttcaccatgttggccaggctggtctcaaactcctgacctcaggtgatccacccacctcagcctcccaaggtgctaggattacaggcgtgagccactgcacctggccgactcactgctgtctacaggttaaaactggatttgattataagacaaagtacattttaaaaagttattttactggagaatagagatttttgtatatttctaaaagtagtaaatatttctggggagtgaaatgactaaatttaactcagagggtgttgttcagctgtcagcaaatggcagcatgcttcagattcccatttccctcccattctcttgggtccattgttcaaaaacatacattatcagcttactcttctgctctatgggactatgtggctctgatttcctgttattaaggttctagagatttggggtggtgctttgtcagagatgtcatcaggtgtctcctgcttgctttacgctactgcttctgtctaggacattcctaataacctgaagataagagtttgttttttttttaaatgagacagagtctcgctctgtcacccaggctgaagtgcagtgaggcgatctctgttcactacaacctccacctcccaggttcaagcgattcttgtgcctcagcctcccgaatagttgggattacaggcgcacgccaccatgcctggctaatttttgtatttttagtagcaacacggttttgccatgttgaccaggctggtcttgaactcctgggcctgcccaccttggcctcccaaagtgctgggattataggcgtgagctactgctccctgcctaagagtttactcctaattcccttataatgtgtatgattttcaaattttgaaaactttttttttttgagacagagtctcactctgtcgcccaggctggagtgcagtggcatgatctcggctcactgcaagctctgcctcccagtttcacgccattctcctgcctcagcctcccaagtagctgggactacaggt

SEQ ID NO: 86845 - DNA, 1199 bp, Homo sapiens
ccaaaggattctaacagctctcttacttgagccaaggtattggtgaaatattggcaaaagagtttgtgattgggccgggcacggtggctcacacctgtaatcccagccccttgggaggccgaggcgggcggatcacaaggtcaggagatcaagaccatcctgactaacacggagaaactgggtctctactaaaaatacaaaaaattagctgacgtggtggcatgtgcctgtggtcccagctacttgggaggctgaggcaggagaatcacttgaacctgggaggcagaggctgcagtgagccgagatcgcaccactgcactccagcctgggcgacagagtgagattccgtctcaaaaaaaaaaaaaaagagtttgtgattacattaatcagagacacaggaatggttccagtctggataatagtcccatatagataaaattgttctacccatcttgtttttacagtcagaaaagccacgaggctttgctcgaggtttggagccggagcggattattggagctacagactccagtggagagctcatgttcctgatgaaatggtgagtcggccagtggctctgtgtggttgttttttttcttctcccattggtttcatgccagaggaaaagagctggaccttcgaaattccaatcacccaagtgtgaaattgttaagatggcatagtccttcgatagtgaccctcggcctgactgccaccctggactcatgagttacaggtaggagcccttaggaatcttgggtctttgcccatatttttaggaggtgggagacaatctagagtggaaagagtgtgggaaggaattacatttcacttctgtaaataaagggggagaaaatgaaatgtgattggaccaccctctccttctaccacctccttaataaagatgaggctggccccagaatcagaaattctgctaaattctcagggttaggaaagaatctgtagttcttccttttgtccttaattgttggatccctttcaatttgtgcagattctacaattacaggatcagccagcaggggtcagcaaggctccttaactgctatcaagcatagagcaagcctgcttttttccattatgagtataaataccagtgatagtaatactccatgaaacagcctaatgaagatagttatcccaacaatctctgtaattttcctactctgtcaaaagaaggc

SEQ ID NO: 86846 - DNA, 1067 bp, Homo sapiens
aaaaaaaaacaaaaaaaacaaaaaaaaaaacaacaaaaattagctgggcttggtggcacacgcctgtagtcccagctgcttgggaagctgaggcaggagaatcgcttgaacccaggaggcggaggttgcagtaagccgagattgcgccactttgcactccagcctgggcaacagagcaagactccgtctctcaaaaaaaaaaaaaaagtttgctgtaagattaattggggctgttttatgagctttctggctggacatatcagaaaactattttgtatcgagtgtgagaagaagcctaacacttactataagcagcatacaatattatcacctgtcatgtccctggttttcttaccatccagatattatctaaccaataagagtgctccctaatgccctttttatttcatttatcattttagcagcgtcaccctttacaccagaaagctggcgggcactatggggaaaaaacaaaacaagaagaaagtggaggaggtgctagaagaggaggaagaggaatatgtggtggaaaaagttctcgaccgtcgagtggtaaagggcaaagtggagtacctcctaaagtggaagggattctcagagtaagtttcactgacacaggtaaatgtagccaccacgtgtttatcaggagtctagagatgtatgagacctccagtgctatgatggatacagtgtgactcagtccccaccttcatggcttattgtttaattaggaatatggcctactgcttataatacaaagcagaatgacttctttttaaaaattatttcttttgagacgaggtctcgctctgtcacccaggctggagtacagtggtgcagtcatagctcgctgcagcctcaacctcccaggctcaaggtatcctcccacctcagccttctaagtagctggtaccacaggcatgcaccaccatgtctcgcttagttgcccaggtttgtctcttaactcctggcctcaagcagtcctcccacctgggcctcccaaagtgttgggactacaagcatgagccactgtacccagcccatagtgattgctgagaaacagtttt

SEQ ID NO: 86847 - DNA, 1577 bp, Homo sapiens
acatctcagataaaattcaaaatgtattcgcacaccagcattctagcctttgatcctctggaattcaagggctggtgttcctttaaaaatgaaactcctgactgggcgtgatggctcacgcctataataccagcactatgggaggcctagatgggtggatcacctcaggtgggaactgaagaccagcctgaccaacatggagaaactccgtctctactaaaaatacacaattagctgggcgtggtggtgcatgcctgtaatcccagtgactcgggaggctgaggcaggagaactgcttgaacctgggaggcggaggttgcagggagccgagattgcaccactgtactctagcctgggtgaaagagcaagactccatctccaaaaaaaaaagaaactcctgctaactgtgtgtggcataagttcttgttttctgcttagtcaagttttccatctggaaagcatttgcttcgcaaacagccacagcttacagactacaagcagtttagaaacaagactaccacctgaatatactacacatgccttcacctgccttttgatgattggtatgtagttgctgattctttcaacaaaaggtacttctttcttgttttctctttagggcttatggatcagatttatcttgctgcttattcccttaaaagcttatagctttggaattctattccctgatgcttctgagacagtcatcctcttttttttgagatggagttttgttcttgttgcccaggctggagtgcaatggtgcaatctcagctcaccgcaacctcagcctcccaggtagctgggattacaggcgtgtaccaccatgcccagctaattttgcatttttagtagagatggggtttctccatgttggtcaggctggtctcgaactcccaacctcaggagatctgcctgcctcagcctcccaaagtgctgggattacaggcgtgagccaccgcgccccacctgagacatccatctttattgtccatatagggttcaacaacttgttcaggttccagacctacctttaattgtatgtgcaagtaaaaatagaaacagaatgctttgggaaccccaaagaaaagagaaatattatttagctaggttgggtaggcttcatggagaaagtagcatttttaagctgggtcttgaagaatggataggattttgactgttggccctgtacaggagcacactactttcttttttctttctttttttttttgaggcagagtcttgctctgtcactgaggctggagtgcagtgtcaagatcttggctcactgcaacctctgcctgcctggttcaagtaattcttgtgccccaccctcccaagtggctgggattacaggcatgcaccaccacacctggctaatttttgtattcttagtagatatggggtgtcaccatgttggccaggctggtcttgaactccaggcgtcaagtgatccacccgcctcgacttcccaaagtactgatttataggtgtgagccaccaagcccagtcaggagcacactttttttttttttttttcctttgagacagagtcttggtccgtcacccaggctgga

SEQ ID NO: 86848 - DNA, 1010 bp, Homo sapiens
tcacatcctcaaaatttttgaatcttagattcttcaccagaactttatcatatcgccgctgcctcaaatttccaatgatttcttagtcctcaatctctgcctcctcaaatctctgtaaaattcctactcacgccggcacggtggctcaagcctataatcccaacacttggggaggcggaggtgggtggatcacttgaggtcagggtttcaagaccagcctggccaacatggtgaaaccccatctctactaaaatacaaaaattagctgggcgtcgtggcgggcgcctgtagtgccagctactcgggaggctgagggaggagaatcgcttgaacccaggaggtggaggttacagtgagccgagatcgcgccattgcactccagcctgggcaacaagagcgaaacttcgtctaaaaaaaaaaatactgttcagtgttaagattacttcccctttgaggtcttccctgattccctagagtaggttaggtccccccataggcctctcatagcttcctgaatttcccccttttcactggctgcgccacaaaaatgtcctctttttcattgtaagttgtgctcacctttttcagtgtcattaatctccgtcagcacctttcacccaatcatcccaaggaaacacacaattaggaaaaaaacatgtttttaagccacaatataactaaagttttatttttttattttaaagtatccttctaatcaggaggaagagggaaactctattgcactctaccccaaaaggcaagagtttgcatttataagacagttttgctgatgcaggcactgttcagggcaggagtttgcatttataagacagttttgctgatgcaggcactgttcacggctctggagaactgtcatgtaagaaaaacccagcccagcaatatcataatagagtttagttaaaagggcttcaagaaagcacagagaagatgagaggtgaagccagctggacttcctgggtcgagtggggacttggagaacttttctgtct

SEQ ID NO: 86849 - DNA, 1335 bp, Homo sapiens
caagtaggtgggattacaggcgcctgccaccacgcccgctaattttttttatttttagtagagacggagtttcattacgttggccaggctggtgtctggaggtttttaaaaagccagttcatagctatttgtttctgagtggtattggccccaaaggaaagaagaatttcttcatgaaggtagtgcagggccctatacaaacttcctgagaccaagggtatgatgatcatttcgttcctaaattatggtcctgaatttgacaaacctttttcaaggcacaaaagatgtatgagctccactgagtggatgactgtgatttccttgtcatcgtctttcccgttgttagttttgtttaaagacacttcagaatatttaactctctgctcctgtgctggcagtttatccaatgcctgcaaagagaagagaaaaaaaaaacttaaggaggttcattgttcacagcaaataggtctgctctttttggtctcagacatttgactgatatctggaatgttatatatgggttgttatggaattggaatttcccacctttcagttcaggaccccttggaggtggtggctgcatcagataaaaatcagattgtcagcaagaataccatttaagatggtactgaaatcacaaaaccttaggtttgctcaatattgtgtagcccaattttgtcatggaccatgcagcttcgtttctgcatgcagtgtttgtctgtggagatacttctggtatattggagagaattgaaaaagtggtttgctttgctaatttcatggtgtaaatgagttccccttcttttgaaatgttagccttgtgttagcaaaacataaaatagaaggaaactcattacacagtgttctaatggtaaggcagaactaataagagaatgtgtttaaaattaattgtgggactgtaaaaatgagtgggtatgtgaatgagtacgggatgggggaggagagggagggcttagagatattagagatagtcttgttttcccaggagccagcctggatcatttgttggcagtacatattggctgaagtcagttttcatttcaaggtaaattggaaagggaaattaaaccttattgtttctctcttaagagagaagggggtgcaggcggcagccagggtggatgctgttggaatagttgtagaagtaacaagattagtgctgtattttaacagaaggtgacatcatgggccccattggacttgagtaaccccgtgctgcagccttcatggtccccttgtcggagtgggtgatgtcgctatacacgtgaactgccacattggggaaaatcaggggctgaggctttaatgaatctt

SEQ ID NO: 86850 - DNA, 1064 bp, Homo sapiens
gagaattgcttgaacccaggaggcagaggttgtggtgagccgagattgtgccattgcactccagcctgggcaacaagagtgaaactctgcctcaaaaaaaaaaaaaaaatgctgtgatgtgagtgctcaccagaccctgttgtgcctgcattcttcaaggcaaaagttttacatctggacccgcctgttctggctgcgtgtgacaaactttctgtagactccaacacgctttggggagaggtggcctagttgagggcctggtctgagaagggaggcaaatcccccagggccttttagcttggcattgagctaatggggattttttttttgcttcctcttaagttttacaagaacaaaaagtgttgcctgggtttccccacgggggtctattaaaaactttcggggttttccctggtaaagaatgataagaacagaggcatactaaccttgatcctgtatcctctgtccctcatcagatgtttccttccaatgggcttttggtgtaggatgtcggagaaccaagaacaggaggtaagagtatggtctgcagagaacaggtgggtaaaagttggagaggggatttaggaggaaagaggacatagagatgcaaatcattaattattacctgcagtattactttggtggttctgatgagctcagaataaagtcaggagaaagaaatcaacagcagaggcattcctaggaaattggggttccattctgactaaattttcctttgattggaatatactggaatgtaagcttcatgggggcaggcacttacgtctcttgttcatgctttatccccagtgcctataacagtgtctgacacgtagtggggctcagtaaaaatttgttgaattgagtgactgaattgagtgaatgaaagttgaattgaataaatgaaagttggtgttgagtgaatgaaagttggtgttgggtggaaaaatctagcgacctgtgttgtcagagctgccttgctgtgtagctgaagctgagggagcttttcttacctacaggaggtgattacagtgcgtgttcaggacccccgagtgcagaatgag

SEQ ID NO: 86851 - DNA, 2582 bp, Homo sapiens
tcccagtgaagaaaaggaccatttagaagtgtgggctccagttgttgactctgaggttccttccttggaaagtcccactctcccacccctctcctcaccattatgctgtgattttggaagacccaaagagggaacctccactcttcagtctgtgaggagggctgtgggaggagatcatgctgtgcctttggaccctggtcagttagaaacagttttggaaaagtgagctctgggttctgctctgagatggtcagagaagatgcgggccaggagacttactcaggtgggactgggcacagggcaggtatgtgggaggctgggctgcttagtgtcttctagtcacctctgcttgggctgattgacagaggtcagtcattacagccccttatgcctcttccatgggaacaaatactgtgcagatgtttgtaagttaaacataagacacaggggctgttgcttttgaacagaaccctatattactctcctgggatctgagtttctgcaggtcatttgtatgtaggaccaggagtatctcctcaggtgaccagttttggggacccgtatgtggcaaattctaagctgccatattgaacatcatcccactgggagtggttatgttgtatccccatcttggctggcttcagtttttgctgtagccctagagcactttgtttgtgggaggctggcctcttgcctacctccttgcatggacagggggatgaatatttactttcccacctccttgctttttctttcactgataccactgaatggaactggtgctgtgactcctgctgctggggatttatgtcccgagaccttagcctggctgagtggagcctgagacctgcacaacagctcatggtcatgcatgagagagaagtggctggccacagccagagggaacagtaacagcccaggggcctttattttgggaaaggctgtcccgggctgttactgtctcttctggttataaagcagacatgtggccatcttttccgcagggttagagtgggctcctttctttttggaatccttttcttctcctttggtagcagctccctgcctccagggcttccgccaccagcgtctctgctgtgttgcgcagtgcagtggggtgcaagggctttgtttctgcctgcctgaaagagagggctctggggatggagatgagaaacaacacgctctccttcagacaatgaggcattctgtcctcctgctgccattcttcatctccactgagagccagagctggtaggagccgagtgccacaggcattctgcattgctctactcttaggtttgtgtgtgtgatccttcccctccctgtcgcccactcctccctcctctggctatcctaccctgtctgtgggctcttttactaccagcctatgctgtgggactgtcatggcatttagttcagagtggaggggctttggcctgaaataaaatgcaagtatttaagattgttgttgcaatttgtgtctaacaagctgtagcagagaaggagggagtgagcgctggcagtatttcctttcataaatcatgaatttatcagtgtggaaataatgcttcagaactgtgctctgtagccctcctgcattgtgtgtgcagctcaagttcaccactggaggaaggattgtcttccaaagagctgggatccaactcttctcacagttctgggcgtgaaccttgttaggtataatttacctgatgctgcttccatcctcgcagtctgtctgaggtgccaggtgctgaaagagaaataaagtttgtcaacaggcagatgcaaagccctggctggtattcatccctctttcctgcccgcctcccctgggtctctcctttatatgatgcagcagagcaaggcgaggatagaaaacctacagaggcaaatccaaaatgtcagaagaagttcatttaaaaggggaaaaaaactccatgtgcaaccctcacaaaaacccgacagatgctaagctaatggcatccgctctgccgattggtggggatggctcatgaatattaatgagcccaatgctccaaatggtgcagctgtgaacccagctgtgcctgaagctctctgatctcgaaacttccagacaggagctggaggtggtctgtgtcaattccctactcagccaaaaaaacagcaagctgggttggccttcttctgtttgctccttttcttcctggagttggtgctcagcagctagttctgccagccggctaggctgctgggacagcaggagccattcaaagacatggatgtgatttttctgactcccagcttttttaatgatccattagcagcatgcatacaacagcacctcagttaatctaaggccaggcaccatctcttttcagtctctctcttaactgagtataggccttggaaggagaagtcctaggaaggaaagcacttttctaataatacaagcctagggtcatccgaaaaatagcgcacatgagttttcctctccatccagatagtgccataggcccctcttctgttttgctctgtccctgcgtgtgcccaggtctagccactgtggccagatgacctctatgaaagatggaggatta

SEQ ID NO: 86852 - DNA, 1030 bp, Homo sapiens
atctaaataaatggtaataatcaatactttctggtaggtgtcaggagttcatcttaaagaatgactaactgtaataatccattgcttctcaatcgtgaaacattggtatactttgatcagttaaaggacagagattttgaataatttacttttagaataagaatgggttttggccgggcgcggtggctcacgcctgtaatcctagcactttgggaggccgagacgggcggatcacgaggtcaggagatcgagaccatcttggctaacacggtgaaaccccgtttctactaaaaatacaaaaaattagccgggcgtgttggcgggcgcctgtagtcccagctactcgggaggctgaggcaggagaatggcatgaacccgggaggcggagcttgcagtgagccgagatggcgccactgcactccaacctgggagacacagcgagactccgtctcaaaaaaaaaaaaaaaaaaaaaaaagaatgggttttaagtttttctataacaataccactcactgcattctgatacgctttcttacagggagaagtcaatcaaaaataacttatagcttatcctatgtatgctacagcctatagtgatgaaatgaatctgatgtactatcataattgtggcatcatgaattcccacagtgctttatttacttgaaaaaaaaaattgtgttccttcaaaaccatgagtgttctgtggtggtgggttaagcatatgtgtcttttgattttatcaataacacatatctgtaacccaacatcctcagcttcatttttatcctaagaatccatccttaatatagaaccgcaaaagacctgaagtatctttagcagctaagtcacagtaagtggcaacagagcaaagtgggaatcctgatacaaattaaggcagaaatccttcaatggtctcatgattctaaaaaggagaagaggattttaaaatgccacattgtctttttacaaaccttgcaagatcgacgtattccccctgagtcagatcacgattatacatgcatcacttga

SEQ ID NO: 86853 - DNA, 1182 bp, Homo sapiens
ctatttgcacagctcattaactaagggctcacactcagcaaacggggaaaaaaagaaaaagaaaaaaactttagtaccaaatacatttggaaagttactatagagacctatatttcccttgaatctaaactaggccctgccacattctgctacactgtggttggatgcatctgtttgtctgtctgtctttattgcttatttagcaagtagcaaatcgggatgaggcaaagcatcttttgtcagaccatgcaggagagagaaagagaacatttctttccccactgaacattatgaacattatggcaggcactggacctgctctgctactgggacaacatgatttacaatgtgaaaagggaaaacctaaatcaccaagtaatgaaaacattaaagttaatgcatcacaagtgaggaatttattaccattaactccaataaacagttataaaacactcgtcctttcctgtccgtgcacagggacacagacactggacttcattaagctcaactttcttttcttcttcactagaccagtcatgtgtgtttgaaccaaccaccatttattgttaggtggactagctcattttccaggactgtagaaagctgaaggcacatccattctgcttcacggcacttggtatagacggatgaaatagcaaagtttagaagacatgcagctcggtattgctgtataagtttatttaaaagtctctaaaatgtatttctgacaaaagcagaatagctcttccgagcagcctttctcacaggcaggtatataagtaataatgcctggtggggaggatggcatattggatgccaatgcacgtcaggtgtgtttaactgaataatttttcccttgttattgtttggtatagcaccttggaagcctgagatggaaacccatttccttctaacatttttctctgtcacaggggcagagaagtttattaccttaaggttgttcctgaacaaaagaggctgcacatattggatggctaaggtagattggttccagattcatttgttttcaaggaaaaaaagaactaaagtgtctttttgaaaagccacttctaattgtggaattgcctgggtgttacaaagcacataggagaggcagcatgaaattcaggctttcctgaccaaataattacaacagtaacatgataatagtaatactttaca

SEQ ID NO: 86854 - DNA, 1064 bp, Homo sapiens
ctgattcaggattatctggagtggggctgaggcatgtttatttttacaaagttctatgagtagttctgatgctcacctagggctaagaaccacagcctcagagtagatttgtatgttaggtccttatcatcctgatggcttgctggagggccttggtgaggtgggcccagggaggcccccaggtggagggcctggacagtgagtatcagaacaagcacgaggggcaagagaagtgctataggcaccaaagtaaccaaaggtgacctggaaaagagccaagacaacttgtactcacagcaattttaacaaactacccaggatcattattaccaagactagaataaactacattaatcaaccaataaaagttaggacttctgcataacaccatttaagaaatactaaagaaattattatctgtgctaatataactctggctttaatcgtttccatggctgaggaggccacttgtagtcatttcatcactgtggtatctttcccattctattcctcatagtctcctcccgagtgttaccctgctcggtttgtcctcggctaccctccaaaggaagtccttaccagatgtatcattaggattagtttagccagtgtgacggaaagccccaaataatagaggccttaacaaaatagaaggtaatttgtccctcatgtataaaaagactggggggaggcaccccaggaatgggagggcacttcatgctcctcttttttttcctgaaaaagagttttgcatcttggtgatcacatttattagaagggttggagaaaaataaaaatgccatttagcttaagaagttatgaattatctgggctgggtgcagtggctcatgcttgtaatcccagcactttggagggccaaggtgggaggatggcttaagcccaggagtttgagaccaggctgggcagcacagtgagaccccacctctattaaaaaaaatttttttttaatagaagttatgagttgtctgcaaatcaattcatttcaggagtgggagaatttcttaatatcaaaatgtttgctggtttctcttttgaatgtcctg

SEQ ID NO: 86855 - DNA, 1065 bp, Homo sapiens
tatttaaatgtagatcataagcatgtaatctgcctagaagctcctggtaatctctcatttatccataaattcatttatccaggctgagcctgatgaaatcaaggggctcctctatggtgttggtagtttgttgctggtttatgtcgtccaccatgtttcaaacccttcgccctttcctcttcaggctctttctatctttataaagtatgtcatttgttcgtcatggtccaaactggctccagttccagccagcaggaaggaggaaaggggcaacacagacagcaccaccatccctctacctgcttaaggacacttgtgtgtggccctaaaaagttgacacattacttacacattccactaaccagaagttaaatcacgtggtcaaatctagttgccgtggaggcagggagttgttctgggcagccacgaacccagaactgggggctagctagcagtctcagctacaccagtaatactgcacacagctaaataagtattggcagtcaccttatgaacctagaatatcccactggaaagaaagaaaatgagtatggtaagagaagactgcttaattccaggtgttgggtaattcgtggcgattagaggaaagtgttttccactaatgaagagtgagaatttgttcaaagtagttatctgtggtccaagaatcataacagaggcctcaaataaatgaagtgttggtttatcttttgaaaggttatgtttcctcttggaattatgtgattcaaaagtccacctcttgcctaaggaaggactggaatacaggccttcttgtccaagttcctgaagttaacttctataacactgtcaggagcagaacaacatataagaccactggagtgtgcgctagctgttagtgctcacaaaaagtaggagaaatgttagtactaatttcacacccaaatttgcttagatgtgcttaaaaagattctgatcaatgaaaaggtatacttttccctaactctagggctccaagtgcttgagggttacagataatgctgttctagatgcatgtggtataaaatacaaataatctgtttaagt

SEQ ID NO: 86856 - DNA, 1066 bp, Homo sapiens
gaatattcataagagataaaattttgccctctcttttgtcagacattctctagaatgcatgttctttcatggacagattggcaaatattataagtatcagattcaaaactttctaagaaatttaaatgttgaattcttctaatacaagaagcaaaaattccattttcagcgtttcatgtgttgagagtgaaaagggggaatataagaaagaagtgaagtccagatttcctaaagtacatctcaggtaagcctctctcttatcacatattttatttttttacctgaaatatttcagaacttaaatgtttttgtcaaatttgaaaaaggtgtgtggtattgacttcttcatactgatctcatttttattttctttatagtctgtccaaatcattttcaggccccttaaatcagttacctttcttctagggacaatcaatagaaagcaagcaaaaagaaaaaagagtgagacctgccctctcagtggtctcctgggtaactttatctcccagacaggatgatgcaaagatgaacagaagaggggtttctgaatagatttccagtaggattgctgtcaagatgggatcagctgcaatggtgccagataaaaactgcaggagaccgagatgggtggattgcttgagctcaggtgtttgagaccagcctgggcaacagggcaaaaccccatttctacaaaatacacaaaaattagcctggcctggtggtgtgcacctgtagtcccagctgctcgggaggctgaggtgagaggatagcttgagccaagaggtcgagactgcagtgggctgagattgtgccactgcactccagcttgggtgacagaggaagatattgtctctaaataaataaataagaaaaggttaggtaaaggtaaaaattatatggagtccactgcaatatctcttatccaaaagaaatttgttaaaaaaaaattttaacagctcaaactacctttgaggctaataaaggcaccaaaatggattatcagaccatgatttgaggtttgaaaaaggatgccagtgctgactgactgggaagctattggaaataa

SEQ ID NO: 86857 - DNA, 1028 bp, Homo sapiens
tgttgaaaataagccaagttaaccagtttttatgagctcatagtgaccgatggttaacagtttgcttggggttattcactcagaactttactggcatgttctatgactacaagtacaaggtaccaaggaacagcagatgtgcacggcactgtatgtgagaagtatgagaggaaaagcagatggcctctagctgaatatctgaaattgttaattaacaataaaaaagtatataggtaccaaaataaaaacctacagctcagagaaggcagtgtgtatagactgtggagaagagtaccttgagctgaactctgagagatgggagacagagagagagagagagagagagagaagaaggaggaggaggaggaggaggaggaggagaaggaggaggaggaggaggaagaggaggaggaggaggaggaggaggaactttccagaaaggaaacagcacaagcaagagcttgaaagtctacactgagtataatgtgttcttagccaacagtaacttgactgatgcctggagcttttggtggatatgtaggtgtgggtgtattctaagaaataagctaaacatttatcctatgggtgtaggacaaactctgaaagatttcaaaggtcaggctgacaagttctaataatctagttttccctagtttccctcactccaatttctcattatgaatgctgaaatgagcaggtcctttaaactggagaggctaggaggtctcctcagctatgcagagttattgaaagttttcagtcaggaaatgacataataaagccagtgtttttctagtgatgaagatgatttaaatatagttgctctacaactattcttctattgactgaactattccatttttcaaatagaataataattcttaacaaagtaaactggttcttgtcttagattctttctggaacaatgtggtatcatacctatgcctagttaatggataggaactgtcatcaaatttaaattttctcttaaaccttgtgttattttaccactttaggtggccaaaaaa

SEQ ID NO: 86858 - DNA, 1085 bp, Homo sapiens
gagcagtcactaacatttgtaactattgagcacttgaaatgtggctggaagactaagaaactatttaaaatgtaattttttagttaatttaaatatacccttaaatagccatatgtagcaagtggctaccaaattgaagaccacagctctagaaaaatgacttccaaactaaatagtcaagagtacctgaaaatagtatttcagaaatttctttaaaaacagatggaatggaagtttggtgggcgagggaaagtagaaaggaaggctcagatataggctggttgaggagaaggtcagaggggcaaggtaggtgagtaggcaggagagccctcaaataaatttatgtgagaagcccagagaaaacaggatgtggagtggaagaaaggaagtgacctggcaaagtgctttgaagaagagcattagcatccatagttaatggatttgcacagattgaaaggtaaataaaaatcagcacttttttttttcagtattcacccactgtaaatcattacttgacattttgattggtggctttggagtaagttgtttaaatggtactgagatgtttgtgtaggacagaaacttacactgctatcatcctatagaaatcacagagctcctgggtcataaggctgtaagtttcctcagtacgggggtatcatttattccttcacaagtattcattaagtcatataggccctcttgtttcaagtcagtgtcatatctaatctttctcaagagatagatttttccaacacattaaaatattttttcattataaaagtatttaagcccctgataataagtaatgctgtcacgaatttgtacactttatagcactttacactttaaaaaccttgttcaaatgcatcaccacatttaaccctcacagcagtctcatgaggcgagtagtatccttgtttgataggtgaggaaaccgagcatgagattcatctgggatcacacatctcacatgtagcagagatggaacccagatgaaagccagacagttgcagagtatgggttctctgatctcactcttgccattgttgtttctcagtattcaactctttgtggtgataatt

SEQ ID NO: 86859 - DNA, 1046 bp, Homo sapiens
aagacaaaacaagaaaagccacatatgttataaatatttgtgtaagcctaggaataagtaaaaaagaatatataccagactgttaacattggcttccttgagagaagactgagagtttggaggaggggaggttattaatttttatttcatacatctttgtgttgtttgaattgtgacaatgaccatgcattacttctgtaaacaggaaaaaataaacagtaagggtatttaaaagaaaaaggaacaaaagacaaatagaaactcagagaggtcagagtgctaacggaccatttactatgcttgtgatcatgtttttctctttttagccctgaggggtatggaaggtggagaaattaaaaaaaaaaaacacgctatcttggatttttggcaaatatcaaaacagtgtgaggtttctagagtaactcaggaaatagcttctttagatagactctgtcaagctctcatatagaaatagtaactagtcccctatcaacaaataaatacctcatagataagtaaaatggagggtgctttctgctttattgaaagaggaggaaatattcaggtctgttttcaaataatggggcttcagatgtagaagttatctttttgtttttgttctgtgataaccacaccgaaaacaaaaacaatgaagtgctggcagtttgcataatctttgctccacagatataaacataatcagtctcttcttcctggtctttctagccctgcttttgaagtcagaagcaaaagagacaagtatgaaggaggtggaatagatatttctttggttcgtagtttgtcctgtgtgatggaatggggcctactgacattaccctggtagctgataggtcccaactgcctacatggtactaaatcctgcccagaatatggatttaagccaaaataacattaacaacctggctgcatgtagtagcaattgctgtgttaatgctgattctgatatgcctatagttatttatttttaaacttccttgtaaagaagcagtcattaatcatttccttccagattgttctccagatct

SEQ ID NO: 86860 - DNA, 1022 bp, Homo sapiens
gcgctttggaaaatatctagatattcgtttgatcacaaactaaaggcttggaggggcacggaggagccgattggggttttgttttttctaaaaaaaaaaaaaaaaaaaaagtcctggggggaggggaggggcgcgaaggcacccagaaaggcctgaatctgacttcgtggcagcctcagaatgacccttcctccttttgtgcttagctaatgtttacatctcataattcatgcgccaccgagagttgcgcggcggcggcggaggcaaggttctcgtccctttgcgaactggctacttgaaattctaatagaagaggagaattgaaaaccttgtaatcccaagaacagactcgcactgcctttttctgttcccagagctcaaaactagaacaaaacgaaataaaaccaaagcactcaaaccacaccccaaacgaagaaggcgcggaaagtaggagaactggaaaatttctgggccaagaagatctgtctgtcttctgtatataccctgtagatccgaatttgtgtaaggaattttgtggtcacaaattcgtatctaggggaatatgtagttgacataaacactccgctcttatttttccagaagaaaaaaatatatatatatgtatatgtagtatttttctgaatgaggacagtctggtgactggccacacgaagactccttcctctttattcctctatcttttcctccttcaactggttagagatggagaaatcatctacctgaactctccccacgcctgcccctgggagccttggtcccttttcacatctctttaagaggttaatgttattgttgttgaagttttaaatttatcttctcgtcccaaacgcacccattttctattctgggctcagggaggctttattggaaattgcgaaaaaaaatgacttgtcttcagtgtgcgaagaaggcaaaggaaatttgtttaacaaacggatgctgaggccgcctttccgtttcagttcagaacaagatgacctggaaatactcgattaccaagg

SEQ ID NO: 86861 - DNA, 1039 bp, Homo sapiens
tagtatctcgtaatagcttctgtgtgtgagctaccgtggatctccttcccttctcttgggggccggggggaaagaaaaggatttaagcaaaggctccctcgccctgtgagggcgagcggcaaaggcccggctgagccccccatgcccctcccctccccgtgtaaaaagcctccttgtgcaattgtcttttttttcctttgaacgtgcttctttgtaatgaccaaggtaccgatttctgctaagttctcccaacaacatgaaactgcctattcacgccgtaattctttctgtctcccttctctctctctctctcgctcgctcgctctcgctctcgctctctctcgctgcgtcctcatttcccctcccaatcctctctcccctctgcaaccccccagctcgctggctttctctctggcttctctcttttcctcctccacccaccccctttggtttgacaattttgtcttaagtgtttctcaaaagaggttactttagttagcatgcgcgctgtgggcaattgttacaagtgttcttaggtttactgtgaagagaatgtattctgtatccgtgaattgctttatgggggggagggagggctaattatatattttgttgttcctctatactttgttctgttgtctgcgcctgaaaagggcggaagagttacaataaagtttacaagcgagaacccgagactggcccggccagcgctcctcatttgctcccgggtgccttgcagagccggtggggagcctgtcaccgggctcctgcgcctgctgaggctaggctgcagagaggagggggcgggggctggaggcaggtggtgcgagtccctcggcccaggggcgctgggggtgagggaggcggctgagcctgattggaggagagaaaaacgagggaggggagccaagagaaaccccctcctctcgcgttccgaggctgcccggccagggaggccagggcgcccaggccacgctggagacctgcggctgggctggtggctgtgtcccccgccacctccctctttgttttgctgtgt

SEQ ID NO: 86862 - DNA, 1044 bp, Homo sapiens
ccaggcaatcacattaaggaaatagcgctgcaaattggtaagacacggtacttagtgtaggatgaaccaaattttttatataaaaaaatccagtgtttttcacttggggagaaggaagctagtagctggtggctgttatttttaattggcttagctttatttggcaacttttttgagttccagagtagggggagagaaggtaagaagagaagcctgtatatatttttgtttcctctcttccactcggttaccctcttctcccctccagcccccacataggatcaattaaggctaggtgtgctgtgaagggcttccttttacctccacatcacccctggctccccaccttgggactggagcaattttattccctaatttccctgcacttgcgttaaccaaactgtgagctgagcaggagctgaaaaggagagagactattgcaaccataagttatctgtgagcccccagtgctcccctgtccataagctggagttgataaatggttgcaattgcattgcgtgtgaattggagtgtgctggctgtttgtggctctaagtgcagacccatattcgtggtgtgtggtggtggcagggggggagatttctacgcagacacacatgcctgctgccatgtggtctagagacacaagcttgtttgtgatcaaggcaggggatattgggactggactgaagggctgagaggtctcttggggtgaagtgacaccccaaatgcagtgactgaacagacatctcacttccccacccaactcctcctctcacctcctagagccaggacccttcaggtcagccacccacccctagtcagcctgggagtgctgctggtgggacttcaaccatgctgaactctgacctgagtcctaagcagtttggacccaagtagagaaaaattgagagggaacttgatgtaggcagagctttggaagtgctgaggaagcctgggcccacgtttggctccatcctttccacacagcctctcacctggaggtgtctatagcaatggctggcccatctgtgacacccttcc

SEQ ID NO: 86863 - DNA, 1048 bp, Homo sapiens
gatctcagaaaagaggcctaagtccccttctcacccagcactcaggagccaccagggaataaagggcaactcctcagacagacagcaacccacaaacccaaatcttgtctgctgggagaactcacccttgtagagcacaagccatcagcccaagtgttcttcttcctctaacttcttccctaaactgagtggtcctcttgactcctctcttgttgcagagaggcagctgcaaagtcagggcaggagagggaaggggaaccaggaagacggcagtcagagcgcagtgcctgctttgcttgggtcttaaggacagcccagcgctgtgacttttcaataaataaaaaaaccccagtccgtagtaaacatgtccttttaggccctaatttatatactacagaaatcatatactcagcccaccatgcttcataacaccattatttatggcgggggagggaatcttttttcctgaagagtgtatttatgacaggtaaagccaacagcagacttcatagggctggcaaattgagaacaggtgctttgccttaactgtgattcattcgctcagtgcccagctttttcgctggtgagtccggggagctccctcgactttcccaagcgtccaacctctgcttggaagaatttgcatcggatttttgtttccccacttgggtcctatggaaaaggcagaccttcatgctgtttggttacggatctgccgggctgtcaccctcggagagcaggggtgggaaaggagggggccagatgggcgccggcattgatctttaaaaaatcattttgaaatcgccataatgtgaagaaatatggcgcttcaccctcgtatttcacgtgtaatgacacgagatggcttcatttggaaagacaagcgggtgggagtgtgtgcctgtgtgggaggtgatccgcagccttctacaaggcagaggggtaggtggccaaaaagatacggactcaagttagagtggcccctcttttgctaaaaggaccggactgagggcagcctgccttattaggactcagagtcagagagttg

SEQ ID NO: 86864 - DNA, 1043 bp, Homo sapiens
atctctgtccacctctgcttcataattctgtgagacacatgtgcttataagtaactgtgcctccacccccgcgctcatcgctgtcatgaaataggcatcacacaatgcacaccgtccctgcggtcttgggtaagaaacacagtaaaggattttatggtcaaacaaagaagtcacaaaatttcataacctcttctgggccactttgaagcatttattttaccttccagagaaacattttggaaagaagttgtcgtagaatcaacgtagtgttaagtcatatgcacttgtttgaggatacgctgtatattttgcttgaatatcaagtcaagggacagattttcaagtgcgacatctgaattagctaatattttatagccataattcaagtacacaaatacccaagcttttgccttttccataggtgtgtgatggttataaaaatgtacacacaaccttttgggtaactgatcttcttacacgagcagaatcagaaacctccatcactcacagaggttatgcatgcatccacatatgcacgattagatcctgcatacacgaacgcccaagcacagcaagtttcatagttgggcagatttatttattacatattctatatacagtatagagcagagtgcatttgcacactgggttccccatacagaaatattgatttgaaatatacatataggacacacacatctatttacattaaacacgcgtaaatttcagctaagcttattaattaaaaacaaactatttttccccattctcacttattgtttttctttcttctcccatttccttcccttcctctagattttctctctcttcttactgacaaggacccttccaaaagtcacccccacagcataggcactcaccggctggtcggcctctgctcttcaaacctcggcctcactgttggctgctctgggccccagtgtggccaggagctgcgcttttttccctgcttgcccttctccaagctaccagctactggccccagctgtgttcaggcgaggctccagtgcagggaatggcaa

SEQ ID NO: 86865 - DNA, 1050 bp, Homo sapiens
aaggccccctatgggaccagacctacagaagtaggtccgaaaagtccttcctttcctaatccctcagttgactttttcctccccacccaccccagtggccaaaggcttcccactggccttgggctgggctgggggtacacataggtcctgagtgccacctccttggagaggggcctgacttgcaagctaatggggagcccaggttgttggacaattcaaccccgactgatgcagtgacaagggatgaaaccaggggttgggcagggcaagactctgataccctctctgacctcggtcctcttaaggctgttggccctgtgcccaggaaaggaataactagaagtgctggtggaagaagggggactttccaaagcataagctaacttttgttcccaaaccttccccctgctgcttgaggcagaggaaatgtgcaaaggggcccgggaaagaggcccgaccggatggggcttcggcgccaggctgacttggagggccagggggtctctgaacaaggggcttctgctagagcagaggggcattagggagacccacccctagcctaggggaaatggagccttcaacccactgtcctgataagcaaaggctaacaactctgtcccttgacagtttctcatcctctggtctgggtggagatggcctggcgcgtccctgcggccttatctcacttctccctgggcctctcacaaacctgcccagtcactcagagcctgactgtcttccatccctggtgtcccttggccaccccctcccaggaaaagtgctgtaaaaagaaaaaaggagaatgttagagagaaaggaggaaataaagtctttggaaagcagagttttacaacagccacaggttttatggaagcaatttcgtaataaccttctacctgctcgcctcctttccgcctgcctgccgcccaccccgtttggcctcctggatgccccctcccaaggagtcagccacccccatcgccttggatatccttgatggctgagagttggtaagaagattcctgaggtgggcttgggccactgacctct

SEQ ID NO: 86866 - DNA, 1015 bp, Homo sapiens
tcacccgccgggagaccacagagctgcttccccagccgcccgccgccagaaattggaaaaaaaaaaaaaaaaaaaaaaaaaatccagctggggtctaggaactcggcttctggcacctctgaattctccgagactgtctcctccctccccgcctgtaatgaaccctgtgaagggagacaggccaggaagtcccagaaatatttattcttgtgactctcacaaaatggaaaagggtctcaatttttgtttctttaaggaacttgtgttctgcgtctgtgtctacactgcctcctctcaccaaccaaattgtctagcccccctccagttacgctagaactctgctttatcttcaaggaagaaagggagtggggagaagttacctctaaaccctccagcatggccatcaattttctgaataatttggaggtcaacatgcttttggaaaagtgtttggaaaacgtttgggggtgaaaagaaatgttgcctaactggcctttactcacggagtgaccatcatctcagctagttagtgtatgagcggcaccagcaccccggccatgggtgtctgtgctgagcctctgaaagttgacttatcctttggggagccctcggaaagacacagctggtatctatgggaatggctttggggtgtcctttggcaccatacagataattttgtttttttaattggaatccatggcctgggttcttgggatgggggtagggggaagccacaaagcccctggaaatgtatgcaaaacatatgggtgtgcaggtgcatcatcctaaggctatggcctcttcagtttttccaaagagtctaagactataaaaggtttccatctccttttctcagccagggagccacagagacccaggccagcagtaggctgggagccagcacaccggcccccaccaggtgcccggtaggggatgggtaataacactcttgaatggtctggaaactgctggcccctcagtcctgccgtcctcccagagggaaatcctaatagaa

SEQ ID NO: 86867 - DNA, 1034 bp, Homo sapiens
cccgtccctcctcttgttgccttcctcctccgcaggtgattctctggctcctctgttttaggaataactttgcagaaatgtctctcagagggctctgcagtataaaatggcatctctgccacaggggaaggggaagagggaccctggtttctcctatcctgctcttcctaggccctggacgtttctgaggggctcattccagaacaagacctctctttccttgctccacaagaatttaacaaagaggccctatttgggccaagaaggagagtggcctgactggccctaacccccctcgtttgggggctgtggagcagtcctgctgctggcagcttctcttagttgttgagtctctttcacaaagcattcacacttcacaacttccctttccagtaggtcttcatctgggcacctcggggcctaaggcacttggccagggtcatgcagctagggacgtcataagtgaggagttggcatttcttggaagagggggctggatttgccctggctttgaatcctgtactggctgtccctatatccgcctctagttttcttatgggcctccccaaatttgaaacccaagaaacgccaaacttccaacatagaaaacaccaaaaagctgcctttctggagatgaattttgcttacaagaaagacacgtttggagggggtgaatggtcgtggtaatttggggtaaagaacattccacttggaatagagggctcctcctccagccctgcttcaccacttttaatagctgctccgatcttgggctaatcacttaattccttcggacctcagtgtcttcttttgcaagctgggggaggggtttaaagatgctggcgctgccctctagccggctgctggggacatcaaaggagattcgggctgtggaaggctccctagcgtcggagatggagttaggaggtaagggccagggggtgggagcggatggggccttgattagctgtggatttctgtcccagcgcactcatttaaccgtgtttctcttggttggcagagggcgccaaagg

SEQ ID NO: 86868 - DNA, 1051 bp, Homo sapiens
aacgtcaagggcctgtagattcacaacctcctctgtcggggatgggggaagatgaggtgggatagggaggctatgtccagccaccagcgcagggagtggctctaaacgctgacccaacgcctcgccccaagcgggatcttggcgcgcagatagaccgagcccgtggtggggcgccatgccgggctccctcgcccttaccgagtgagcatcttcttcccaatttgctgctcagagagggagtgggtcctagtctctggatctcagcgctcacgactacctcgctgctcctaacgaacggttcatctgctctctcctggccgcctgcgccagcgccgctcacccacttttccagccctggatctcctctccccggatgcgtccttccttcccacaattaacaaatgatctagcgaaaccccgccaggtccccggcagagaagcacctccatccgccctaaccaaccaattaatcagatcattaaggagcctgaggagttgtaattgggtggtttgggacgagggggcgctgaggaggtcattaacctccccgtaaagatggggaacggagacgcgcctggccgcctctgccgcccctgccgcccctgccgcccctgtgggctcttcttagcacgcgggttttggccactccacctgcctgctgcgctccagttcccgcctccagtccagctatttcacttctctctttgtcattctccgtcttttctctggcaaccgtccagggcccctttctttgtgcctacttctgtctacctgtccagctgcctcttgcaccctttctgtggcccagcggccaagaaaactcaaaggtcatggctgttggcccccgctgatgatctctgggctcccgggtctcagacaattcctcagggctggctagaaatggtgggagctggagatttggacactatacccattccccaagagaagggcatttgcaaaggggaagtgtttcctgaaacgttcaattctctttcggtatgagatagctttggacaaggtgacaaatggcggaaggtccaggccccagtgg

SEQ ID NO: 86869 - DNA, 1098 bp, Homo sapiens
gccagaaaactgaaagaccaaatgctttactttttttttcctttgtctgatctcagtgcttatcaggtcaaccttcacctttaaaaacaccctggtggcagtatttctttgccatcactgtctgtaaagcaaagggcaagcatctcagggcttttagttgggccgggaattcaaatgtctcctttctcaagaagatgccaaagtggccaccctcagcccactttccgtccttacctcctctgccctttccccagctgtagttataggaataatggcctttaacttgcagagatcattaaggccaaagccctcactccttcccatctctcctcttggggccgtctgagtcgcttcctccacgaccctcctcttttgaagcactccctagtactgttaaaggccgaatttgggctggagcgaagatgggggctcagtccaaaataacctagatattaagtaatagtaatgatttttttaaaaggtaactatgaactctcaagcctcgaccacccagtaaagttcctccttaaattgttgccggccctgggtgcagacacgcaaggactggccagaacgcgagaaacttcttcaaggagagagaagtcagggcccaaattcctcatgctttaaagcagtataagaggagagagtccaaatttttactcgttaaacctcctcttacctcttcctcaggtctgttcactccttggtccagggaccggagctcctgggcttcgaggtgaaccagagggaacgtggctccccgcagcaacctttttgcttcagggctcctcctgggggctgagtggtcccctttgctttgctattcccgctgcggctcctggggggacagctccgtgggaccaggtctctcagggggtggagggtcgccgaagtcgtgaccaggagttggagaccgctgcgtccctccgctgcggacctgcctgggactgcgtggaatggaccaagtcctccgtctaggattccctagtgctcgacggcgcgcactccgcagtgctccgctggagatctgcacctgtgtcccggggctgggcgcagagtgaagatctccgtgcacgctgctgaccggctcggcga

SEQ ID NO: 86870 - DNA, 1051 bp, Homo sapiens
cagtgggatcactggatcccaggaagttgaggctacaatgagccaagatcacaccactgcactgcagcctgggtgacacagtgagaccctgtctcaaaaaaaaaaaaaaaaaaaaaaaaagacccaaatcaagaataagaccagccaggcacggtggctcacacctgtaatcccagcactttgggaggccgaggcaggttgattacctcaggaggtcaggagttccagagtagtctggccaacttggggaaaccctatctctacaaaaatacaaaaattagccaggcatgatggcaggtgcctttagtcccagctagtcaggaggccgaggcgggagaattgcttgaacccacaaggcggaggttgcagtgagctgagatcgtgccgttgcactccagcctgggagacagagcaagactccttctcaaaaaaaaaaaaaaaagaactacaagaccgctctttttgacagcagcttccccaaccagaaccagcccaggaactgcttgcaggactacctggacttccacctctgtgagaaggcagtgattgctaaaggggacaatgtctttgtatgtgaatggtaccagcctgtgtacaagtccctcattcccatatcctggatctcagcctgggacgaccactgggcagaagccacatttccctgggaagatttgaactggctgcaccccacctttcctctgtcctccgtccttctcccagggtggtaaaaggggacctgggtacatggcgatccccaccctggaaccctcaatcatgacttgactaataataaaacttattggaaagtgaaagaaagaaagaaaagaaagaaagaggccaggtgtggtggctcacacctgtaatcccagcactttgggaggccaaggtgggaggatcacttgaggccaggagttcaagaccagcctggccaacatggggaaaccctgtctctactaaaaatagcaaaaattagctgggtgtggtgacacatcaccactactcgggaggctgaggcaagagaatcgcttgaaactgcggaggttgcagtggg

SEQ ID NO: 86871 - DNA, 1030 bp, Homo sapiens
cttgacttaggcatttaaatgtttccaagacaaattggaacaagaactactcaaatggaggagccaaggacagaaattgcaggtggctagaagttgtttccctgttccaaggcagcaataattcttaggccttcccaatgatattttggtcacagtgcattaagaaactccaggatgtgaatgaggactccataaaattcctgcttcctgtaccaccgcaggctgcagtggctctgagatgcttacagcaatggggtgtgtattaatgagactctaaaacatgccctaggatgttctgatgagtttttggtatagacttttcaaccctgctttgattccttaatatataaaaatggaatttatttttagttctcttcttactgagctcagacagggtcaaaatatggcaataaatgtaattttgcttctcatttgctgagtgttgtccccttgaagacacaatagcttcctttctattctctggtgtgcttttattttctagataagatttgagcaatcttttacccccttcacatttgtgagaatattttccacttagccagctttctgctctgaggcgtgttttgctgcatccttatgtcttatgatttattgtattcaatacctagaagaggcctttacgactaccagattgttgttaatatctttattaccaaaaagccatcattaagcatgcatgaagaaaaaaaattatatagacctggaatctcttatctggtgcctcataatctaagaaccctgttctccctctgcccccaacacagacattatgaaaaataatgggtttttttttaatgcagtagtatatccaggttggtatatgacaaggcttaattggacacaatagaggacacaccaatagagagggcaggtcagaagtgatttctgatttagaagtccaaagaatgccattgtaagaggatcagggttcatattcccgcaactttccccttaaatcagtctcagctctatctctgacttgtagatagaatttttggagcttttttcc

SEQ ID NO: 86872 - DNA, 1046 bp, Homo sapiens
ggcctatattttcaatatatacaaataaaaagtgattttaagaagatgtagcccaattaggattttccccagtcccctttcaggtactaaataagaacttcttgtcattgcaggtggggtggaagacaacccgtgagtattacaccttcatgtgggttactttgcccattgacctaaacaacaaatcagctaaacagcaggaagtccaattcaaaggtgagaaaaatactggatcaaaggtgttgaagacagtagccaagactaattaattcccttcagcttgagctttctggggcagataaaaagatttccagaattttacttttctgaatagatcttattttggatgaaaaattatgttgtgttttcagcttactacctgcccaaggatgatgagtattaccagttctgctatgtggatgaggatggtgtggtccggggagcaagtattcctttccaattccgtccagaaaatgaggaagacatcctggttgttaccactcaggtttgtaaaacttctcacctcaatcccttactgccattacgggtagcaatataggataggatggaatttgagttaataaggctttattgaatatctaacgggtatcattggaaaaaatgtatgtagtactcacacagactcactcaggaatgacttcggaatgttaacaagactcataacaataagtggtttcttcttttctaaaacttctttaactcagctggcattcagttattcttttaactttccaattgcttaatttttgtcatctacacatcttatcacaatggtaaatgtaaaagctcctttgaggagagaagcaccaaatattcttatctctttcagttctggcctacagcctgtctgtcatacgtgagtattagattcattttcttacttcatcatttaacaggacacctacttttcatccagcactatggtaggcactgggaacacaatgaagaatcagttaaaacactgtccttggcctcaaggagctaagtccattgggagagacaaacaatactaagcgtctgcaaga

SEQ ID NO: 86873 - DNA, 1049 bp, Homo sapiens
tgcctgtaatcccagctacttgggaggctgaggcacgagaatcacttgaacccgggaagtggaggttacagtgaaccgagattgcaccactgcgctccagcctgggatacagagcaagactcgtctaaaaaaaaaaaagaagaagaagaagaacagggacagatttctgttcattctcctcagtgcaaatctctggccccagctttcctcatcattattcaaacccaacatatattcggcatttactataagcaagtgctgttattaagcccatttatagatgagggagccaaggcttagcaaggataaagacttgaaggccgcacagctgcagaaggtcaggctggaccagggtttatgttgttaacactaaattgtttggagaaacagcaaacccagctgtgggggaatgggaggggtgggtgtggagcctgaggctaacttcctcccacccagccattctgtcctctctgcaataaaattcatagtccaggaaattccctgcaagtgacaatgactcttaaactttcctgaagataagaattgctgggccagagcctccttcactgcttgccatcccttcagctgatggtcagtaactctttctttgccagtagcctgcctggccttccagtttaccagagaggccctggtgatgaaccaggcccacctcccatcttccggaacccatccctgccacctcacccaaccccaccctccttccctctttcactctgggagtttttgcagttcatctgctcagccaaagagaagtaactgctaatgttaagccgaaatttgggtcaggccaggaggcacctttaaaataaaaaatttactcgggtacaggaaacagctataaatgatcttggaaatgcaggcactccatctggttacacactccaggcaatgcccaacagagcatctgaaggggccttgcttatcaactgtcatggattcaggaagccaaacagacctgcctgttaccaaggtgtctcctgcaggcccctgcctccagaaatgaccacccctgagatgaaaacttctct

SEQ ID NO: 86874 - DNA, 1047 bp, Homo sapiens
catagtgaacaacagtattatttttgttgtgttccacatctgccgtgtataatctccttttatttttttctgagttaactttgttttcttttttctttgttttttttttttgtttgtttgtttttctgctgactacctacttatctgtcataactttgtttttattgtggtaagaacacaatgtgagatctagcttctttttttttttttcattttaaacaagaagtttatttaaacaacaagacgcttgacttgaagggaaaactatgtaggattcttttttgttttagagtaatttatccttacttaaagacagattaccctacatgtaacagctacgtacaaaaaagttataaaattgtccttggttttacaatgataaatgaaaaacattaaaattctccaattgaacaaggtatgcaaggatttttatgttgttgttgttgttttgttgttgttgttaaaacagtgagagcaaaataacttactggaatataaagataggagctgaatgagcatgccactaatggagaaagggggtattttcacagaatcagtatttttccccatcccgtctccccttgatgtcagtcaaaacataccattggctgtttagttaaaaaaaaaaaatgcaatatgcttgtgcacatataccagttactttacgtacaataaaggaatggggaagggggaaatgaaagaacagagaaaactatacggtagtagtcaggatgtggtggaaccaaattgcagttttctaattgagaatgtaatcttggtctttaaagaacagagttctggagtaaagaagcaggttcccttttcagtagacacctcccgtctgctgttggaacacatcaattgtatcttcatcctccatttccaactgtgcaggtgtgtctgtttcattgactggttgcccgtcgaatgggaatctgatctacctcattgacaatccctgttgttcacaataggctttcattagtttactgagtggtgtatgcctcttaatcttaaactgcaccatagaaccatcctgccccgcca

SEQ ID NO: 86875 - DNA, 1025 bp, Homo sapiens
tgcccagtatccgcctccagtcttcccgagagaccattccctttcgcaacatttccttcctggggcttgggcacatttccttgacttccgatctccatgactttgctttgaagacccactgctctgtccctctgacctctaatgccctcctcagctggggcacggtgcaaggaagagcgtggtctagggaggacggacgggggtgaaggggacgaccaaaggtcgtcattataagcaaacaaccagggtctcagtgggattattattactattttttccccctctgcagactgaaaaaatgcagaccgccggggcattattcatttctccagctctggtaaggtgccgcgccgcagtgctctgtagtaccaggtgtatggtgtggacgccatcagtgtttaatgaatgaacccaggggagcttggcgtcctgatgatgtaggctctttgaggtggctgtaggatgtgatgaaggtaacccctgtttatctgggcctgtgaaccaagctatcttggctttggaatgtggtcagagagtctggatttgatttttatccccagtctgtcctggccatagagacagcccactaaaacagtggttttcaacagtggctgcacgttagaatcatccagggaactttttaaaatcctgatgcctaggctgcaccttagaccatttgcatcagactttgggaatgggggtggaacccaggcatctgtatcttttaagacttctccagatgattccaccgtgcagccaagtttgagaaccactgcactaaaaattatttcaaaaaagccatgttacagatggctctccttggatggctattccagtcggtttccggggctgactggcccactccatttagggtgtgtagctgtgagtgtattttagcagaataaaatttcccccatctgattacttggtgatctgggtataaacctttcctgtacctgctttggtattagtgtgggttcttgttccattctgagaagctgattaaagctgtgcccaaagaagtg

SEQ ID NO: 86876 - DNA, 1051 bp, Homo sapiens
gaaaccaagaaaatatctaattggtgttaagaacaccttctaactgaaaggcaactagcaaagagggttaaaacatacagaaaatttggattccatttacgtgcaatttaaagacagtcatgtaggtatttaagcatcttcctagggaccttaggggaagcaaagaaatctaattctaatgtccttgccctcaaggagtttggggcaccaacagagtagaaataagtacaccatgccctacctcattgtatatgtgggtacatgagctatgtgctatagaagttcccagaggaaaaaggaggctggtgtgagttataataatgtgggctaacatttgagcacctgtgtgtcatgcacaatgctaagcactttccacgattaacttccaacatccctatagaataagtcagtttacaggtaagtaagcaaatgaagaggctcagagaggtgaggcattctgcctaaattctactaaaccacagctggttagtaaagctgggattcaaactccagaacctgtgttcttagctttgtgctgactcatctgaggtttgcacaagtgtggtgacttgcccaaggtcatagagcatgccaatgattcgaatcccagtctgacatttatacaatcatggcgtttctaccccaggatttcttgaccttggcatatctggggccaggtaattcattgttgtggaggggactccctcgtgtagtgtatgtttagcggcatccctaacctctacccgttcaatgtcagtagcaactgacatccccacccaagttgtgacgacaaattgccaaatgtcagaatgttgacaaatgccccctggctggggggcaaaatcatgcccagttgagagctactggtctaccacaatctgctgcatctcctcagccttttcaccttaagaaactccctcaagtttgcccacaacaagccagtgacaaccagaagcaaagcccaggaatctcacggctgaataggaaatggaactgaggttaaactggtgactgatgtttcaccaagagagcaatggattaactggtaatg

SEQ ID NO: 86877 - DNA, 1022 bp, Homo sapiens
attcagctcacctctccgattacacagatgaagaaatcaagaccccaggagagtaagtggcttgtccaaggtcacatagtgaggtggagcagcactttgaagaggtgtctgttattagtgtaccccataggtactgattggcttggaaaatcccagttcatgtctgttgtcgcagcttgactatttatagggcattctttcactctcaaaaatgctcctgtttggataataaattatatggtcaccctatccattgtactacccagctcttcccccatcccgttactcttgacattaactatgctatggtactataaatcagatgtagggaaggttgggaatagggcaagcttgactgaagtgtttgtggttaaaggactttgctcaggatcctgtccttactggttgcgtttaagtatcccttccaccccaaagactatacctctcttgtcctcctctcagagagaaagcttaatacataatgtcacatttctctggcatagatacctaggtttctctgtcactgaatgctctacccacagaagtgcagttgcacttaaactgatgttagaaagaaatcatatttcctaaacctaatgctgtttaagtgaaacacatagttttcttacagtaaatttcttacagtaaaaattcagattttgtattgttggtgtatctttttttgttgttttgaatagatttcccttcatattttttttttatgtagttagaaatgtttttcctaggacatctcgtcctcagtcaagtaccagtgttaatagcctagtacctggggtcccagagttgatgccatgttgagaccagttgagtttactattccaaatgactgagagccagaatatgacgtagggtcttgccaggagggcaaggtgggaactatagacttaggcattggattgccacgtccctttccttttgctgttcaaatgcttagcagacctaaatgcctaggagcctttgtggaagaagaaatataactgagtcagttcaggttttcctcc

SEQ ID NO: 86878 - DNA, 1196 bp, Homo sapiens
ggaagcaagcagataccctaggcatccatcacaccccctaaccctgctgtgttactggcactgggctgtggcctccaatccctttcttcgtctcctttcatcatactttcccttcgtgccacataaatgtagggtggggttgcatcatatgcatgtttggcctgggcaaatccaaacatatattcagtcaaaatctgtgtcgatttctcaaaattaaaaacgctagggttatattttatagataagcatattatatttttccacagtggtgttttatccattatatgtaacactgatcagggaggtctgcacaaaaaaaaaaaatgctttaagagagttttaggggatactcaagagtgattttgactagattcagttttcgccttgggctctaactttagaagtaacccctgagtaagatgtcattccactgtaatgagatttcttaaaattccaaacctacgtattagtatgagtgaatacaggatgttccttctgcatggtgaggatatagaacatgtgtaccagattatggactctgcttctggtgtgggtagtaggtggagggtagccaggagggcttggggtgggtcatcacctcacaattttgagatggggttttattttgcagattcatgcattgatcacaggcccatttgacactccttatgaagggggtttcttcctgttcgtgtttcggtgtccgcccgactatcccatccacccacctcgggtcaaactgatgacaacgggcaataacacagtgaggtttaaccccaacttctaccgcaatgggaaagtctgcttgagtattctagggtaagaggagacttttaagtagccaagtcggttgttagcagataattactctaggtcagcctttatcaaccggagtccctcatctgaactacagaacacagaaaatgattgagtgactcttctcaaatctcctcaggatggtatgtgactagtatcattctagatgcagaggggagaagttaatttattacagtggtaacctttgagaagtggttctcttaagagtgtggccctgagcatctgggaacttgtagccgagcagtttctggggccctatcttagacctacaaaagaaactctggggttggggccaaaaatctggtttttttggttgttgttttttgtttgttttgagacggagtcttgctctgtcgcca

SEQ ID NO: 86879 - DNA, 1057 bp, Homo sapiens
gtgctcatctctatccagtccctgatgactgagaacccctatcacaatgagcccggctttgaacaggtaaggccagatgggcctggctctggggtgtagactattgtttttgtttgtttggttggttggtttttttgtttttttttttttttgagacagagtcttcctctgtcacctaggctgtagtgcagtggtgcaatctcagcttactgcaacctccgcctcccgggttcaagccattctgtctcagcctcccaagtagctgggactacaggcgtgtaccaccatgcctggctaatttttatatttttagtagagatggggtttcaccatattggccaggctggtctccagctcctgacctggtgatccgcctgcctcggcctcccagagtgctgggattacaggcgtgagccaccgcgcccagccagaatagtgttttaagagatctgcttgggaggttttttttgttttgttttgttttgttttgttttggacctagcacagccccatgtactacatttgttggtatagggaaaaaaagggaattgacacgtgttttttagtaatgaaattttttgccgaccactgtggctcacacctgtaatcccagcactttgggaggctgaggcaggcaggtggatcacctgaggtcaggagtttgagaccagcctggccaacctggtaaaaccccatctctactaaaaattaactggtcagaagtttgagaccagcctggccaacatggtgaaaacctgtctctactaaaaataaaagaaattagctgggtgtgatcacttgaaccctggaggcagaggttgcagtgagctgagatcacgccattacactccagcctgggtaaggagcgaaactcggtccccccacccccaaaaaaataataatggccaggcgcggtggctcacacctgtaatcccagcactttgggaggccgaggcgggcagatcacaaggtcagaagtttgagatcatcctggctaacacagtgaaacccagtctgtactaaaaatacaaaaaattagctgggtgtggtggcaggc

SEQ ID NO: 86880 - DNA, 1026 bp, Homo sapiens
cccaagctcaagcagtcctcccacctcagcctcccaagctgggacttacaggtgtgcaccaccacagctagtttttgttttgttttgttttttgagacagagtcttgctctgttgctcaggctagagcaatctcagctcattgcaacttcagcctcccaagtagttgggattacaggcatacgccatcatgcccagctaattttttgtgtttttagtagagacggggtttcaccatgttggccaggctagtcttgaactcctcacctcaagtgatctacctccctcggcctcccaaagtgctgggattacaggccctgttttgttttgtttggttgtagagatagggtcccactctattgcccaggcaactcctgggttcaggtgatcctcctcccttagcctccaaactgggaggctgagattattacaggtgtgagccactgcacccagcccatagtgttttgaagctaagatgcgttcagccctcccagaatcttagggattatatgaatcctctatttaaattctgttcccagccctgagggttgatcacagaaacagtagcttagagaaacaacatacctgtagtgtcacatgttgaaagattcctattcaaagatgataaccattgttcattctttgcctctactgggaaaagtgtgcttttgcttcccataagaactcaaaatttaggcttgttttaaggaaggaggctatcattgaccaaattgtagatagacagccaggtgcggtggcttatgcctataatcccagcactttgggaggcagaggtggacagatctcttgaggccaggagtccaagaccagcctggccaacatggtgaaaccccatctctactaaaaatacaaaaattagccaggcatgatggctcatgcctgtaatctcagctacttgggaagctgagggatgagaaatgcttgaacctgggaggcagaggttgcagtaaactgagattgcactactgcactccagcctgggcaacagaacaagattctgtctcaaa

SEQ ID NO: 86881 - DNA, 1730 bp, Homo sapiens
ggttgtctatttgtctgtcttcagtcttgaagcagggcttcccaatgcccttttcctccctgccttccttcccccattatttcccacaggccagcataattttgtttttcctaatttatagtcactgttctagacagaccaaagagaaggaacagtggtggagtctaggctgctgatcagtaagctttacctagcacctgagcacctttctcccctcccctctttcctcacccttttctagatgtaagacagaaagtaaatgtgactgggacttaaccaaggtcttggtaaagcctgcatggcaccgtaagaagctgaaaatactgtttgttcccgcaatcactgatttgaaaagttcccaacacaggcagctgctgtgtatatgggattagagccactacatagaatagtctcttacagattttcataaatactagtcacaataagggtatttttcttgggggtggagtaagggggagactgatgctagtccttgttgtattttgttgggctgtccttgtgtattttcaccccagcctgtagtcctcctcacttcaaccccagggatttttggggagcaagggtagccaatggcagagggggttggggctgggactctggaggctcctccccttctttctcttccttccgcctcccccgtgcccccagctgctcttgtcactgtctctgatgggtatttgcctggctttgttgcttctctatctgtatttagctgcagtgatcctttagctggttggctcagaaaaaaaaaaatgtgctttaggtgccctgtaatcctgggcatcaagggaatccatccttcccctttttgatatgttctccccgtacttccagatttattgttatggctcccagtgggtattggcgattcttgtgatgcagggcctcagtcagtgtccagccatgcataagggagaggatagtgtgtacctgccctgccctctgctatgaaggtctctgccttgtggatcatgggactccccttggaggatctgtgcaaaggggggctgggcacaaaggagaatgtcctatttgggagggcaggaagcaaaggaactggacagggattggtgggcttggggaacggaagtttatcttggatacccttgaagaggctgggtctcttcacatgaagatcgaaaagggaccctgcttccaatttccctcttccattcctcgagctactccagggcttagaagaatgctcttggtctgtgggtccagtgttgtctgtcatccatttaagtgttcccactttcaagtgacaatcctctccttggccctgccatagggcagagcatgtctggcatagcagcctgacttttatgccctaatcttgagttgaggaaatatatgcacaggagtcaaagagatgtctttatatctgactgtatataaatgaagtttttttgttttttttgttttcctttttggtgcaataaagtttgttttggcagaaggaggaagtgcctgtgggtgtgggagggcttgtgtaaaggacgaatgggatcatcttgtcaaccacacctcacctaggcctggaactgttagggagaaggaaagtgccatgaattgtctggaaaccgaagacttgcataacatggtggaagggcagggctgggtggggagagcaggacaagttttctcattggaaatggggtccatgctctggcagtcagtgacatcttagtttgagtggtttccaaaga

SEQ ID NO: 86882 - DNA, 1061 bp, Homo sapiens
ctagagcatgacaagggaagattctggacaattaattgatgggaagaaatgatgataatcataaactgctaataacctccattatttaaatattcagcccttgccctgcctcattctactcatcctccaatacagaaaagcccctcccttatttagttctgttttacgtcataaaggaaactgggccgggtgcggtggctcacccctgtaatcccagcacttagagaggctaaggtgggtggatcacctgaggtcgggagttcgagaccaaactcaggcctggccaacatggagaaaccccatctctactaaaaatacaaaattagctgggcgtggtggcacacacctgtaatcccagctactcgggaggctgaggcaggagaatcacttgaacccgggaggctgacattgtagtgagctgagatcacgccattgcactctggcctaggcaacgagtgaaactccatctcaaaaataataaaactgaacacatctaaatacctgatggggatttgggggaagatggcatatgcttaaggcatgatgagggatgggggcatggcaaacaagattttttaaaatctgtttttgaagaatccataaagtagtttcaaaagacatcaaagagtctggctacccaaagaaatctagttagttgtctgcatgtctgtctacctgactagactgtaagctccttgagagcaggaattttatcatctttatatgccccacagcctggcccagtgctttgcactgtagctgctcaataaatgtctgctgaacaagcacaggcctgagtagttcatccactggatagtctcagcaaaagacctgcataatggggagcacgagctgagaactgctccagacttgcctcacagactgtcccttgcacacacacacactcgaaggtgcaccagtacctctgccagctgcagcaccacggtgtgatccatattgagctcagctggaacagactgaatgaggtaagtgccgcccacagggatgatgccgaagccagtgccaagtgcctttagtttcttgatggctctgatcaggtc

SEQ ID NO: 86883 - DNA, 1300 bp, Homo sapiens
ctggggtagggggatgggtgggggcggggcgcttccctaggggccaggttcttgcaaagggggaaggggcctgtagagcttcagggacgctgccgcaccgccccagtttaccccgggggtgagttgagttccccaccctcaggcgggagattatcgggtttggccggagggccgaggggccctgtggcgtcgggggtctttccctgcagggtgggtgggggctgtcaccacgtggcttctcctttttttttttttttttttttccgctccattttttttcaagtcgattttatttagaggcggcgccagggcggccgcggagaaacgtgacacaccagccctctcggaggggtttcggaccgaagggaagaagctgcgccgtgtcgtccgtctccctgcgcgccgcgggcacttctcctgggctctccccgaactctcccgcgacctctgcgcgccctcaggccgccttccccgccctgggctcgggacaacttctggggtggggtgcaaagaaagtttgcggctcctgccgccggcctctccgcctcttggcctaggaggctcgccgcccgcgcccgctcgttcggccttgcccgggaccgcgtcctgccccgagaccgccaccatgaacaagctttacatcggcaacctcaacgagagcgtgacccccgcggacttggagaaagtgtttgcggagcacaagatctcctacagcggccagttcttggtcaaatccggctacgccttcgtggactgcccggacgagcactgggcgatgaaggccatcgaaactttctccggtaagaacacagccacctcccggaaaagccacaacgagagccccgaacaacggagacccgcaccttccggttcctctcccgccaactcctctcttcccgggcctgcggggtttggcctccgtacccaccctcgacctacccccttcgatgccccctccctcgctctgcgcctcccacccccgcgcagaaacattcgggatttcctcatccctttctcccagcctgagataaggagctctggcttcccccatccttcctccccaccgacggggcgggagcccccactggcagtagtggggggttgaatttagggacacggggatgacccctggctgggcgttatttccacgcccagcccctccctatccgccggtggacgcccccccagctggaaaaccccggctcccgttcctcagtcttaggcctttccaggcgtggaaggggtacccggaccgcctgcgatctgtccgcttcgcgtggggaatgcagccctccagcag

SEQ ID NO: 86884 - DNA, 5022 bp, Homo sapiens
cgctccgctcccccaggtccaccccttcccaaaccagccccgacaggtgaccgctccgtggcccaaagcccgtcttcctggccaacagagaaaaataaagtttcattctgcacactgcctcccgccccgcgccccactttctgaggaacggggagccctttctttcctggctccttcccacatctgggagctgtgtaggcagcgcacccacacaaatggcctcgcacctttcccaaatcgggattccagagcgatccactcaacaagcctcagtgatttaataaagcaaaaattaaaaaatgaataataacgaatttacagactccaccattcctagagcaacctttttcccatctggatgcggaagccactgcctggattcctaggaagatctcgaatcccagtaactcctgaattatcctagtgtcttttccccttcctcttcccacccccaacccctgttcaagctctcatggtaattttttttttttaatctttagggaaagtagaattacaaggaaaacgcttagagattgaacattcggtgcccaaaaaacaaaggtaggaaagagctcttttcggggggggtgggggggccgcgggggtgtgctgtgaagctgtgttcaggggtccatagcgtctccagtggaagaaacccattactggtctttcccacccccaactccggatgttgggggcagggagggaagattggccaagatcttgtaatgggtggtttacagcttgtaaaaaaaaaataaataagttggggctggggtaggctaaaagatgttacttgcagaattaaaggggaaagaaaatcaataggggagaaaccttgtggagtttgtttgttcaactcgtggggccgttttttgtgggggaaccttaaaatctttgaagagttcagactcatggcgatttctgcaacttcgtagcaggcctcattttctgtttttcccactctttccacaccataattcttaagtggattgcccttctcccgaagcgatgtggaatgagtttcccggcccccaaagaatccccttatgcttgtactttatttatatttctacaacaggcaaagactttttattttccatggaccccccacccccaatccctcatatctcacatcatccctctccccagctggattttccaaagaatatgccttggctgtactatccttttcgagcccccctacccccactccttcagcccattgttaccaggggaccatctggggtgagagctttgtgttgaggctgtgagctggggctctttggagggtctagaactccgtggatgaatggtgtgtgtgtgtgtgtgtgtgtgtgtgtgtgtgtgtgtgttcgtgtgtgttccaataccctctatcctctctcttcagcaaaatggggtacctccatcatacttaccgagaattcatggtggatttcaaatcttgcattgaactctgaaacctttccttgaactctggctgggaagtataagggcagagtctttctactttctcaaatcagactttaaacatgttgacagtgtagagtttgctctcatgtcccaagctggaaagcagcccccagtaaatctttgatcttcctcaccccccatttcagctgaaaacttggtacatttcaggatagtctctggccttttccgggtagatgggagatgatgactgctttttctgggggaccattaagagggcctagaaagtttaatgtgagataaaaatctgttcagttgcttagcttgatatttaagtaacttggaactattgtgtctatagatcaatatggcttgttactatgtttatagagcttgcgatttaacttcacatgtttgaaataccgtgttattggaaaggcaattagagttaggagtaaagaggcaataaaatgggaaggaagaaaagaagtcttatttgttattttgaaacattttctggagatgtgtctaaggaacatacactgacaccagcaggtttattgaaaaggatatggatatttgaactgaaagctgagtgttgatgaaaaatatccagaataagtggaattctaaaatatgtggattttttcttttgctcttgaggatggtttaaattttagggaataaagtgaaaagcaagagaaatagcaaaacgtgatgaaatggaactcaaaacatttatattttaattttcatggtgccctgtatttatgaatctttttccccaagccatctgcttgcttttaagtcatttctaggccctttttccctccaaaatgcattactgagggctcttttttgagttggaatggagagggggtttgtgagaagactgggtaaaaaaaaaaaatctgtccacacccatattaaattagatcttttatgtgttctccccttcctgaaataatttttttagcccaaacattgagtcagttgtgttttctttgctttttattttggttggtggtgagaaggcacttcatttttctagaatgaatcaatttttgaagtctcaagatttaaaaaagaaagtttgttttcattaagtcagtttgctctatcattttgtgtctttgaggaagtatgttgtggtatgtgtctttagtctgtgtctgaaaagtatttcgtcagttaggtttgttactgactttccatctcatggatgtatagaacaggaactagttaattatgactaatatattctaagcaaaatgaacaactatacaaataatattttgtgtatatatactcttgtattttccttatgaactcttcttgaggcattcagttccaaatgaactatgatttcaatttctaaaataattcataaaaacccaacaactaaatgttcctggttgttttgttttgttttttaagagggggaaatcaaacaaaagatatgctgtagcaatacctcttaatgtattttgttcttagtttgaatttatttgatacatataatttgtacctttttaagaactcaagaggccgaacactatgcatttcaactgaaaacagcagttagcttgaatttttaaaatgaggtgatactaatttcttagagatcaccatctcaaacccccttagtgttggaatttggttaacaatttgtgcttttttgttgagaatttgtatatgttcactgccagatactgagacaaaagagaaaaaccaaatgcatttaaaaacagttgtggaaagggcttgtatatgttttattctgagagacttaggagtagttgaggtaaagggggtaccattttagtgtgacttgattactttgagacatgatttgctttttaagggaattaaacctttgttacacttgccactgtggtgtgcctttttctagaggaatgtgacctaaagatagcatattcactgtcaactggtgtcatcaaaataaaaggtgttactgttaattaagaaaaaaatgaaagagatgcactgactcattttttttaaaggtgaaatgtgttcacattaaagaattctaagtttggtgatttctttaggcagattaatggtccttttcctctatgttgactaaaaatgaggtgggctaactcccttaagtacctattaaacaaaattagttttataaatcgttcataaaattgagaactcccaaaagaaagtgtccaaattttacagtttaattttttgaagttaacagctttaaaaatctgtgaagggatgtcttataaatggcaaaaaatattttaaatatattttaacaatgatttgttgaggctctgaagaaatcacttggatcactaaatgttttcaaaacaacctaaaaattgtcttcagaaatggatttgcacttaaggaaaaaagaaaacctaccttgtactttggggctgaaaatgaatgaagaggggttaaaaagggaatgaaaactactagagcgggagggttttcaggcacttttactttaatggttgtaattatgaattagtatccaagtcaaaaagaaagtttttaactcatacgaggtaaaagataacatgtgactactattcaacatggaagtttaaagtagaaacaattgattactcttttaaaaaggttttcttattaatattaggttagaattttttttttttttttgctttacataagtgaaaaaaatggttgaatgttaagtttttgtgcactgtttggaggaaaggtggaaactggggtacattctttccctattttaatttccacctaaaaattaaactttgcaaattcataaattagtttccttcactgctggtagaaatccttaactgttctcatttgggtggtcagtatttcaagatgagagttttgtaagggcagtggcaactgactgtcccttagaagaattgtaggtttctagaaccccttattttctgacccaaattaaaaagatgaaattttaccataatggtttctcagatggagaactttttagtaaaaagggggaagaactgcaagtcccatcactaatttattcaaagtattgttaattgttgaaaaggtaaagttttaatggcacagcttttggtggaaaaaaacataattatgtttcagagattaaatacatgacattagcaattggaagaaccttgattcaaaggttctgagcttctaatcttttaaaattaccttaatatgtatcattttaatctatgtgtgtgggtacttttaaggcttactttttaagagtgtatttatactatactttaatgtgtagcagccagttgacaaagatactattgaggtagtctactgagtatacaattttaaaacattttaaaattcagatctggtttagttgagtgagaagtggggaacagcaagtgctatttgttgaagtttaaaggttttgtgaagagttatttagtggttagatctgttgatttttgtgtgtggggtggtagtggtggtgatggggttgttagaataagtttatgaaccaaaggcatttgaagaacggacattttcccagctgttagaatttaaaataagtgtggttcgttccctatcctcttaaaa

SEQ ID NO: 86885 - DNA, 1072 bp, Homo sapiens
ccccgcgccagtcccagcccggcaatctcgtctcgctctgaggtggggccgcccgcctgccttctcttaacaagcccctgacagagaacatccgctggcctgggtctccgaggaggacttcccctctcagatccctgagaccccaggagatcccaggccgcttgtggtgcgccttagtcctgggaaccccagatcgcaaacctcgcagcagataccccacgagagggttccccctcaccggctgcgggctgcgggctgcagaccctttccagcacctgggctgcctcaggagctctccattctaaggcaaaaagccagtgggtaaatgtgaagtgaaaagaggcaagaagagaggaagagtaggtaaagggaaaataggatgagacagttggagagaaaatggaagtgcaagtagctgttcctctctcccagtagctggggtcttggcctgagaaatagaaccttaaagagttaagtgtcaatttaagtaacctgcaatctttacaaaatgagctgtttgtgtctgtccacaggtcctgaaggctgaccgaaacaataacagaggcagtaatagtagtcagaggttctatccatggattttgtttatcttgtaaaagagagacaacaggccttccagttgtccagggtctcagccagtcttcgactccatgttagtgtaaaacttctgcaccccatccatttccacctttcctctcctcccctatacctttttaaatgcctgtcaaaacaaaaagcagaaggaaaggtctctcaaacctgtactcaagaaagtgtatgcccatttggttaccgatagtttggttaaaaatgatcctgtaagataccacctgacacacaccatcgcaagggcaaggaggcaatgccagcaggaagctacgtagtccccaggtagtgacttcattctactaggagaacttggatggcccttcagattttgatcagaggagactatgtacttattactggatagaaggggggtcatcctactattaaaatttattgcagagcctgctttgtaagacctgcttactaccttgcagcacagtaggtt

SEQ ID NO: 86886 - DNA, 1056 bp, Homo sapiens
tgagtgaaatttgattggatagtttagtttagttgattggatatagttaggatctttaaggggagaaatcagagaattcagaaatatgtgtgtaatggttgtttgtgtggtctgacctctttggcaaagaggaacaaggaggaaaggaatcattcaaaattcttaaggctccaggagggaagaagtgctgttaggtcagagtcttaatgacctaccctaggtctctcactcatcctttactggggtctggaggaaaggtcttcctcccaggagaattcagtgtttaaaagcttgagctcaatttccgtaactgtaaagaagtggtcctaatagtagtacacaatagctcttattgttattattttgttgtagatattgacttctgtccctcctgccctagccattgtttgtcctcctttgaagctttacagttgtatcctaccctgccccatatagctgtggttagctccatgagtattagaactgatcaagtgtacagatgcctgaaaatgtgtccatgagaggttgtctttgaactgtgtgtgtgtcagcttgggctatatatctaaggcactaggaacagtgatggctaggcatgttgaaggggatctgtgcgtagggtgctttggtaactctacctgtatgttgaaaggaaaagccaccttttagtggagagagatgaagctcaccagggcaaccccacagagcccctagattatagattcccccagtacattctctgagacagaggcttggagagatgaggcgagcatggtggataatgctattaattgttctttaggggaaacaggccatttattctgttatcgtttatgccctgaacttggtccaggttcctagctgaaatttcacactttacggctactgtcaaaggtgtacatgtagagtagggacattggtgagaggggaactaactctgcatataaggtaggtgttgtaagaattcaggatgaaggggactgtaagaatcctcctgggggtctgaggaaggaagaaatgagagtgacctcccccatctgctgggatgggtatgtt

SEQ ID NO: 86887 - DNA, 1044 bp, Homo sapiens
ctctactaaaaatacaaaaattagctaggcatggtggctggcacctgtaatcccagctacttgggaggctgaggcaggagaattgcttgaacccaggaggcagaggttacagtgagcagagattgtgccattgcagtccagcctgggtgacaagagtgaaattccatctcaaaaaaaaaaaaaaaagtaaataaattgaagggcaaagataattcttcacagagagatatggctgttggtggctgcagccagtgtattccaaacaaggactagatgtactaggatgttggctgaggaagcagctagattcagaagaataatcttgttaagggtcttcctacaacttatttaaacttatttaaaatctagctgactgaggttatctatagggttttcttcctctctatatttattaccatttggttaagatatgctgctgctgttggctttttagaatagagtggagtgattgctgtccagaatgagctctgggtgtaggcaggaggtggaacagaatgatcttcacaaacctctaatatttctgtgagataatctttgttccactcttctaccctttccctcttgctggccatcttgaatgagtagtttcttttaaacttctaactaaaagaggaatgctgtctgtctaggcccaaactcctttgctctcttctcttaaaagccccatggttagcaactgtagcctgggagtgtgtgtggggtccttgcctcagtcactggctgtttgaaaaataacttaaaaaatatatatttacaatgaaatgccatgggagaaaacatttaacaagatgctgcagacgtctgggatagcttgcatattgctgcaaagattggtacttctgatgtattcattcatgcatgcaggcatgcattcatccagttatttttatctagtaagagtctactattgcatgatatgccctttgctaggtattagaaatacaatgaggaacaagtgaaagaccctgatcttacagtgcagatggaaggaaatacaatttttttttgtttctgttttttttg

SEQ ID NO: 86888 - DNA, 1002 bp, Homo sapiens
ttcagtgaggattcacagaaatgaggctctcagttggtagggcagccactcctgtttatttctcttcttgagcatctttgcttctgagcactgtgaggtgataaggctcaaaagatgagttctttctacaattataggagcatttattgagtatctgctcagctcacactgttacttcaccgaatttcccaaagaactctgaaggtattatcatcttcatcctacagaagaatctgaactaaggtcacaccttcaataagtaggagtgctggcatttcaaacccaggcatttctatttccaaagttgagctctcttagaaggtgtgaactctggaggttgaggcaggaaggttgcgtgagctcacgtgtttcacattataatgagctatgatggtgccattgcactccagcctgggtgacagaatgagaccctgttccaaaaaaaaaaaaacgttgggaacaggtgatcctccaatactcaggttgaggttttcttgagctttttttgcaggggctggggagtggggcgtaagcttagcagataaaatttctccttgctctgagcctccccaggcatttcatacctaccttgcattgtattttcctatcgccgttgagattttcagattatcttgagtggttgaagaaaattgatttttttttttttttttttgggagatagagtcttgctttgtcacccaggctgtagtgcagtggtgcaatctcggctcactacatacaacctccgcctcctgggttcaagtgattctcctgccttagcctcctgagtagatacaggcatgtgccaccacacctggcaaatttttgtacttttagtagagaaggggtttgccatgttggccaggctggtctcgaactcctgacctcaggcgatccgccctcctttgcctcccaaagtgctggaattacaggcatgagccaccgtgcccggccagttgaagaaaattgagatggatgggtccaaattttctccccttgtct

SEQ ID NO: 86889 - DNA, 1065 bp, Homo sapiens
ttcttgtcaaactatttccgagataggcgaattgagcaaagtattcatgctgaggttggcttgaccccaccgccacttagcaccttccacaagttgcttccttcctcccccagagcaagatgacattttgcatggtagggatttttggtgagcaccctttcaccccactaacaaatctccctgacagccatccagccgtatgatagggcacttagctcttctgcaagtgaaatcccgtgcccaaattagagccgcatgcagtaaaagccagttggcacgcacttaaccatacagaatatgggcacttttcctgcttctgacgtcggggctgttcaggcttctgctgtattaacacttgtcttcagaaagaaagcagtggagtttggtgcagtgagcacaagcagcctactagtcctgcctccaagttggcaagtctgtttccttctctgagcctcagtttctccatctgtgaaatgagggtgactgttcagcatcctctcaggcttcagaggcttacccctttcctttctgcctcaatgtatgaatctgatgtttttcaactggaacttcttggtgacagattaaggtgtgtgtattgtgtgtgtgcgtgcgcacgtgtgtgtgtgtgtgtgggatcatataagctgagtgattcccttctctcccctaaatatgggtagaagagccctccagaggagtgggaagaagggttcagcccagagtagctcttggtgacctgcttttccttcctacttttcccccaacaagtagtataggaaggaggcagtgcgtgtatgccacatacattaaaagaccttgctcacagggtgacagttgcattccagtggtgtcctcaccttccagtcccctcacactctggctttcttcgtggtggtggcatctgctctgcccagtcccacatctcccagtaggtcaatgttttctggcccctacccctgccagcctgccactcgacagcccgccagcccgcccgcccgcccccctgtcctcctgcccccccgcctgtcctcccgcctgtctggctgccctgcctctggatcagcc

SEQ ID NO: 86890 - DNA, 1666 bp, Homo sapiens
aatttgaattttctagtagcttccttgaaaggggaaaagttttttgcctttttattcaagttggagtatctgccaggtgtccttttctttcttctttttttttttttgaggtggaatctccctctgttgcccaggttcggagtgcagtggcatgatctgggctcactgcaacctctgcttcctagattcaagtgattcaagcagttctcctgcctcagcctctccagtagctgggactacaggcacgtgccactacgcccggctactttttgtattttttagtagagacagggtttcactgtgttggccaggctggtctcctgggctcaagtgatccgcccgcctcgccctcccaagatgctaggatttgcagttgtgatctaccgtgtctggcctgccagatgtcttcttgatctcaaaacgtggaaagctggagttggggattcattgattgggcctccagatttccctgctctgaggttatcctctcttttctctgcagtgaacaccgagagtgagacggcagtggtgaatgtcacctattccaaccgggagcagaccaggcagtgagtgggctgggaagtggggctgggtgcggtgggggggggttctgtgaagggtggtgtgagcctggtcccactttttcctcaggggggtctaggcaggctgggtccccatccagggttctgatattagcccaagccaaacctagaatcttccataaaaggtttcttcagggggtctccttcatgtccattgtttcagggatctcaaaggctcagaaacatcaagattgatagcaaaaatacatagaagggagggctccaaagccctcccagataagtgggaaatcccttgcagagaaaatgtcccctgctgataggtctctggttgctccaggaccttagagtcctttgccgtgttcatggcgccatctagtgataatgagggggaacttcggggttcaaaaaagattcctcaaccttgggatgctgggacattttattgcagtgatggtcgtaaacctagctggtgatagttgtggggtccttttagtcccatcgcacccacaattttagctcctagccctttgattgagcaattatgcgtctcactcactgttacagacagactatacattttgcgcattactcatttatattaatatccgagcccgttataggcttttgccacattttgctttgggctttcttgcttcttaacatgccgccttctccaatctaataatactatgtaaaatcctacctcttcttcaaatacctaccattttcttttagatacctcctgggctcagaattttctagaggttcctactgccccttgtggccactagggtttggctttaaagctcatgtcaacagttgttcattctctcctgcctattgttgctgtgttcttgttttttggagacaagtctcactctgccacccaggctggagtgcagtggcatgatatctgctcactgcaacctcaacctcctgggctcaagcaatcctcccacctcagcctcccaagtaggtgggactacagacatgcaccattatgcctggttcatttttgtatttttttgtagagacgaggtttcaccatgttgcccaagctggtctcgaacggctcaagtgatccgcttgccttggcctcccaa

SEQ ID NO: 86891 - DNA, 1747 bp, Homo sapiens
gtggctcatgcctctaatcccagcactttggaggctaggagttctagaccagcctgggcaacatagtgaaacctcacctctacagaaaatagaaaaatcagctggacgtggcggcctgtgcgtatagtcccagctactcggaaggctgagaagggaggatcgcatgagcccaggaggtcaaggctgtggtgagccttgatagtgccactgcattccagcctgggtgatagagtgagaccctgtctcaaaaaataaaacaaattggctttattgatgttcaattgatgtataataaatcatacatatttttaaagtatgcagtttgataagttttgagatgttttacttggaaatgccaagtctggggtggcatggtgattgagtcttcatgaagcccacaattgaaggaactcttgtcttccacttcttcctttgtcttcccaagggctgacgaggttcccctgaagatcctggcccataataactttgtagggcgtctcattggcaaggaaggacggaacctgaagaaggtagagcaagataccgagacaaaaatcaccatctcctcgtaaggctctcttctatttccctgtttatgagtgggggatgcatgggggccagggtcagtatttcatcatggaaccttgatatgtgctcttttaaaatgggtgctccttctgcctcttgaagaaaaacagtcgaagtggtaaagagcatttaaaaaatccctgtaaggactggatctgcccattcccactgccatatggggcaggggtgttgtaaggtgctgcctctacagtccacgtccaaccacttcacagccctctttccctgtggctcgtggacagcctgcagctaggagccagggattcagggctttaggcttgtctgtcactgtgagaagtgaccttggcccttttctgtctgtggtgggctgctcctgcaagcagtgtgcttcgtttcatcagagactaacctgtgggcaaagtaattgctcttgtccaaaaaggtataggacatggattatgtagaatcaatggggaaacttggaggcacaaccataatctgagattggatccattgctaacagaggagtttgagttaggtgttggcatctccctccatcttaccccctgccctggttacaaactgggaacaccaaagactggggttgcagagttatttgccagaagttgaataggctgcagaaatggtgggcctgtgactcagctggcctctcgtctttgttactgccggggcctggtcctggcctgccagtgaaaggacacaactctgctctttctgccaggttgcaagaccttaccctttacaaccctgagaggaccatcactgtgaagggggccatcgagaattgttgcagggccgagcaggaaataatgaagaaagttcgggaggcctatgagaatgatgtggctgccatgagcgtgagtgctgggtagtaccctctgcttatcctttcctgagtcttagcaacagcagcttgtggggtgcagggtgatggacatgtgccctgtgccgtgtggccttggagctttagttgatgcttttggacttcgactatcagaaatagtatttaaatagtatttaattagcaaggattcttcacctggttcctagagtaggggtccaatcttgggctttgagtcctgtgattccaagtatgtgtacaatttgtgtttgtgtgcactttattgaaatgagggggtccatcgttttcatctgattt

SEQ ID NO: 86892 - DNA, 1093 bp, Homo sapiens
aaagtactaggattataagcatgagccactgcacacaactcatctgatttttaaaggagacttggggttggggtacaggaccaaaaatgtttagaatcagagtcctagaagtccaatggagctctgtctccacgcctttttctcatatagggggttatagtatagtgtcatgggtctatcgtctgtctccagcagtctgaacagccagagaggaaggactcctgagggtgtacaactgtttggcatttctggttgcaattgctagccgttagtccagtgagaacatcatatcacttaaaattccacacccgaagtgtgtaggtgagagtgtatgaaaagcacagaataggcttttgtggaaaagtatgtaattcatgtttttggcccacttgcctctggggctactcgccttttatacagcgggggtcacacacaagcccctgtcagggtgtgctgactcttcctcctcatctttcttccccagctgcagtctcacctgatccctggcctgaacctggctgctgtaggtcttttcccagcttcatccagcgcagtcccgccgcctcccagcagcgttactggggctgctccctatagctcctttatggtaggtggaagatcttattacacgggatccctgggcccatatgtggcctcccttaagggggactcagcatgctctgggagttggatgcttggcaagtttgcagggagagggaaggaaggtctcagaggcatccctcctctccagtgctcctagccactggctctgaggctcccaaatgtctgcctagaatgctcccggggcatagacagcactgttcccttactctctcctggcctcttccctttagccctactgggcataggaagagctaaagagctcacagcatcccttggcagcccagggtggcggtttggtgcctgtactccttcctccttgaggatgcaaggcaggggagtggagggtttctgggccatgctacttgggccccctggtaacaacgcctcctatcctggcagcaggctcccgagcaggagatggtgcaggtgtttatccccgcccaggcagtgggcgccatcatcggcaaga

SEQ ID NO: 86893 - DNA, 1009 bp, Homo sapiens
agctttgagcaaaaaccttgattgttctccagtggaggtgcagtcactgccctctatccgttggtcatttcatttgtgtccttgcctgttggcaagactccactgaaacctctctgggagattggtaggtggagggggcaggaggccctacttagaaagtgtcattgaagccaatccttctaactgaccacctctgccctcctaataattctggtgtgaaggcgtaatgatgtgggcttcagggtctttgttcttcctcccctaagtcttcagaatgggtagttgggagtaagggtggtagaaggggaactggatgaagtggacatggtgggggtcttcccatagagggtccctcattgactagctttttgctttttagattgcaccacccgaaacacctgactccaaagttcgtatggttatcatcactggaccgccagaggcccaattcaaggttttggtctttattgttttccaagctgaacatggaggaattgaggttgggtatttcccctgaggtaggaaaaaggctgggtcagtttcccgttagctgtcaagtcctcatcacatctttaagccttccatgcaggataaagggctgcagagctattttcaaattgacatcaaactggatttctgttgacttcgtcttccctttttaaggtccacagaagaagatgggaaggaaagaagtctgagggcatcttatttgcactctgctgtcatttctaaggaaggcctttaatgccaaattctcatcttttatgtccccactaaatcctaaggttcttgaacttctgatcagacagccaaaaaatgaaccatcaactagcttaacctaacatatgtgaggatagaggactgggacagctctctgggccactggagagtcagacaggcctgccctctgtgtgacttgattagttgccattcagggccttgaaatgctggtcagtgccacgtccagattccataggtctggtttgtagcttgtgaattagattcctct

SEQ ID NO: 86894 - DNA, 1680 bp, Homo sapiens
gcctgtgggccagaaaatatgggctggagcttcctttttcccacttttctcttttgtcacagatatatgaaccactgattaacaattacctcctcttctcaggctcagggaagaatctatggcaaactcaaggaggagaacttctttggtcccaaggaggaagtgaagctggagacccacatacgtgtgccagcatcagcagctggccgggtcattggcaaaggtggaaaaacggtgagctgtgagggccaggttgaaagccctgggccttggtctccaatctcagcagctctctctggtctcctgtactgctcaacctcaggactcctgatttgctcatttacttgattctactccccaagctcaggtcctgactcttccaggttctccccactagtcaccctggctcctccctccaaccccacccatgctttcttgatggcaccctgagctcctctctggccacccccaggtgaacgagttgcagaatttgacggcagctgaggtggtagtaccaagagaccagacccctgatgagaacgaccaggtcatcgtgaaaatcatcggacatttctatgccagtcaggtacatatggtgctcccccattgagggagggctgcaggagcccagggagcagagaagcagagactctatagaggttgaccttcatgacgttgacaagtcctggggcctcagccacatctgcctgcctctaggctaggttattgccctctttcaggtgcagaagtgggatgtgtagatgacatattacctcttattactctctaggaaaagtgatttgacaagtttaatgtacatatattgtgtataacattatatatataaataacatatatatgaatatatattatatgtaaatatatatatatatgttctacgttagtccctccctaacccctttctgcactggttaagaaagaagattagttttgttcatggaataatgataacagtactaacaccctggattgatggcatttttgaaatgtagtccctctgcctttcgcagaatggctgttctctccctggtttctgctcttccaccctcccattcctttcccagaactcatcattgccgttcagcactcggacaggctccagagcatggaagggaaggccaatatcaggttcaaattttgctgaacctcagcaaggcaagcaaacaggtggttggcagctaatggtgttttcctaaagtcttaaatccatcattgttagaactggaaaggaactttggagactgttgatcacagttcctacaattcatagaagatatccagatcttagcaggcttgtggtctgctggggctgctagagcaattggggcaaactggctcttggttttttggcttccagtgcccatatagtatagcatcaagtatgaaggttttggatccagggagctttgacctcaaacttcacatacatagcctttctgctatgtgaccttggataagtaactttctctgataaccctttgagaagtattaacaagaggctttagttacatctcaactatatatatatataaaataacaaaaaagtattaataagagccataataataataatatctaagatttatcgatgcctttgtatacccagcactgttttatgtggcttatgtatattaactcatttaattcccacaacaattt

SEQ ID NO: 86895 - DNA, 1079 bp, Homo sapiens
gatacctccaaagatgcataaagccaggatatattaatattaaacactgaagcaattttagctgatcagaatgagaattaaatgaaaagctatgtaaaacatcaagccagggttgatggagttggacctcttattgacttacacattattttcccaacctagatcaacttcctctttttttttttttttttgtgacagggtctcgctctgccatccaggctggagggcagtggtgtgaccacagctcactgcagcctctacctcccaggctcaagtgatcctcccacctcaggccccccaagtagctgggactacaggcaggtaccaccacgctcagctaatttttgtatttttttgtagtgatgaggtttcaccatgtggcccaggctggtttcaaactcctaggctcaagtgatgtcactgcttcagcctcccaaagtgctgggattacaggcatgagccacaatgcccagcctcagctgcttctttaaccaggaaaggaagcactcatttatggaaaggagacattctggtcttcattctatgaagtgaatcccattttgcagtttatttcctttataaaactttattcttagggaagaaccttttaagaaggaaataataaaagattgggtattttgtccatttttacagtgaagcttatgtatttatgctttttgactaacccatatctggactttattttttatttttacttttttttttttttgagatggagtctcgctgtgttgtccagggtggagtgcagtggcacaatcttagttcactgcaacttccgcctcccctgttctagtgattctcctgcctcagccactcaagtagctgggattacaggcgcacgtcaccacgctcggctaatttttgtatttttaataaagatggggtttcaccgtgttggccagtctgctctcgaactcctgacctcaggtgattcacccgcctcagctccccaaagcgctaggattacaggcatgagccaccgtgcacctggccatatctagacatattattccttttcctggggtattaaaatgaagcgtggatttgtgatgatgtct

SEQ ID NO: 86896 - DNA, 5717 bp, Homo sapiens
ttatctttcttctgagtcctgtgtgacctgttctgtttattgcctgtgtctggacctgatgacctctcttccgtggaaggctgtctccttggaggtctcacacccactctcttgcctgttcttgctgcagatggctcaacggaagatccgagacatcctggcccaggttaagcagcagcatcagaagggacagagtaaccaggcccaggcacggaggaagtgaccagcccctccctgtcccttcgagtccaggacaacaacgggcagaaatcgagagtgtgctctccccggcaggcctgagaatgagtgggaatccgggacacctgggccgggctgtagatcaggtttgcccacttgattgagaaagatgttccagtgaggaaccctgatctctcagccccaaacacccacccaattggcccaacactgtctgcccctcggggtgtcagaaattctagcgcaaggcacttttaaacgtggattgtttaaagaagctctccaggccccaccaagagggtggatcacacctcagtgggaagaaaaataaaatttccttcaggttttaaaaacatgcagagaggtgttttaatcagccttaaaggatggttcatttcttgaccttaatgtttttccaatcttcttccccctacttgggtaattgattaaaatacctccatttacggcctctttctatatttacactaatttttttatctttattgctaccagaaaaaaatgcgaacgaatgcattgctttgcttacagtattgactcaagggaaaagaactgtcagtatctgtagattaattccaatcactccctaaccaataggtacaatacggaatgaagaagaggggaaaatggggagaaagatggttaaaatacataataatccacgtttaaaaggagcgcacttgtggctgatctatgccagatcaccatcttcaaattggcacaactgaaatttccccactctgttggggcttccccaccacattcatgtccctctcccgtgtaggtttcacattatgtccaggtgcacataggtggtattgaatgctcagcagggtaggggctgaccactgtccctgattcccatcgttctcaggcggattttatatttttttaaagtctattttaatgattggatatgagcactgggaaggggacgctaactccccttgataaagtctcggttccatggaggacttgagtggccccaaaggctgccacggtgccctcaccccagcccatgtgctcccataagggctggttcctagaggcaggggttgtggggcactcccagccacggcactgttaccttggtggtgggacttggaacccaaccctgagctcccgataaagctaaagtccatcatctggcaaattcagtaaattggagagtacttgcttctgtttgtatctgagaggaatttttaactgacggcttctgtctccatgaatcattatcagcatgatgaaaggtgtgtctaaaaaacaattcagaataccagcagcattgtacagcaaggggtaaataagcttaatttattaatttaccaggcttaattaagatcccatggagtgtttagcccttgtgggagacagaagccatcagttaaatgaggttaggcctctcctcctaatatactgattgacaatgcatattagccaggtaatgcactttagctaccctggacaatgctatcaagtgtgctgggaagggaggaaggcctctctacatatggaaaagcccatgcgtggagttcccctcctttcaacattgcaacaacagtaacaacaagacaaccgcaacatgtgggcgtagtcaggcaatgctgtgtgcgaagtaaactacctcaaggtatgaagttacctcagcaattattttcctttttgttccccccaaccccattaaaaaaatttttttttgatttttgtttttttgcagcttgctgatattttatataaaaaagaaaagcaaagcaaaagagaagctgatagtcttgaatattttatttttttaatgaaaagaaaaaacaagaaagttatgtttcataatttcttacaacatgagccagtaaccctttaggaactctctatggagaacaggcctggtgggaaaggctttgggggctgcccccttaggaggaggctagtgctaagagggaaggcccaggtttgagagagcccagaggggcagagcccagagccttgtttggccctgatctctgacttctagagccccagctgctggcggctgctggaatatcctacctgataggattaaaaggcctagtggagctgggggctctcagtggttaaacaatgcccaacaaccaaccagctggcccttggtctcctctctttcctcctttggttaaagagcatctcagccagcttttcccaccagtggtgctgttgagatattttaaaatattgcctccgttttatcgaggagagaaataataactaaaaaatataccctttaaaaaaacctatatttctctgtctaaaaatatgggagctgagattccgttcgtggaaaaaagacaaggccaccctctcgccctcagagaggtccacctggtttgtcattgcaatgcttttcattttttttttttgttattgtttcatttcagttccgtcttgctattcttcctaatctatatccatagatctaaggggcaaacagatactagttaactgcccccacctctgtctccctgtcttctttagatcggtctgattgattttaaaagtggacccaaacttagggaattcttgatttagggtggctggtggcaaggaggggcaggggatatggggacgtgactgggacaggttcctgccttatcattttctccctaggacattcccttgtagcccccagaattgtctggcccaaattgaatagaagcagaaaaacatttagggataacatcaggccagtagaattaagcctctccacctgtcccaaccataaaaagggtctcccagctttccatctctggctctatatgctttatcccaaaacaaagcagataacgttcagacgtcggccatttagtaatttaaagcgaatttccagcagcaagcatgctttgatatctggttcagactatcatcaggaagaaaaaaaaatcccacagtacctgaaatgtgattgttgcagtgttcagtttccttgggggcctgctcccttcacaccttgagcccaagtccttttccgttggctgattcagctcccagaagagacgaggaagtgtgtggcaagggactggaaaacttcacttgcttggattaggcaaggctccactcattgttgatatttgcccagcaggaaaatcatgtaagttataccaccagaaagcaaaaggagcatggtttggtggttaaggtttagtgggatgaaggacctgtcttggtgggccgggccctcttgtgccccgtaggctaggtcttagggcaactccttgccctcctgctcagcacctccatttccccatccttggtgagataacaagctatcgcgaaaagcacttgggagatttggatgatttgagaagagtgacttaaaaaaaatgcttctgtgctctaagatatatatgtgtgtgtgtgtgctacatatatatttttaagaaaggaccatctctttaggatatatttttaaattctttgaaacacataaccaaaatggtttgattcactgactgactttgaagctgcatctgccagttacaccccaaatggctttaatcccctctcgggtctggttgccttttgcagtttgggttgtggactcagctcctgtgaggggtctggttaggagagagccatttttaaggacagggagttttatagcccttttctactttcctcccctcctcccagtccttatcaatcttttttcctttttcctgaccccctccttctggaggcagttgggagctatccttgtttatgcctcactattggcagaaaagaccccatttaaaacccagagaacactggagggggatgctctagttggttctgtgtccattttcctctgtgccaaagacagacagacagaggctgagagaggctgttcctgaatcaaagcaatagccagctttcgacacatacctggctgtctgaggaggaaggcctcctggaaactgggagctaagggcgaggcccttcccttcagaggctcctgggggattagggtgtggtgtttgccaagccaaggggtagggagccgagaaattggtctgtcggctcctggttgcactttggggaaggagaggaagtttggggctccaggtagctccctgttgtgggactgctctgtcccctgcccctactgcagagatagcactgccgagttcccttcaggcctggcagacgggcagtgaggaggggcctcagttagctctcaagggtgccttcccctcctcccaacccagacataccctctgccaaactgggaaccagcagtgctagtaactacctcacagagccccagagggcctgcttgagccttcttgctccacaggagaagctggtgcctctaggcaaccccttcctcccacctctcatcaggggtgggggttctcctttctttcccctgaagtgtttatggggagatcctagtggctttgccattcaaaccactcgactgtttgcctgtttcttgaaaaccagtagaagggaaacagcacagcctgtcacagtaattgcaggaagattgaagaaaaatcctcatcaatgccaggggacataaaagccatttcccttccaaatactcgacaatttagatgcagaacatttctctgtattcagacttagagtaacaccagctgaaaactgcagtttctttcctttggatacataaggcttctctatcggggtacgggacagggaggaggcctcatgtctgaagggggatttaggggcgagagccccagccctgaccctcggtcctgtgcaccgctttggggcacagtctgatggcgcctttgctggcgccttagtatggttgactccggatggacaaaagaaaaaaaattttttttcttgaatgaaatagcaggaagctcctcgggagcatgtgttttgattaaccgcaggtgatggatgctacgagtataaatggattaactacctcaatccttacagtaagattggaactaagggcagggactcatgcataagggtatgaatcccagccaggacaagtgagttgaggcttgtgccacaaaaggtttgtccttggggaacaggcaggcctgccaggatcccccccatatcgattgggctgggagggctggccatgaggtccccactttctgctttccttgcccatgtgtcacccctttggcctccagcttgtccctctctcactttctatagctttgttggaccagatggtgaggaaaggaatggcctcttcccttctagagggggctggctggagtgagacctggggcttggcctggaacccaccacacagccccaaagtcaggaagcctggggaaaccagagctgagacctcttcaacagggtttctttgagatcctacacctccattgggccctttttcagtcttcaatgggggcccagttggctctagaaggagaagaggtgaagcaggatcctttgccctgggggagtctgagggcgcggtccttggactcattcaggccgtctttgtagttgggggagttccactg

SEQ ID NO: 86897 - DNA, 1230 bp, Homo sapiens
ttttttcccccataaataagtttcactctttggcgattttcttcacttgtttaagataacgtgctagctattccaacaggtaacagctttcacagtctgcccctggcctgtctcaccccatcccccaccctattcctgccagtgagtccttcctgtgcttctctcccttctcccctcccagccagctgacttcagtcacccctgtcccccctcccctgccaataagctcccccaggaataaaggctttgttttggggatgcttaaatcttgactggcacttcccggctgtgggggctggggagccacttgtaacatttctgtgcagattttatgttagccactgctatgtaaaagcacgttcaaaatgaatttcagcagattatgtgttaccataatgaataaacgtcctctatcaccatttggagtctcccttttctccaggatcttgatcctggtccccaaaaccagagtgaatcaaaagagcttcctcccctgaggcaaagtggatttgtaagcagttctgaaacatcacttactcagaagagggaacgatgtattttgatgagtgcaaattgggaagagctggaggcctactgcttgggacagttttttttttttttttttttttaaatatgagtgctagcttattctgtaattgcggcaactttgaaaattgtattttactggaaatctgccagccatcaccacccgattttgattgtatccttcctcccatcctttaatctgttcattgctttgggggaggtggggcagctggctcacacgttggagtttgttctttgatggatgaacgaacactccagttttctttcccgtgaaggttgtttcagccacaaaccacttcattttgctgtttcaatttcaaaataaaaggaaacttatattgaaagacaagtatgtctgtgtctcagggtttttgggtctgggagctgagatgctcagcctcagcatgggagccctggttctcagggacctgagtcatccaaatgcaaagtaggcatttttcttaaatgtacagaggagtggtttttaaatggtgccctgctcttaattagctttgcatattgggaggggggcaggtcaggtgtttggaatgaggactccagcattaaagaagatgttgggacatcactgcagagaagtagctgtccaagaagtgacgagggtgtgtcactcttcctaacacctaccctaagaaaaaaacatgt

SEQ ID NO: 86898 - DNA, 1050 bp, Homo sapiens
gggaaagagtagcaaggagagagagaggtggggggaaagagagaggaagggtgggaagaagagagggagagagaaagagagagtggggagggagagagaaaggtgaggggagagaaggagggtgggaagaagagagggagagagaaggagagagtggggagtgagagagacagtggggggaagagggagggtgggaagaagagagggagagaaagagagagtggggagtgagagagaggtgggaggagagagagaggtgggggagagagggagggtgggaagaagagagaaagagagagtggagaggaagaaaggtaggggagagagggaaggtgggaagaagagagggagaaggagagagaaagagagagtggggagggagagagagtcaaggagaaagagggagagagggaaagaggagagagagaccaagaccctagctctggtagaatcatggagatgacagatttctctacatgtcaggaatctttgagatgtcagagacctcaagtcgcttataaggaccccaatcgatttccacatcggaaatgaggaaagatgggagcagtgtacagtggctcacgcctgtaatcccagcactttgggaagcctaggtgaaaggatctcttgagcccaggagttcgagaccaacctggccaacacagtgagaccccatctctacaaaaaaatttaaaaaattagcctggcattatggtgcatgcctgtagtcccagctactagggaggcagaggtgagagaatcacttgagcctttaaggttgaggctgccatgatcactgtgattgcaccactgcactccagcctaggtgacagagcaagactccatctcaaaaaaaatgaaaaataaaaaaatagaaatgagaggctgggtgtgatggctcacatctgtaaactttgggaggccaagataggcggatcacctaaggacaagagtttgagaccaacctgcccaacacggtgaaccctgcctctactaaaaatacaaaaaatagccgggtgtggtggtgcatgctggtaatcccacctactc

SEQ ID NO: 86899 - DNA, 1021 bp, Homo sapiens
aaaaggatcaggattgggttctgaaccaatttgaagaaaaatcaacacagatggaaacagcttacaaagtacagtcagtgaaaagcaataattataaaatatggtacttgggatgaggcatctttccctacctctacccccttcattcagtcattcatttattccacaaatgtttattagatgcctaatacgtgctggacattgatctggccactggggattcagcaatgagaaagacaggctctactctcacagaccctgctttctagtggagaaaccctgacaataaacaaatgatgatcttatataatgtcaggtggtgtgggcccttatactgtgaagcttgccctcagagctgtgactgtagtcagctggaagatcaactagcttctgtcataataagccttcccagcccataagccacctgattttgttccttctaaggattccagtgagggagttgggtgtataggaaggaaatcttattgtccaagtttccctttgaaacctcttagaatggaataaaactgcccaaatcatagaattgctattctttatcatcttgtatctctaactagatgtagatgttaacacagtttcttcatagatacagggtaggtaatcactcccacctgagtatatactaaataagtgctttcaaactttcaccatgaccccatagcaagaaatatttttaccactactttgctactcaatacatatatatatgagtttatttatataagtgaataaaaggttcaagaaaaatatatgtgctgcactttgatattttctatttttcttttttcttttttttttttttttttttttgagatggagtcttgctctgttgcccaagctggagggcagtggtgtgatctcagctcactgcaacctctgcctcctgggttcaagcgattctcctgcctcagcctcccgagtagctgggactataggcgcacgccatcatgcccagctaatttttgtatttttagtagagacggggtttcaccatgttggc

SEQ ID NO: 86900 - DNA, 3872 bp, Homo sapiens
agcaagtaaagtttgggttttaattttcctttgcctgaaccaagataggaaattacttaagagttttttttttttttttttttttttttttttaggaatgaaaggtcataagccattagaaatagtggcattattatgcaataacaacaccctagctaacctgcttttgtcatctgtagcacttacaataaagaatgatgaccttccaaccctggacactacctcgataaagcaaaccagagatcctctctacactttctatggaagccataaaagttgccatcaatatatccactttcatagttctatacttttatactttctagacttttttatagactttatgatcagatctttttgtctcagaggataggttttgcaagattcaaaggaaaatcaaactccttggttgttccagctttgaagcttttgcttcagtaaatttgtttaaagaaccagatcacataccatttatcaaattctttacttaagtcagaatactttgcagacatacatatttggaaaacaaactgtttcttgttcactagatagaatctgtattgtagtaagaaactacttacaaggtggctttctttctgctttgttactctatgtattactcaataatatatgtatggtcacaggttcctggagttgttttatttctttatgacagacacatgagtatgcacctctctctaatcctctgatgtcactgcagcttcagtctctctcactctgtttttgagtgccttcaaaatgccagcatcctggaacattcttttcctgatctaaatcctacctctgactatttcattatccatgaatattggaattcacccatattccaatgggcttaactctacaaactagctaaaaccttggacaagaattttgaccgtatttctgttttgttcctccatgtcatttttaggttatatttttaacttttatttatatcttatttcttcacatatttcgtctctctgttgaaagattttatccttatttgactcttcactttttttactttcaccagaaatttgacgttcctttaaaattaaaggtcattgaatgtcttttgaacacctttttctcaactgaagtcttcctgaatgcctcccctttctgatgaaaggatcctgagtgctgctgttgctctgccctgttcccatgtgcccactcccttccgtacacattttgcaagactatactctttattttagtcaaattaatttaaaattgctccctgggtttctgctctctcatggccctgtccctcaaaaacttctgtttactttttctagctgttttcatctaatttgtttaaaatgtatgatggatccataatatatgaaggatgtaatgaaaaggaggttgcagtgttttatataatatgatcgagcacctccgtgatgaaacatttagcaattggctagtccttcacagccagagtggaagtttgtgctgtggacaggtctttttactcccttccagttctcctccaaaactggagaaaaaggaaaaaaaaaaagaactctttcaaatgaggagatttgattgcatttttttaggtgaatgaaagcttggagttgagcatttgggccttagtcagcatttttcctttctgacttaaaatctcatgtccttttccttaaagttaatagtactcaggtttttaagactaataaccacacaaggtgggtatctaagaaggcagctgttaatacattctccatctttcctgtctggcaacaggaaagatattattggtgagatagtgcaaaattgtgagaattggttatgtttgatgatgaataaattcaagatttttgaaggcttcactgctatttgggatgggaaggtgagtttacaaaatgaaaaaggtagatttttatgttacagaaatcagtaacgggtttcttgttgtgttaattacctttcacttgatttgccatgatgtttcttcctcattattgatctagaagtttgcctcttggatagtaactagtaacttagtatctactttaaaatttgtggcttttctcttcagggtcccaggccataaaacaacggagagctgtacttgcttgtcacttggaggaaccacatccttgagacagcctgctgtcttgtatgtcttcagtaggaaacttctgacacacacattcaagggagttcctgcccctgagaagtgttcccatagctttccagtcgcaggttactttcacactacgtcagcttctctggtgagatcagggatgttacatattacttgaaaatgatttcataggaagtgaggatggggcaagaaaggaggtagaagctgaattttgcttaacttcagaaggaaatctgatacttgccttggctagttctgatcaactaaagagcctgtgtctgtactggatgtgccaaagagtcaagttgtttctggaatatccagctcctctgaatgaacacagcttcctccctacctgtcttttatgggtgaaaagggaccgtctgatgagcatgatagacatcctgtacaggactcaagactgtttcattgcatttgaaagttggtgggaagtattttattctgctagagctcctaaccctcctagaaatatcttttcatgctctattaattcaattcattagtttaaaaagaaacagtgtgacataattttggtgtttacttcttaagttgtctccccaagggcatatatgtagcctctgaaaatgggatgatttcttctcaatcttccataaatttgaatatgcattttattcatttcttgacatgggctgtgtgactgttttccatcagcagttctggctttgtccacaagggagcaataaagtacgttagctttattctcaaccttctaaagaaagatcccacttttaaatctcttctggaatagcctcttagctcaaagcttattcatgtattttgattatttaagaaattttcccttattacaaagtccagtcgtcgttcatccctcatgatgccaagcaatgattgatgtgtgggtgtggagtccttgtgggtcaggcatcttaattaattagactttttacatattgatgatccccagattgaaagccaggaccttcccataggggcgcctttgtgtgctaaaggcagagcaggcaggcttctccactcctatctcctccgcaggccaccaccatcacatctataggaggaacaagagcactgggggaactctggagtatgagtaaggaaatgcttctcaccttctctgctccaaagagatatctgttacatcagggaacaagtcctctaggtcaggcacttcctcctgaccagtgcaacgggcactccaggttagaaactgtgtgtgctccctctctgtcagttacttgtctaagggctcctatccgtggtcatcagctctctggccatgagttctgtttgtgcttattgcagcagcatcttcacaacaaacaggtcagtaatcaacctgggaagggaaaagacgacagtaaatattaccccctgtagagccgggaggcatttacacctggaatggccttcttaactgatttctgcctggccacctcacccccagccaagtctgaacctgagcaataccaggcacagagaggtgtctacttgtaactccaacacttgacaaaaaacaaaactgaagctgtgattggtttaggcagcaagtggccaggtgcaacttgtttgtttttatttttgttttccccaacagtactgagatcacttgcacttttcctcatttcttaagaaaatccagtttgcttgccatgacttgtttagcgttaggtttacaaagcttgttgttgaatgttgaatatttgtccaaaggagtttgacaaaatagaag

SEQ ID NO: 86901 - DNA, 3545 bp, Homo sapiens
aggaattgtgttgatgtttaacttttatgggatgacaaattgaaatcgctcattttgaggttgctttatttttctagaattgttataagaagctaaaatagtaaacttaaaatcacaaacatgacattgctgatagtggctgagaaattcagatgagaagacaaattggttatgaattttgaaatatctattatatgtaaaatgtggatatgttcacaaccttgagctattttaacacagtttaaatatagtgagggaaaactcctaagttttactgccctgtcctctgcaaattatgtaataccagcattcttaggcgataaagagagcagcacctctagtacctttaggcagattactttttcaagtttggggaacttcaaaagaccataatcaaccaggagcttattataggaaaggctgaacagaagggctagtgtattgattacacttaacagatcatatttatccagactcagtatagcttaaaattttgtatttctttatctgagagaactgagttcccaggctaaatcacttacctcccaccccctctccaattttttttttaagagacaaggtcttgctatgttgcccaggctagagtgcagtggctattcacaggtgcagttatagcacactacagcctccaactcttgggttcaagcaaccctgcctcagctaaccaagtagctgggactacaggtgcatgctaccatgcccagtccattttttaatcttgaaatttcttcatttttctttcttcggtttcttaaaatctttgcctgaatcagaacgctggcttttatttatttttttatttttaatattaaatgtgcagatatgcttcgagcacttttctaactaatgagctctgtggtaagaaaaaatgaactctttcaattgagattaagtccatatttttcaaacatcacgttctctattggctttttggtttagtgtttctaaattttctccttctgattttgcctgtcttatataatgagcataggaaaattttggaatgaggcagaaaagtatatcaagacatacttcctggttttggatgtaagttttaaagaatggtatttttaatatttgtacacattctttgagcacccaggtacccaagccaataaggaaagttaattccttgcatatgactgttatatctttagtggttgtctccctctccctccacagtctccttggcattccatgacaagtttgtcaacctacacttttatatagacatatcattatttcatggtcaagcctgtagtattaaaatgatttttttaaaagatgtaaactgtgcttagttaattggttatattttgttctgttttttttttttttttttttttttttttgaggcagagtcttgttctgttgcctgggctggagtgcagtggcgtgatcttggctcactgcaacccccgccccccgggttcaagtgattctcctgcctcagcctcccgagtagctggaattacaggcatgcgccagcacgcccggctaagttttgtatttttggcagagatggggtttcaccatattggccaggctggtctcaaactcctgaccttgtgatccgcccacctcagcctccgaaagtgctgggattacaggcgtgagccaccacgtccaactgccttattttgttctgaataaatttacagtattgggcagcaattctggattctagacttgagaccacagaatcaaccatttcatgaggttgtactgtaattatacactggaatattcaggtagtcatctttgatttttcattcaagtaaatatagccataagaaaatatctgctatacaggaaaaccagtattaagcaaataccaccatccttaacagaaacaaaaatatatatatatattatttttaaaaattagcattgtcatacagtacaattcttagtgaagtgtattgtggaacaatttagaaacttcctttttttcccctagattaaggatactttccttgacttgagacttgtggtcttcaggaaaactactcagaatataatgactcctcatcagtatcatattgtatataaataatgaaatgcattaagaatattcacaacattgaacccaggaggcggagcttgcagtgagccgagattgcgccactgcgctccagcctgggcaacagagcgagactccatctcaaaaaaaaaaaaaaaaagaatattcacaacattaatgcttctgaatagaagaactgcaggattaagccttaaacatatatgtgcaacacgtttaacatgcttaagactcaaactcagggttgaaaatttggttggggtcctctttgtaagataaaagttgcattatgtggtatgttctcttccatatatgctacagcaccccatgaattcttcaaaactttttacctacttgttatctgtttatgaaaaaaagaattatggagaagtttgagttctcagcccttatctgtacatgtctgttaaagacaacaaaggctgcatttaagcattatatagataacaaattgaggctgtctctcgttacttagttttactgtcttcaaaggcttgtatcattgctagggttaagacttatttgaggatgagttggcattgtattttttgtgtgtgtgggttggtttgtatttgtttcgtttttatttttctattttctctcatagatttatcagtaaaatataaactcttccttagccttaataaaggctgctgctttctcaaattgagtcagataggctcattcggagttagatttttaaatttgaatgaagaaaagacaacaatttaaaggcatgtggcttcatttccacatatatttgtgactggattcttatttttagcaagaggggagatcgccacaaaaaaaactttagttcaaagaagactgtgcaaatcagttacctgtactttcatagtctaccatttacattaactgttctagattaatgactaagcatggccattaccataattacatcatttttttaaaaccacatttgttcgaagtatccttttctagtggttagaactgtccctataatttgattgtccctcatatactaaccgaaagcaaaatgctctgatgagatgcttataaactatgaattttttaattcttgaaatttttttcagtttttatgattgttgaatagatatgtatgtttagttccattattatttcactggaagttttaaattttgagaagatgaagcagagatagaaatccattgcagatatatgtatatttaccccatcttgcaggtttcagttagtaaaacacagaatgataggtcggttttaatgttttaaaaaaaaactaaaaaactaaagttagagaaacctttctgtttgagctactgtatagaaaagacaacttttattgcattgctggtccacatgataaatatttcaatgctgttctagactgtatgagaagtacttaatgaaaaaagggatacattacatttaagaattgtatcagctaattactgttttaaaaaaatcaactcatttggaattc

SEQ ID NO: 86902 - DNA, 1372 bp, Homo sapiens
cccgtgaatgtgccacctgctgtccagatcccacttacaacttccccagccaccccagttccttctgtggtgaacacagccacaaccccaacccctccaatcaatatgaatcctgtaagcactcttccccctcggcccatcccccaccccttctcacacctgcacatccacccacaccctcaccacccacaccaccttcccatccctccagtccctcacctcccgccacctccagctctctttaagagtgagcctttaaatcatagaggccagagtgaggacaactttctgcggcacctggcagagaagaacagttcagcacagcatcattaacatccgtctccttagtgtgttctccaggagacacgtccccatgtgtgagcgtgcacagagggagtcggtgagcatttccttagttctcagactctcctccgcctctaccaagagcttcgccagtgtcactgaatcaacagatccaagggaatgaacaagaagactaccttgagctcacagagggactgtcatctaaaccaggggaaccactgaactaaagcccaatttgcttgcattttctgatgacttttataagtttcaaatactcagacttgtggaattttataatttcatatcagctgatgaggtatgcttgcttttatatcccagacttctcctcaaagaggggataggcctggtttcctttgtactaatcgggaaggctgtgagattaatccagagcattaattgtatcactgtgtatggtaaggaattcttttcagcttttggtgccagctacagagttgagctggccatgtttcacagtatatcaagcattatagagaaagacagaaattttcttctttgtgtagctctcctaacgcactctttattttactacagaaattattttagagtttttgtatagacttctttggtagtctgtttctaaaatgaaatgtatttcaataagcagtgtaattttttcagtgtagctgaacctatgttgtaaaatagaaaaaaatttttataatcatcaaaatgtgattcttaaagatgcatataacttctataattcaaagctattcttacatccgtacaactcaaaaggtgcttcagagactagatgtatctgagagggtctccagaccaggttactgcaaaaatgaggttttgctttcaggatttggcgtaaatacttggtagttttgacatctctgcttaacactcaagagaggctccctaatgtgctcctgtcctccatgttctgcttggcttcgttagtgcattacatgaaatgatttgcaggggatggggccttttccagggaagtcacctaaagcttgcatgttttgaaaatttgaataaggctgtttgc

SEQ ID NO: 86903 - DNA, 1038 bp, Homo sapiens
aaatgagggccaggtgtggtggctcacacctgtaatcccagcactttgggaggctgaggtgggcgaatcatgaggtcaggagattgagaccatcctggctaatacagtgaaaccctgcctctactaaaaatacaaaaaaaaaaaaaaaaaattagccaggcatggtggcgggcgcctgtagtcccagctactcgggaggctgaggcaggagaatggcatgaacctgagaggtggagcttgcagtgagctgagatcacaccactgcactccggcctgggtgactgagcgagactgtgtctcaggaaaaaacaaaaaaaaagaagactgcaaatgagagatgattagagaggtccaggaaggggatttgagcacataaaaaacctaaacatccatacattcagtaactgctcagggaatccattctgtctgtgagtagtgtctagtgtgcctaagaagtgattagtaaataatgtggagaggatttgctcatactagactaaaattcaaagattagggcctttggctgtgtttccatatggctgctaggtgtgaagaatactaactctgaagtcacagagcaggggagcttagaggttaatcaaacatgtgcttttaaagtattttattgtacaagtaaatcatatttaatttagaaaacaaactacatggccaggcgcagtggctcacacctgtaatctcagcactttgggaggctaaggtggatggatcagttgaagtcaggagtgtgagaccagcctgaccaatgtggtaaaacctgtctctactaaaaatacaaaaactagccaggtatggtggtgcatgcctgtagtcccagctacttgggaggctgaggcaggagaattgctcaaacccagaaggcggaggttgcagtgagccgagatcacaccactgcactccagcctgggtgacagaatgagaccctgtctcaaaaaaaaaaagataagcgtaaagaataaaacatcacccatgatcttattacctagagataatcactggtaacatttgttgtattttttt

SEQ ID NO: 86904 - DNA, 1320 bp, Homo sapiens
aggatcacttgagttcaagaccaacctaggcaatatagcgagacaccatctctattaaaaaccaaaaaaaattgaaaaaacccagagggaaaatactcatttgtccagccctttataattgtaaataaaatccttgctgatttgataggtgagaaatgatttcttatattaatttgcatttaattactaagtaagagtgaacatgtttatttgcttgtagttatcaacgtattttcttttctgaattgcttgtgccttttctgtgttcatctttccattacagtgtttgacttttttaatttcattaatgttgaaatactttcccctggtttgtctatctgccttttaatattattcagagtgtccaaactggaaaagcagctagatggtgaagttggacaaacctggctctgccagtcactagcagaattgtgtaacctctctagacctctgttttcttgatattaaataagaatgacagtaatacctaaagggtgcaggagaaatgctggttttagagaaggattagctttagagaaggaaggggatgcggataggtctctaaggctgaatgaaactacatttagagacagcagtgtgttttggtggggattaaggacattgtatgaactgacagtattggactgtttctttgcagttaaagagaaatgaggcagaccttatctaggaagggtgaccagccatcagtcagggtttactaggatgatgtggacatagggtgagttcaaaatagaatacctactgattcttcttataccaggcacagtgctatgtgcctagagacacaaggatgaattaagacctggtttctgctcttcaggagcttatagtctggtgaatggtaatgatggtgttgatgatgatgataatagcaggtaaaatgcattgagtactatgtgccagatactgttgtaagcactttaccagatactgttgtaagcactttaccagatactgttgtaagcactttaccagatactgttgtaagcactttacttgcgttttgtatcataataatctattaaggagattattatctttattttatttatttatttattttgaaacagagtctcgctgtgtcacccaggctggagtgcagtggtgtgatctcagctcactgcaacctccgcctcccaggttcaagcgattctccatctcaaaaaataataagataaaataaaatagaatttatggtaatggcaacgaatgagattaaagtgatagacaaagtagaacttggtgaattgactggatatcagtactatcaaaatagtattcaatcaccaagtttgaatg

SEQ ID NO: 86905 - DNA, 1686 bp, Homo sapiens
attgtttgaacccaagagatcgaggctgcagtgagctgtgattgtgtcactccagcctgggcaacagagcaagacctggtctcaaaaaacaaaacaaaccaaaaaaagagtaacacatacttattaaaatatatgggaaactatgaaaattgcaaacaaagtaaaatcataccaccaagagatcaccactcttaacattttggcatatacacattaaaaaaaattcttcagtttcttaacacacatatagaccaatactttgcataagtgtttatgtgttcatgtatatagtaaaaacaaatgttgggtctttatactctgttgtaacctgcttttaattttactgtattatgtcatcagcaatataactttaatggctatatatttcttataaatttgctataatattagctataatttattacatacatatatgtcaggcattatcttaagtgctttttctcaattaatgtaacctttgcaacaatcctataaagtgaaggatttttgttgttgtcgtttgtttgttttgagatggagtctcgctctgttgcccaggctggagtgcagtggtgcgatctcagctcactgcgacctctgcctcccatgttcaagcgattctcctgcttcaacctcctgagtagctgggattacaggctcatgctgccacgcccagcctattttttttttttttttgtatttttagtagagatgggggtttcactgtgttggccaggctggtcttgaactcctgacctcatgatctgcccgccttgacctcccaaagtgctgggattacaagcttgagccactgtgcctggccttttttttttttttttttttttttcttttgagacagagtctcactctgttgcccaggccagagtgcaatggcccgatctcggttcactgcaacctccacctcccaggttcaagtgattctcctgcctcagcctctcaagtagctgggattacaggcatgtgccaccacgcctagctaaatttttatttttagtagaaacggggtttcaccgtgttggccaggctctaaaactcctgacctcaggtgatccacccgcctcagcctcccaaactgctgggattacagacatgagccccacccctgagcccggccagtgaaggatgttttctccatttatttagccagttccctgctagacatttatgttatttctgtttccagtttttctactgttatagatagccacaggccaggcacagtggctcacacctgtaatctcagcacttcgggaggccaaggtgggtggatcacttgaggtcaggagttcgagaccagcctggccaacacagcagaacctgtctctactaaaaatacaaaaaattagccaagtgtggtggcgcatgcctgtaatcccagctactcaagaggctgaggcaggagaatcgcttgagcccacgacagggaggttgcagtgagctgagatcgcgccactgcattccagcctgggggacagagcaaaactccgtctcaaaaaaatagctacaatatcgtttatcacagtgttatcacagccataattatttacttaggataaatttttggaagtaggattattatagcaaagagatatatacatttttaagacttagtgtcatgtattatgaaatgccctccacatatactcccaccagctgtatgaaaat

SEQ ID NO: 86906 - DNA, 1429 bp, Homo sapiens
aggtggatcacaaggtcaatagttcaagaccagcctggccaagatggcaaaaccccgtctctactaaaaatacaaaaattagccaggtgtggtggcgggcgcctgtaatcccagctactcgggaggcttaggcaggggaatcacttgaacccaggcagcagaggttgcagtgagccaagattgcgtactgcactccagcctgggtgacagagtgagactccatctcaaaataataataattattattatttaagccctgtttcttgtgatttaaatgcatgctctaaaaaggaaatagtggtattacctgatttttttcctctttgcttttctttgtagataagatgctcccaagtcccttgcagctctcttcagaagaaaaatcactagtgctctgctcttgccataataccaaacctttttgactcatgctttggtgctgcaacactggaagaattgcacacagtttccaggaatatctttttttcatttgagtgattctttgtggatgagaaaagatttgagtcttaataattaccttgttttaaagctatttctttatagtctgaactgtttaataaattgggccacttaccaatgagccacacagccagttcttgtcaggagctggttgaaaactgtgctgtgcatgtagcaggaatggcacaagaagatagccgtcgtggtcaagtgccatcttccttttatcatggtgccaaccaagaacttgacctgtccaccaaagtgtacaaaagggaatcaggaagtccttattctgtgttagtggacaccaagatgagcaaaccgcatctccatgaaacagaagaacagccatatttcagggagacaagagcagtgtctgacgtgcatgctgttaaggaagaccgggagaattctgatgacacagaggaggaagaggaagaagtctcttacaaaagggagcagatcatagtggaggtaaaccttaataatcaaacattaaatgtatctaaaggggaaaagggtgtctcttctcagtccaaagagactcctgttcttaagacaagcagtgaggaggaagaggaagagagtgaggaagaggccacagatgacagcaatgactatggagagaatgaaaagcagaagaaaaaggagaagatagtagagaaagtcagcgttacacaaaggagaaccaggagagctgcctctgttgccgcagctaccacttcccctactcccagaactacaagaggtcgtaggaagagtgtagagccacctaagcgtaagaagcgggccacaaaggagcccaaagcaccagtccagaaagctaagtgtgaagagaaagagactctgacctgtgagaagtgccccagggtatttaacactcgctggtacctggagaagcacatgaacgttactcataggcgcatgcagatttgtgataaatgtg

SEQ ID NO: 86907 - DNA, 1051 bp, Homo sapiens
tattttattatttttttcagacagggtcttcttgctctgttgcccaggccagagtgcagtggtgcagttataactcactgtagcctcaaccttctgggttcatatgatcctcctgccttagcctcccaaagtgctaagactataggcatgagttttgttaattcatttctgaccatagatatgctggagaaactgaaagaaaagggggtagggagaagaaggaaagaggtagagaaaaatttaatttacaaactttgtctaagtaaatatatactacaggctgggtgcagcagctcacacctgtaatctcagcacttgggagtccaaggcaggaggatcatttgaggccaggagtttgagaccagcctgagcaacatagcaagacctctgtcttcaaaaaaagttaaatatatatcacaaggaaaggtaaaatctgctctgtgatgagagtttttagcctggggttttgggacccctagagaatccttggatggatttctgggaataggtggatcccttgaaattgtttgtaaaattgtgtgtgttccttttgggagagagaggatttgtatatttcaaaagaatcggagagggaacatacaggcttatgggaaggaaaaggcagaggtgtgttagcaatttgtctttttctgttggctatgttttgcatacattatgtttgggttaaaacttcctacctggtttcaaatatttttgttttagactatttattcatacctcttggtttaagactagttcagttaagatgttttcaaaatgttatatttatttatttattttgaggcaatgtccccaggctggagtgcagtggtgcgatctcagctcactgcaacctcagtctgctgtgttcaagcaactctcctgcctcagcctcccaagtagctgggattataggtgaccaccaccagctaaatttttgtattatcagtagagacagggttttgccacgctggccaagctggtcttgaactcctgacttcaggtgttggcctcccaaaatgctgggattacaggtgtgagccaccatgcc

SEQ ID NO: 86908 - DNA, 1034 bp, Homo sapiens
ttcatgtcttgctctgagaaaatttaagtatttagtgattcttgaaggagaaaaagctactgatcttgaggcagaataccattgtagataaggtagtacttgggtatctttcactctacacttaccaatgcaaagaatccctgctatggcaaaccatggcatccaaactcactgcattacatttgttttgttgtttttttttcttttttgagatggaattttgcactgtttccctggttggagtgcaatggtgtgatctcgactcactgcaacctctgcctcctggattcaagcaattctgctgtctcagcctcccgaatagctggcctggcaaatttttgtatttttagtagagacaaagtttcaccatattggccagggtggtcttgaactcctgacctcaggtgttcaatccttcccaaagtactgggattacaggcgtgagccactgcacctggccactgcattaaattgagtaattccttgaaacagtttagtttatggcagaggaggacggaattggcaatatgaagtagatatggatttttaaaaaatcactttttctcccagcttaaatggaactcttaagtgttccttccattagcaaatcacttttttaattctttttttgttttgttttctttttcattcagtttcattcagaagcataccacttattagaaaaaaagaaaaaatcctcaagcattctaggaaacaaaaatgcatagggataacttggcagttccataagaaaaaacacactaggatgagtgcagtgtgcatatctgtaatcccagaactttgggaggccatggcaggaggattgctacactcactacacttccctacctgtcccctctcattttaaagcaactccagacatcatattatttataaaaacttcctgagcatcattaagtattcagtcagtatgtgtatgtcccaattgactcataattgttttttcagtttgtttgaattagcgtcccaagaagtgattgggtaggtttgttttctttctctcccctccccct

SEQ ID NO: 86909 - DNA, 3251 bp, Homo sapiens
agtacattgtctggccctgagcaataaacaacaaagtagcttatgcatgtaaccttgtgttttgttctttgattaggataagttaggtatttgtaaattatcatttcctcgttttcctgtaaaaaggaaatgtatgtgagagtctttcagaaaaagttaaaactagagtcaaaataatttgtttagacttgaccaattggtaatgtatgttcctggcaccagattctaaatgtagcaaatttcaacagcaaagtccaaggtctgttttataatgcctatcctgaatctttatgcgttggctgaagttgatctgatctcttaaaagaaggctatatcattctcatagcggtgtacctgctccataaaaaggatttttttttcaactttgttaactgtgatttcatgtcttaatggggatggtgccatcaaaatcattcattttgaaattttgttttaatggaaggattttaattgtggttagggaattcagcctccatatatagaatctggaactgaggatgaactttgcaccattctatcaataagcaggtgataaatatcagctatttttgtttaaattactctgcacccagcttttgcctttcggtcgtattgcaatcaggagatatttattccagcttgtgatagtgttggaatgggtagtaattttaagcacagtaccggctctttaggagcttacgattctgccattatttttcacttaaaaaattctttgagaccttcctattctttgcatctggggggttctgagaagctaaggaatttatgatattaactggcactttggaaggcaagggagccttggaatcttgcctatagaacctgttccatacacctgaagaatagcatttattctactaattatgcagcataccctataagtttgaaagcatgctgaagttgcaaatattgccttttttattatctcataaacatgctgccagtgctttatattacacattatattttttgctcatgtcatgcctgaagttttactgtcggaaatcatttggctattctaaacccaaaccatttcaaagttgcaagtaggttacttttctttgtatatactttgtagtatactgacagaccattaaaatctcagaggacagtgtgcttccttgatttagtattgcagaacctcttctaaaccagtcacttacctagttaaacacccacacatcatagagcagctgatcatataacatatacggttgtgagaacagcattctctccctgccagattcagaacttggaagctggaaaacaattgcatagcagtgaaacacttaaggagtagtggtgccagcagttcactctcattaatacaaacagcttgctttagtttctccaacactcttcttcagacacccttcccttaggaggtttcagatcagcagctcctactcaagggaaacagcacctactttctgcagctgtggtctcaagatctgattcgtgacacccagaactgttgccatttctgttctaagtatgggaagtaatctcgtagtgtggtaagaaaatacttttcaagtctgtagaaaaaaaaagttgattagtaatgctactgatgtgattttgtttttgaatgtctgaagcctaacgaagaggtaaactagaatgtgaacttttgaagtcacccttttctcaggggttttagataattttaccaaaaaaatgtgactatactcttgaatttcatttcccttgttataaaaaagtcagctgagagacaacaacaaaaaaaagtggattgtcttgtattttgaaccatagcctttaaaacttgttattctaaagggcataactacacctccttgttgtgaagtcttaggtcttgtgctaccattttaggtgtgatatttttctcaggtgttgtcatcatttctgacaatcagcacttgaatttacttcgatagaggtgaactggtgctgcgtttagtgactttagctgaagaaggctcatggagatagatgatgctttggaggtaggcataactcgatttaaaacccccgctccactgtttactggtcttatgatattgaacaagtcactttgagctctctggcctcagtttcctcagcagcagaatggaatttgttatgaggattagagataatgtatgtaaactcctagcagttcctggcatatgatcatattagagactcaatacatgttaggatatggagcatgttggagtaaaactacagatcattttgtcttatgacaagatttagaagtctggcactgcgatctgcattttttcatttgtgcagatttgggatgaaaaaattgcaaatatttgacttggagcatacctaagtcttgcaggtgcaatgtgcttattggaactttgatttgttgctctatggctggcggaacttggtggggacagtaaaatctagctccaaattctacagtgctacccataggctgtgcttgttttaagcctattcagagcttatgtagtgaaaggggtattttaggacattaacgtatctcaatgggttctgtgtccagagttgaatcacgtgcaaagccttgtataaattttcatggttaatgcaagccataaagtgctttgtagaatcagtggcaatatcagttgcttattttagttatctgtttgtttatatagtagttatatttgatttttaaaaatacttatgaacattttatctaatacaatttcaattgtcttctgagatttttattataaactgctattggggctatagatttgagtgctttatgaatttttactttggcaagggaaggaaagaaaagtagagtgtctttacctgtcagattttatgaactctgctttaggcctgtagattatatatgtagttccttctcttgttttttagccagaaaggcagctttatggtaaagatgacattatcttttttttttttttgagacagagtctcgctctgttgcccaggctggagtgcagtggcatgatctcagctcactgcaacctccttctcctgggttcaagcaattctcctgcctcagcctcccaagtagctgggattacaggcatgcaccattatgcccagctaatttttttgtatttttagtaaagatggggtttcaccatattggtcaggctggtcttgaactcctgatcttgtgatctgcccacgtcagcctcccaaagtgctgggattacaggcgtgagccactgtgcccagcctctttttttttttttttttaaaac

SEQ ID NO: 86910 - DNA, 1034 bp, Homo sapiens
gcggcggcgcccccggcagcccttcctctccgccgcccgcggggccggcccgggctccgggggccggcgtaacccttcgccgaggcagctgcgtgcgctaggccggagcagcccccatccggctgggaggccccgggcgctgagctcctcaggcacccagcttgggctgggggcgccccgctcctgctctttcgcccccttcctcctggacccgggcttggctgcagttttgcagcgggtccgctcgccctgaggcctgaggggaggctggggcggcacgggttagcgggccgagaggaggtttgcaccggtcctcctgcgagcgttctcctgccctgcagctggtggcttgcacccactacctcccccgccttgcggttgcacccaaacctccaacccccgggagtattgtgccgccagtagataaaatgcgtctgatgtacacccgccaccggcagccccacactcaccccagtgggtaatgcagacctttctccacccccacctcctcctcccctccaatcaggctctgctgaagattcttagatccgagacaccaaaggtagtgacacccccgttacatctccacgtaacatgttcattgtcgagggatgtctccaatagaaatgataaatgcccctgcctcacctcgaagtctgtcttcaggattcgagaccttctctgaaaaggtccagctttgatcacaactagagcatccctcccccacaacacagacacactcatacactcactcacttcctgattgccgagcagcccctgtcaccgcggatccattgtcagaaatggcttttgccaatcaaaggaatgtgcttgtgcctttggagaagggtgctttccacatccacgttttcggggtgttcctgcgtgagtctgcctttgcccccagattgttcccgtgttcaagcatcattatcatagtgtatcccttacatgcatctcccgtggaccctcaggaacacctgagtgatgcttttttcccagttgattagatatggtgtgtgcaagtttctcct

SEQ ID NO: 86911 - DNA, 1636 bp, Homo sapiens
ctcctccctttgaaaccaggctcgctttgatgctggagaactaatcacccagagagagctggtctccaggcaggtgagcgacgaccttacagagcgagccgccacctttgggctcatcctggatgacgtgtccttggtaagatccttcgggagaccgaggaggggaaggggctgcagttctcgtttaggtgcctggctccatttctgggtagacgctattaggtcctcccttctgctttgctagatgtgagacttgaaaacacggaaacatgctgaggtgaggcagtctccgtgggtttttcagttgagggttcttttaccttccccctgccacacacatttttcttatgacctctggttgtatccagatagtctctaaccactaaatgttttaccttctccaaactgttacccagagagtgatgccttgttaaccctgtttgacacaggcagaaactgcctggtagagaccagagaacagctcgggtagtccttctccctagcacagacctcccagcctgactcctgggagcttcctaacactttacagtccgaagctcagtgaagtaagctctgggaaccccagtgaaaggtgatagagtgtaaacgaacggttggattcccccaggcctggtatagggggcaagggacatctctgaggcgtaagctatcctcttgagacactatagcttgtgtgtttatatgacattggatgtcataactcagaaagcaatgcaggcaggatagcgtttcaggttgaggagggtgaggggaaggggtcgtgtttctagattctctgggaaaaaccatttggagtgatttgttcgggcagtgaggtaaagtgtttcctgttcagttctcccgtgcattgctagggaaaggcactgcctcccccggcatctgtgcagctgtttaaacagccacttgacaacacccagtgctaacccctgggcactgctccaccttgctccgcctgctggaagtcctgggggcttggggctccctctgctggcaagaggccaggctgcagccattctgtgggcccttccctcgtaattaccgttaacctgaacaccttggctgtgagaaaacgctgagtaaaaacctaagggaaaagttggcattttactagactttaaccacatactccattctggggaaatgtgggctgaccacaagaaaccctatctaaggtgtgagaagaaaattaggtttcatggggaatttgctgccctcagctggcccttgtagaaataaattttattccttaattatacatttcatttttcatgtctcaggatcagattttcttacccaaactttgactaagaaactagaaatggatcaggcgaagtacaacagctgcagttagagttaggaggttaaaaattctggaagagaatgagaccaggatttactcttcaggagaagtttggagctgcttttttaaaaagcagaggttgggagagtggaggaaatgaaacaactagaatttgatggcaaaaccaatgctcttctcttgattctttttcaataaaaattaggatgaataagtaaattgctctaggctgggcattaggaattctgaggtcccttcccattgtttgtgctatctttagggacagtcccgtcagac

SEQ ID NO: 86912 - DNA, 1038 bp, Homo sapiens
cctggggcaacgtagcaagaccccatctctgcaaaaaatgaacaaaattagccgggcatggtggcacacttctgtggtcccagctacttgggaggttgaggtgagaagatcgcttgagcctgggaggtcgaggcttcagtgagctgagattgcaccactgcactccagcctgggtgacagagcaagaccctgtctccaaaaaaaaaaaaaggaaagaaaagaaactgaaaaaaaaaaaaagcagaagaattgatagtacactttccaagctataaagcattatttattaggtatccttcaatggatgatttagcactttcaggaatggggaaataaatagccaggttgaaaagtgactgttgtgtgtcagagagggccttctctgaggatttggcatcaagtttgattgtattttgtttttatccccttaggtgtgagagggtccagcagaaggaaacatggctgccaaagtgtttgagtccattggcaagtttggcctggccttagctgttgcaggaggcgtggtgaactctgccttatataatggtgaggcatggagggacagtgggtcactgcactttcctaggagttttctgttggtctgcatagcccatgtgacactcttgatggtagctgccgtcagtgaatgtgtttgtggccaagagggctcacctcctgccatttcataccacaggactgcattgttatcagagcccctgacctttcagtcataggttctctcagagcctgtattcaaaaagagcttcccagcccacttcctagttggatgtgtccagtggcttctgtcaaggtgaagtgaagccgcaccacccaaatgctgccgcacagtgtctggatttccctggctatctgaaatggagatctcatttgttctcctctgcttgcatgtggaataacagcaaaggctgcagatctgtttgggtgaccttgtcctgaacaggaacttttgctgtgctgaattcgggtagtttcagagaaagtatctttgagatgcattgcccagcttttaacagtgta

SEQ ID NO: 86913 - DNA, 1102 bp, Homo sapiens
gatccttcaccaatgttacatgaggaaaaaaacaaaagcaaaacaaatgaaaaactgaaatcagaatcactaatattatcaagtagggaaacaaataaattaaaatctagcagccatcagcaagagtacagcaaagacaatgctgtaaaaagaaacaaagaaaattgctagaaaactgtatgcatcataatctttcaaaccagcaaaatatgcttctgcataaaatggaacaacagaattttttttcctgtaaagtatagaaatgccaagttgttttctgactattgtggataggtaaaatctgtatgtaattaatggtaattctactgaactattacagagtgggccaggaacacatttatggattctggagatgtgtactgtaattctttgattgggatagtgtaaactctagccaaaaaaaaaaaaaaaaaaaaaaaaaaaagaacacagaagtacaagacaaaggcgaatgagacttctcttatatctgagtaacatttagatggaaatcaaatttaaatgcagtccactctgctttttgaagaggctttggttcagctcccaaatctcgattgcttgacgcagtctcctatgagaatactcagaaggtgtcttcttaaacaacaaacctatttttagtggtggagccgctcttagtagctgtgtctgcgtgggactgataaccaatcactatctttggaggaagtcctaacctttccttgtataccctccctatatgtgtaacagcttctctgttttcacattcagtagtccatattgctatcttatcacctttagctctaacattaacaacagcgccacatacatcatcactgtagtcatcaaaagattctccaataaggcacagaagtgtctctagccaaaagcgatcgaggtcacttcgtctctgctgtttgttcaatgtaattagccatcgtcctccccgtttgtttttctcatcttcccacataggctcaataccatccttaaaaagtgagtagtcacagccaggcattaaattactagacaactggatatggttgtacagagcccaaaagtcttcaacagtatcaaacttggagatcagccacaagtttgc

SEQ ID NO: 86914 - DNA, 1102 bp, Homo sapiens
ttaaagacagagaattctacaaacagcaagagcaggccaggcatggtaagtcatacctataatcccagcactgtgggaggccaaggaagggggatcccttgagctcaagagtttaagaccgagatcgatctaagatggcgaccgtcgaaccggaaaccacccctactcctaatcccccgactacagaaaaggagaaaacggaatctaatcaggaggttgctaacccagaacactatattaaacatcccctacagaacagatgggcactctggttttttaaaaatgataaaagcaaaacttggcaagcaaacttgtggctgatctccaagtttgatactgttgaagacttttgggctctgtacaaccatatccagttgtctagtaatttaatgcctggctgtgactactcactttttaaggatggtattgagcctatgtgggaagatgagaaaaacaaacggggaggacgatggctaattacattgaacaaacagcagagacgaagtgacctcgatcgcttttggctagagacacttctgtgccttattggagaatcttttgatgactacagtgatgatgtatgtggcgctgttgttaatgttagagctaaaggtgataagatagcaatatggactactgaatgtgaaaacagagaagctgttacacatatagggagggtatacaaggaaaggttaggacttcctccaaagatagtgattggttatcagtcccacgcagacacagctactaagagcggctccaccactaaaaataggtttgttgtttaagaagacaccttctgagtattctcataggagactgcgtcaagcaatcgagatttgggagctgaaccaaagcctcttcaaaaagcagagtggactgcatttaaatttgatttccatctaaatgttactcagatataagagaagtctcattcgcctttgtcttgtacttctgtgttcttttttttttttttttttttttttttttggctagagtttacactatcccaatcaaagaattacagtacacatctccagaatccataaatgtgttcctggcccactctgtaatagttcagtagaattaccattaattacat

SEQ ID NO: 86915 - DNA, 1092 bp, Homo sapiens
ctctcttttcccccgacattgcaccctcgctttaaaagataaacttgttcagatttcccattccaactggccaagcgaactacctcctgtctcttccccacctcctcaccccttctcccttctctcccagcctccccttccctagcctctctctgcattctgaggctggggctggggcaatcgagaggcttcaatagcatgaattcagcccccagcccgggctatatttagcctggtagctcagacactggacaaagccacttccaagaggctggtggggacagagttgagaggaggctgcccttcctgcccctttcccttcctgatatggataccccttggttgccctcctggggttaccaggaatgctgttcacagggcatgggctaggactttgtgtgcactgcatgctatttctagatcatccgctgggaagggagttctgagccccctgccccagcctgaacgagcacattctgcagtgttctcctttcacttcctgcccatgcatcagagtcacttgggagctttcaaagctatggatgcccaggccccacccctaaagattctgatttaattggtctggggtgaggccctggcatctttctttttctttttaaaacctcccctaggctacttgaatgcactgccaggatggcagaccatggttctagatccttaccactcaaagtgtggttcctggatcagcggcatcggcatggtggggaaggcagggcttggcttgttggaaatgcacattcctaggccccatcccagcctgctgaatcagaatcttccttttaacaaggtccccaggggattccagtgcaggctgaagtttgagaatcactgctgtagagcctcacactgtcacgggcaagactccagatctgtgtctccaagggttttggtcaggctggagcagtgaagggccctggtgctcaccctgcctgtctccgctttcttcttaggacaagattgtggtttcttgggatttatatcctgtgggggatggctgggtccatttctcccaggcccagatggagccaatctaaattctcaagtttcggttagctgagagtgtcttacgtg

SEQ ID NO: 86916 - DNA, 1017 bp, Homo sapiens
tggcgtctccaatggggagcccattagtcctgcttagggcagcacctaagtactgtggctgataaatataacatgagcccatcgattagaatcctcctagtcctacagcagctcggctccctaatggctcccctcccctcagcacactgactacccacctctcaccccccaccccaggctgattttctggtttacttgaggctgtggggcaaacatgagaggagcagaagtgaggtgatgggtgcaacacccagagcccagtcaaaggggccactgcttggagacaggctggactggtctgggccctgaggcagcctggaagcccctcggtcagttaggggcagctaggggaggagccgcctgtgagttcccggggccccggccctgcggtaggacatggagcaaggaaggcagagggcccctactttctgtgaggcgcaagacacagcacctgcccttgggggcccttgggggctctcctggtaactcctcagagaaacctgcagtgatgccagctctggccctgtcaccacgccctcttctccctggcatctcctgcccaagcccccgctgcacctgtcccagcccagccaaccctctctgtcttcatttcacccgtctccagggcgtccacatttcctcatcagatcagggttctgagggcaggggctgtgtctcctgcatcagcttagggcccctaaggggtagggactgcttccccagggtgggggctctggaagtcatgaggcttttccccccaaaccaccaaatttggactgagaactgcatagggtagggtctgccgcaccccccgcccccaccataaggtaatcaaaccaattaggccttcagacttgttaaccatcagtgctgggtggaagctgagacagcagagtgagacagctctgctacacctccccccagcctgaaacccctcgaggctctggcctgctgctcgaagacgtctggaagggccttggcaagaggtgcaggaagagctcctgcctgggcaccaga

SEQ ID NO: 86917 - DNA, 1285 bp, Homo sapiens
ctgtgcttgggccagcaattggtcactatttgaaaacagagtttgccccatagcaagcagccccacagagactggatgtggagggtgtggaggagggtgccagttagagcagtgaatcccgccacagtcccactgctgctgtactctcgcaggggtctggtctttgggttttgggagcctagcgcttgctacctctttacttttgagatggtcctccccaggcacaccccagagaagagaagtgggaggcttcagtcccttgcttacatgcttacagggtggagggaaggtgtctctggtgggaaggagaaggatgaagaggaaggaaagggaagacagaagtgtccatgaaaaactcagtagaaaggctcatgagaggcaggatattggctatttggggaggcacctctagaaaatgactcaccctcccttggttcttgagtggccccagggaggcatcaccatctccctttttagcatccctcccatgggaagggagaaggaaaaagacatctactgtccaggcagagccagtcagactcctctgagcaatcctggagggcttccaggaggagatgagctttatagaagccacaggctacctgggagggagatagtacaggcagagaatcatagggagagaggaccacatcccagggtaatagctgagaagcaggagacagcaaaataaggaaaggcagcgtgaccagagtggagggggcattgcaagggaggcaggaatcaccctgttgtattaacaggtctggttgtgtcactctctgctcagaaccgtgcagaggctctcatcccactcagaaaaaccacaaaccatcctccctgctctcctctcctatgcccctcactgccactcccactgctgaggccatgttggccttcttcccagtctgcatcgcatcgcatgcttcttaggctgttcctctgtctggaacctccttccctacccagctccactctcactctctcccttcctgcaaagctctgctcaagtcttgccttctgacgttgttatgtaaaactgcaacacttccctagccccattcttggccctcctgacttccttcaccttgcttttttcccctagtcacggaacttataactttctaacatcccccatgatttatttactctctcccacgagaaagcaagctccgcagggcaagaataatggtctgttgttttgttgacgtgtcagcacaagagacaggtcctgacacatagtaggtgttcaacaaaaattggttcaatagctaagaggggtagaggc

SEQ ID NO: 86918 - DNA, 1034 bp, Homo sapiens
gacaccccagtttagcatggtgcccggctggcaggagggctcttttcctcttttgcagactgttgatgcagcctcctaagtaccctctctgcctcccatcttggctcctccagtccaccctacagtcttcctaagacactgactgatcggatcctctgactctgctgaaatgcctcagggactctccacagctacagcaatgacttcccaagagtgccctggggcacaacagtcccaagagatgctcctgaagaaacagcttagggccaaaataaatgtagaaaatgctctttactgaagctccccagcccttggagattcacatgccctatgagcataatcagggatctgagaagtcctgcaaggttagcatgcagccaggttagcatatttgatacagttttccgaagctttttccatcacaggcaatctttttgcaagcaatgtctacaaacagcccaagacatagtcccacagaacatactttgggaagcagtgagctgcatggtagagcctgaagttcagtcggggaggggaagggcagcggttgtgtgatgagtccctgcccaagggaacatggtctgtgggagactgagatggctcagggtgcaaaagggaaggtgctggctgtgtgcagacatgacagagacttgtgggtcaggaaagtccatcagcagctctcctctctgccttcagtctcttcatctagacacagatgtcctgggcacgtgtgtgtttctagacctggcacatcctgagtgaatcttggcctcttaatgaacccagcagcctcctgctgcagagtcgctgagatgctgtgcagttatgacatatcctcccaccacaaaagaacattccagcttgtccaggggatggtcacggaggccagtgctccaccggatccccagcagcaggagccttctgtggtagaaaaagcatgggcatcggaggccgagtccgggattcccatcctgatccatcactgactaggtgctgtggggccttgggtaagtcactcaatctctctaagcctg

SEQ ID NO: 86919 - DNA, 1069 bp, Homo sapiens
cttagcaaatggagtttgggataggtttcagctctacttgccccgttggctgggagccctgtgcaagctacaacctgtccaaccattcatgacatccctgttggtaggccctccgctgggcctctggccaccttccccatgtggtatatccttgggattccaggagttgctgtaaccccaggatgaactttgcagaaggtcagcagctgaagctctgacctcacacccccagcagcctgcacgggcacactgtccctcacttgcctttcccctgtcagctttgatgttcctaacgcctccctggtgagctcatcccagcccaggtggttctaatagaaggcagtgggaggagggtgtttgattccccggaagaaccccccccaacccaccccagctttctcttgccagtctgaccctccgatctccctccatccaggtgtcccttggaggtgccaaggaggcatgccccacaggcctgtacacacacagcggtgagtgctgcaaagcctgcaacctgggcgagggtgtggcccagccttgtggagccaaccagaccgtgtgtgagccctgcctggacagtgagtagagggtggcgggcaggaggaggggagaagaatgggagggaggagaggggtgaaagggaggggcgctggggagaagcatgcccagtagaggccttataagaccaccactgtaaggtcatcagaagtgggtctgacccagtgtaggaggcgcttctcccagattcgagaagctgagaatggagaagggaagtgtgcagagggaggaggggaaccccatgggggatctccaaggggtgcccattcccagctctggagaaggcagaggcttggtagaagagtgtggctgggcagggaggagtagctgatgctaagaccagctaaaaatatcatctgcactgcaaaatcaatggctgccacttatccccggtgtgtttgggggaagggagaggaggatcaaatcctggctgccctgaaggctgaccttgggggatcctgggggtgtggctgttcctccctacaggccaactcttctccagctttgacca

SEQ ID NO: 86920 - DNA, 1049 bp, Homo sapiens
caggaggtggaatagaattccaggaccatagccccagatggaagggagcttagagactgtctctcttaatagccccattagataaataaggaaatcaaggttctgagagaaaagggggctgggccagagtcacccagcaagtcagtggcgaagctgaaggagatgcagctctgtgggcccacaggccttgctctttagcatcatgacatcatgcacgcaatcccagctgtgcataacagctgggcacaagagcacctggagccagggcggggacacaggaagaacacggcagtgggttagagctaaaagggaggagtgggggaagtgggtcctcactcctgtggccttttctcccagagatccctggccgttggattacacggtccacacccccagagggctcggacagcacagcccccagcacccaggagcctgaggcacctccagaacaagacctcatagccagcacggtggcaggtgtggtgaccacagtgatgggcagctcccagcccgtggtgacccgaggcaccaccgacaacctcatccctgtctattgctccatcctggctgctgtggttgtgggccttgtggcctacatagccttcaagaggtaagagagggcacggtggcgacagagaggggagatgtttgccctcaaggaagactttgctgtgaccttgacctgaaaacatacacacccttttaactcaaccccaaaccaagctcatcctcactcatcatctgccgccccactccagggtgcagcaggtcagcaggaggtgaggggagaggatccacctgtcctgtcctgtcctctcctgccctgtcctggctccagcccctcccactcccatgccgcaccactccctgactccccacccccaactgcttgtgtcctcatccccaacctccttcaccccacagtcacctgcgtgtgcatatgtctcttccccttcgcttgtcacactgggaatgctgtggcacccacatccaggaatccaggatgtgcacgaactcccagaaggcattttaaagctttaaatgcattt

SEQ ID NO: 86921 - DNA, 1083 bp, Homo sapiens
ctctgccatgattaattgctgggggggaagagaggagggatggggatagggattgggctggagtgacaggaggaagggacaacgagtccccccaggtgccttcacttcctggtgccccacccaggaccttgtcttggccccaggcctccagatggggaggagcactgcctcggcccttcttgggtctcaccccagtgcccactgttggggaaaggagttcaggggtaggacctgactctcctctggtttctctgcagccctcaagggtgacggaggcctctacagcagcctgcccccagccaagcgggaggaggtggagaagcttctcaacggctctgcgggggacacctggcggcacctggcgggcgagctgggctaccagcccgagcacatagactcctttacccatgaggcctgccccgttcgcgccctgcttgcaagctgggccacccaggacagcgccacactggacgccctcctggccgccctgcgccgcatccagcgagccgacctcgtggagagtctgtgcagtgagtccactgccacatccccggtgtgagcccaaccggggagcccccgccccgccccacattccgacaaccgatgctccagccaacccctgtggagcccgcacccccaccctttggggggggcccgcctggcagaactgagctcctctgggcaggacctcagagtccaggccccaaaaccacagccctgtcagtgcagcccgtgtggccccttcacttctgaccacacttcctgtccagagagagaagtgcccctgctgcctccccaaccctgcccctgccccgtcaccatctcaggccacctgcccccttctcccacactgctaggtgggccagcccctcccaccacagcaggtgtcatatatggggggccaacaccagggatggtactagggggaagtgacaaggccccagagactcagagggaggaatcgaggaaccagagccatggactctacactgtgaacttggggaacaagggtggcatcccagtggcctcaaccctccctcagcccctcttgccccccaccccagcctaagatgaagaggatcg

SEQ ID NO: 86922 - DNA, 1058 bp, Homo sapiens
tcaggaaaaaacagtcctttgcagggttgtctagagctgggagaaatccccacaggtcacagtcgaagtcaattccttcttgccgcattcccacactggcccacttttcttcatcacaaccttctgggcccagccaaccccatgtttgcagggaaggggaggatgggggagcattcctccacgtgtaagcccttgaagacagacgccagctccagcctcggtcggcagtccttggcccgccaaacccgggggcgagtgaagacggccgagcagacctcaattccctccgatgcttctctggcagctgccccgggcagtatccagtctcagcccaagagaaaaaactcatggagaaaagtgagatttctcctcctgtgtgtgtgtgtgcgtgtgtctgtgtgttgcaaggtgaggggtccttggtccctgacccctaggctgattctaggggccagtgttagctccgggtccatgtcgggatggagggcagcagactggagccatgccactgatgtcacacaggcatgcctgagagggacaggcagagggaagcagcaccctttccacgaaccccaaacctgactccatcatggaccaggccctaggcaagcatcccatctccacgggtgggcaggcagtggggaaggggtgggggtctggagacagcgtggaaggcaaagctgacttggcttcaagccatttcccagaaggtcacctgccaccctcccctcgccctcaggcaaacctgaggcccctcatttagagaaggcggtgccagcctgcacttggcctccccgttgctgtctggctttgggcgaatcatggcctctccctgggcctcactgacctatatccaaaatgaggggggtgggctgagcttcgaaaacccctcccagctctgacaagcctccgatcctcttcatcttaggctggggtggggggcaagaggggctgagggagggttgaggccactgggatgccacccttgttccccaagttcacagtgtagagtccatggctctggttcctcgattcctccctctgagtctctggggcct

SEQ ID NO: 86923 - DNA, 1038 bp, Homo sapiens
accttcttttcatgtctaagaaaacagacatccatggaagtgaggtggcatgcccaaggtcacagagattacatttccagccactgagcaaacaattgctgagcatctaggaggccccagacactgtgctaggctaagcctagtatggaaggtaggatttctgttctattaactcagtctaatggaggaggcagaaataaaccagagagcccgtagaactgaggactaaaaagaagccattgaatttagcagtaaggaggtcaagggttaccttcgagcagtttcagtcaaatggtggaggcaggagccaagcctgacaaggaggtgagaaaacatagattgagaataagctcctctttccagaagtttgaaagggagagaggaaggggatctctcctactcttcaggatttgtatctcaatctagtcaacacatttgtttttgtctagaagtaatggtgtacaggttgtcctataaacgatggacactttagtaagtggtatttgttatgaaagccatgttgtagaacaactgtagctttaagttgagaagaaattgccttcaacccttacacaattttgagaaggatttcttaaagacatgtttttatactttttttttttttctttttttgagacggagtttcactcttgttgcccaggctggattgcaatggcgcgatctcggttcaccacaacctctgcctcctgggttcaagcaattctcctgcctcaggctcccgagtagctgagattacaggcatgcgccaccatgcctggctaattttgtgtttttagtagagactgggtttctccattttggtcaggctggtcttgaactcccgacctcaggtgatccgcctgcctcagcctcccaaagtgctgggattacaggcatgagctaccacgcccagctgacatgtttctttactttttaacctattcatcttccaagtaaacatttgcttcagaccttcaaatgttttcatgggccagtggtttggttcttggtgtgctataaaggtacaccattcagttc

SEQ ID NO: 86924 - DNA, 1918 bp, Homo sapiens
cagatcatacaactattgaatgccagatcttctaatggagtatcctgaagattacgtaattaactggaggaagttccatttctgaaatgtttaggtacaaaactgaaagtaaagcttccttcctgtgggaatagcaagaacaaagctctggaaaggtgcctctgctggcctgttcttcagaggttccagaaggacaaaccaggcttcagatttgctttcctcttcattcacagacagctgtgggttgggatgctggtgagttcagggactatgccctcaggaggacagcagtcctggcacctagcttctgtcaggatgaaggtctcttctgggatcttcaatatttatggaatttccaacttgggctttactgtgggtacaaagctgttgggatttcaggtacaggtaaagctactggatgcttctgtcattatttcattctttctggacatgtttgtttttgttttaaatgatacagttgaagccatctggttatgacaacatcagagccccagcatactgttcataaacctcccactgccaccacccccctcccttagctcccccacatctgaaatttaattcaagttaactccacaatctggggcatgagctgtcactgcagagatgtccgtgccagtgaagcagttggagatttcaattccacgaggatatggcttatttatcaaaacagtatttcgggcaagtagtttcgcagaaccattggagttgcagtttcagttccacatagaatatctggcatcatccccatctccccttcccctgtgttgtcagcttaccccatatatccgaccacctatggaaaattttccccattccctatgtaaagattaaagctctttgcattgttactaggcatctcaaacacctttgtgggttttaacaatttgggtaagagatgctcctcttttctttttcactgttaaagccttttaggtcttgaagagctttctcttgtattttttttaattccagccaggcacattgagatctttcttaggccggaagatccctggcttgaccacagctctgcacattcatctttaaatctggtgtaaatctattgtgggatctccatattgtatgagcctgtgcagatgaaaggaaacagcttgtatgtttatgagcagaacaacaaacagagggggagttgagctgcactttgaaactgactgttgctttgttcttgctcttcaactcctataaaagaacaactaaatccccccaaaatgactgtatcaaagcctttggtttatctttgtcaaagacaaattctgggctggagcccaaccttattttccacaactaattatctttttaatcagcctgagccctgtatgtttcctttatctcttgacttgtcactgaactctgccctacatcatttagattcatttctaatggcttgctgactaatctaacattcaggtgagtatcgttgggctgctctttatgtacgtgtatgcacaaggtgaatgcgttttccttcttttaatttcagaggtgaccgcgccatgttggggcctttgacccaatagatggacacctcatggagacagtgagcaggaaagcaaatgtaggatgatcagtatttgggataatgagttgggagaaccagaagctttgacctccggatgagaacaggaacttgaatgttgttgactgatgggatctttatgctgctgagccattagcaagatgatccctccccctctgtaaatcctatagttgctggagtagaaagtggcatctggaatactgtttggtcttgatttctgcagctctaggaaaaaaagaattttagacttgagggaattcagtgcaagcaactgaaatgattaaggagttgaaggggatcaactccaggggagaaatgttacgaagataaaatatgtgt

SEQ ID NO: 86925 - DNA, 2083 bp, Homo sapiens
gatattaaccattgaatgaagtatggttatcctcccctcttttttgataatcaagtaggccccaggctctgatctgccctgtggttaaaggctggtgagtggcaaagccaggcagaagctcagggcttctggccgagggagcccatgctcctttttatgactagcatcaccggtgaatataaggaacataggcagtgttgggggcctggggaacattctgctttttgtttttgagaatatagtggctcaaagtcttggttttcagatgacgacagccacaggcaagtcaccagtctgctcattgtctaacaagcaaattcttatgcatattaagggttcttctgtttcttgcattgacaccctttatacctaacagtggaaaattaggctatctaggtggctgttgaattcatcccttgctcactccctttggtaacccatttctccacatttctcctagtcatgcttcggatgtcttggagacctctgggtggaagtcaatggtggtgtcacatccccacttggtggctgaggcataccgctctctggcttcagcacagtgcccttttctgggacccccacgcaaacgcctgaagcaatcctaagatcctgcttgttgtaagactccgtttaatttccagaagcagcagccactgttgctgccactgaccaccaggtagacagcgcaatctgtggagcttttactctgttgtgaggggaagagactgcattgtggccccagacttttaaaacagcactaaataacttgggggaaacggggggagggaaaatgaaatgaaaaccctgttgctgcgtcactgtgttccctttggcctggctgagtttgatactgtggggattcagtttaggcgctggcccgaggatatcccagcggtggtacttcggagacacctgtctgcatctgactgagcagaacaaatcgtcaggtgcctggagcaaaaaggaaaaaaaaaaaagaaaggacattgagttttaacagaagggaaaaggaaagaagaaaagatttttgcagaatttctcaaaaatcagtttgtggattccagtagtatttatattgagagaaacaaattttagtccttctaactgtgctaaaacttggatatttgtgaaaactccttaccaccatacaagcatcagaagagctctcttgttgttagcacttattgtttgcaagaacagaatacatccttttatccttttatgaaaaatgacaagtgaaggcaaaaggggaaggttatttgatctggaagatgagtgttctgatgtggtggcttttgcaaaaatctttattggtgttgaaaactggaaaaaataactcatccagaattcatattgtcttgacaagaactatggttctctgtttttagatattgtggaaaatgtttttgggcatttttctctgattttatttcttctcccccacccctttttctaaaaaacaaacaaaaaaaaaaacacacaaaacaaaaacagaacaaaagaagagagaaggaaattttatcaattaaaaatgctgtgtgataaaatcccagcccagattgctcagctgtttgtacctgacttgccgcctgcataggagccagttctgttccttctgactagcccctcttcctccaggggagaacttccaaatgttaatttttttttttttgaaaatataaataattactattttgtactgtgtggtatctctggtcttttgtttcactcacctgccttgtctcttgggtctgagtcccttgcttaagggattttgaagtcctagttttcagcttgcagagattatgtctgaaatgcctaatgagtcgcagggatttgttgagactccgtaatctcaagttctctttgtgagctatcagcatctgccagtctcttgtcctccctgagtatctcacagtccatatcctgatgagggatcaggcccctacctctgccaaggcaagtaatggtagtgggcttttaaactgccccccgtatgttttaagacctaatccccacctcccttcttctaactaaatataaaaagatccaggggacataaatgtggagattaaataaaggg

SEQ ID NO: 86926 - DNA, 1061 bp, Homo sapiens
tcttcaaaattatgagagaattaatagcttaatagtagaataaattgtacttcatgacacatttcaatttgagaagtgttcaagtgtggaaataaaaatgcagatcttagaatcaaagacatatgatgattacctaaaataattcggtcagtgattcccaaaataaggtgaaatatcaacagatattaggttggtgggaaagtcttatgaaaaatactgagtttaaccaagacaaatagttgctatcttactgcaggatttctcagaacatgtagcatattaatgttactgtgaattttctaacaggaattatgatagacagcatttctccaatttagttaaccctggaatcctttttctcaaggatcacctgcaagattagtggtccccaaaacgcacattgggaaacggactttcattgtttaggtacatcagagagagaactcaatggtctgcccttctaggccctgcggtctgtggaaacatgacctgtggggaagggtgaaagaattggtgtttaccctgtgggagcttttcctgtgttggcggacaagtagagttggcgtgaggatgggagaagggcgtagatcctgccagcagtagaccctgtgagaaagagggttatctgccaaaagcacctccttttcctgctgtgatgctgcaatacccattggagggaaaagtgggctctggtctaaggacacaagagccttccagggtttgctcatgggatagtctcctacctccctttgtgcctgaggacagaggaaagtgcctgtgtttatagtggaggttttatctttattgatcagcttttggagtgtatgtggaggatggggcaggtaaatgccatcagtgctcctgatgaagaagattggaataataaccgtatctttcttgtcacttttcaagactttatgagtacaatgaagcaatgtgaaaattccatacccttccagtctacctcaattctgaccaggggaaacttgcttttaatggagacagtaagaaaatattcactgcaagctctgggaaagtagaagacacaatccaataactgc

SEQ ID NO: 86927 - DNA, 1024 bp, Homo sapiens
agacatgtctgtttagccaggtatctagagtcagatgatttcccactttagctgcagattcattttcctaattacttttttcttactaaaatggagtatgagtccctaaactccttctgagagcagagagaagtggtgtagaagtattatgggtaaagcagattgacttattaaatgaggctgatcatccacacagttttgggtgagggtatttagacatatatgtttttactcagaaaactgaggaaaagaaaggtgaaaaaatcgaagagttgttttgctgttatgtttaagaaaacaaagatggaacatgtgatggacgaaaaggctattataatcaagccgggcaaagaaattttccattaatgttaggttttaaatgatacaaagttctctcctcactagagcttaaaatcatgaaaatagtttagtttagggattttgttctgttggaatgtttctcatattcagtttttctggcatagaatcgagttgaaatcaatgatgtggagcctgaagtttttaaggaaatgatgtgcttcatttacacggggaaggctccaaacctcgacaaaatggctgatgatttgctggcagctgctgacaaggtaagataagaatagaaaaataatcaggactaggagttattgtgacttcttgtgtttcatgaacaggattctatgttgcattgtgggtaaaatgagcatatatcttggtttggccaagacggtcctggtttacacatattattccaacacaattattaatagcacactttttattctcaaaagtgtcctgttttgaatagtaaactatatgatcacctaactatgggaaagaaggataagtttgacttctacctctcctcttttttccatctcaaatttaaccacagtgatagtaaagattcaaataatactaacatttggattgtgctttataatttacaaaatgtttttgagtttattaatgtatttaaactttatcagtaaaacagccctttgtatccatgtggactcaacca

SEQ ID NO: 86928 - DNA, 2132 bp, Homo sapiens
acttcctcaactcttgcttcttacctcacctgcattctcagtggaggtgttcttcctcgtggacaaagcagactttttttctacctctgctctgttttatatcccatcttgccttctcagaaaccttactctaccggttatacccttgctatctatctagtatcttcactatctctctgttattgcctcttcaccttcagcctgtacaggctccaagcttctccctctagttattctctctctcttttccccagaactgagtttcttgagttagcatattcactttctacttcctttcctcccacttatcctcagttcacctccatgctatgaaagcagtttttcaaaattacatgatctactggttcctaaatttgaaggactttagttcatatactaggactcctctctcctgattctctggttgcttctgatgtgtggtctccttacttcttcctcaccaatccctttatacattggtgagccctgaggatctgcttcagttccgttttcattccacttcttctccctgagtgatttcatttattcccgttgcatcagctgctgcctatttaccgaggaccctcaagacctggctgctttggacccttccttctttatgaaaagcaccgggcctttagtctttaatttctgaaatatatttatttagttctctatggtctgtaacccttctgaaataagaacaatgagaattgatatcctttcggtagaaattaaaatactgaagttcagagggttaagtgatttgcccaagaatatgtggttagaaaatggcagagctaggccgggtgcagtggctcatgcctataatcccagcactttgggaggcataggtgtgcagatgacttgaggtcaggagttcgacaccagcctggccaacatggtaaaaccccatctctactaaaaatacaaaaattagccaggcgtggtggtgggtacctgtaattccagctacttgggaggctgaggcaggagaattgcttgaactcaggaggcagacgttgcaatgagccaagatcatgccactgcactccactctagcctaggcaacagagcaagacttttgtctcagaaagaaaaaaaaaaaaatggcagagctaaaattagtgctttctgacataaactataggccaaaatttccagttctctgttagctcaaaacctttctactatatattttgtccattctttcactcttaggtaatcgttggatctcagctttcaccagaacccctgatttatttgacaacatgaacaaatttgagttcttagccattctattacttttcgtggttgagattattatttttcatggtgttcattggactagaatgagcatgagttggagcactgtttctcaaccttccaaccttcattatccctgcctctaaggagaaaaactaaatttaaattctccctgatgagagaaataaaatactaaggaagaagattttatcaggtagggttgtgctttaaagggacacaaatcattataatatctaaagtttctttccccccccacctctttggggcaatatcatctctgttaggaatgcatagcttagaaaaacagacagtttgccataggtgagcatgcgcttcatctggttagtggatgccattgagcccagttcttgaccttcttcctgtgcagtccctggaggtgcagaaagtatggtgtcagttccaacaaaaacataggtattagaacaccctgcttgatcataagggaccttccatttgaaccccaaatctatacagagaacatagcattatcatccaacatagataagtaattttcttgaaatgtgaatggttggagtagagccgataagttattttggaagtagtggtttcttattttcctttatgtattataattagttacttattgttataatatatgaagaaaggaattttgtaattctgatgtaaattgaggtagagacctttcctatagcagtaggataggttagaaaatgatctctccctcatgactggcaacaaccaagagatttcactgtgatagccttatctgcttgtttctctttgactttgtagctcgttctccggtttttagtgccatgtttgaacatgaaatggaggagagc

SEQ ID NO: 86929 - DNA, 1054 bp, Homo sapiens
gctaggtttagttctgttttcttcatttcatgttacaaggggagagaagcagtgcccagggagtcaggaaatttttcctaacattgtgcagcaaactagtgcgagggtcatgtcagctccctattttctatctctagtccgctgcactacactaagtggagctgaatgccattcacccaaggaagcacaaactcgggtcccaagttttcttgacagagcatttactttggtaatgaaagagagagacataagagtcaggagtggtggcccacccctgtggttcccagctactcctgaggctgatgcaagaggatcacttgagcccaggagatcgaggttgtggtgtgctatgatcgtgcttgtgagtagccattgcactcctacctggacaacataattagtccctgtctgttaaaaaataaataaataaataaataaatagagacatgaaggcatgtttaaattccattttaaattttctctttaataatttggtccacagaaaatcttcatgaaatagttcagcttctattgacccttttctccaattatttatattgaaaacaaatagccattagcaataaagaagcattgtattccaactttaccatatatgcctttgacaggtagataatcccagaacctctttgtcatgttgtaactaaagatgaaatatgaaataacataaatgtgaaatatccagacactaattaactttattttaattttttaagagatgggatcttgatcttgcccaggctggagtgcagttgcttaatcatagctcactataacctgtaatcccagcactttcggaggccaaggtaggaggatcattcaagcccagaagttcgagaccagcctgggcaacatagtgagaccctgtctctacaaaaaaattaaaaattagccaggtatgatggcacgtgcctgtagtcctagctacttgggagggtgaagcaggaggattgcttaagcccaggagttggaggctacagtgagctgtgatcacaccgctaccactgcactccagcctgggcaacagagggagacc

SEQ ID NO: 86930 - DNA, 1593 bp, Homo sapiens
tggcaaactagtgagtgttcttctaaaagaggtgctggctactcagctccagctaactatagctatgcatgagtaagggctgacccttgccagattttctgatttttcaagaaaagcaagaaatctagattttaacataaaaatctctttacttttaaattgcctgcttttaaacaagaaaggggatttatttgcttatgtaactgtattgacagggtataggatgggtttgaaggtagcttgatccagcaagccagtagttagagtaagaacaccatctctgccctggccctgttctccacgctcttggacatctcaggtctggcttctcttgtgcttaagggataactggcagtaccaatgggtataatctactacatgctagcaaaagtctttgagctttctctgaactgtgtggccaggaatatgtcgtacatgcaccaattgttttacgtttgcattccctgaaccaatccctggagcagggaaaatatgatccaggagtgaggatcagtctcattcagactatgtgtcatcttgcctgaggagcaggcagttgaggatacaaccatatacccactgcaaagaccaaaacgcaagtctctgaaccaccagttttgacctctgataacccaccaaaagttattttttcattcatttagtattttttggctatatattgtgcattttactactaagtgttgagagagatgtttattcttagacattgtatttaaatcctcatcattagcaaggtgtatagtaatgtatgtagcatatgcactccctagagagacactggattgggccacctgtttgagagaggtgcaataatacagataaggcttaaggatacatatgacctgtgtattgcatgtggtagaagcagtgcctgaaacccatgcatttgactaatgacatttacaacttagttgaacctattctgtctgaattttgttttgatctctccgtaacagattggcatctctaacactatttagaagtctggcctggaattctgtgctgcgtaatgataatttacttttgtctgtgcttccttcatattgcctcttttattttagtcttagaatattgttgccagattggtaaaatatctataaaagattatgtatattattatctataaaagattattcacactttttttttttttttttttgagacagagtctcactctatcgcccaggctggagtgcagtggcacgatctcggctcactgcaacctctgcctcctgggttaaagtgattctcctgcctcagcctccagagaagcagggattacaggtgcccactagcacgcctggtatttttagtagagacaggattacaccatgttggtcaggccattctcgaacttaagtgatctgcctgccttggcctcccaaagtgctgggattacaggcataagccaccgtgcctggtccacacatttcttttttttttctttttcttttttgagatggagtttcgttcttgttacccaggctggagcgtagtggtgtgatctcagctcactgcaacctctgcctcccaggttcaagcgattctcctgcctcagcctcctgagtagct

SEQ ID NO: 86931 - DNA, 1034 bp, Homo sapiens
ggtttcaccattttggccaggctggtctcaaactcctcacctcaggtgatccacccacctcggcctcccaaagcgctgggattttaggcgtgagccaccgtgcctggccactattacacatttgttaagggaaaatatgtttgtatcaactttttagaagtcttaactctgactcattaatattaataagtgcataaacctgaaacttgttagtaaaataaactttgttaatttgacatacaaggggagaaacattctgggttttttttttttctttttttttgtgctatagagttactgtctaatctttcaagcacgggaatctaaaagaaaacattaattcagtcatttattaaataagtatttgtagccttccatgtgccagacactgtctgggtgcagcagcaaaacagacaagaacctgtcttggtagagtttattttccagttagagaagacagattgtaaaaagatacaggatggtagatgactttatgcgctatagaaaaaaaaatgatgaagcaggaataggattgtggttgttaacggagggaattgctttttttttttttttttttttttttttggagacagagtcttgctctgtcatccaggctggagtgcagtaatgcaatctctgctcactgcaacctccacctcccaggttcaagcgattctcctgcctcagcctcctgagtagctgggactacaggtgtgtgccaccacgcccagctgatttttgtgtttttagtagagacggggtttcaccatattggccaggctggtcttgaactcctgacctcaagtgatccacccgcctcggcatatcaaagtgctggtattacaggcgtgagccaccacgctcagccaggaattcatttttaagggtatcagggaagacctcacagagatggtgacaaggaaagtcttagcaatggtgaaggagtgtgccctgagaacatctaggggaagacttattcagacagaaaatgacacgtacaatgctccaaggcaggaatgggcttattctgagga

SEQ ID NO: 86932 - DNA, 1009 bp, Homo sapiens
tttcatcatgttggccaggctggtctggaactcctgacctcaagtgatctgcccaccttggcctcccaaagtgctgggattaaaggcatgagccaccacgcctggcctaggttgttcctctactgtgaatcttgaggttatggtttccactagactatagtgctcaactatagtggcctattttaagtggccttataattcctaaccaaagtgacttgtgaaacagaggaccctggataaatttaaatgttataaagatgataaaatgtacaggtaagtttgattttgctctcttatttggcaattagagctttattcctagccataatacagaaaggaaaggcagcaaaatatggttagtactttttatgtgttttttcccctttatttgacctttgggctgtggagtgggagcatcttttcctttaagaagtgaaaaatataaatatgccagaggcttgctagcagttgaaagcaactgttggtcagtgagataatggaaggaaaaaaaaacaacaacaggttggagatgggaaacgtcaaggaagaaggaggaaaaacatgtttgaaagaaggggaaaaaaagcttaagtgaattcaagaaggcaaaaaagccttaagtgttctttttataatctgtctttgagtttcaggtactaaaatttgagatgattaaaagagagattggttcttagaggaataaataaaattaaggcaaagtataaggatttatggtctttatgaagatatgtcagattactgtggacattatttttatttaagatgtgctttctggctgggcgcggtgactcatgcctgtaatcccagcactttgggaggccgaggtgggcagatcacaaggtcaggagttcgagacccgcctcaccaacatgccccatctctactaaaaacaaaaaaaaaattagttgggtgtggtggcacgtgcctgtaatcccagctacttaggaggctgaggcaggagaattgcttgaatctgggaggcagaggt

SEQ ID NO: 86933 - DNA, 1046 bp, Homo sapiens
attccggaaataaagacacctttcacatcttaagaatcagagtcaaattatgtctgtgctgttttaatcagtaaagatttggttgaattgaaaataaaaggttacaggagccaagaacaaatagagttgcaaatttatctttgtaactccatatccttaggaggaatccagtttgtatagccactttaattttgttgtgaatatagactgagcagtggaattgagtagcttgacagttgacttaatttgaacagtcacattagataagactggaaagctaggttgagggaagtcaattttgtgtgtgttttctggttttgtttctagtatcgtttctgataatgaggagaatttggtggcccatttggaccctacttaatggtaactatagtgcctcaccaatatctttcttgtgctattccaatttatcaatcattattggacccaatatcctgaattacagtctgattatttttcaccaatcttttatctttcatttacccacactgaaattcttgagcccaacatctctttttttcctcacataactgtggggagatagtatgatagctaggtactgttctaaactccgctgctggcttcctgtgtgtattattaacacattgggcaagccactaagctgctttggggttcagttccttgatctgtaaaatgaaataatttgactggatattattaagtccttttatatctccagagctattttattcctttattcaccagacttttcttgtgaagcaccttctctgtgctaggcacaatacaggatgttctgggtacaaacttcttgcccacaaagagtatttagaacttccatcactttattcaaatcagcttagtcttttactctggaaaaatttagtattagcaagttttgtcaatttttactatcactgtataaggtatttgttaaaattgctggtattacttagatcttcatctccaaaaatactcatatctctactttttgtttttctacttatttatttattattgttattattatttttgaaacggagtcttgc

SEQ ID NO: 86934 - DNA, 1037 bp, Homo sapiens
cctcccaaagtgctgggattacaggcgtgagccactgcgcctggcctaaatcagttttattcgtatagcaactgttttcttctttccatctgataagttgttttttaagtaccaattcctagatctcactagacctataaaagagaattttggaatagggaaaaacatacagagaattaaaattctgggcatcctacgttaattggcagctaatgggttcttagtaacatttgttaactgccaagaaagtgacactaggaatttagagtatactggggcagttaggaaatgcttcagaacaaggtaggacttgacttggacctggaagggtagtattcagataggaggtagaacatttctggctttcggggtggtatgaataaatttgagaaaggcatatggttgtatgtatgagctgacaaacaggctagagtcaactaattggagaggagggtttgtgttgtggtgtagtggagaggtttttatgggagttatgtcccagaggactgattttatttttagtacatctgaagttgtgtagtatgcaagtgtaagataaagcagtatctagatgtggcctaattttaagcaaactggatacattgaagtctctttttacaagaaatactggagaaaggttctttatatgtggattatttaaataatgatcttcccaatacttaaatatttattttactttgtagttctctatagatagactagttgcaacttttgtggatctcagattcttttgtaatatcaaagagttcagacaaggtggtttctgaagttctttctggcacagagattattacataacttttaagaatacctggctgggcacggtggctcacacctgtggtcacagcactttgggaggctgaggcaggtggatcacctaaggtcaggagttcgagaccagcctgaccaacatggagaaaccccgtctctactaaaaatacaaaaaattagccgggcatggtggcgcatgcctgtaatcctagctactcaggaggctgaggcaggagaatcacttg

SEQ ID NO: 86935 - DNA, 2467 bp, Homo sapiens
gcgtgagccactgcgcctggccagaataaattattaaggaaaataatggggagattaaatttaggtggaggagtcagggaaggcctttctggggcattaaatattaattgggtaccagttatgtgccagatgctattctaaatgctggagacaaaaacagacaaaaatccctactctcatggagcttatattcaggcagcaaacaagataaataaaatatatggtttattggaaagtgataagtttcaaggagaaaaatacgacccgaaaaagggatagatagagaatgttggggtgggagtaggtgttgtgattttagatagaatggccagggaagacctcactaactcacatcaaaggtaatgcttgagtaaatatctgtagaagatgcaggagagaactagcactctagacaaaagaaatagcaaaaaccatgaggtatgtatgtgcctgccatactcaaggaaccagcaaggaggccagcatgactggagttaagtgaacaagagagaaagtagtagaaatgaggtcagagaggttggtggaagtccaaatgttgtagagcagtggttctcactcttagctgtttgttagaatcacctggggaactttttctactcctggtgcctgggctgcacccataccacttaagtaagaatctctgcaggtgggacttagtggcagaagagatggagagaagtggatggatttgagaagtatgttaaagaaagaattcatttaattatagattgagtgtgggggttgaggaagaggaaagtgtcaagaatgactcccaggtttctggctgaagcaactggatgggtagacgtgtcactgagatgagggtgggagataggaatgggaggagtaggtgtggaatttggagggaagatcagaaatcaggagttcaattttagacatgttaaatttgagatgcgaatgaggctaagtataaatatgttaagtaggcagatatatgagtggagcttgaaatgaaatcagagcttgaggtaatacaattttatatcatccgcttgttgatggtcttgaaagtatctaaataacatcatgtaggacaaacttaatggtgaaagaactggagatatggaaactagcctactctactaatctgaacaagaattggtgctaatttgaatcaggatagtgtcagtggctctagaaaaatataagtaggttggaggtttaaggactgaggagcctgtgtgtaacggaggtggacaataggcaaggaatgaaagataactttgagatataaagcctaggtgaatgatccgtccattagcagatacgaagctgtcggaggagctggtttgggaaaacaggtagtgattggctttggttgtattgatgtttaggagaggctgcctagcaggcaggcagttgggtctattgcactgagttttggaagagtagatgaggttcaaaacgtagatcaagaaatagattttcgtacattgaaaatgaaacactttcatttgcataaaattgattcaccatgggagcagcaacatttatgaaaatagcaacatccccagatttattctgacctgttaggatctctgtgatgtggtccttacctgtttcttttagtgttttcctttgatgaccgtgttcaagctatactgcccttctttctattcttccagcatacccagctaggtcctcctttgggcttttgcactttttattttctcattttaactcttctctccttcttagtagagggataagagggctgagaaaaattcagaagttggtgtctgggaagtggagaaagttgcaagcagatctttgctaaggtgtgggagcatggatgagcacatgaagtagaatggctgtgggagcccttgacgttgacatttggtcaacacaaagacacagagtaccatgttggtctcagtgtatcccagtactcaaatctgttgaccagagatgctacagcagtggtagttcttctccgcttggttgtctgatgatggtggtggtgatggtccacctttgaaatatgacttgactcattgctatctgtcctgccaccgccgatggaaacatcttctgcataggtgagaaactcccttcagtgaaagctatgggtaaattatttcagaaacttgctggcttgaagaaacaacatgaaaacagcagggaagttccttgcagtccactttgacatattgttaggaattacttctcattaggagcacctatgtggctctttattggtggtgttagtagtaaaagggagtaatgcactccacatgaatccttaaaaagagatttaaaaatcaacatggtattttttcagaataaaagtatttgcttttgctgattatgaaataatttgtggaaaaaaatagaaaagtataaagaaaaaagtaaaaaattaccccaaatcccaccatacagagttaactacagttaacgttttctgaacatcttattgggc

SEQ ID NO: 86936 - DNA, 1056 bp, Homo sapiens
tatttttagtagagatggggtttcaccgtgttagccaggatggtctcgatctcctgaccttgtgatccacctgcctcggcctcccaaagtgctgcgattacaggcgtgagccaccctgcccagccaatttttgtgttttgaatagaaatggggtttcaccatattggccaggctggcctcaaactcctgacctcaagtgatcctcccgcctctgcttcccaaagtcctgggattacaggcatgagccactgtgcctggcctaaattataatttctactaaaaaattgaggtaaattcttaattttttttctttaacacttttctgagtaaggaaatggtacaatatcatctctaatggtggtaaatgagtttttttcactctcattgttttagtgtcatggattttagtttattctgttttaccaacattaccttctttttgatgctcacactgtcctgtatttggcctgtgggagccctttaagcttgagctatgagtgcttccttgctttctgtcacaagaagttcctagctcactttgtatttttcccgtcctagatgcagaacccttacccttaacctttatgtatatgacattttcttccctttcagtaaattatgaggttggtgcaaaagtaattgcggttttgtcatttaatggtaaaaacctcaattacttttgcaccaacctctaacaggttatttgtctaccatatggagcttctggaaccaaattctaaaaactaaaggtgctttaattttaacttgatgtacctagtgtttgactcgcttctgtgtcactggcattgctggattctggatgttagaactcacagcttccttgtcttgaatattcttcgtgaaaggcagtatctctgaagagagcattgaccaccccgttgtccccacctctcatgagcaaacttgtttttttctaagatgaaaggcacacagaataaaatttagaagttgaaattgtgtgtttctaagctttgggatgtggcggttttattattatataaaaacatctgtgcgtctatgcacaagtatgtcttc

SEQ ID NO: 86937 - DNA, 2153 bp, Homo sapiens
gccttactttcaattctctttagtttgtattctttgatgttcttctctcaaggcttttttggctgccactgttaactccaaaaccgcatgttcttgggccttaaagtatatgtatttttcacttccccttttaaccctggcccttacagggttctgctgtcttttgtgctgtttcctgttgccatggttacagttagaaccaagagatgacacacagggaacagagaaatttggggtgcatatatcttcctgggaaagagctggaaactcacctttttttccttagaggtagaagttattgtaagactaccccacccttaggtttggggtagttgttatccatttagtactttattgatttctcgttttagagctcttcatagtagctagtttggtatttggagatgtttactgtttcctatgtccatacttagatattacttaggtagtatctagaagtgaaactattgtagtaagtgtccgtcttctcagtaggtttcggccattgggatgcttagattttttcttttttccttttttttttgagatcgagtcttgctctgtcacccaggctggagtgcagtggcgcgatctcagctcactgccacctttgcctcctgggttcaagcgattcttctgcctcagcctcccgagtagctgggattacaggtgagtgccaccatgcctggctaatttgtattttttgtagagttgaggttttgccatgttggccaagctggtctcgaactcctgacctcaagtgatccacccccgccttggcctcccaaagtgctgggattacaggtgcgagccactgtgcccggcctgattttttctagaaacattttgtctagttgaattcactgaagcctcatttaaaattttgatggcgtgcaatgcttttagattaagacgaatattgttaaataattcgtactggtgcagagccttttttaaaaaatcattgtttaaaatgggttaacacatgtacatacatatgaaacaaaattcaaaaggtacacagagagtgaagtctttcttttcttaccatcctctttttatccatgagttccccttcccaaaggcaacagtcttgtttattcatcccgagacagtatatccttttacaagcatatacacctatatattcttcacattttttgtttttgtttgttttacacaataagacactatgctcattctgcactttgcttttctcactttatttatcttggtgatcattccatgtagtaaatacagtccctcttcctttttgaaagatggcagataattccattgtgtagatgtaccatcattcagccaacacttattggacatttaggttgtttccagtgatacaattaattccttgtatgtacttattctgtgtacatgggtgtctgttggtttaaattcctagtggaagcgctggatcaatggatgtgcatttgtaatgttgttaggtattactaaatgctttccacagaggttgtatgaatttatattcctgccagcagtgtgagtctgcctgttttctcaccaacactattatcaaaatttttgatcatttgtgcagtcttttatctaagattttaaagctcattatgtagtttgttaagcttcatttcactgaagagttgtgtataaatacctcactgttttgcagattggggaggggtcatggaggattttgtttgaaaaataatgtcatgagaataaagtcatatgtctggataatagcaaatccatgacaatgctaggaagacataaaaaacctatattccaatttcttcctttaactcttagatgctagtttctctgttagtattctgtaaacctgtaaatgatttatgatctccttttgatagctctgactttaaattgtttatccaagtaaactgctgttattctggtgagaaattgaaaagctaatctagttagttgaggtctgctctcttggtacagaatactggtactagcattttttaagtctgctgatagcagaatacttcactatgagcttcaaataaatagaaaataattaaatatgtctgtgcctgaagagagcttacagtcttgttggaaaacctagaagaaatggataactttctggacacatgtagtctaccaagattgaaccatgaagaaataga

SEQ ID NO: 86938 - DNA, 1006 bp, Homo sapiens
aaaatattttactgacagggctggcttttaaaaaatgagttaatacatataagagtcgttggtactccataaactgcttgcagacctaaatcgctgttgtgaaatgcctttaactgttccgttgcccactccgacccttggcttgttacgcctctatttggtcctcgcacctcgcagcgggctcccgcgccctgcgcgcgaccccctccaagttcccgcctctttttactcaggcccctccttcctctcaaatccccgggccctgacttggccccgagacgcatgcgcactaggaaagataggcggagtcttgagggaggaggagcagggaaacccagggaggggaggggaggagaagggagtaatggggaggaggccgcgcggggtggggtctggcggtacgcgctggctgcgtcgacgtgctgacgccatgacgccccggctggtgtgtgtcggtgtgtatgtgtgtgtgtgagtgtgcgcgctccgagtgtgtgtgtatttgtgtatcggcggtcccgcaggtcccggatgttgcggacagtatgaggcaagcgcagggggacggggaccagcagctgtcgccgccgctctcaggtgagtggggggaggagagtcgagggagggggttgtcctgtcggagtggggggggggcacctccctgaagaggtgactgacccccactgtccccccaccccccgccacacacatatactctcctcagtcccatttcctacacccggattacgtggcctgcgaatgccagagccgaatcagccgtcccttctccctatctcaagcattcagaagacacaaacgcgccccctgccttcagcccccccatcatttcccagccccatcccccttgccaaatactgagctgtcgcctgcggcgagatgggtgactgcgcatgcgcgagtgtgaacgcgctcgggctgcttcttcgctgccccgggggcgcatgcgcatcgcggtgttgcagggacctgcgggataaagagccgg

SEQ ID NO: 86939 - DNA, 1042 bp, Homo sapiens
gtgacctgtggttggtccctaggtatgtccctgagacacaaactagaactccaggctccctgaattcaagttgcgttttggacctgtgccctctgagggaggaaagtgaagcccccactgggagaccctttgcctctgtctggccccgcttatcagtggaacagtttgcaggttttatgagtagtgctggtcattttccccggatgccctggcagagaaattgtcctgagtctctgtggaatcattcagcccttcccactaaaaacacaccagctgtctttgggaacagtaatctcatatatttatagagcgccttctttcccaaagctctttagtacgtgacattttatccttagaacactcctgggaagaggttgggccagaaaccagtctccccatatttggaagagggagcctgaaacccaccaaaatgcatcagctgaaggtcgcgttgcactgccccacaggagggcaggagcctcctatttcacttcccactttccagggtcagggaaccctaaccctcagtgggctaaactagtggtttccagctgtttggattttctgaaagttcccagtagaattttcaaataatttggaggtatgctggcttttaatttttttcaagtaaggacatttaaaaaaaatcaaatatcaccattgtggtttaaaaagttttgtttttttttctgagacaaagtctggctctgttgcccagactggagtgcagtggtgcgatcatggcttgctgcaacctccacttcctgggctcaagccaacctcccacctcagcctcttgagtagatgcgtctacaggtgcatgccacaacacctggctaatttttgtaattttggagagacggggttttgctatgttgcccaggctggtctcaaactcctgagctcaagggatccacctgcctcagcctcccagagtgctgggattacaagcatgagccaccactcttggcctaactcagaagattttaggaaaagctatccaacctcacaaaaaaggacccttcttccaaagaaattacga

SEQ ID NO: 86940 - DNA, 1037 bp, Homo sapiens
ttgcctaggctggccttaaactcctgggctcaaatgatcctcctgcctcagtctcccaaaatgctgggattgcaggtgtgagtcaccacattcagccatagcctagaagttttgactcttaaatttcttttagtcttgctgtattatatatgtatctatatctatctgtatctctatatagatatatttatatagatacagatatctgtaataactagtatcctggtgccattctcttgtctctgaggaagttacataaaaccagtgttctgacatgtattttatttaaagcccccattttggagatacaaggccgactaccccaccccaccacaatcattggtaagtttcatttccccccataaggctaagcccattttcttccttttcataggtcttggtcttgatgccaagtttgggaaaggagctaagaagacatcccactaggaagagagagactacctccacatcaagaatatttaagttattatctcaaacagtgacatctcttgggaaaatggacttaataggaatatgggactgagttccagtcttttttaataaaataaaatcaagcaaaatcacatattctaaaaaatgcacttggattttaacaagacagagtggtggtttttgttcttcatgccctggagcagtctatggtaaataaaagagggagggaagaggcagagctggatgttcattacccaggctgctcctctcacgggtgtggttagcatggttgagtgggcgattcctccaagaacctgaggattatagggaggaactctgtgagatcgcagaattgtgctaatggcttctgttccgatgggtgaggcttgtcccgttagagctggtcccattagaggacgggtggctgtccattagagccagagaatgtaaaagtcacttcctctcctaaagctcctgtgggcaaatatttcattaaaaaaacaaagttgtgttctgtctttttcttaggcctggtgcagtggctcacacctgtaatcccagcactctgggaggctaaggcagca

SEQ ID NO: 86941 - DNA, 1052 bp, Homo sapiens
ccacatgatgctgaacatcaacctttggtcgacattgctgctgggaatgggtgagagccagttctgctgttcttcccatgtatcaccagagggcaggctgccctcatccttttgatccctctagctgttagttgcccagaccaagggcctgaattagttccaagatgcccttttgttcaagcccttgagaaaccttcctggaaaaacctgcaccagcaggatttgtttgctacttgttactggcacaatgaaggagagtcgtgtgtcagttgtcatgggaagacactcagtagtaaaacacagggaggtacctgggaactttccctttcatgagggaaatgagacacacgtagtgctcacaggaaacagagttagctgtacactgaagacagttcaaatgtgaatgatttgctttgaaatcagtgcttcctaacttttcaaatttgggcacatgtagaaagtattttttatacagcacactggggttaatggtggaggctgctgatggctgaaggtgactaatgcgaggggcttccttgagctaaggatgtgtgggtcagcatctctacagcatctgaggatttctgcttgtaatcactttggtagaagtaactcattaactttcaagcctttctcacaaaattctctttagtttctctaatcagagaaaaatatgagaagaatcaatgatgagacgatgcaaacccacaccatacactttcccgcgtcccacctcccttgcagttctttaacaggccatgtgcaggagtgtctgtgtgtgtgtgtgtgtgtgtgtgtgtgcgcacattttgtgtgcacaaaatgcgccgtacatttgttgacatgtcttctcaggaatcctgttcactggggagctctgggagttcttgagctttgctgaaaggtaccctgccatcatctataacatcctgctctttgggctgaccagtgccctgggtcaggtgagtgcttgaaaggggatggcttggcttccctactctggcagctggttccctaagaaagactggcctggctggaagaagagggtggca

SEQ ID NO: 86942 - DNA, 2119 bp, Homo sapiens
agtcgctgacgctgggcagcagctagacggcgctgaagctccagtaaggaatttggcattaggacccagcagaagcctggccgcccgccgcggaaaagactattggatttgctctgccgaccacacctcctcccgccccgcctacctgtccgtcttcgcacagcgcagccaattggtggcctccacatccttatacgtcattattctacgcccaggtggctctaggacaccctgtggtgctctgggtcgcagttgtcctcagagttgcctgattggaaaaatctccagggcgagggatcagtctcgaggctgccggttcccctggccctcagggatggagccaaggtcccagggcgggttttctttcctaggaagtggttgctgggttctgaggagtttcccccttggcagccatgagccggcagttctggtagtgactgctgggccctgctggacagcggtcgcatgcagctcctatgaggcccctgccgccggtcggcgatgtccggctggagctgtcgcctccgccgccgctgctgccggtgccggttgtgagcgggtctccagtcggctcctctgggcgtctcatggcctctagcagctccctggtgcccgaccggctgcgcctgccgctctgcttcctgggtgtctttgtctgctatttttactatgggatcctgcaggaaaagatgtgagcgaccccgggggcgggccgacagtctctccccagcctgtgacagggatcccgggccttctgcctctggacccgggctttcctcttgtcctcctgcccggctgtcgccctcttagcaccctactacttttgcagctatggctgagcctacccagaattccagaactccaggattattttctggattcttcggacttggttattttcttttcttagctgtttttccccgcttggttctaagggcctgcgttttacaggctgagacttctattcctcaaacaggacccgagtcggcccccttttggtactcccagatgcttgcaaacaacctattcgtcctcggccttggtgccatagccgaaataccgtctcctcctgcctggggtacctgatttcactatctcgttctgcatgtttcctctccgtctttttcgggtattcttttcttaggctttggaatcagtaggctgggatgtctagtttctagatccagtaaaatcagccccttttgcaaatgagcctagtggtccttaacaaactctgcctacatccagagaggcaagataattttaaagttttcagtggctcgggatatattagatgacagtgagtgaaatacactaatttctccctcttttctcatgcatttcatttctagaacaagaggaaagtatggggaaggagccaagcaggagacgttcacctttgccttaactttggtcttcattcaatgtgtgatcaatgctgtgtttgccaagatctgtgagtacccagatagtaatttgttgggtaccccaccaccccaagttccctcagtatgctgggcattaagcattgattcaaccttaaaggctaactcatgatctccaccccattttgtacttacacagcctctctgtgaagtctgtaaaactaatgactttgaagtggagtaaaatattatttccccaatttttatcagcttctgagttagaaatgttcagagaatgggtcttctatattccaaatccccattgaaaatacttaaaacatttttttctttccctttgagtttcttttgtgtgtcagcttcaagcatgctttgagcattctctctttgttccctggggactagcagcagagctgactggtcccttgaactgaatgaggcccccacctccaccctgcatgtggtcttttgttgggcttaggtagaattggaaagatgaataattttcagagatttcccagtgtaacaggacagaaatagcttgtgtcttgtttgacagacaagttcctttcatgtggcttcagctttgcttagtggtccatcctagccccaccaggtttctcttgtttttttttttttttcttttcttttctttttttttttttttttttgtcttctcccagtgatccagttttttgacactgccagggtggatc

SEQ ID NO: 86943 - DNA, 1031 bp, Homo sapiens
ttgcagccagcgtcccatgctcggtggccccagaaaagtcagtgtgtaggcctcagccacttcaggtccggcgtacattctccctggacaccatcctcagctcctaccttctgggccagtggccacgagatgctgatggggccttcacctgctgcaccaatgacaaggccacccaggtaatgaagctctctcctgatgggataagggataaggatggggcgggagagctggctgaggaggcctttggtcttcctcaagtcattgcgatgatttgtcttgggttttggtcgtacatattatccatgtaatgttttatcttcttaagacagagtttccttttgtcacccaggctggagtgcagtggtgcgatcttggctcactgcaacctctgcctcccgggttcaagtgattctcgtgcctcatcctcccaagtggctgggattacaggtgcctgctaccacgccctgctaatttaccaccgtttttctttgtaaacttatatggaaatgagtttgcattccacctgcctggtggaagagagaagtcaatctgggtttttcagtttagctttgagtatttgtgtcggggtaatcaacagctgactttagagtttattctagctttttaaaaaatgagatttaggctgggcgcagtggctcacgcctataatctcagcacttttggaggcctaggcaggcggatcacctgaggtcaagagtttgaaaccagcctggctaacatggtgaaaccccgtctctactaaaaatacaaaaattagctgggcgtggtggtgggtgcctgcagtcccagctacttgggaggctgaggcgggagaatcgcttgaaccttggagggagaggttgcagtgagctgagatcacgccattgcattccatcctgggtgacagagcaagactccatctcaaaaaaataaaaaaaataaaaaatgagatttaccttgctaaaattaaaccaaggccaacattctattgagtttgtatttcccaaagaagtggccaaaaagtatgctga

SEQ ID NO: 86944 - DNA, 1049 bp, Homo sapiens
ccttggagaaatcagttcacctgtctacatgggggtgtgtcataggccctgcatcaccttggaagctcagccctctcttccataagagaattcatgagcttgtgggggtgcacatacccataacagaaatcagagtacagtttcaatcatggttgtcctcttgtaggattttttgtctttgaacttccctaatgtttgtttttccttcaccttacttaaaacactacctaagagctgactgggcttcatgatttctttcctacttgatggaaatcagattcctgtgagaagtgaagattcaaagggtttatgcctgtcctttgagtttaaaacagccctccagaaacccatcactcccaaataaccatggagtaaggatttttttttttagagataggggctaggctatgtgctatttatgctattcttgcaaaggccatgtagatcccaaaggaaagtatgttccaatcagtaactgctagtgttttgttttaaggatgttgaaatcctgcagaactcctcttcagagaattcagataaaaggtgaaaagttcacaccacttccttttcttctaactgcagcttaagaattgaacaaatgtctaagtaactgctgtctactctttttatatacacacatagactttgggttcaccctttttctccttactgttacaaagagccaatgtattccttattttttttcccacaatgacatctccagaagggtttctcttggcctgtctctccagctgcctacagatatggtctgcatcttgggaagtcggacacacagccagaaatgctttcagtggctctcacttaagctgtacacttaaatatggagtcagtaattaattgagagcctggctgagaagtttttcatgtgtgtacaaatatcgtcgctccttttttcatttggggtagtcttattggtagggataacatgggatattatcatttttcttctttctttctaatgtagtttctttagtttcttctacctgttaaggatagctattgaaagaagtgttgtttaaagaagtgtt

SEQ ID NO: 86945 - DNA, 1010 bp, Homo sapiens
gggtttggtttacaaagtgatgccaggtatacgcctaggccagagagctttcttctgctacgtaccagtcgattgtttgtacccaccgccttgtgagtgagcaggttgcgtggttcagtgcagcacattgtatcaagtaggtcaggagttacaacttcatgcacaaagagatggctcatttttagtcagtgaaaacctttcattaaccacagggcccaaggaggggtggatctggtaatcattgctaagcagacagagctagaggttcagacactgccgcttgtgtgccggcccctttcctctcacaccaaaccacatgttatgcacctgtttgtactccttgaaggcccttgaattattcttgtcatttttgcttactgatgttttcccccagctgtcagagttgggggtaagtgaatgaatgtgtcccactcaaattcttaacatagagaaaacattttcctgaaaatctttagttttagagtgcatcctttatctgaaatgcctacctgtaggtaccttagacttaattaatcctgaccatggttaagttgtcatcaaaatattttttttcaggggcccagctagttgtatgaaatagatccatgagcacttactatattgttaccccagcttatatacttagattttttgtccttaggcagtgatgaagttatacacactgcccccaccattctcttgattcctcaggctctttcctcctctaacgtaagtttccggtagtggccaaccagaatcagggcaagatgcaggaggatgcgaagaggctgccctcaaattcctgttgggttgtctgaagcttagaggtgtgtgttggagctgctgtgcaaatggcaatgctgtctgctcagagaggaccatcataactgagcctggaccttctagttcttggaggtttggttaggacttattggtaattaatgtaccaatgtttccctggatcaattttttgcttcatgaggttaagcctttttacttaagtataaaag

SEQ ID NO: 86946 - DNA, 1096 bp, Homo sapiens
tttccctttcaaaagtgacattgtttcgccttgtctagtcagctatattccttatttttctcaaacctcttgagtcccttctgccgtatactggaaattgtgtgcctgcctttttaagagtaggcacctcacgtttcaagttcaagtgcaatggaactcaccctgcagcttgaacagatttgagtgtttttgcagagggaggaccagggcagatggggagtgtcatgctcaataaatacttgttggattgagttgctgggaaggcagcagagtggggagagtaagccacacctcccccaggctcactcagaatggtctttcccacttctggtccccacatactgttccccctctataatacctctcttcagctacttacaaggcaaaaccccccgaagtgttagtattctctctttctttaaatcactggtctcctattcatcctggtcattgggcttgaagcccagttggtggcaaagacgtggcatttccatagatgtcattgctaggcctgtaggttcttttcccaacacacttatagctagagggtgagcttgggcagttaccaggtcgatccatggaaacagccaatgtgtaggattttgttatgattttgttaaaaagccagactgcctggctttaggctttgaagtggatatggtgagaggccaaggagaccaagatgaatgctaactgtcttttcactccaggtagatttttgccaacttcctagtagtgttctgtgtagcaagaagatggaggaaaacaaaatctggatcagtggcttttctaggccaaggaggagaattatctgttggccctaggatggcttcagaggtgtgatcaggctgaaagcgcccctctcccaagccagccaccatcctgtgatagcaggcactgctatttcttctcccaccaaccaccagatagggaagtgcaagaaagagatgcttgttaccacttcgcaggccctggacacttacactgttgtccacagagtctgtgttccttgccttgaaggctgccaaccatgtgtctggtggcttagtgaaaatggcttttttttttttttttttttttgagacggagtttcact

SEQ ID NO: 86947 - DNA, 1050 bp, Homo sapiens
tgtatttttattagagacgggggtttcaccatgttggccaggctggtctccaacatctgacctcaggtgatccacctgccttggccacccaaagtgctgggattacaggcgtgagccaccacacctggccctggagcccttttaaagcagtggaaaggaaaactttgggtgtcgctcccagttcagagcaaaggtagatgctcactagagagtgagttagtgagagtggacagtctcttcttgggttagtaagctctgccatcctttgagatgcatgttacccttctttgtcacagaagtgggaacagggaagagtggaagcaaagaaaggatgggtgggaaatctggtcagtttccccccttcgtctaggttcaatcttcacagagggctccattatttggtttgcagggtatgaattaaccaaacattagccaaatctactcacattattaggtcaaaaacaaatcctgatctcagggaagagttgtggatgatatttgaaatttctaagttatctgtgcccccattttctccagtcgtgtggagctcatgaaggggccgttgttgttggcaacagctggatggtgggaggttctcgtaacagctggctgctagtgttcgggctcagcttgtggtccccaccaaacctcctggtttggaaaactctgcctggcactgtgctttcccctcagggtcactacaaagctgaatgccaagccttgcagtcatttaaatgcttcccctcaggcccacatatgccttgatcgacccttactgtgtgggagcactgcagctaatcaagggtggctttaatgaacttaaaagaatgctatccaagtatttcataatagaaaaacttcaagtccaggccctgggggacctggaactgaagtccaggccatgtacagacatttaccctgccctgctcaggcatacaggtttgtggatttgctcaggagcccccgagagttgctgggggggtggaggacagatggagtgcctttagctcagctctgcctacacattagcagtttgagctcccagctccc

SEQ ID NO: 86948 - DNA, 1071 bp, Homo sapiens
gaaagccctcagcaaactggtccgtgtggctactggtgccagaaacagcctggagattagaagagatttccaaccgttctatgccaaggcatcatcttgctataatgaggcctgggggtgcagttaaaaccctttaagagctacaattccccttctaaaacctgtgattgaggcagcttctgtttgggaagcattaaaacaccagacacttcctagcccaacactgctaactgttgcttttgacagctttgccagcaccaggcacatacatggtcagcaaaatgcactgctgaagcatctggctcttaaatgttatcaccagtgatgacatccttgaatttggggactagctgcttaactgctttatctctttggtacccaaaggagtgtgagtccatgtgttcttcggtattttggatagcaaaggattatatagtacgagaaggtctcacttatataacatagagctaagagatcttaaaccatttgaggtcagtgtcagaggggtgagaacaacagtgggctgtgatggcaagaggactttgttctctcacattctagacatagatagatctttagaaagttgcaagcagtaatgcaaaactttcatagtgatggtgctaatttgggtgttaccacagtggttggtgggctttaatagccaagagaacactatgcctttattttctgctgaattcagtttattttgaatggtgtgatgggcatcagggccacactattccttgatcttagaagaactgttagagcatcttcctccagattcttagatgactcacatagagccttcctgctaaaggattcaggcttttgggtgtggcatcttctgaggggcaggtctggttatggagttcttactgacactatcacgtttgactctagctcaagtgttctgactagacctgcctgggcttaccgttactccacagacagtttggagcccttttattttatttatttatttatttatttatttatttatttatttattttatttttttttttttttgagacagtctcgctttgtcacccaggatggagcgcaatggcacg

SEQ ID NO: 86949 - DNA, 1929 bp, Homo sapiens
tctctatttaaggcaaactagcccatacatagttcagacccacatccttggacatcttagtcttgctcttgccaactgaggttactgagcccaatccaatctcagaagttaagaacgattttcttgctagtctggaaattacatgaggatgagtggacatccagtcattgtattatgtgcctagccttgccagcagatgtcactacaccaaaccacattttccaaagatatgactggaaggaaaggactggctttagaaaggctgagtccaacaattgtgaccctcttctccaatggcttccattaatacccctggaaaactatcaaggatatgtatatatccatggttcccaacagtcctgaggcctaaacttagcaggtcaagacccaagtctctgggcagagtcagagttcttatccagggaccttctccagattgggtggggagcacagctgctgtaggaagggcggcaggccatttaaatggggggtacacatgatagagttatctaggaaaaagagccatagtcttggggctgttccaaatgtcatgcagagctgagatctcaggcaaagcactccacccaccctccaccctgcccctttgtccacatgggtgggggctatcccttgcctgagggctgtaggctagggctgatccatgggttctgggggctccccagtgacagccaggcatagccacaccatgtcaggatgctgggaagttcctagcagcttagaccgtcatgactgttctccttccagacaactgtaagtagcattagtaatctgggagaaagaaccattggcagctcttctttaaagaccttcattccatgtgcctatccatggaggggtaaagacagaaatccttccctggccttcagtgtcctgcctggtctgtcttctggctaactcttcaggcccatctcacacaaacctgcttccttctcagtgccgcagcttcactggccttcctgcaattccttaggagtgtgcaggtttcttccttctcaggacctttgcacatgctctttactctgcctggaatgttcttcccccatattcttctttgcctattttcactaatccttcagatctcagctcaaataccattttctcaggaaaccttttcctgaaccctccaggctagatcaaggcccccactgccatgctcttattgcacactgtgcttttcttcatagcacttgtctcagtttgtaattatacatttatgtgtgtgttatttggattctttactttctgtctccccaacacacaccccagactgtaagttccatgagggcagtgtccattttacttaccattgcattctcaggacctggcagagtgcatggcacttagtaggcattcaataactattggatgtatgcatgaatggcaagtgggtaaatgaaggaagttagaaaacatagtgttactcttgtacacacatttatatagtatttgcatgtgaaatatagcgcctaattctggtcactctacctgcaaaggaagatatatcagagtcggggaaagtaatctgaattgatctaaatggagactactataccaggcaaaatgttaaaagattgtgaaaagatagaggctgaaatcatgatccatgtatatgaaaatataaaggagatacatgcagatttgttttcaaaatcccaaaagtcaacactaagggtcattttttaaaaaacagactgtggattctccagaggagggaccatgtgttatttatctgcatatctccagcacctagcatgatgcctggcacttaatagggactcaagaaatgtgttctgaactatttttgttgttagcttaaaagaggtagacttgggtggaaggataaataaggtagtatgcaattattcacttgggaaaccccagaggcaaaaaaagaaaagtatgaatagg

SEQ ID NO: 86950 - DNA, 1067 bp, Homo sapiens
atgttggctcactgcaacctccgcctcccgggttcaagcgattctcctgcctcagtctctctagtagctgggattacaggcggattccatgacgcccagctaatttttgtatgtttaatagagacgggatttcaccatgttggtcagggtggtttcgaactcctgacctcaggtgatccacccgcctcggcctcccaaagtactgggattacaggcatgagccaccacgcccggccggtggtatgtatgtaaaggctcaccaaatgcaggaataatattggtgccttgaaatagggccacagtcctctttcttaatttcccaaataccgggagttacttgaaaatgtacatttttttagtaacctgtttggcggcaaacctgtcttaatctgtcctgaggctacttatggtttttgtgtgtctcatttagtgtgactgtttatattttttgctgcagaaatactattatgttttgttattgggtggtatttgcaggatacatgcaaagtactccccttctaaaaatccaaaacaattacaaattctaaacacaactggccctcagggttttgaataaataattgggacttacagtgtgaatctttgtattgttttcagtaaatattttttcctttctggttttgtaaagggtatagtgttagtgcttaattgataaaagttatctttatggctaagaaagaactcctcaggaggataataattgacaaatccttgctcattgaaaagatggttttgaaaacaactgtttttgaatacccatgagtcttcatgtgcaagctgcctttttggaagatagatggctttcatgtggagaaacgtcaaggatagatggcatacgcactaacaattttcatctttttctgcttaaattcttttgggattagagttgtggtccatgatattttgagatagtgtatggtttttaaaaaatgtgatagcttttcatggagacattgaacaaaagctactctaagttaaatgaggtccagcaccaacgattttctcactacagtggacctttttttgtgatattgatctccaaatgg

SEQ ID NO: 86951 - DNA, 1057 bp, Homo sapiens
cttatttaggtttgaacttggggttttcagtgtcacagcttgttttattttcaatgttaatgcaaactctcagaccaaatgcttctgtgctaatatctggatctatggtattacagaggaatgcaggcagtagttcagatggaaccgaagattccgatttttctacagatctcgagcacacagacagttcagaaagtgatggcacatcccgacgatctgctcgagtcacccgctcctcagccaggctaagccagagttctcaaggtaaaaaaaccttcatttttccttaccactcctcacatctggctgactggcccatcacattattttcctagttaatgtggaaactggccccttggcttggtgtagatgacagtgcaccagatgattggtaaaatgtagagtgaatgcagagttgtcaggtctttaacaatgcctctgtggggggctactatccaatctgtagacccaaaggaactgcggatggtataatggatagagacacacgtatgtcttgagtcatttgtttgtttgtttgtttgtttttttagatcgcagtgtctccatcagtaaaattggaatgttatcccttcactttctgtttgaatgtttgaggcttagggacttgaagtccagatggtatctgatttatggtggcttgatttaatttttttttttaactttacagtggtgctaaaacaatatgcattcagtggaaacttttagaattttgaatttcggtcttttcctgggccagtgatatgtgggccaaatattttctcatgttgctgagtggtggcaatgagccataataactccagtcagtgagccgtaactcccagtcagccatttgatcatgagggtaaaccagtactcttcagtgtactgtctttaataaattatatgcaatattcaacactttattaaaaataggctttgtgttagatgattgtgcacaattgtaggctaatgtaagtggtttgagcctatttaaagtaggctaggctaagctatgatgctcggtaggttaggtgtatagcggttttttttattttct

SEQ ID NO: 86952 - DNA, 2114 bp, Homo sapiens
tgttttatggtgggttagaaaaagggaagaatgagaggatgcagttaatatttataaagcactctgtaccacggatcatgttaagtgcttcacatgcattatctcacctattcctcaccacagtgttatgaggaatgtgctactagtattttccttttcaataggtcaggaaacaggcttggagaaaataacttgcccaagatgccacagctagttggtatggtggagtggagttgaatcaagttcagtcctaattccagaacctaaacttattaatgctgtactacattacatctgtatacctgagctaggctcttttgcttatattttatttaattaaatagatattttaaggatttgttggattttgtgaaatatgaagaggaggaggagcgatattctgataaattatatggataggaagtaaaacagatttccatcttttttctttattttcttttaaaattgggatcagattccagtcctgttcgaaatctgcagtcttttggcactgaggagcctgcttactctaccagaagagtgacccgtagtcagcagcagcctaccccagtgacaccgaaaaaataccctcttcggcagactcgttcatctggttcagaaactgagcaagtggttgatttttcagatagaggtgagtgggtatggtatgacttagacctattacagagcatctgggtgaaattctttttaaggagggcttggggccactgcaggtagatgcctaatacttcagctagatgaatgctgtttgcttgcttcctttcttatgtctttttttttttttttgagacggagtctcgctctattgcccaggctggagtgcagtggtgcaatcttggctcactgcaagctctgcctcccgggttcacgccattctcctgcctcagcctcctgagtagctgggactacaggcgcctgccaccacgccaggctaattttttgtatttttagtagagacggggtttcactgtgttagtcaggatggtctcgatctcctgacctcgtgatccacccgcctcagcctcccaaagtgctgggattacaggtataagccaccatgcccagcctcctttcttatacattgctgaggacagtttgatatcagaatattctcaaggtccagagtagctggagtatattaaatcgtacctgtaataggaaaaagagactgggcccttcttaaccacatttgaaaagggcttgaagcagacttttcttatagccatacttctcagtccatttatctccaaatttcttaatgcagaggtcacagactggtgaactacttctagctgtccgcatggttggttggtttgcttgcacagtgtttaaaattttttaaatttgttgctagtatttgaaaacacaatgatttcatataaaaacctggattaatagtttattttaaacaatgaaaagatctgggaacactgggcggccaatcacccatagtaataattggctggagttgaatagtagttgtcccctttagatggacaatgagctgtctctttggccttgctgagcccctgtaggcatttggtttgcaattcctgatttagagtctggaatttcaagattgaattgttagactacaaacaggctcactcaagactctaagtccattcacatcttacaccaagcctgttcagtgtcatccagaaagataatcactgtcacttatcttctgtcctgtgtatctcctggaagggaagtgggatagtaatgttttaaaaacgtatttccatctagttttgattatccatgattagcaactcaggagaaatacagataggtgtaatagatgaagtacaaatttaattttaatcagaatttaaagttgcacaaaatggatggtgtagaagtgcctcttcattttccatttagccatctagcagatgaatagctgaaagttactggttaaatcatagaaaaagaacctgggaagcccataaactctgaatagtaaacttctaaataaatgaactccactcataacttctaccaattgcttttgctttagaaactaaaaatacagctgatcatgatgagtcaccgcctcgaactccaactggaaatgcgccttcttctga

SEQ ID NO: 86953 - DNA, 1019 bp, Homo sapiens
tgagatgatatatttttattacatttagaaccctaagtggaaagattagacaaattccccacatttattaacagctctagtgtttttgaagaacctgcatatacatgattgctcttgagtttcccaggacacccttgcgatcagtgatgttacatttgtattcagtcatatatttctgtagctgcatgtgccaaatacaggtatctgaggattcagtgaataaaagactgcatttaaggagctcatgttctcacagggggaggcaacataaaccttcaaattaataagtaaataattttgtgtagtgataaatattgtgaggaaaaaaagacgaatgatatagagagagtctgtttcgggggtgagggtagggatagcactgcttttcccaggatggtcctggaagacattcctgaggagatggcatttgatctgggacgtgaatgatggcaaagaagcagttgtgtaaagatctagaagaaaagatatcttaagtagaagcaacagcaagtgcagaggccatgaggcgcggctaaactgatgggtttgagaggctgaatgaaagtaggccgtgtatggctggatccagatcataaaggaccttgtggaccttggcacaggagtatatttttgttctgatagaatgagaagcatttggggggctttaacaaaggcatgacaggatttcaggcacgcttttgaaaactgaagacttgttaacgtggagaatggagtgtgggggcaagagttgatgcagggtatagggtgcttgggaaactgcatggaagttcaggcagtagttggtggactggactagctttgtatcggcagcaattctaagactaggttggattcaggatacgttttagaggggagcaacccgttaggcttgctgattgatttgatgtgaggtgtgagaaaagagaagaatctaggataacattcaagttgttgactggatcagctatttagacagtattgccatttattaatactgggaagatttggggtagagcaga

SEQ ID NO: 86954 - DNA, 1121 bp, Homo sapiens
agaaaggatgctgtctcacaggcaagatgacaacaacaggcatgcaaccaggcaccaggtatgggccttgttaaagcactggccattcatagtttgaggtccgtttcttggatctcctctataattgtcttcaggcatgtctgtgcctcatttcctgtggtatatcttccagatgtaaacttagaatcatgtttgtttttcaaacagtaaattttcataaaacaaacacttctacctcatgaatgaaggaatcatgctatctacagtagtagtaatagtagtagcagtagtagtagtagataattctgattatttgaaagattacacttgctgcttcatttcctcacttcgcatcctttaagactattgtagctttcaaacctctccactctgctagcacctttccaaggccaccagtgacttttccccagcatttgacacttgctgactgtgttatttgtcttctacttatctcttcccttggtttgtagggagcatcctggcttggtcctaaacctcctcctgcctctctgaacattcctgccacattggttcacttacttccttgttcttccctaaatgcctttggtcttcactcttcctgttttcctgcctggaacgctatacctgtaccaagaacagatggtattttctttcaaggcccgtgcagttctcagctgttggaggaatttttcccaaattctctcccaccgttaaggaatttcttccttatgtattcccattgtagtgctctcaaaatgttagcctttgtgacatattatattttgttcatcatttaggtgtctgtttttgcagttagattatagttggatagcagagatatatggtgatgaggaagaagtttgactttggagccaaacagatgtgaatttgaatactgattatttaactctagctatgttgtcccgggcaggtcaactaacctatttctttgttaataagaagaggtgaataatgcctacctggcaggggagtcagctaaattatgtatgtaaagtacctatacccagtgcttggcaggtaaaaagcactccataagtggtaactacacttttcttcgttgtctatcttaggtttaatttaatttaatttatttattt

SEQ ID NO: 86955 - DNA, 1056 bp, Homo sapiens
aataatacaaatgaataaaataaaattgccatatgatttgcattgtggctagaaaatttctggcatttttttctctttaaaatttttttacatgttttggtaccttcttttttttttttgtttttgtgccagagtctcgctctgtctcccaggctggagtgcagtggcatgactggctcactgcaacctctgcctcccaggttcaggtgattctcccacctcagcctcccgagtagctgggattacaggcgtgcaccaccatgcctggctaatttttgtatttttaatagagatgaggattcaccatgttgtccaggctggtcttgaactcctgatctcaggtggtctgcctgccttggcctcccaaagtgctgagattacaggcgtgagctactgtgccgggccttggcactttcattttgaagcttagctttataaggagttttctctcagttttctcctttttccttttaggcaccaacggagagacagcttcgatataaggaaaaagtggctgaactcaggaagaaaagaaattctggactgagcaaagaacagaaagagaaatatatggtgagggaaagttaaatatttaatgagcatgaactcctgctatcacatttgattccttttgctttctgagcttctgcctttcagatttgccatttagtattctccacatgtgaataccaattgactcttctatggcacttagagtttatttcatcccccaaaactgaattgttgagagtggaaacaggaggtcttgggaaaatgaaatacaattagaatttaaattttaaaaaatttgatcctctagttgttcataaattttactttcatcttaaagggttaaatttacccgctagaacacatgccatggcactggaaatgtctgtatgaagaaaaatattcaagcttaatagtagtctgcttattttaatggaaaaatagatttcctccatgattaaaaggtattaattgggtgaatattctgtaatagaccttcttgtagtattttaacatttttttctaactttagaagtaatgtacatt

SEQ ID NO: 86956 - DNA, 1065 bp, Homo sapiens
tgatttttcatgtagctctctttagtgtaaattctcatggatagaagccaaatctgtctgatttttttcatagcctagcgtggtggcatgcacacacacttttaaaaacaaagataatatttatttttttaaaaaggagtttcgctctgtctcccaggctggagtgcagtagtgcgatctcggttcaccgcagcctctgcctcttgggcgattcttctgccttagcctcccaagtagctgggattacaattgtttgccaccacaccttgctaattgttgtatttttagtagagatggggttttgccatttcggccaggctggtctcgaactcctggccttaagtgacctgcctgcctcagcctcccaaagtgttgggattacaggagccactgtgccctgtctaaaagcaaagataataaattctgatcctcctttgacttttgatttcttggcaataggagaagttaaggctgcaaggccaaatcacagagggaagcaacatgattaaaacaattgcttttggccgctatgagcttgatacctggtatcattctccatatcctgaagaatatgcacggctgggacgtctctatatgtgtgaattctgtttaaaatatatgaagagccaaacgatactccgccggcacatggtgagttgtcttgggttcctctgccttgaccatgatggcaataagctgtaggatctctagattttgccatagcgatggcatctgttcaggcaccttctcagtggtcctcagcagtgggatgaaggcataggaaatgacaggccacagcttaaggcggggtatagagcctgaggtatggcttgtgctgggtgccacccaaagcagctgagggcccttacccacatcctgtcatgtacatcttcttgtcttttgttcttgctgcctactgctcttcatttcctccttggaatatgaattacctctgcccacaggttttgtgtgtcccaaactagatgaaaatacagacttcattaggcacagcagagacagcatggctcaccttcatatccctagcaactagtgtggacaactgat

SEQ ID NO: 86957 - DNA, 1327 bp, Homo sapiens
ttgtgagtgggttttctaatctgaacaaagaaggccatcatggttaggtggtaatgagaagttatgggtaaaggtgagagtaaagtacttagccaccctaagctgctggaaataagctgcttaagaatttcctgttggcttgaggcatttggtaataagcaagcgtattgttatttatttggcctttatgtagtgggtgattttaatctcctgggctaaagtagtgccagaatgtaatccagaatacttgttccagattgctataaaagtgtcataaatatattcaaatgactttggaagcctttgttttatggaaataaaatctctgttttgctgtatgttctcagcttgtccaactgtccggtagctcagttaaccacatttgacctgtcattccttttcccttttgaggagcagtcttgttgggaggctttggttccctgatgtgaatttcattgtcttgcaggccaaatgtgtgtggaaacacccacctggtgatgagatatatcgcaaaggttcaatctctgtgtttgaagtggatggcaagaaaaacaaggtaaaaagtggtgactttagaaaggagttgaaatgttgtatattcacaggtttcagaaggcatatgttttttctccatcacaccttgtgaaggacatagaactcttctcttgccaaaatacacaatgtgtttcattaataattatggtatgtttgtgaattttaggcctttatctgtttaggaatcagtggcccacacatgaactctgtttctctgcttccagatctactgccaaaacctgtgcctgttggccaaactttttctggaccacaagacattatattatgatgtggagcccttcctgttctatgttatgacagaggcggacaacactggctgtcacctgattggatatttttctaaggtaagcaggatctggagattaagaagccaatggccagagcagggtgatccatgttcgcagttgggggctcaaatcactgacaggaagaagctgtactctgggcaatgatgacaccccttccttaaattaaaaaaaaaaaaaaggcaaacccatgtatcaaagattgtttaatgaaaatgcagtttttattaaaagcttctggttcattcatttctagaattgtggactggagctgcctattaataactggccagagccctccctagtaactcacaagcccacatcttgtagtcaaaccagttctgctggctttgcctgcctctatgttattagcttaaaaccaggaatatactctttttgcctgattgtttagctgggctccttctagcacagtgccttcagtgata

SEQ ID NO: 86958 - DNA, 1144 bp, Homo sapiens
cttcttgccctactctgtggctgtcaggagcccagagtcagcctccttaaaatgacactggaggtctcaactagggaaatcctgggatgattaatggctttggccatgataaagggtgtggttataacagctgtgagcctggcagccactccttgggactggttagccagatgttttgcaagcagccttattttgcatctgtggaagtgctgaaacctttggtttcaaatcctcatgacgtgttcatctgtttgctcttgattttaggaaaagaattcattcctcaactacaacgtctcctgtatccttactatgcctcagtacatgagacagggctatggcaagatgcttattgatttcagtaagtgaaactgctaagtcattagttccacaaggcagggaccatgtgaatattgtttgtctttttgtcctgtggtctctgcaattcctggaatatagtgaaggtacatggatatttagtaaatgaatgaacaagtaggaaaaacctgaacattgtcattctgcctaatacacattgaacattgaaggagtacaggactcctccttaatgagtaggaggtacagaggatgataaagtaagctctttaggattatcccagtttgagacttttaaacagcacatacatgcatgaggcttaaaatctggtccttgatgctagggatttcacttttgtagggacttgtctagaggtaatccatgtacccaatggaccctgtgcataatatactctgccctcattaattgtggattctgtctttgtgaatttgcttactcactaaattttatttgtaaccccaaaatcaatcttaacatttttgtggtcattcgtgaacatgcacagagcagcaaaaagtaagagtcatggatgcacacattcccagctgacttcagagttttcagctcttacactgtaaacaagttcattttcagtctgggaatgccacatggttttcgccttctgttgattttaaatggcccctatgagtagtactgatgtgtctggtgttcctaatctcaggaatacctggggtaccttacaggggttaggtagctttcttcaggtgaattagagagttgctggcagtgagttcaatgttaatgatatcaacagtgtatattaaa

SEQ ID NO: 86959 - DNA, 3973 bp, Homo sapiens
actacccacagttttgggcctccactgggagttttggaacacattccctgtgaataagaggggactcctgtgtcatgtaaatgcaaatacacattcttccccttttgtttatacaaaggcagtatactatagttaaccacacagtattccattgaatgactaaatcctaatggagtggactgtgcttcttaaaccttcttccatgttggcacacagttttttgctattaggataagatcgagtgttgctagaaaaagtctgtatttgttccctggcaggttatttgctttccaaagtcgaagaaaaagttggctccccagaacgtccactctcagatctggggcttataagctatcgcagttactggaaagaagtacttctccgctacctgcataattttcaaggcaaagagatttctatcaaaggttggtttttgactccttggaatggttgattgttacccaagaagttaactctactgggtattgtgtttcccctgaatgtgagaacggaaggcccactgaatatggaccactgcggagaccctcactaaagctgcctaggaatccaaagcatttggcccctgggaatggttattaattggcttctcaaatccagagttgccaacactttaattcttataaaagtcaagaagcaaaacttcagatcgtttggttcatctttctgagaaagacatccctgtgtatttatgcaagggtggaacaatttagtttgatctatatttgatcctgatttctaaggggccaagagtagcttcttgctgtaatatccttttgtggttatttggactggtcaaatgaatactttgtaaactccttctaaacagattgggttgagtacagaagattctgtccatttggatttcctttaagggaaagtagaccttggttgggggcaaaggggtgggaacctgcactttggccaggttgtcagtacttcttctgtttcagaaatcagtcaggagacggctgtgaatcctgtggacattgtcagcactctgcaagcccttcagatgctcaaatactggaagggaaaacacctagttttaaagagacaggtaaggttctcatcaggggcttgctcattgctggatgtccttcaagacttagcagagcaaagtatgggccttaagactggagaaccttcccttaaaggagttgggctacacgccccttttactgggtctcatttctgtagctggcagtgatgcctgtgttgccttatccttatcagaaggttttgataagctcctgtctcaaatttggatgacacaagttaagcagctccagttaagcagctttatgttgtacagcatttctgtcatttgatgtttttcttaggtgggaggaaattgcccatctgtagaggaatcttcacaaatgctgtctcaactcaaactcacatctaattttttaaattatttcatatatacaataaaggtcggtgagcgatgattttcatttctcactgagggtaaagtaggaagaatggattagataggaaagcagtttataagtcaaaatatagtattttttttgataccctaatatgttgttaaacctttggcaattccttcttggcggttagttattttggaatctatgtaaaggcacttgagttgaaagtatgtaatcctttttcccattgttctccctcaggacctgattgatgagtggatagccaaagaggccaaaaggtccaactccaataaaaccatggatcccagctgcttaaaatggacccctcccaagggcacttaaagtgacctgtcattccgagccagcgaaccccagcagtaggaatccgtaccctagggatctgtctgtcatttctctgttgctcttgtgattggcaagtacagtatcctttgggaaggccatccccctcaggactgtcctggctccgacctttgtgtacactgcagacgctggttctgaggaactgttgtttcggcctcagtgaggttgcctggatgggatctgtattagacttgagtgcaggtctctcagcactgacccaaggagttctgttatggtactgtacctgtccagtcactggttctctcctcatgtcctctcgccccatgaggttgtgttgtgtcttctaagcgtggtactagtgcttgccacctggtcaccagacctccaaatatggctgccaccaccaggacctttccagttactccttatatgtgtgttctatggaggggcagggaaaaggtggcacttgtgagtgtgtgtggattggcagggggtccattcactttgggttccatcttgctttaaatttcttcattttgattaagagacctctttttgatctgtattgggctaaccagagccaaatacttttgaagagtttcccagggactagtcatggtaatagcatataattgatctgaatgagatggagagaagaatgaaggggtggtggttctgggtttgatttgagttcacctgtgggcagtgggcagtgggcagtgtcttggtgaaagggaacggatactactttttgcctcaccgtaaagtactcactagtaaatatttccttctctctttactcccactttttacgtttgcaggtgccaaagtaatgtccacttttccctttcatgctgcatattaactggttaattatactgcagaaaccttttcacctccactagtctgatacagtacatctgtacttccatataccttgcactgattttgtctgagtgccctgggagaagtagaaaatgattgaaagtgacttccgtatctcagcccatgactcagcaaggcagaatggccacccctgccaaagtttgcttctcttttcaacagtgcctcaccctccctctaggattaaagtgcttctgcccttccacgaactcctcctccatttcctttttgggatttgtcaccatccttctattctctggtcttctatttttggtgttgttcaagtgaaggaagagatgttccctctaatttctctctagcccattataacctgctatcttggggcaacttttgatgtatgacatgtcacccttcccaacttggtctcctccaacatgctgtcttcatgtggagccctcaccacaatccctgactccggtcatttgtgcctttctcttgtcatctctgtacactacttatattcactgtgggttgggggagctaattttaagcatgttcagtggcagctcccctccagtttcagtgtcactgttaaaatttatcaaaaagcaacttcactaggggttttcttaagggataaaggccttttacagaagctaaacccttccccacatgtggtagaatgtgctcttctatatctactcctcaataaagcatgttctctgctcaagtctgtttcatctgggggctctcatttatatatgaaaatgatgcacacgatctgctactaatagtaaatgcacttgggatttgctttccctagcagtaaactgttgagggatgtggtttgtggctatggaatgtttttccctgtgatacaggctgtctgtaaagatcaagggagtgctcactctgaacttctctagatggtggcacaaatttgatctgcctcactttggttccagctaatcagtatacgtagcaatgattagtcagtattacccattctttcactaagtgccattttccactgattttaggggcaaaggaaccaataggaaattaggatatatgggggtacagttgatgcctgtaggagatgggaacagacattccttctcatctccaagctcattcaccagtattgagcagtgtcacctctaattattgactctctcgcaggttgaaattattctttttgaaaatagctgcattttcatgtaagatatacccagcacaggaaaagggtggctgagcactaacctccgtatggtggaaaggaggaggctgggaattgtatgtgctggaatggtttcactcactgtgac

SEQ ID NO: 86960 - DNA, 1026 bp, Homo sapiens
actactttgctgaatgatagtatgtgatgtgtgctaggacttctagaagccaccctttgctttgctgttcattgggatcatggaatcggacctcagctggttttgcctcagcactttctttcacaaaattatgtgtgactgcctcctccagactgtttcctgctgataggggcagtttaatagccttcttcctgtgtggtatctgcaacaaaatcccaatgaatgtcaccaagaaggaaacaaaggattgcccagcgatgagaaatgtccctggtgccaaaacatcagtttgcccctaacctcttgtgcaatacctttaagtccaggtcatgttgttaccatttgggggtttgcggatttgtttacttgtgcccaagaatggagaaaataacctgtactattgtacaactctggctccatggctcctcacaaatgttccatgtgagatataaacatctttatcctcgacaagtcatgttcattccaagaaaccagtctttgttcttaattggacatttgtttctgcaaacagcttaccatacattcaattccaaagttatcagaaacctacactcttatctcacaaatttagaggtgtggtagatcatctccaaagatggccaccaacagttgctctcatcctctgtgcacgtgctatttccaataaggtctatttttttctacagtgagggctgaacttgtgacttgttttgactaataggatatggaagtgatattttggcagcttccacttttgctcttgaaaataagctgacacgtttccaaacgagaagcttgggctaaattactgaatggtgagagacgatgcataggagaaccaaggtgctctagtcacagcactaaaagcccagacttgtgtctcttgaaggtttcaaccccgccagactcccagctgaacgcaccctcatgagtggcccttgctggtaccacatgacactaaagacatctagctgagtcctgttaacccagagaattatgagaatactgttttaaccacacgttttg

SEQ ID NO: 86961 - DNA, 1040 bp, Homo sapiens
ctgccctctgctgtgcaccagagaaggagccattcactggtcactcatttattgagtgcctactgtgtgctaggcacaggatacagagtgtgcgagtctcctcactgctgtgcagtgagatgccaactctgagtgtgagggagggcagagtcagtgcagcttgctacggcgaagctgtgcatttatgcaggactgctgcttgacactgagagtccaggaagaagcccagtgggttcagtgtgggccttgtgtgaagtgccagcgatgaggacaggagacacagagaagagagttggcctgccggcttgtcagctgtgacatccaggtaggaagaagcggcaccgtgtcctctgggaagtctgtggtgggggcttttactctgaaccttgggcctcatcctctctgcctggggagagtttggtatatgaaccatggttagtcgggggtcttgtctggctcctccacccttagaagtcttccctagttgcattgaaggccttcatcttcctaacccctctctcctttctggagatatctagggcaatgggattacaggctcatctgtcatatcttccattattcaattgctaatgtctccagagcatggatggagcccaccctcagttaccctctttaaaggtggggaaggctatccaagagtcctgggaacatggcgggtgacatggactaggaagcaggagacacagtttagtcctggctctgttatcggctcactgtgtgactttgggccagtagctttccatctctgaaaaatgatgactgactcctagtattcctgcccacaccatgcatggaggaacattcatctctatttgttattgaggtgacttccatggctattgaatggaatgagtcgagcaggtgttctttcaggggtgctagggaggcgaggggtccagaagtctgcagctccggtggaagaggttaggcactagggaaggcagactggagctcagtgtctgtgacctgccggggcgcccactgcccgctcacttgagctgtgacctttccccaacctg

SEQ ID NO: 86962 - DNA, 1042 bp, Homo sapiens
tcctagccctgctgccctctcctcactgcacacacttccaggttcagacaaaccggaaaggaaacccaccatgcaggactgtccatgtgatggctcttcccgtggctccatttctaagcgcctccgaggacctcatcgtggcccaggaccgcaagccaaggccaccccagtgtccttaccatcctgggaatgggaggagtcaggcccagccttgtcctgtctgcccccctggaagccttccctgagcactggcctcttatttacccgtctttgtctctggcttgttggtatctgtcccttgtctgattagggaacgcctgaggtcaggatctttgcctccccaatcagattgtcaggcaggagtgggggtagtgcagatgctgggtcatttctacatgtgagaccaaatagtggtcctgtttaagttgatccccttgaaagaaaattctggaaaagctcctcagatgcacagatacacagaatcagaccttgggcaaagtgtgtagttgtgcttttgaagctgtgcaaccttggacaaactacttgacttctctgtgcctcagtttccttatttgtgaaatgaggggtagtcatgataccttccccatgaggttgatgggaggattgagttaatatttataaagcatttcagacagtgccagagatataccgtgtgttaaataagtatttcttacacacacacacacacacacagacacacacacacacacacacacacacacacacacttcggaggtctgccaggccagggctcatagccttgaatctacccatggtagagagtcagacaacttgccttgcagactgcctgctctcccagcagccatgcaggggatcttctgcctctgcactgccgattatcccctgccctcgtcagagcctctccccaaaagtacctccaaggccacaattacccaggtctctgcttcagtgctgagtgtctgttcctctccaccatcacctgccacagtgcacacggacagctccatcaggagaagcagggcgaggcaaggcagcatgg

SEQ ID NO: 86963 - DNA, 1066 bp, Homo sapiens
ttctgagtctgactcttctgcagactcggatgcgccctctggcaagtcatctcccatctgctggaaacttccctactgtgaatcccacatgtatttgatggtcaccttgaattcagccatctcatacccaaaaagcttcgggacacaagcctgctctggggtcagcacacctcatagttggacagcagggtcaccacacctctcttgagggcagtgggcagggccagctgcgtgagctgtggctccatggagtgggggaactgctccaggggccctgagtccaggcttgcagtgaaagctgctttgttaccagctcgggcgtagtccatttctgtgtatttcgtaaaccattcattcacttcctcctttgtgcggttggtgaacaggagacccacttcacccctcaaccttttgctgacgtggtgcaggttatctttgttctcatcaggtgggctctgacccagggccaccatcatcaccttgtttttgccaaagaacatccagctgtgctttcaggtgttctggatgtccctcagcctgttgttcctcatgttggccacagagaagatgaaaaggtactgtaggtgtccacacatttccaaagctcttctatcaggttttgtttcaattccaagcctttcttggcagttttggttaaggagactttcttgtcacacttggatttgggcattgcactgaatccacgtggaagaaccatttttaataggtaacttgcaaatagcatggggcatctggaggggcagccatctgcctgctggagccggggagggcagatctgggctgagactggaagtatgagctggcacttgcccctcatacagtgactagggaaggagaggtcgtctgagacctgggaaaagcacagcaaaatgtgtgttctgggattccccacctccccacggtccagggctgtgtgaagacagcagggaaccctggagtctcaggcagaggaagcctttgtgggtcatgctctggggtccagcagcaaatgggcaatgaagcaagccgcccctaaacagtgtggggtccaggacaagagtacaag

SEQ ID NO: 86964 - DNA, 1028 bp, Homo sapiens
tgccaccctggccccctgccagcctccctggccaggaagcttcaccccttctcccaggaacacttccccagggtgaggtctgagctgttgtcttgaagtataggcaaggtcccacccccttcccagcacccgcaggcagtacattcctgactcccagtgggtggagataccccaggccctggcatgcccaggccctgcactgccctgccctgcccagcccactccctgtagcccacactcacaggtcccaggcagaagctacaggcgtggctgttgcttggcacttccagactggcaggaggcccagagcccaagttctgagctgggagctgtagagtgatagagttgctggggccaaatggtggggcacctgggaggtgcctgccacccgagaaggccagggccatcaggattgagcaggggctcctggcagaacatttagaggctgcagggaggtgatgtggggagaaaatctgctaaaactgagttctcaaactggggtgcaccagattccaccagatggtgtgttgtgggcagaggaatctacctttttaacaaagatccccggggtttctgatggcccaaggcttgtcctctaagatggcatttcagggccaacccctgcctctttctgctccagccacccctctggtatgggacgggttgccagggtcctaagcatccttgcaggaacttgctgtctgcatccccaaagatggattctgggcaggctgggagcaaggcaagagccctttccctccccacctgctgcccacccactgggaactctgctctggggccacattgtccaaagtgtcaggtacttatcccaacccctacctgtgtgcctgtcttaaggtaactggggaaggatgttggacatcacccaggtcgcttaggggcccaggtctccaagatctgagtctccacatggcttcaggaggaaaaacccagcgttctgacaacccagtcccctaagttctcccctctgaacccccagaatttgaactctctgccaggattcctca

SEQ ID NO: 86965 - DNA, 1050 bp, Homo sapiens
gtggggcttggggagtctgaacccggacccacctccgtccctatccccaggctcctggctggtgccccccgggagctcgctgtgcccgatggctacaccaaccggactggtgctgtgtacctgtgcccactcactgcccacaaggatgactgtgagcggatgaacatcacagtgaaaagtgaggggaaggggctggggaggggtgctgggtcagaggtctggcaggggggtaccgcagagagaatggcctggaggagatagaaggcttgttcacacggcttctagtcgcttcttgtccagctgggaagagggtgccctagaggagagtggggctggatgggattggtagagctcagaataatgacgagctggagaaggggagttgggagggctgccctgtgggtggagggcccaagcgggacccactcctgccctctggagactttgggcactgaagtatgggtgaggtgctctgattcatgatccttccggtgcccacagatgaccctggccatcacattattgaggacatgtggcttggagtgactgtggccagccagggccctgcaggcagagttctggtaagtgggtgctcagtgttggctcctccacctctacccggctctcccctcatctccagagctgggaggaaagaagagggcagcaggggggtccacggcgcgtgtgtgctggggcctgcacacatgtcccttcctgtggctgtgtgtccctcgctctctgcactcctggggagggggtgagtatcctgtgctctcccaaacccccgcacggcctgagttctctgactcatccacttcctccgcatgcctacactgggtgctcagccttcgtgggaacaagccgagggagccgagggaactgcaaggaggagaaagggcagagagggccccaggcagctcagcgctggctggcgctccttcctgggaggctgactgccggaagaggcccagccctgctgaccccggctcacccagctctggtctgggggctaatcaaatgtgtcacctcctgcccacattctatagtggc

SEQ ID NO: 86966 - DNA, 1050 bp, Homo sapiens
tgatggagacccttggggtggggatggggccaaagggcttattacctccaaggaaagtgaggagtgtgggagctcttggctcagcccacctctgggaaaaggggtccctgagtagggagcaaggtcagtccctctctgggacatcagggtggaaggggagagctcaacctggagaccctgtggatggggaggtgaagggacttttgaggaggagaagccctgtctctcctcttggagggtcaggatagtaggaagtcgcaatttggcgaccggactggagggagttcagcctaactgtcaggttttcagggtggggggcgggtccagctcttctctggggttcagggtggtgtgaggattcagctggggcagggagcagtgcagggccgggctcagctcaccctctctccccaggacaacctccgtgacaaactccgccccatcatcatctccatgaactactctttacctttgcggatgcccgatcgcccccggctggggctgcggtccctggacgcctacccgatcctcaaccaggcacaggctctggagaaccacactgaggtgagtggggctggcgcctggactggaagaccaggggccagaagggcggtggggcgagagggcactggggggggtggtgcggccttcacacctccggccaccccccaggtccagttccagaaggagtgcgggcctgacaacaagtgtgagagcaacttgcagatgcgggcagccttcgtgtcagagcagcagcagaagctgagcaggtggctgtgggccgccggccgcgttaatcggccaagggtgggacggggcctcattaactggcagggtgggggcggggcctcatggcaaggcgagcccagggacagggctttagcgggaacaggtgggatggtcagaaacggggctttctcctccaggtgcgactagaggacggggcctggctgtcccaagatgggcttttctcacctaggagaccccaggggcggggcctagttgatccgggagtgccctgggggcggggctcttggctgagtcctgggc

SEQ ID NO: 86967 - DNA, 1052 bp, Homo sapiens
tgggagagggagaggcctggcactccttcctggtggctcaaactctggatgctaatgttctttctcttctccctccaactccagtgtgacttctttaagcggacccgctattatcagatcatgcccaagtaccacgcagtgcggatccgggaggaggagcgctacccacctccagggagcaccctgcccaccaagaagcactgggtgaccagctggcagactcgggaccaatactactgacgtcctccctgatcccaccccctcctcccccagtgtcccctttcttcctatttatcataagttatgcctctgacagtccacaggggccaccacctttggctggtagcagcaggctcaggcacatacacctcgtcaagagcatgcacatgctgtctggccctggggatcttcccacaggagggccagcgctgtggaccttacaacgccgagtgcactgcattcctgtgccctagatgcacgtggggcccactgctcgtggactgtgctggtgcatcacggatggtgcatgggctcgccgtgtctcagcctctgccagcgccaaaacaagccaaagagcctcccaccagagccgggaggaaaaggcccctgcaatgtggtgacacctccccctttcacactggatccatcttgagccacagtcactggattgactttgctgtcaaaactactgacagggagcagcccccgggccgctggctggtgggcccccaatgacacccatgccagagaggtggggatcctgcctaaggttgtctacgggggcacttggaggacctggcgtgctcagacccaacagcaaaggaactagaaagaaggacccagaacggcttgctttcctgcatctctgtgaagcctctctccttggccacagactgaactcgcagggaatgcagcaggaaggaacaaagacaggcaaacggcaacgtagcctgggctcactgtgctggggcacggcgggatcctccacagagaggaggggaccaattctggacagacagatgttgggaggatacagaggagatgccacttct

SEQ ID NO: 86968 - DNA, 1034 bp, Homo sapiens
ccctgctcactcagcttctgtgtggccgtctgtgacagtcacctgtcttgaatctgggcccccgcacctcccacatctccccagtctgcacagatctcacctgtcggatgtctctctgtcacctttcctccatcttccctctcttctgtagctcccaaacccccaatttctacctttctcctggtgttgtccaacttgtcagcacctccctgttagaaaacttgagactcaaaggagccgtggggcctgctctgacttcctggcccctgagcggaactcctctctctgcccaagcctccctcccgcattcatgattgccccattcaccccacacacacttcttacctcagtgtcccctcccacatgtcccctcccagctctgggacccctgccatgtgaccccagctccacacccttccctccctgcatcagtccctgcagctccaggaggcccctgccagcctcctcatcctcactgccttcctgccccgctgcaggctggctttggttatgggctccccatttcccgcctctacgccaagtacttccagggagacctgcagctcttctccatggaaggctttgggaccgatgctgtcatctatctcaaggtgagggcccttcccgcagagcccagctggagaagagctttgctgataggacctgggcagccttggccagctgcgagctttcctttccatccccccagtccttccctggccccagactctgagaatccaagcaaagctacagttcctcaacctgaagaaccctcaacccccagacacgcactgcttgtcagggaatttaggggagtctgtggtctatgattaagacccctgtgctgggaacccttgacttgttagacccagaaggaaggggacaccctaggtcttgccattcagttcagaggagaagactgaggcccggagtccgtgacttgctcagggtcacacagcccagcctcctccccctccctctccctcccttagagggagctgcttgcttgaatgggcaggagcgggacacaggag

SEQ ID NO: 86969 - DNA, 1055 bp, Homo sapiens
acatagtacccacagaccccctcacccagacacatagagacacccactctacacagacacagtcacagagacaatggacctgtgcttcacattacactcgaggctatcagcctggatatgcagacccactctgcacccatctgctctgaaacacacaggcatggccatcgatcagaccacctggtctaggaagagtgtcacagggcatgcatattctcatctgggcaagtaacacagaggtgctgatgccgaccccagatggagacacgtggcacacacacacacacacacacacacacacacacacacacacacgtagtatacacagatgcttacacaagcatgtcaggtgccagcaccctcacaggcatgcagatatacagacttcatattaaaagtctgtatggggcctctgctgggacctagactataggagtcccagtacctatggggcttctgccgtggtggggagagacagatctataggggtcttgcagacatgggagtgtgtgtaccctcccacatgggggtatgcaggagaggaggccagggtttggatggctggggcagaagcaggggcattcctggcagggagaggagctccatggagcttggagtctggctttgaggggaggccagtcaggaggtggcagcatgcctgtcggggagaggtggaggcagggctggactgccaggatgggctctggcttgcagtatcctgcctcccctctaaagactctggccttggtcctacagatagcatggggtatgtggccattgggatttttcggaaagccactgcctacaaagtgggagggcatgaaagtgggcagtgctgggaggcaggcaaactggttaggggcccagacagtgtcctggcaggggtaggccaggactgctcagagtataggcagagggtctggaaaggaagggtaggtgagcgctgcatttccggggtcagagtgacaggccatgttcctgaggtgtatgcagagtatgaaagggaggggcacgccaaaggtctgttagtgcattctacttacagacatcctctg

SEQ ID NO: 86970 - DNA, 1032 bp, Homo sapiens
tcttctccatcctctctcccctcctcctcttcccctcttctgctcagcctgttccttcctctctgtgtctgtctttgtgtcccctctcgcctgtctggctctctgggtcctatctctcactttccctctatctgggtgtctgggttcctgagttggacgtttctccaggattccccttctgtgcctatggcagaccatgctcacgctggttggagctacagagagaatagcagtgcgggtctgccaaggctgggtccctttctgtcttgaccctgggctccagaactataagggcctttgttttgctcagagctggggtctcaggggactgggtgaggcctcatctcagggctatcatggggaggcatggggtgggtaactcagcctgcctcctcggcctcctcatgccagttctgcacttgtcctcctgccggcctctctgaccagctgcctccctccccaggtgttcagcacttactccaacgaggattacgatcgtcgcaacgaggatgtggatcccatggcagcctctgctgagtacgagctggagaagcgtgtggagaggttggagctgttccctgtggagctggagaagggtgagaggccaggaggccacgtcacttgcgcacagctggggttgacccgggtctcatctctggcaccagctcctgccctgtgccctcaggggctcccacagacttgctgggcctctccctctgactcaggcccttggtgaccttccccgctcctcccttgtcagcacccagagcaaacagggcctccaacccaggccaagccacacccccaccaccccggtcatggaaccacatttgcacattcagttaacaggtctctgtagggtactgtgtgctaggtcctgggctctgtgttggggacacagtggtgggctcctggggagatggatgggggaggcagacatggaaggcacagtcacatctaatctcacccttaggcgctggaataggggctggggaaggtaaggaggggccactgtaaaagcgtttaacaggt

SEQ ID NO: 86971 - DNA, 1329 bp, Homo sapiens
caaatctgtctccccagaagacacaggaaacaatgtattgtctgcccagcaatcaaaggcaatgctcaaacacccaagtggcccccaccctcagcccgctcctgcccgcccagcacccccaggccctgggggacctggggttctcagactgccaaagaagccttgccatctggcgctcccatggctcttgcaacatctccccttcgtttttgagggggtcatgccgggggagccaccagcccctcactgggttcggaggagagtcaggaagggccacgacaaagcagaaacatcggatttggggaacgcgtgtcaatcccttgtgccgcagggctgggcgggagagactgttctgttccttgtgtaactgtgttgctgaaagactacctcgttcttgtcttgatgtgtcaccggggcaactgcctgggggcggggatgggggcagggtggaagcggctccccattttataccaaaggtgctacatctatgtgatgggtggggtggggagggaatcactggtgctatagaaattgagatgcccccccaggccagcaaatgttcctttttgttcaaagtctatttttattccttgatatttttctttttttttttttttttttgtggatggggacttgtgaatttttctaaaggtgctatttaacatgggaggagagcgtgtgcggctccagcccagcccgctgctcactttccaccctctctccacctgcctctggcttctcaggcctctgctctccgacctctctcctctgaaaccctcctccacagctgcagcccatcctcccggctccctcctagtctgtcctgcgtcctctgtccccgggtttcagagacaacttcccaaagcacaaagcagtttttccccctaggggtgggaggaagcaaaagactctgtacctattttgtatgtgtataataatttgagatgtttttaattattttgattgctggaataaagcatgtggaaatgacccaaacataatccgcagtggcctcctaatttccttctttggagttgggggaggggtagacatggggaaggggctttggggtgatgggcttgccttccattcctgccctttccctccccactattctcttctagatccctccataaccccactcccctttctctcacccttcttataccgcaaacctttctacttcctctttcattttctattcttgcaatttccttgcaccttttccaaatcctcttctcccctgcaataccatacaggcaatccacgtgcacaacacacacacacactcttcacatctggggttgtccaaacctcatacccactccc

SEQ ID NO: 86972 - DNA, 1488 bp, Homo sapiens
agtgggcaaagagaggaagaatcctgaacaaacaatctgatctagctttggcctctctgctccccaatccgtcctcccctggctcagcggctgggaggagctatggcatgtcctatggaaagaggctgaggctggctctatgagccgtggggccagagccagcagggagggtggtgggcctctcctccagagctggggttgttcgggcttctggcagcctttctcaaaccatttcccccactccagggtccccctggctctgctggtgctcctggcaaagatggactcaacggtctccctggccccattgggccccctggtcctcgcggtcgcactggtgatgctggtcctgttgtatgtagcccctcatcccctctgctcatggccctccagcccccaaagcacttggatgccggtaatccccactctcttccctctctgtgcagggtccccccggccctcctggacctcctggtccccctggtcctcccagcgctggtttcgacttcagcttcctgccccagccacctcaagagaaggctcacgatggtggccgctactaccgggctgatgatgccaatgtggttcgtgaccgtgacctcgaggtggacaccaccctcaagagcctgagccagcagatcgagaacatccggagcccagagggcagccgcaagaaccccgcccgcacctgccgtgacctcaagatgtgccactctgactggaagagtggtgagggcctgccctagcctctccctccctcctactcctgccatgccagggtccccatgcccatatgtgcccctaccatatggtgctggctgctccctttccctgactccatcttgccctgccctaccacaggagagtactggattgaccccaaccaaggctgcaacctggatgccatcaaagtcttctgcaacatggagactggtgagacctgcgtgtaccccactcagcccagtgtggcccagaagaactggtacatcagcaagaaccccaaggacaagaggcatgtctggttcggcgagagcatgaccgatggattccaggtgcgtgagctggacctcagagccagtgttaggagatgggctagcccagtgctcagaagggacatgaagtcctggagtaggtctctgctaagggtgatggacagagctgggctgggaggcaggggtctcaggtccctgatagtggttcagacacaggctgccgatgggcaggtggtgcctcctctcgatataacggtgcattgggcagctctctgaggaccctggacagggaggccaggcaggactagaggttcccgcatagcggctcactcttccctctctcccctcccctgcagttcgagtatggcggccagggctccgaccctgccgatgtggccatccagctgaccttcctgcgcctgatgtccaccgaggcctcccagaacatcacctaccactgcaagaacagcgtggcctacatggaccagcagactgg

SEQ ID NO: 86973 - DNA, 1074 bp, Homo sapiens
ctcctgtctctaccacgcaagccactccccacgagcctgccctcccgatggggcccctcctattctccccccgccctccccctctcaccctgtggtttttatttcacttggcttcagcgccaatgggctgaggttggagttggaagccaccgcggactaaagctttgtttaaattcctgagaactggaaagagttacagcctccctggccaggcgcctcggcgctgtcacccgcgctgatgaggagcaggcgagcttttaaggatttgaggaaagaagaacggggggaggggcgggaagtgaaaaatccaagtgtgcctcttagacccgggggaaaggtggttaagctgggggttgcagtcactactgacaacgcccctcttccgcctgtcccagtcccaccaatcacctgcgtacagaacggcctcaggtaccatgaccgagacgtgtggaaacccgagccctgccggatctgcgtctgcgacaacggcaaggtgttgtgcgatgacgtgatctgtgacgagaccaagaactgccccggcgccgaagtccccgagggcgagtgctgtcccgtctgccccgacggctcaggtgcggctgcgctcggggcctggggcctggggcctggggcctggggcctggggctggggctgggggtggtcggcgctcgctggccctccgtgctggaggcctctgccgacgggagcagcattagcaaaccttggctctaacgcgcgtctcttcgtcccctagagtcacccaccgaccaagaaaccaccggcgtcgaggtaatctcctgccctcgaattttgcccctgcgcggcccgtgactcctcacagtcctcccttctctaacctggcctcttgtttcttctcccccaatcccacagggacccaagggagacactggcccccgaggcccaagggtaagcgttgcactctgggctgtggggggctgcaggtgggcatggctctcggccccacgctcaccccggccccgccctctccccctgcagggacccgcaggcccccctggccgagatggcatccctggacagcctggacttcccggacc

SEQ ID NO: 86974 - DNA, 1035 bp, Homo sapiens
agggtcctgggagctgcgcgagctgttagggtgcatcttaggaagatttctgggcaggctgtggaggatgggttggaaggtaatcagaacggaggtggagtgacctcttagaaggctgccacagaggcccaggtgagaggtgatggtagccaggcccaggccagtggcagccaggtggaaagaggtggccagactgataagagatttaaaaggcagaagccagaggacttggtgactgatgggcagaaggatgggggccagtgatctgctcaggctggctcctgggcttctgaagaatgaatgaacgaatgaatgaatgaatgaacaaacgaactgggaaacagcaccagatctgaaagccccaggtttcagcttgatcgtcgggctggggagtttgctgctgcacttgcatttggtacacctgcagggcatccaagtggaggtgcccatgagatggctggacgcatggaggtgccctggagaaggtggagagagaggaagccggcacagcctgcaaagaggccagagaatgagtagccagagcccctgaagcctcacaggaggaggtcttagacaaggcacagccaacagtgccaatggcaagagatgaagcaggtgaggcccaagaagggacatgtgttctagggacccagaggcttctccctgtcccccagcctttccttctgtctgtcccccagcccttgcccacccctctacgctccctcccccggtctttcccctatagtactctttctctcgatctcctcctcgtctctcagaccagaaggctcaacatctttctaagggaaacttcgtgctactcccaccccactggggtcctggttgccctccctagcttctgaaatcaccccccacacccccaacaaccaccacatacacctttcaccagagactcacccagcgcttccagaagctggggcaaagaggagcacacacgaccacctgcctactgagcagctcacacttcctccaatggagccaccacaaggtaccggcctccagggcaactgcagg

SEQ ID NO: 86975 - DNA, 2119 bp, Homo sapiens
aagcacttgcaggagttcctggcacatgctcagctgtcagtaaataaataactcttattatcccagcactgtgcattgggaatacgattcattcattcattcattcattccacaaataggtgtgaagtcctactttgtactagacactgtgctaatactggggatacaaaaataaaatagatgaggtctctgccctcatggacaggtaatctacagagagaaacagacagcgaaaaggaatttaatagaattacaaaggggttggcttagatcagggggtcaggaaaggcttctcacaggaagaggtgggcaggagagttcaggcagaaggcctgaggagaatgggcttagctgggcacccttgaggaatggacaggagggtgtggtgctttccctgaaagaaggttccattctgtgcggctgaaaggaccagagcaaggggcaagggttttattctaagtgcagtgggagagcactgaaggggtttaagcagcacaggattcagtgtgcatttaagacgtgcactctgcccatctatggagaggctgagagtggatcccagggatggtcacgaacctccagagagccactttatagtttccaaagcttccacaaacaccatctcaccacttgttttaaatgcagcccgagaagtcaaaggaggtggggtatggggggagcatttctgtgttcaccctttctgtgactcagagaaggattctaaggtggagctacagagccaggaagtggcagaggattttaatcgcctccttggaggagaggaaggagcctctgaggccagaatgtatcccagccagaagtcagaggaccattccctaccctcagtcatcagaagggctcctgacctcaggggctgctgggggcagcctgtgaggggcacaaggctggggctgtgatgacgatgctccttggacatgcctggaagggatggaggtgggggctgactgcccaccagggcctctgctccctcactgctgcctcctcatcccccagcctcctctgggattgtccttctcagggtcagccagctcccactgcagtgcagggaccaacatgcccatctcctcccacatcctggcccccaccacagccaacctggccccgtgcctcatgccctgccctcctgaccagcttcctaactcactgatactggcttccactcggagagcctacagctctctgccatctacccacctaagcttgggaatgtctttctctgcttgtgctctgtagccagctcacatgtcaccaggctgatgcacactcagctcagtggggctgcatttacctttcctagggattccccagcctgtggtgccctccccagtgtgggtagagaatagggtctgctgcctcctcttgcaggtatctcttctcggatgggaatgggcgcccccagctcccactggccacctttaagagatcagagggcaaccgggcactgtggctcatgcctgtaatctcagcactttgggaggccaaggtgggagaagcgcttgagtccaggagttcgagaccagcttggataacatagcaagactatctctattaaaataaataaaataaaaagatcagaaggctggctgggtgctaggcacagagggcatggatgtaggcatggggctctggcctgaaggtagctgtcagcctgacagcatgaggttcctgatgtgcccatactggtagtgggtagggtgtgggtagggtagtgggtaggttgggggaagtcctggggaggtgaggagcacagagaacccaacccagccgagtccaagatgtccaggatcttgggtctctcttgacttcacgtttgactaatttcctcctcccatctgagtaatcataatgataaagatagcagcattgggccaggtatggtggctcacgcctgtaatcccagcactttgggaggctgaggcgggcagatcacttgaggtcaggaatttgagaccagcctggccaatatggtaaagcccagtctttactaaaaatacaaaaagttgccaggcatggtggcacatacctgtaatcccagctacttgggaggctgaggcacgagaatcgcttgaacctgggaggcaaaggttgcagtgagctg

SEQ ID NO: 86976 - DNA, 1049 bp, Homo sapiens
tgaaactctgtctctactaaaaatacaaaaaattagccaggcatggtggtgcgaacctgtaatcccggctacgtgggaggctgaggcacaagaatcgcttgaacccaagaggcagaggttggagtgagccgagattgcaccactgcactccagcctgggcaatagagtgagactgcctcagaaaaacaaacacttactgagtgtgtactacagccagacactctcctaggtgctacgactatgtcagtgaacaaaacaggaaaaaagccctgcccttggggaacttacaatcttctgaggagaaagacaaattaaaaaaacagtataaataaatagtaggatgagaggaaatattgtgcgatggtgaaaagcagaggaggagggagggctggcactgtaaatccagtggtctgggtggccctactgagaagatgccatctgaacaaagaattgaaggaggcaaggagtgtgagcagtggggctatctgggggagggtttgccaggcacaggggatagtgggtgcaagggttggagccaggagtgccaggggggatgaggggacgcagagaaaaccactgtggctgcaggagagtgagcatgacaaattcccagatgaggtcagagaggcctgggtggagaagggggcatccagacagctcatggagcctctgtaggctcctgtaagggccttggtttttatcctaagaggggaagccactggaggtttggagcaggggagtggtgaaatgggattttaagagttgtaacagaaacaccagctgctgtgatgagaacggaatttaggggaacaagagtaggagctggaagaccagggaatccaggcagggatagtgagggaggtgttgagaagggatggcattccacatgtattctgaaggtggccccgatgggatttactgatggagtggatgtggggtgtgagggaaagagagtcaaagatgactcctggctgggcgcagtggctcacatctgtaatcccagcactttgggaggccagggcaggtggatcacgaggtcaggagttcaa

SEQ ID NO: 86977 - DNA, 1880 bp, Homo sapiens
tcctcaggggcctctggtgctcaccaccccagacatcagccaggggtagggcacatggccagccagcaatcaggcagagaagaaaagccagaaggtccgctctgggccagtgactgagcaactatctcatgtggctgcctgtcaccccattccttcaccaggaccaatgaggagctggtggcattcctatccaagaaccgggacaagaatttcctcaagtcacatggccgggacaactccaggtgagggggtggggaaggaggccctggccccagagtcttgtcccaacccctcccacacagttgggctcggtggctccagccctgggtttcaaagcctccacaccagtcacaggttgaggagtgttggttgccaggcgggtgaaagagcttagaccccaccctgcaggatccccagccatggcctctctgctgcccacaggttcatcaagaaacagggcctggaccggctcttccatgagtgcgactcacacatgtggcgcctgggcgagcggcagatcccagcaggcattgtggtggatggcggttctgactggttcgtgctgacacgcagctttgtggagtatgtggtgtacacagatgacccgcttgtggcccagctgcgccagttctacacatacacactgctcccagccgaggtgggtagcccagcaggcatgaaggccagggagggcgtgggttgggctgcctgcagctcaccttccactctcccttgctgcttgcagtccttcttccacacggtgctggagaacagcctggcctgtgagaccctcgtggacaacaacctgcgggtcaccaactggaaccgcaagctgggctgcaagtgccagtacaagcacattgtggactggtgtggctgctcccccaacgacttcaagccacaggacttcctccggctgcaggtgcttgcccgaggccccaaggcccctggctaggtcttctcccctggcttttcaccaggaaaatggcagggtgggccagtaagagaatctggggggccacggcctgcagcaaccctcaggggtctggggctacaacagcagcaggaaaagccgcaggaggctgagctctaggcagtgctgaggggccagccccaccatgccctctggggcttccagagcccttcaccctccttgcctctcccactccagcaagtctccagacccaccttcttcgcccggaagttcgagtcgactgtgaaccaggaggtgctggaaatcctggacttccacctgtatggcagctacccccccggcacgccagccctcaaggcctactgggagaacacctacgacgcggctgatggccccagtgggctcagtgatgtcatgctcactgcttacacagccttcgcccgcctcagcctgcaccatgccgccactgctgcacccccaatgggcaccccactctgcaggtgagacccccttctgacatacagcaggcccttggggtgtggtgccctagggggaggccaaccagagagtgacgtcccctgcccacaacaaggccccagtctgaagcagggaaaaatgcaaataccgaaaagacggctagagccaggcatgcaggtgctgtgggggtgagatctggggaaaggaagtgcctggggatgggactccccagagccccctccctgggactccaggccaagtcaggtgtgctgatggcatctccctttctccctgctggcaccttaggtttgagcccaggggcttgccgtccagcgtgcacctgtatttctatgacgaccatttccagggctacctggtgacgcaggcggtgcagccctcagcccaggggccggcagagacgcttgagatgtggctgatgccccaagggtcgctgaagctgttggggcgc

SEQ ID NO: 86978 - DNA, 1035 bp, Homo sapiens
gcatgaagagctgaagtgcccgagtacaggcttctgagggctctaggagccaccaatgatggtcaagaaagggtatgggacacaaaccagactgttcccttttctaaagtgccttgaacccactgctttactgcatcctaaagttgggaatctaaggcttactgccttgattttataaaactcagttttataggcacagaaagtcccttggattagcccaaggtcattcagcaagctgtgactcagaagtagggctgtgacaggaactggggtacccagacccaactcctgggtctggcctccacggagtctgttgcagggggtgtgcttactgcctgctctgcacccacagatgatgccagctggctgcacgcagggccaccccacaacgagtacatggagcagagtttccagggcctgagtagcatcctgaacctgcctcagccggagctcgcggaggaggctgcccagcggcacacacagctcacaggccctgcgctcgaggcctggacagacagggaactgagcagcttctggtccgtggctggactgtgtgccataggcccctctccctgcccctccctggagccctgcagactgaccagctggagctctctgtcccccgaccccaaatcagagctggggcctgtcaaagcagacgggcgactcaggtagcagggccccagccagtacccgtggaggacccgggaaattgcaccttacagacagtggaggggtgtcccctcccacaggcaagaaccagaggcccaggctgcacacccatttcagccatcaagaacccacacagacggcagggaaggtggacacagtatgaactactgctgatgtctctgttggggatcagagggctggcgggaacgcgagaagggcaccagcagcattccacacccagctcttcctcaccttcctgtctagtttgaatttcttttttttctttttttttttttttttttaatttaaaaaggaaaatgggtggttgggagagaaactagaacagaagatgtgcaatagggc

SEQ ID NO: 86979 - DNA, 1011 bp, Homo sapiens
tctccagtcttcatcccatccttcccctcccctgcgttctttttagtccccttaaccacgctaggtcccttgcctggcttcagaaccccagcacacactttttcccccatcccaggtggcaggcccagggagcctcacttgtatcccttgggactctcggctcctttccactggctggacctcggtgtggcatcccatggtgctgaagtagggaggcgggcagccctgggatcatgaagcacagctcaaggtgaagctcagggtcagtgtgcaagacagcagattccaaaccctttatttccctccatgcccctttctccatccctttaatcctctccacctgggccaaggcacaaagctcagaccctcagcatttctgaaatgcactagggtgtaaagagaatccactcctttctggccagtagctcattctgtcactgtctggtagccaggtctcatgacctttggtgggaaagtcagagaaaaccacctcctgtccctacccctccatcctgtctggtgcccagtgttggggaatggtgtcagagactggggggctgcagctcagattttgtttcctttctatacaggatgccatatggcacgctgtccctggggagaggactgacagtgctgtagttgccacttacccccttccccagaagtcggggctctgcactttcccctgggagctggaaaaagaccttgtcttcactgagcagctccttgcactgagttatgtttaacaatggtcagggaggggcctagatgttattaaccctttccacactgctcccctgactcagagggaacccaggctggatgctgcagagaaagattccaaaggccctttcttttccatactgaacacttgtttctccttggccagagcacaggtgcccttttgtcaggatttgggtcgggggtggggggcatgaaggcaaggggttggtggatcggggtgcttacgtattggctgggactccggaagaagtggcaggcgcagaggac

SEQ ID NO: 86980 - DNA, 2753 bp, Homo sapiens
ttgaggctccccgttggtgtgcactagagaacctgggtaaggaccaacagatcaccaggcagttccatccaggtgtgtccctaaatagcatgcgttcatgacgctggctcactttatttttggccccaggtcaggtctcccaaagggtttcccagcagtcacttcagagtctcctgcagagtcaccatcaagcagacctcttcctcgggaggccgtgtcgccaccccaacccttgacttctggtatcaccatctcctgtcacctgggctccagtctctgtccgatggcctcaacaggacatcaaagcatagctaccagtttgaaggtgccctcaggcttggcaggaaccacgtggacaaaagtcttgtagagcacagcacccttgggcagcctggtgatcagatccacagcctccgtgtttctgggatgaggcacgtagacctccttagtgtagcggactatcccctcttccagggcatacagacatttattcttcccaacacccacctgcaacacacagacctggtcagctggtcagctggtcagcgaggtggtccgtcccagaattttgggacagacttctcacacagagccgggccctggggctgaaagggtgatcagagagctccatctcaggttccctttcccactggctagcacgtccaaaccttctgcttctttattgactcataacaaatgagggaaaagaaagctccaacagccaacatgggccactgctcagtcccagggactgttacctggagccatgtctatgcagctggtcagaagccacactgcacaaatcccaaaacccaggaagatgccctaaatcttcacttagacttaaacaacactagaactgtcatattaaaacactagtttgatgtaaattttcatttagatagtgatctataaagtttaggctctatggaaaatataaaccaaagctatatggataatgcatatgctaataaaacaatcatactactgcattagctaatacccatgtaagccctttaatacacattaagtcatttaattctcacctagtgaaagaggtattatttccaacgccacttttcagatgtgaaatatgaagcagagagattaaactgtgttgtatatacagtttttaaccatattttttagctttttcttttagaacttcaggctgggtgtgtggcaaattttacccaggtagtccagcattattctctgtctctctgattaaaagaatgggctctggagccaggatgcctggttcaaataccagcactgctacttactcctgtgtggtcttaggcaagttacttcactgtgcctctattttttcgtctgtcaaatggggataatattaactattttacagggtcattttgaggattaatgctcaacaatcataaagggcctagaatactgtctagctcaaaatgtgttagctttgattattattgttgacatagccacacatctaatgtcttaagttctaaaaggtaaaaagctactacatacataatcaattcacatacaaattagcatctttgaaataaatacaggttactatcaacctttttgtacctactaaaattatcgaaaaaggggtgggggaggggaaactgtttacaaaggcaactaatatttaaaataatgtggagagtacagtatcgttatgtctctgtaacaaagaactgtcctaccctataaaaatgatgccaacttgctgaaactgaaatccccacctggtatgaacctaactcctggcacactgaattctatttcattaaattcaagctatctttcaaccatctgcaagtaagtttatacaaaggaagaagtcttagaataatgaaaaactaataaattgaaattagtttcccaagactaaaataatattttaaatcaccaggtatcttgtcctccaagaactgagggttagaaaggagaaccaagaataccaggccaatgcaacaccagggcaaatcatagtgatctgggagttaggcagacctggtgcaaatcccagcagtcacttgctccttccaccccgtctaggtctctggcatttcaccttacttacagggatgtggtaaggaagaaatgagatcgtgtaggcatgggaatcagcacaatgcttgccatttggtaagcactcaatacatgcaactgttattaccatgcttaggggcaaggagaggtcaacctagaaaaggaaaaaggggggcagcaacggagcaactcacatgggcacctgggtgccagcggaaatggcgctgtgttgcaatgatgttcccagcatgaacatagtgacctagaagagaagtccacagtgactggggcagcatagcaaactaccaagaaaacatgatggcccaaatgctgcacaccaacctccaagcctgcccctggccaaaaacaactcccagacagtccaacacaagcagcgcaggatctgccacccagcagctcttgtctctaattgcatggttatggctcacacccacccactcgatgacccttcctcaggtcttatccgttcctttaaactggagccaattatgatggtaaggaagaacagggccaggcacacgcagggttcttctgctctcctaaggaacatgaggacagggtgcagctaggaaggggaagccaaggcacatcctcaccttccattttcttaatgccttggcgtctgcctgatgactttccaccgaggtttttggagctaccacccgacttcttggatgcgtatctga

SEQ ID NO: 86981 - DNA, 1833 bp, Homo sapiens
acagatttcacgactcagagatagaaatctcttgctatcatcaggtcacgggcagctcctgtggagtcctgcccaacttatgtggcttccataaaatggcaacagtccaggctccttgcctaattttagagcattaactccctaattgccagtaagcaaggaggtggatctctgcaaacctacactgtctatgacagctctagttgtacttggtgtgactaaatacctcaaaggcaacctgcttctgcaggttttgaagtgtcagcttcataagacactgaggtttagaattgtttgattctagaccataactgaagggcataaatggaaacaggatatgaagggaaacaagtagcatcatggagctgaaaagtggtgcatcacccaatggctagcacaaacaaggatcacactgtccattctcttgtctgctaaattaagcattttcttgcctcctttgcttcatcttttcacaacagctggatagagggatcagaaatgactgtgtcatggtgctcattcactgcaaactcccagttgcaagctccttggctcccccggagggagcaagaatctcatagttcagagacacagagggccttttagccctaatgaccttttggatgggactgcaactcatgactatcctgatattggaagaaaggactttgttaatcttctcccccatagctctgctgcgtaggtctacatcttactcagaatcactacacattcctttagtcttcctccaagctccagagccattggtacaaatgctttattgaaactaaatacataatacacacaatgagatgaagacaatatagaagtccgcatagtcatcataatcccgttccttggccggttgaggcagctcagtggctgagcccagtcaagccaacccgcagcttcactcacgacttcaagatttgatgctaattcttttggatttctacagttattaaataagtgtctgagtggactgtctttgttcctttgtgttttgagggctggctgggtaggagtgggggtggtttgtctgtggcagtgaatttttgccaggagaggaacattaaatgccaaaggtaggtggcagtatttcagtctctgccccagccgacaggcagagagaccttcacaaataataagacccaagaaagactgggcctcacctaggcttgtgttccaggaggtgctgccagtctcttcattacagtcaggctctgaggttggggaagtggaagtttccagcttttcatcctcatccctgagggctagaatcagtcagcactatctaaagagagatgtggctgtaaagtggtcatctgaaggtagatacgcctggatagttctggtccaatgcggcgagaagtggatgtcacaccttccccacggcgcacctgtatgtctgcgagcaaattctggcgttctttatccgaaaaacactgctgataagcctggaagtggtagatgacctcttaatatggtaccatccatggtgatcccttctccatgagcatggagggtgctacgcttggcttggggcatgagaacctgtcctccctccctgggtcagcattagcaacactgatcttagtagacctgcactgctgacctgtgaggcctttgtgggccctcaacagttgtccatggaaatctgggggcccactgagcccgcaggcaatgggcagtgacccctgagccctggagcagcatacctgtaccaggagctgtggggagggataggcattcacaactgcactggccatttccaggctgactcggttcagctgctgaatctgtctcctccagactagtgcgagtcccctgcca

SEQ ID NO: 86982 - DNA, 1078 bp, Homo sapiens
catctctctttagatagtgctgactgattctagccctcagggatgaggatgaaaagctggaaacttccacttccccaacctcagagcctgactgtaatgaagagactggcagcacctcctggaacacaagcctaggtgaggcccagtctttcttgggtcttattatttgtgaaggtctctctgcctgtcggctggggcagagactgaaatactgccacctacctttggcatttaatgttcctctcctggcaaaaattcactgccacagacaaaccacccccactcctacccagccagccctcaaaacacaaaggaacaaagacagtccactcagacacttatttaataactgtagaaatccaaaagaattagcatcaaatcttgaagtcgtgagtgaagctgcgggttggcttgactgggctcagccactgagctgcctcaaccggccaaggaacgggattatgatgactatgcggacttctatattgtcttcatctcattgtgtgtattatgtatttagtttcaataaagcatttgtaccaatggctctggagcttggaggaagactaaaggaatgtgtagtgattctgagtaagatgtagacctacgcagcagagctatgggggagaagattaacaaagtcctttcttccaatatcaggatagtcatgagttgcagtcccatccaaaaggtcattagggctaaaaggccctctgtgtctctgaactatgagattcttgctccctccgggggagccaaggagcttgcaactgggagtttgcagtgaatgagcaccatgacacagtcatttctgatccctctatccagctgttgtgaaaagatgaagcaaaggaggcaagaaaatgcttaatttagcagacaagagaatggacagtgtgatccttgtttgtgctagccattgggtgatgcaccacttttcagctccatgatgctacttgtttcccttcatatcctgtttccatttatgcccttcagttatggtctagaatcaaacaattctaaacctcagtgtcttatgaagctgacacttcaaaacctgcagaagcaggttgccttt

SEQ ID NO: 86983 - DNA, 1022 bp, Homo sapiens
cctcagcaacaacttgggaacagcatttcctccaacacgctttcctgactgcccctcctgtggctaccttaagtccccctccatctactcctgtggaattcaacacaggacattgtagctacttgctacctatctggcttggtcataagatggcagattccttaatggcaggaaccgctgtctggtctgtaggtatcacacaggggcgtggctagcacagagtttagctaattgcaggcattcaatacatacatgaggaatggctaattcccatttcaaaaggaagaaaaccaagactcatagggtgatttgtccactgctaatggccagaaagcagcacagctaagacctgagcacagtcccctgcattcctagggcagagcttgtcgcacacactttcaccacatgcagaggagagctccgagagaagcctacacacagcacacttgtactcggcaatctgagctccccagatccacataaactcgctcatggatgacctctaaccacacaatcacaaagattctcgctatggtgggtggaggaggtaaagaccttttctgtttgtatttttttaaaggtggtattctttggctgtaggggatagagtgtaagcttggagcccaacgcaatcctgactaccccttattgtataaccttggcaagtgacttaacctttctgagccgattttctgatcgagaaaacagagataagatatacttctatggagtgttgtgaagaataaataatataacttgtattggctgccttgtataatctctggcattatatgtgctcagtaagtactgctgcttattttctttaccatgtgagtaagaaaaaagaagaaaacccaaactattagcaaaagggtcttgttttactactgcacttaacaattacatttgaatatgcatgcgcacgagacagacatgtatattcatatgtaattcttatttctagaaaactccagacacgcatacctccagacaagcacacacccatcataagaagtattcag

SEQ ID NO: 86984 - DNA, 1462 bp, Homo sapiens
agggtgctgtggaaggacagaatgggtaaccacacctctccaggagcagtgtggagggtaggctggagcaagaactgagggtgaaggaatagtgttttgtgcctactttgtgctaagcccttttccatacatatcttggtaattatcaccaggtgtggtaggtgttctctgcattttcatttgaggaagaacggctgctaacagtagagccaggatttttacatggggtacctctgacttgagggcttccagactgttacaccgaagtgtgtgagcccaaggcttagatgaggagtttccaatcttgtggcttccctgggccacattggaagaagaagagttgtcttgggctacacatgaaatacactgatgagctgaaaaaggaaaaaaaatctcgtaatgttttaagaaaggttacaaatttgtattgggccacatttaaagctgtcgtggctcgtgtgttggacaagcctagcttaggttctctctttggatcctagtcggatttctgtggcctcacacacctggtgaagctagacctgagtaagaacaagctgcagcagctgccagcagactttggccgtctggtcaacctccagcacctggatctcctcaacaacaagctggtcaccttgcctgtcagctttgctcagctcaaggtaacaattcatgaaccagtgtttcatggccagggtggcagagaactcagggactctggagcacggccctgagaaaggctgacagaaatacccccttgttggtcctgcctcagatggcgctccctatatgtggaacacagaggggcattcttcctgctcattttgtttcaccctgagggactatgtatgtgaactcgggcttaatgagcctctttgcccatcgcccatctctttagaacctgaagtggttggacctgaaggataaccccctggatcctgtcctggccaaggtggcaggtgactgcttggatgagaagcagtgtaagcagtgtgcaaacaaggtaagcaccaagctccctcccagtggctccttatacactccctgggatttctcctcctcctgtttttccctcctagggcacctggagctttgtgtggagttaagcattcaggtccgagtgaaatatgtccactatgagcctgtcaaacagagacctttgtttctgcatttactttatctttttgttttttatttgttttgagacagagttgctctgttgcccaggttggagtgcaagtggcacaatctcggcccactccaacctccgcctcccaggttcaagcgattctcctgcctcagcctcccgagtagctgagattacagacgcctgctaccatgctcagctaatttttgtattttttagtggagatggtgtttcgccacgttggccaggctggtctccaactcccgacctcaaatgattcgcccaccttggccttccaaagtgctgggattataggcg

SEQ ID NO: 86985 - DNA, 1022 bp, Homo sapiens
atatttatttttaaagtgctaggaataatgtctaagaatctaaattttgcttgcctgcctgcctgcctgccttcctttctttttttttttttttgagatggggtctcactgtgttgtgcaggccggcctcaaactcctgaactcctgggctcaagcgatcctcctgtctcagctttctgagtagctgagactatgagactacaggtgtgagtccctgtgcctcgcctaaggtttaccttcttggaggttgtacagccacatcccttctctttgcattcttccttagatcatggttgactggcttatttttcctcttattcccaggaacattactctttactgccattttaaaaggcctttcctaatcatgggaacattctctggaaaatgcttcattaacatatgtcagtgaattgttccagatgttggtctgacatgtttttctcatcctcttttacctaggctgcccttccaaaggccaccatcctggatctgtcttgtaataaactgactactctaccggtaagattggcatgcagccgtgactccttctggtgccttggatgcatctccttcctgtttcgggggttgagaggggggtgggagggtgtcataaggtgtaatttcaggataggcctacaggcaggctatagctaaatctgagtgtgtaggggaggcacagtggaatggagtggttggtctcagtgggaaaggaattgagatggaggcctcattcttcagaacagtggtaaagtcagtccacagaaaactaaactcaacagggtgctgagtaacttactgggctcatcttttttctacattattttattcctctgaaaaatagtttacctccctactgcatagaggatgctagagaccattttgtaagttgctctgcgttccagggagaaagctgtgaacagcttccttgtgcatcttttgatggggagcaagaaagaaggtgattttatgggctaccttatcattattctcccaaaggacttgaattagttgagatttgc

SEQ ID NO: 86986 - DNA, 1044 bp, Homo sapiens
gagagacagaatatgttataggtattgttttgtttttgtctacctcccctccccttactggactattaattccagagactgtgtcttgttcctgctatgtctcccagagtctagagcagtggaagacacatagtagctggtcaataaatgtttcacgactgagcaagcaagtgagtgaacaaggcagagatgacaggttgcccctgggctttccttacagagatgtcgccacaatgaatgagcagggcttctgcaagatcgtgggccgctctaaggatatgatcatccggggtggtgagaacatctaccccgcagagctcgaggacttctttcacacacacccgaaggtgcaggaagtgcaggtgaggcacttggctcaggtgagcccccagaaacaagaaacacacatgaacacggtgatgtctgatatttttctttggccctggaaggtggtgggagtgaaggacgatcggatgggggaagagatttgtgcctgcattcggctgaaggacggggaggagaccacggtggaggagataaaagctttctgcaaagggaaggtgggagcctccgctcaacctagctgatgctgctctgttctttgctcacccactcctctgccaaccagcccagggtggggattgctctgcccttgacgaagctgactcctggccaggccagcccctggtcccctacccatacccctgtgagcttgcgcagcctcacgccttacctccctccctctggtctgcagatctctcacttcaagattccgaagtacatcgtgtttgtcacaaactaccccctcaccatttcaggaaaggtgtgtaaggtggaggaggctggggagggcagcctgggctctggggccccatagggccccacctctgtttccttcagcaatgggtgtggagagactggcagtagggtgaccgggtcacctaatcctggtttgcctggggactttccctgttttggcactaagagcctgagaaaccccttattcttgggtgaaccaagacagctggtaaccctaactccatt

SEQ ID NO: 86987 - DNA, 1046 bp, Homo sapiens
cggtaacccgggcttaccccacctgcgtacacacacctcagtcttcctgggttgggggggtggggatccaggccaggagaagagagctgtgccccgctggctcgcagctggacgccctccagatgtggtcaggggagggtcgtcatcctccagatgtgggaagcttcgggagcctgggagctgtactctgcccgcgccggttagcgagctgggtttggtttccgagtttggtggggggtgggtgggggcggtggggaggaagctgcggggacggaggaggggggaccgcaatctcctgggtttccctccttcccccgccccaaagtttgcggcggattctagggtctgatcccccaacctggtccttgaggctgaggtttttactgacctagaaggagatgttggggggcggggaccaggtcctggcccacctcaccccccacctcgcgggttggaggcacaacaaggagattccggcggcggctgatgtcaggggcgcagaatgagaacaagatgtggtggaggggagctgtctgcccccggagctgggagtggagcccctttccgctagagcccagtgccgcgggtgcctcctacccgatctccattcgatgcagggtgcttaagattgggttggggagttttatgctggatttttcttgtggagggaaagactgtgtcaagagcttttttagcaagtgggggatggggttaagctggtccaggttactcctcccctttcacaaataaagagtgctcctgcagaccaggtatgggggactgcaggcccgcgaaagtcttgaggggacagtaatactgtcagtgtgttcactaaggaggactcgggtccaccaccccagcgtagactccgcagataggtttggggaatgcaagccccacattccagggagatggatttagcactgctccctgtctgcccaggctggagtggtaggggagaccccagcccagtcagaccctagctcaaagcgccacttgacagacgcctggccccaagctccctggcgggtcctgccaccggggga

SEQ ID NO: 86988 - DNA, 1031 bp, Homo sapiens
gatggcggcaatggcctcttgggggagggggtagacattgtccactctgcacggcttgggagctatgcccagcatggtgcctgacacataatgggtcctcaatatttaaatgtgtgaatatgcctagtggtcatttgagggtgttgagaggttgggaggctggtggtggaagagggagccccgggctctggtgctgtagcagcggggactgcagctgtggacgtctgccttacacctagtgccagggcggtcatgacaggcagttctgcctgcctgagcagctatggtgtgcagaggaaactatcatagatcaggagcttggaaaccaccgtctcatcctgccttctcgggtgaccttcagcacatgacttcggcatttctgggcctcaacttcctcgagttctggggaagaaaatgatctaccccagatatttcacagggctgttgtgagcatcaactgtggcattgtgtgaaagtgcttggtaaactgtaaggcaggcataatccgactttaggtttgtataacacattcacatacagtatctcatttgcttctcacatctaccctgtgaggtagggagaataggattcagattctgcagcaaactcatggtgtctggcatttccacaggcatgatcgatttattccccaaatggcttgtgcaaatagtcagggtatttgtggcttgtcttcctttacagatgaggaagctgggtccagagaggtgagatgaccaaggtgggactccccttctctgatgaggagtctggggctgggggctggtctgcgtgtatgtcagggccctggcaccacacctgcttagcctcagatggagccaggaggtaaacgaggaggaggtgttagggcggggtcggggggccggcctcagctccagccttggccagctgtttccttgactgccagtacctggtttgagcgcatcagcatgttggtcatccttctcaactgcgtgaccctgggcatgttccggccatgcgaggacatcgcctgtgactcccagcgctgccgg

SEQ ID NO: 86989 - DNA, 1049 bp, Homo sapiens
aaaaaagaaaaaataatggtgagttttacacagaaattcagatttgtgtctactcaggaaaagtctgaagatctgggaagactgggcttgcattccctcaaggcaggagtcagccagaacaaagaggcagttttggatggagaatctactctcccctttaccacagtccccgcccctccctactgcttcacatcaaacccacaccattcatttccatcgcctgtcaggcggctgtagctatttgggttcgcaggaacccaggctgtgggcagctcctaagacagcttgccctcgggctgatgcctccgcctgtccttcctgctccccgccagcccatcatgaaccacaacccctggatgctgctgtacttcatctcgttcctgctcattgtggccttctttgtcctgaacatgtttgtgggtgtggtggtggagaacttccacaagtgtcggcagcaccaggaggaagaggaggcccggcggcgggaggagaagcgcctacgaagactggagaaaaagagaaggagtaaggagaagcagatggctggtcggtagtctttccacctctctctgggtcgtgcttgaccttggccttgcgactgcagggggctgggcgctggggccgggggcagggagaagaggctcccacccccctcctcacctccttctccccaagagcatgtctgcctttagagcgagcatgaagcagaccacttcagccccatgggtagggggagctgtccccaccctggggcctcccaggacctcagcatcatcctccccagatgatgccaaatggaggttgacacccagcctccccgagcttgactctcagaggagcctcactggctgctccactgccccatgccagcatccagaggcccagggtgggcagcaagcatctcaaccctgcacccacctagtgtctgcagctgccgagcaaagcctcagcagatctcagtaatggacaacagcgtaaaagagaacccagacacccctccctccctatctctaacaaaactttctaccatgatatatatatatatatat

SEQ ID NO: 86990 - DNA, 1118 bp, Homo sapiens
gccctagatatgcccttccccccactgtctgactctggtattttctccacctaaggcagctcatcctggtgggaggcagggaggtggtgccacagctaccaatgcatcagtgaccacaggtccaggctcctcctggactatggttggagctctcaaagcagcaggcttgcccaaggctcctcccaggggctttctatttcttctccacacctgggtgcttgcctgcagagccgaggtccagagagcagcaaaggagggtggcatcgccaggccccaactttggaggcctttgggcagaccatccaggggtgtcctctgggccaaggcctcaaagccttgtgtctgtacccacctggcaactggcgagggactcgggctggaagttcgggtccagctcggtcatgcctcgtagctagctgaatgagtcactttttgcctggcttcattctctccctctgaaaaacaaaggggttgcccgaggagatgctgatcagattggcctggtactctttggacctgtgctctaatgggggatttctggcagcctcagcacctgccgtctggggtaggggccagggtggaggggtgtttgtacagacctcaggggccgggacctgtctataagcagatgccctgcctcagtcctcctgccccgccttccttctgggcctcttggaggagggtcccggctgaattgaagcccacccaccccacagactcctagtgcaaggccagagttggtgggagcagctgctccgtttggcctggaactgcctacagagtcaggctggggtgacggggagaggagggcaactctcccagcctctcctctacattgtctcagctaataatggggctaataaggagccgctttttctaacctaattgtattcaaacattttagttaattctccattcatattttagcataatgggatcgggtgctctcggcatttatggagattaatgcagagaaaatgttccggctgctcaggcaatgcagggcgactagcgccctctggttcttgtggtactcaaggaaggaaggaagaggcccggcccacccggcccaccctccaccatcgcggtgtggatgacccgtagcctcctgtcctccc

SEQ ID NO: 86991 - DNA, 2632 bp, Homo sapiens
tagtgagctgtgaggattaacttagtgcactactagatgtgccttctgttttacaagtgaaggaccaagttcagttacagagcaaatcacatagatgcatgtgtggtccttcatacatctctgggtttttgacatcaggcttctggcttctcagggcacctgggaaactgatctgtgcattgcctctcccttcgcagtgtgtgctcatgctgtcgcagctgctgagctgtttttaaggacttccactttgcaacccaatcatcctggggccttagttgcactatcactgacttagcctgccacagggatttttttttttcttctaggttttgaaataagacaagatactggtatcaatagagtgcaccaaacatatggagacaagtggctcctgttaatctgtttaacatatttttgttttaggacaaggatgttgctcgactccaagatttccaggagctggaactggttctgatgataagtgaaaataattttctgttcagaaatgctgcatccacactgactgaaaggccttgctataacaggagagcttcaaaactgacttactaatgcagcagggacttttatcactgagtattatgacagtgtgcatcacctctgggccaaggacaagccattgatctaaatgcctcagatgcccgggagggcctctggtgccactgcatagtatatactaacatcattctgccaaggtaggaagcccctgacccccaagcagtggtgccactcttccaagcctcttggtgcacagtaaacctattgcttgaagctttgaacagctgagaagtggtctggagaggcagaagctgaaggttctatatccagtgtgttttatgtccagaatgtaagagagttgtctaagcagcagctgagagagagcggagcctatttctagccactcctgttgacagtgcacctgaagggctgggatgcgtttttcttggtgttgcatgctcacaactctgctgacattgggaacttatgagagaggaagactcgggaaagcacagatactggacagatggattctggtgtggggaaagcacagatactggacagatggattctagtgtgacttgtgactgtgaggtttcctataacatatttataaatgttactcaggttaaaagtatttaagaatacagttaactaattgtaaatatgctgttaaccaaaagagctttccctccctcactttttcctttgtaaacactcatgactgcttctctgtctcgagtcatctctgcattaactccccttcgtggtcactagagggctctctgatgccttctaaaagaacaactgcttttttacaatgccccccacccccaccccgcccatagagacagggtctcactatgtggcccaggctggtctcaaacttctggccttaagtgatgctcctgtccttggcctcccaaagtgctgggattacaggtgtgagccactgcacccagcccactttttttttactctgaagtgattccagtcatatgtgtgtgtaactgcatcctatgagaagagcacaaatattgctgttccatgttctccactttcattttccactacaaatgaaaagcaatttttgagactgaatctgttgctattttaaaggttattgtgggaaactgagctaaaggagttagcatctttatttttgtatcaaaaataaaggttattttgaaattattaggatttttacacaattctgaaatctgttgcttttgtaaacaaattgtttgatcttagtgatccccctactactaccaccaattcacttcacaaagtcagttatgagtctaccagactttgttctgaaaaatagaaacaaaacacctgattaagctcttgagtatggcataggaattttttagaagaatgcattcaaggattcttttcctttccttcagtgtcattaatgttaaaagagcagccactgttttgttgaaacaaacagcttaacttcagaaataagaactagcacacttagacaaacaggagagcaggggtttgaagccagctgtcgaagagcatccctgctgtcttaagaagctttttccccatagtgcctatagtttccaaagaaactcaacttcctaactgtgttaacttaattttattagaacactacagttgagtgagaacgtgcagaagatgtcaacagaagagaatgttgtgctaagataatggcctcctgctgctgcctaaatgctgaaatgaggttgagatgtttttcaaggctaacttcatggactcactctgtttagtgacttaattgtatcccaccaattactgctggtgacttactcacccttgtacagtgtttgcatagcagagtgaaggttacttattaccctctttctctcaagtgctttaaagaagaaacctccctggtgtttcttttctttttttttttgagacggagtcttgctttgttgcccaggctgaagtgcagtggcataatctcagctcactgaaacctctgcctcccgggttcaaacgattctcctgcctcagcctcccaagtagctgggattacaagcatgtgccaccatgcccagctaatttctgtattttagtagagacaaggtttcaccatgttggccaggct

SEQ ID NO: 86992 - DNA, 1106 bp, Homo sapiens
tatctggactatctgtactcctctgccccctgcatcctgcccaggatcatatgttgcatgtagttatcacgttgttttagtttcctttaatctggaatctttaccctttatcatttttgatcttgatctttttgaagagtccaggccaattatttttgtgggatatgattttctatcattctttctctacttattagttggtattttactgtaaagaagggctttcccttctccttcattcatatcagtattgactcatatattcttattttattcagtgggttataatctgttactatcattttttaattattcaaattatcccagatttggccagtgggagccccttgaagctagttcttatgtcccttgcatgtgtcttcattgttcttggagcactgccttactttctggggcagcaagatgttccgggcttatagcataacttttcctgccccaaccctggaatcagtcatttctccaagaagccctggttctttttggtggagaatggtatttagggcacacagcaaacttgcctcccacttgggcccaccgagaatggtattcagacaccaggatgtggtcactaggtgtcctcattgctacaggtatatcatttcttctaggcccgttgagaggacatagccaggaaagatatcaatatttctctatgtataactttttaaaaatattaaaaaccacaagttcatcctgattcttccaaatccagtcaaatgccatagggtgtagctagtcttacttttccttttttcctggaagtaactctctcacttcctgtttttgaggagttactactgtaggtgctaacagtgacctggggtgctacaagggattcatatacagggaacaaagcagaactgccaaatgtacagggtgcttgactcaggctgtcttggcagccaggttcagaataaaggagcagattgcttagatcccagacctatgaataataagccaagaccccttcctcatgaaggtgtgctacattcaaatcaagttatactttagcttttattagtagcttgtcatttggctcttttactgtcttttttgcaaggagtttcatattttacagatacctt

SEQ ID NO: 86993 - DNA, 1054 bp, Homo sapiens
taagataatgataaaaatggtaatcataaacctaatgaagtattcttttttcttctgacctgacactgaccaatgtcacataccaaaagacaccactttcaaaagacaccttgttttgataattttgaaaggactgtgtaaatgttctgttttcttctttttaagtggaagaagaagatgatgatgatgatgatgatgacaacctcccccagctgaagaaggagtcagaactgccctttgttcccaactatttggccaacccagccttcccttttatctatacacccacagcagaggattcagcccagatgcagaatgggggcccctccacaccccctgcatcaccccctgcagatggctcacctccattgcttccccctggggaacctcccctgttagggacctttccccgggaccacacctctttggcactagttcagaatggtgatgtgtcggccccctctgccatactcagaacaccagaaagcacaaaaccgggtcctgtttgtcagccaccagtgagtcagagccgctccctgttttcttctgtcccgtccaagccaccaatgtctctggagcctcaaaatgggacgtatgcaggaccagcgccagcattccagccatttttcttcactggagcatttccatttaatatgcaaggtaacccctcatcagcaaacagcctctgcaacaggggagttggtgtccagaggggtgggatttaatgaggtattctgggtataattgcaaacttacagaaacgttacatgactaacataaggaactccctttactcaaattcacaaattgtttaccttttgcccttttaccctgatacccttcagtattctttccattatatctttcctaagaacaaggatattctctcttttttttattgagacgtagcttcgccctgtcacccaggctggagtacagtggtgtgatcttggctcactgcaacctccgcctcccaggttcaagtgattcttctgcctcagcctcccaagtagctgagattacaggagcatgccaccacgcctggctaattttt

SEQ ID NO: 86994 - DNA, 1001 bp, Homo sapiens
ttacctcatgggtttagaggattaaataagttaatacatgtaatgcctttagaacaatgtccaacacgtaaagcattatacctgtattagccattgttgttgttttcttattatgaagcaatatgctagataatggaatataaggttaccctcaaaaaaacgtactctcttgcatttgcaaagcagaatggtgactgctttcaagtcttagttgctcagtaatcacaatttcagcaccaatgagtgatgccctgttgatgaatgacacccagtgcctcaggtctgaaatagtttctgacactaataagatattttgactgcaaatgtaaagcttaaggagttgaagttcaaagatagagtaatctatcaattagattgatcactaatcattcccccacatcagttgtaattcaagtgtcatgcataacccttggttcatgaagaacttgaaaatattacctggctgcaggggctctgagttatggctgcccagagccgcacagctctggacggtaaatgatgatcactaaggcacagggctgtgggggccacgctatgttgacttaaccctgctttacatgggtggtagtttagcaagttggtttgtcccagagtctctcagacccactggtagtaaattacctcctttactctcaagcttgccacgaacaagtgatctactactagcaagtgagcattttatttccaaaagggagcatatttttctcatcatgcttcattcatttttgagggctcacttatcattataattgttcactttttaagcctgtgccacagacatccacacacaaacacactcaaggttccagtttgcccagaatcaagggtagattggatccttctacttcaagcaaggtccactttatccttagtttactcatttggtactttttttttttttgagatggagtcttgctgtgttgcccaggctgaagtgcagtggcacaatcttggctcgctgcaacctccacctcctgggt

SEQ ID NO: 86995 - DNA, 2398 bp, Homo sapiens
gagactcagggcgggaggacaaagccaggtgcaagaggcgtgagcacagcgactaggaaaatggagtcggaagccgtaatcttcagtttcctccgctgcatgaggcaccatgtgcaccacgtggactaaaggagacactttctccattttgaagcggtgtccaggcttcaagacctaggctccaatttctcaccgtgaagaagctcgggaaaaccgggcgcttggggaggcgcgcgggcagaggctacccgtccccgcggcctctagacaggggcggagtccctacccggcctccgcgggccccgcccccggacggcggaagccgagctcgccctctccgcccgggcctgggcgtgtcccacgggcgcacggcatgctgggaaggcgtccgcgcggcggccattttgtcttgtcggctcctgtgtgtaggagggatttcggcctgagagcgggccgaggagattggcgacggtgtcgcccgtgttttcgttggcgggtgcctgggctggtgggaacagccgcccgaaggaagcaccatgatttcggccgcgcagttgttggatgagttaatgggccgggaccgaaacctagccccggacgagaagcgcagcaacgtgcggtgggaccacgagagcgtaagtcccgcgggccttggcctgagcccgggctccgtgggggaggggagcgggcgcgggctgtggccctcctggccgcggcgcgatgtggccagggccgcacccggggtcgagcgtctgacccggtgcccatggagccaggagggaggatgctgtccggacccggggatgggggtgatttggttttgttgttctagtatcaagggggtccgggagagcccttggcataattgaaaagcaccttgatgaggcggggaaacgcgggaaagaaggatagcagcgtcttattaaatctagcggctccgaggtttcacctcattatgaaatagggagaagggcacatttttctatagtttgggttgaacgtcgtatttagactaaaatttctgaccaggattcatggtaaaaatcgtggcggtattttatttaagtaattacagcatgacgcttatacggggaaatagaaatgtaaaagaagtcgtttacttgttagggtttaccgtgatgatttacaagtattgttcgttaacagtattctaagaagtcccttatagaggcagctgtcaaggttttttcttccacataaaactcatttgatgctcttagcccggggagtaaaggtaaatattataaccccagtttcactggtgagacttaaaaaggctcacccaaagtcttggcaactgaggaaactaatctttgtagttctgttagctttccacaatcctatgaaactggttctctgcacctactgtagcatttcaagtgttttgatctagttttgaacatgcagtgtaatgtttactttaggtcttatctggagaatagatacagaatttaattttactttgaggttataatctaacatgctaattttaaaacaattgctaatcaaaataggaaggaatagttcaggtaatgcatgcttctttagaaaactgttttcttactctttttaaacgtaggctttggttaaggtaaaatttcttttttgcagtgtaggaaagcaagttggtgctagatgactccttttaggactttaagaaagagtaagtttggctcaagttgtgttggggtgctaactgattccaaagtagtatgaaacattcttagagtagaatttattgtttttaagaggtgggttttttgtttttaacatttaggctccccatccccccgaccatttgtcacaataggagactaaggaactgcttaccttgaccatctttcttttgtaggcatctttgttatagcgaagtaactttttttttttttaactacctgactctgtaacctttcagtctaaactttgcaaatgtgttaggaataacgctcaaaatcctaagtaaggtaaaaaaccaaaacattatggcgatttggcttatgttcaataggttatttgtatattttgaattcaagagaaaaatgctttccattgcactccttatcagttggaacagccttgtatctctgcacccttgactttgaacacgttttagagaaactgttttctttcccggggtaatttgttgccacattgcattgtatgtgatgggtttatgactcttcaatgatgaggccctcagaatagcaatttaggttttatgtcatctcagccgtaatctgctttgctttcagttttagtacttttcactaattttaactttcagtgtttattactaaagtatttaatgccttaatgacagattgcacttcactctagattgaaggatttcaagtcagttactggcatttcagattga

SEQ ID NO: 86996 - DNA, 2034 bp, Homo sapiens
ttatttatccaaaaattttgatgtctaggattgataaatagcaaaataagcatagaattttaaaaggtggaggtaaattcgggaagaaatagagaagagttaagataattgctttttagaggtgggaagaagtaggggttaggtactagtctagtgctatttgactttatatacagatttgaaaataataaagtcggcaatggttcagttcagtggtctgtccccatcagttttctttagtggcaataaggaacagtttcctttcaccttccctccttttctccctccctcctttacttctcttttaaccatatatggttgctgtccattatattgactttgaagactgagcagatcaattttatatcctatttggttatgatgcttcatgatttagtaggatcagtttagatgtctacaaactactcagtgataaagtgaatcctttttctttttaaaaagaaaaataactctttttttttggcaagaaaaggttgctaataatcacagataatttatacaattatattttttcccccaggtccgtgtgaaaaaattcatgatgaaaatctacgaaaacagtaagttattttgcttgtcatttccacccccccagttattagttggtttaagtgggacaagggttgaggaataattgcaattaaatgtaaaatgagtgtctgagagaagtccagtcagtggctggggatagtaagaaagttctatagcttcagtaatgatactgatagctaccacatgagtgcaccctgtatgtcagactttttttttctgtagcccatttgctgttttttttaaatgagcctcactgtgtcgctcaggctggagtgcagtggcatgatctcagcttactgcaacctccgcctcccaggttcaagggattctcctgcctcaaactcccgagtagttgggattacaggtgcccaccaccatgcctgactaatattttgtatttttagtagagacagggtttcaccatgttggccaggctggtctcaaactgctgacctcaagtgatccacccacctcggcctcccaaagtgctgggattacaggcgtgagccaccatgcccagccccgattttatccatgagacttgtcctaggtccagggtcatagatccagtacagtggtaaagctagtggttaaacccctgtgtaaagctctatgatgaggggcaatcagaaagtcacttcaaatacacctggtttaccctgcagcctaaatggaatagtcgttgaggctagttaagatagaatatttgagttgtaatggctgaagatttggaaatgagtacttgtttattttcatgttaccaggtatgagaagagctctcgtttcatgaaagttggctatgagagagattttttgcgatacttacagagcttacttgcagaagtagaacgtaggatcagacgaggccatgctcgtttggcattatctcaaaaccagcagtcttctggggtaagtgaagtcaattcagtctttgtaaacggtccttgttttctggagattcagagacctccctaatatttttgaaacttgtcttctgttcattactttgttctttaaaatgatatgaaacttatagggcattcattttttttccagtctttattagcaaacataacactgattttgctaaccataagatttttctttgtttttatttttcttgaggccaagatttttcccttaaatagtagtaactgacaatatgtgattgaccaacagaagttgaagataattgaattactatcctttcaattaagcattttaattattaaatagaaatattatgtatggtatgtgcaagtttgcatgtttatctttgttttcaacttgttggtaatacgttttattgtcttcaataggccgctggcccaacaggcaaaaatgaagaaaaaattcaggttctaacagacaaaattgatgtacttctgcaacaggtgagaattgtgtgcattaatgtcaggaagtaatgtgaaacagacatgtaaccagcaaaaatacaag

SEQ ID NO: 86997 - DNA, 1081 bp, Homo sapiens
tttaaaaaaaaaaacagagtctcacgtcatcatccaggctggagtgcagtggcacgatcttggctcactgcagcctcctcctcctgggttcaagcaattcttctgcctcagtctccccagtagctgggattacaggtgcccaccaccatgcctggctaattttttttttttatatttttagtagagatggggtttcaccatgttggccaggctggtcttgaattcctgacctcaggtgatctgcccaccttggcctcccaaagtgcttggattacaggcatgagccatcgcgtctggccgaaagtgcatttttcttaacacatcagttatactttattgaagtataaaaaaaatccaggataaattaaacccaaagaggcttttgtaaatgaaaccaaacaaaaaagatggaaaacaaccactaatgaaccatggggaaaaaagacaatagttgggtttgaaagaaatcttaactgtttttttcccctactcttctaagattgaagaattagggtctgaaggaaaagtagaagaagcccaggggatgatgaaattagttgagcaattaaaagaagagagagaactgctaaggtccacaacgtcggtgagtaaaccttatttcacattatctcatctgtctgttaacagttagtaggaactcatttttatttgagaacctttgaaaactgatgttccaaacttagagtcagcacaatttgtagcccacaaggtctgtggcatctactaagctctgcctttgtgcagtatgcaagcaactttatatagtacaagaaacaaatgggtgtggttgtatcccaataaaatgttagcaaaaggcctctctggcttgccaatcactgccttaaaccataaattttcatatgagcctggttttattttcatttttgttgtaataaattactcagtacatacttacatctttgttaaaaattaatacacccttaaatatctaattcttttaattggagaatagaatatacttgtttcagatactattgattgcagaatgtaattggtcattggttcctccatattgaataggatatgttcagattatagt

SEQ ID NO: 86998 - DNA, 3861 bp, Homo sapiens
ttaattagttttgtatatggacattattccttgaacctaagcaaggaatgtattcatactaaaataggtggctttctgaaaggtgatttaaattttgtaaggtaatgtgggtgttgaacattgaacagtgggtctcaacatttcttctggatgattcagtaagttagttgctgttaccttaaacatccctctctaaaagttgaccacttgtagtccaatattactgatttggggaaatggaaaagagcaattcacacacattagaaatcttttctaaatgttgagtactttcctgggatttgtttctcttcctcagatgttcttaaaataactgatttatcattttagacaattgaaagctttgctgcacaagaaaaacaaatggaagtttgtgaagtatgtggagcctttttaatagtaggagatgcccagtcccgggtagatgaccatttgatgggaaaacaacacatgggctatgccaaaattaaagctactgtagaagaattaaaagtaagtttttttgtttgttttgaggcagattcttgctctgtcacctagagtgcagtgacgcgatctcagctcactgccacctccacctcccaggtttaagcaattctcatgcctcagcctcctgagtagctgggagtacaggcatgtgccaccaggcctggctaatttttgtttgtttgtttgtttgtttatttttgagacagtctcgctttgttacccaggctgaagtacagtggcgtgatctcggctcaccgcaacctccacctctggggttcaagcaattctcatgcctcagcttcctgagtagctgggattacaggcacacactaccacgcccggctgatttttgtattttttttaatagagacggggttttttcctgttggccaggctggtcttgaactcctgcctcaggtgatccgtcctcctcagcctcccaaagtgctgagccactgcgctcggccagcgtaaatttcttctaaagatacattttagctattaaaaaaatctattttagctatagctacagcttttagctatcagtagctatagataaaaataactatattctaatatggcttaaatggagatatgaccctctcattgatattttcctatgtgtaattatttttgaagcattgtgagttctgtgaaattttgctatttattgaactatgaaagcacttgattttcttaactcttgagtgccagaaatttgggaagaatattcctgaggattagacaaataatgataccttgtgtatatacatggtgttggaatgtctacatttcccttaagggcatcaattccataagttggtctacagataacttcacattagttgaccattgtttaacaatgctttaaagttacatttgcataagaatccaacttgatttttctaggaaaagttaaggaaaagaaccgaagaacctgatcgtgatgagcgtctaaaaaaggagaagcaagaaagagaagaaagagaaaaagaacgggagagagaaagggaagaaagagaaaggaaaagacgaagggaagaggaagaaagagaaaaagaaagggctcgtgacagagaaagaagaaagagaagtcgttcacgaagtagacactcaagccgaacatcagacagaagatgcagcaggtctcgggaccacaaaaggtcacgaagtagagaaagaaggcggagcaggtatatataaaacaccctaagactgtccagctcataatgggtgtgcaataacaataataactactagtattattccttggaatggtacttgggaagctcttaagcatctttaagtgataggatgggttgcgagagcggaatcagtgaataaaatagttccatcttcggggcaacttctgtgccatttcccacctgtctaggaaatttcacccaacctttttacaaagttagagtacctgatggtctcttaagtgcttgtctcactgattccgagaaataaaatatgaaatcagccatactgttttaattataattacaaattgaagaagagtcttaaagagcacaacgataaccatcttagcactattggagatgaatttagaaagattttcaataatttttagttcttaagatttctaatgtaaatatgttttagagggtaagttttgcctagtcttgttaattaatagcatctactccaaggcctttacttattgtaatactggctgaagttgccttttggttttaaattattaagaagtagagatcgacgaagaagcagaagccatgatcgatcagaaagaaaacacagatctcgaagtcgggatcgaagaagatcaaaaagccgggatcgaaagtcatataagcacaggagcaaaagtcgggacagagaacaagatagaaaatccaaggagaaaggttagtttatatgagaattcagttcattaagaaacttttcacaccctaatcgccccactcacttttctccagacacaggcaaagatccatttcatacatactccttttcactttgaggaatgccattcagtaggagacaggcattctttccccctctcctacttagatttgtgaaaatgacagtttatctggtgttttcttagatgttaaaaacatctttcagttgataaacctgaaggtttttaatgtagcttcttttaagtgttatattacctttcggggttattaggtgtaggatttattatattaccttggttattggctccttttttttttacacactgcagtgtttcataatacgtcttataaagtgagtgtacattgttgcattaatcttcatttgtagcattcatttaagttagtaattaacatctaagtacctagaagttgaattgcttacatgtgtcttacccacgttttcaatgggatcaacatgctctttcccctttactttttcttttttctttttctttttttttttttttggtgtggcatcccagtagctgatttactgtgctgttggcactattaatggactttttaatttgtgtggcatgttttcacaagaatattctcatctaacttagcctttattggaagataattctgttaaccaccagggtctcctttctgagtttcatgttcttctattttgtattttttatataaaagatataaaatatcttttattttgtattgaatgagctgttgtgctttgcatggttttaggaatgagagaaggggcctatttctgattttctcagctctccttgtttcatttcattctacctgtctccatgtttaatcaccagcataatatatgtgctactattaaggtttattatactagtcttttgtgtgttgtttgtttattatatcctttaatagaactgtcctggttttttgttttcgtttttcctctagactcagctagaactagcagcacaaaccatggacatattttttggtctctgcttttattttcttaaaataagcacacactctttttctgaaatatttaacatctattggcttttactgtaatgtgagaaagtgttgaaaacttttgtcttcctgccagatgtgctagtgtttgccattcaagttgagaacttgcttctgattcaaaaggcagttgctacaaagggttaactgatttaacattagatttaagaatgttttacctaatctttttgcaagactttctgtgtaatgtctttttgggttgagaggtcaactcttaagagccaggtatgactgtcaggtcaaattaataatatttgttttgagaaagtttttagttttacatttcctattgttagctttagttgctctattctgtgttatcatttgtgccacttaaaattgttgggttggttcttagggataaaagctagctagc

SEQ ID NO: 86999 - DNA, 1015 bp, Homo sapiens
gggttcaagcaatcctcctgcctcagtctcctaaagtgctggggttataggtgtaagccaccatgcctggcccctagtaaaacttttcgttaagcggaataagctgagttacgtttagattagcaacagacagggattttccatgtgagacttggtgcaaagagagaagttactaagaaaactgtatcaggcttgtctcccatgattgggtatgctatgatagagttaaacattggaatctcttttagaagtgatataatttattggcattttgaaaatgctatgtaaaaataaattaattaaaatcagtgtgcagatgagtgaatttaaaaaatgtaaaaaaaaaaatacagaaaagaaactaccatgtagccatctaggcactcttataaatgactgaagatctggactttgggaccaggtgtgagccacagtgggcatttattaatggcaaatgagaaaaagcaagtttattactccaggtgctatgatagaagcagtttatcttactccacaaatgaaaagtggtttctcacacaaagctgtcagcaaccagtgtaaggtgctctctttgtcaagagagtttccttttttcatccatagccctaaaatccaccacaaattgtggatgtccttaggactattaagatctaccatatttacatagggcagaagataagattattggactgactactagtcctctacgggacaacaagacgactcttcctcattgaagctacctgtgcaccggagaagcccataaggcacaaagggaggactttcccacaaggtcagttagagcccactgtcctggcacagttctcacaagtggacagacagacatgaagcaagtcttgcgcttaactacttggacattgctttgtgtattatgcaagtgttacggactaaatatgctcttttacataagatcttcagttctctgagtgggtgcccctcccataccatgttttgtttttcattaccatctctttcctagatatttggtgttacg

SEQ ID NO: 87000 - DNA, 5573 bp, Homo sapiens
gtagttgtagtttttaaaacatgcctgttataaacattcaactttttttcaccttttggggtctccatttttacccttctaacttaataattgaacctcatgtgaacatagttttgtatgctgtcttttatacctttcccagtgctttttgatgttttttacccacaatgaaatttacttaaatattatattctgcaatgtgcttaatagcttctcaccaattgagagaatttacccactattttaccttttgcttccttgaattccccttcctgccttctctctcatatattacaaattttatccctttggtaaattcaccaaaccgttgcttgcagtctgtgggaaatgattgtctctcatctctcagttgtttcactttttttcaaaatcatgtctttattgtattttactttaaaatccatggtcaatgtcttcttttatggcagaaaagaggggatctgatgataaaaaaagtagtgtgaagtccggtagtcgagaaaagcagagtgaagacacaaacactgaatcgaaggaaagtgatactaagaatgaggtcaatgggaccagtgaagacattaaatctgaaggtgacactcagtccaattaaaactgatctgataagacctcagatcagacagaggtaagtgtattgtttctcactttgattagggctttttgttactgtttgacagtgcagcgtaagtatgcacagatgaagatggaactaagccgagtaagaagacatacaaaagcctcttctgaaggaaaagacagtgtagtcctgcaaaacattttgaggtacattgttttgtctcagctattttgtagcagactcgtgcccccattagtgtgcctctttggaaattatcgcccacatttgtaatatagtcgccattgaaaagttaattatcctttttttagggattttgatgtcatttcttttttttttttaataaaaaggttgaactgtttttttttttctttttggtattaagtccatcttgtgttggtacattggcagagacatatgctttaaaaacttaaatatttcggaggcacatgttggactactttgttttaattaaactgctagtatttctttgtcaaggatgtttctagttttttgctttattgccttgcattctaatgcagtttgttctgtaactcgagagccagtagcattggattgatggaagtgtagggtttatgaattattgcagctgactaccatacctcacacagcgttggtgttgtgagcggcccatgaaaagccaaattaaaaatcaaggattcagtcaaactaagcaggtactcatgccaggtactcctttctctacccacatccatgtttgaatgctattgcctgtgatctttacgcttaactgttgtgtatcttttttgttctttacaagaagtgcagaggggttttttgtgtattgcgtgaaaacttataaaacaaatgttaacagaatggaattttttttcaactgtatgtagggctgcagtggtggccagaattagatatctttaaagaattttaaatacaataaacacttcatattattcgccttgttacactcaatgcaattctcaagtctataagaggtatgtgcttaatatttcctactgtgtaggagaatttgcagtcagccataggtatgtaggaatagtcactcactggctgatacatttaaagcagcagtgtgaatagcaaggacagacaccttcaatttgtgaaatcaaagaactgatgcactatatagaacgaatttgggtttttaaagaaatattaaaagttaggtactgtaagtgttcttaaaacctgtaaacttcattctgtgggctagtggtgtgggacaaaatattcctaatgaaaggaagtaccaattagttgatttgttggtggcattccccttttgggaaagcaatgtaaggttatgtctgtgtatgtcattcacacttaggcaagcatacacaggcacatggctttaagaaccacactgatgccttgataattaaaaagaatacaagcattccatgtacacatgttaattagcagttagtgactgggccaacactttctcataaaaattggccttttacatgttgtctaattatcatttttccccaaattttgcgttgtaggactactgttcgaagatttttggaagaatactgagaacggcataaagtgaagatcgacatttaaaaaatgaggtgaaagaaagctatagtggcatagaaaaagtataaagctcagttagtttttttattattattattattaaaagttaattcaggactgatgtgacctaccagatttcagaacatgtgttaatagtatatatgccactgaaaacttaggtcctgtatcatacttttttctttaagactttttaagaaatattacttaaacatgtggcttgctcagtgtttaattgcaagttttcaatcttggactttgaaaacaggattaaacgttagtattcgtgtgaatcagactaagtgggatttcatttttacaactctgctctacttagcctttggatttagaagtaaaaataaagtatctctgactttctgttacaaagttgattgtctctgtcattgaaaagttttagtattaatctttttctaataaagttattgactctgaactagtcccctgttttaaatacaagagttacactattactagaggtgttggtgtacagttttatctgatttgttctgtttaagactaatttttatagactttctaatgttttaaataatggtgcttcaattttaggtggttatgaataaatttgaattttgcttttaatagcaaagatgtgcagtgaactagaatatatttttacatccctgagagattcatttagtagaaaattccaagtatcctgacaagcactctttagctggctagctatgggatgatgtagaaaagcattcaagagctagtttttgttaagtcctgtatcaagattaacccagctgtgtcagtttataaatgtatttgtgtatagggtgtgtagtatatatggcaagggttttttccccccacttaagtgattatttttgtgtcacatctaggaaaaccggcagcatgtttctatctatagccagcttcttcgactgtataaaagtattctctccagctacgtatatacacacatacatatatatcatagcaattccttgtggtttataacttgcaaatactgctatcagtttataggtaaagaaacagtgtgttaaatgacttatccagggagggtcctgtggcttcatgtttatggagttgctaggtctctgcctcatggtccagtgcctgttaagccactgtgttcattctaataggcataatgaattgttaaagaatttactaaaatctcttccaccaaactttgaaaaataatgaagccgcccccactttagaggctctgtatgaaaaaatgctgtggagacagagccctcctggctccctagctgatcctggagatgcagcaatagatgaatgggttatctctgaatttgtaagagataattcacatgaggattaagataaaatgggaagtaaaatctaacaaacacaaagatagctcccaggcactgctttgtgtagtttgacagcattgtggttgtagcagcaaaggacttaaagtgatagtttttaaaccatattctgtccctaagtaataaaaaatctaggaagttactaaaataccagatttgttctgctctgcctcatctagaatcaacgtctaactaacttaaatgaagtataataaatgagttcatatgaaaaggcttcctctatggacacttagatatattgtaactattgaagttacctgggatgtgggggtggtgggaggaggacctgcctccccaggacatctatgactaaggcctggctttagttatggagagagacgtagaagttgaattttacacccaaaattgatgtgactgaagaggaactgattgttgctaaccagctcacaagaatccagtattgagaccagttcactagaagaaacaaacatttctgccatgcagaccaaaaagttattagttggtgaatatgtattttctctttggaaggtctttaaggggagcaaaccagttttaatcaatcagattgcttggtaagtttggaatctgcaatcagttggtcttaaaaaaaaaaaaactttattttggaaatttaaagacatacacaaaagaggaacaatataattaacctctgttaactcatcaccaacaagactcatgaccacttttatacttcatgagtgattgtatttgtatccactgttttctattattttcgagcaagtctcagacacaccatttaatctgtaaataattcagcatgtatctctaaaagacaaagacctcttaaataacagttcattagtataaaacaaattgggtaaacttttgttggtcatcaaactatattagcactggtccaatagtttaattttcattgagcctttcaagaggaccgaccagtctgctgctcaagacatcctctcctctggaatgtagagataatacatatcatgctcctttttgttaaaacgtttttttttccccttcaaacacagtccattcatttttcagtttgggttgaaacatccttttcttgatcttgagcttataataacctagtcatattgctcagctcagatatttttactccctctccttaggcattctggttccttaaatatagttagtgtcacagaggataaataaccaaccttatttctaaggtctgagaacacttggaccacatattggttgagctcagccaccttctgattaaagttttcagacttgtaagaactgaaaatttttatggtggaagttctctgagccctcatccattctgtttttaaaaatgcattgcagatgggctatgtgaatatgtttttaaacatctgatatgtgcatgaaacaaaaaacacttgaagttattatgtatacaattctgtgggatgggacttcatgcaggattggttttcaagtttgatttcctgagggattttttagttgtttgtgaaagaaccccaggtctacttttgaaattttgtattataattgtaatgttgcccatggttaaaaaaaaaaagtgttcagtgatctatgtctcctactactcctatttctctgtttttcctctgcaggagcttgctgctgttaacagttattcttccaagttgttttctttgtggggagatgggaggtgggaggaaatataaacatatatgtatagatctttcaaaatatatgacggtatacccgtatgttctgagtcttgctgtttttacctggtaatatttagaaacatttattttgagataaaggagagcacttttaagttgaacctgtagttttaaaaagtacatttcaagtaagccaaagcagagaagtaaatgtatttttcattgttgtatcagaattttgaatttactattttaaaaattcaagagttttgtagctgatctatttcttcccctcagccatcccaaataggtcatttgtcaacagatttaaga

SEQ ID NO: 87001 - DNA, 1085 bp, Homo sapiens
gccattcattcccggatacataccctagagaaactcttacacatgcgtaccaggggatggatttaagcatttgtgtgtaataggaagaaaagaagaaaaaacccgggaagatcccaagtgtccaccaacagtgtgttggataaatactgtggtatattccaacagtggaattccacagaagtgaaactgaactgcagctgtgtatgtgaacatggacaaaactcaacaatagaaggatcaaaaaaagcaagtcacagaagaatacatcactatggttccatttcaatgaaagtcaaaaacaggctgtcaaatacatgataaaaggaaacgattaagacaaaatttaatgttagccgttttgatggagggagaggtgatcatgagggcacaggggtcttcagaagaactggtgagggtctgtttctgaagcctgtgggcatttccttttttaatctgtatgtttatgtgcttttgtatgtatgatatttcttaataaaatttaaaaagaagaatgggaaaaaagtcttggtgtaggtagttactaatatataagctgtagtgtatttcgtaaaattaaccatcagtcagtgacaaatttaaagatgctgtttcttgagtgcccaatttaaggttttattttgtttgagacagggtctctgtcttgtcacccaggctggagtgcagtggcacgagctcagctcactgcatctttcgcctcctgggttcaagccattctcgtgcctcagcctcccaagtagctgggattacagcttcgcaccaccacacctggctcatttttttgtatttttagtagagtgtttcaccatgttgtccaggctggtctcaaaactcctgacctcaaatgatcaggcccaccctggcctcccaaagtgctgggattacaggtatgagccaccgcgcccagtcttcaaattgaggtcttaattgtaactcttaaaaagctagaaacggcgacaagagcaagactccgtctcaaaaaaaaaaaaaaaaaaaaaaaaaaagaaacctaaatgtatgttttctgtgtgataccttattttcatcttaacatagtttctacttgt

SEQ ID NO: 87002 - DNA, 1076 bp, Homo sapiens
gctaatatttcaaatacttagcaaacccaccctttgctaagcaaacaaggatgggtttgtgtttttttttttcctgaggactatgccattttatgttaaccagtcaattttgcagagattggtggggccaaaagcactgaactaaagccttaaattggggagtcacttgtcattcagaggtttgtttttttttgagacagggtctagctctgtcgccaggctggagtgcagtggtgctatctcagctcactgcaacctcctcctcctgggttcaagcaattctcctgcctcagcctcctgagtagctgggattacaggcacgcgctgccatgcccagctaatttttgtatttttagtagagacgggttttcaccgtgttggccaggatagtctcgatctcttgaccttgtgatctgcccacctcggcctcccaaagtgctgggattgtactggtgtgagccaccgtgatcggaccatttagaggtttttaaaaggtttatggattagatgtgcaaatcttaaaagcgccagattgaaaatgacctagctaccatgtttggccgttttgcagccaggatttctggtgtcatgaaatgcagaagtgtaaacgattggctccagagaacatgatgtcacccactgtgattctgcatttagaaactcttaacccttacctttctgagcagtgtgtttggtagctttctgatcttctccactcgttctggtttaatccccagttcacagcaactcacgtttagtaggttttggtaactcagttcttgtctcttcagttcaatttcaatgaagtcattttctttggggttctgaattctgactttaaacacaagctctaaatcacccataaattcaaatacagtttgtaaaggaaacaaaatacctgtcagagattttcatatctattattacagcataaataatcctaaaaactgaatgttaagtagacatggagctttcatgggcacatacacactttgcattagctgagggttcttttcttggagtgttgggcaagctctgggatgtatgcccccattatatccactgaagacagaaag

SEQ ID NO: 87003 - DNA, 1095 bp, Homo sapiens
ctccgctgcggccaccctagtctgattattgcaatatcccctcccattcccactggtctccctgcttctgcaccgcccccatatctcttctttctcagcaataaagtgatccttttagcatggaagtcagagcttgccaggcctctgcttctcattttgcttagagtaagtgcctaagtcttgcaatggtctacaaagccctccacagtctggatcccaggagctcctgcaacgtggtcccctctctcacttggctgtagccccactggccctgtgctccttctcaagtacaccaggcaagcccctatctggaaggagggcctttgcactgcccgttcccttggcccggaatgttctttcctcacatatccatgggtctctcatccttcagcaggcctgcccgggcatgttctcatagtggagctcagggcaagaacagatggagatgctaagccctcttctgcctgcctccggtctgctaacatcctgctggccacagcaagcacgtggctgagcccagagtctgagtgggagggcaccaggatggtagatgcacacggtaaagacacagggagtaaagcactggggcccttgcacacatgattacagccccttgatctgagctccaaatcccaggcctcctcctgcacagcgacctgccaccatcagtaactctctccaccagccaccatcccattttcattcagcaaacatttgtggagcacctgcagtgtgcaggccctgttctagacactgtgaggcagctgcacataaagtagacgaaggccctgcccttttaaagttttgttttgtttttttttcttttttttttttttcgagacagagtctctctctgtcgtccaggctggagtgcagtggtgcgacctcggctcactgcaatctctgcctgttgggttcaagtgattctcccatctactcgggaggctgaggtaggagaatcacatgaaccccggaggcagaggttgcagtgagccgagatcgcgccactgcactccagcctgggcaacaagagtgaaactgcatctcaaagaaaaaaaaaaaagaaaaagaaatcctatgtgtagggacaatggg

SEQ ID NO: 87004 - DNA, 1079 bp, Homo sapiens
gaaatttcatcttggtacatatgtttgacatcggagaatgactaactcaaaatgtgatcttgattggttttattaaaacttgagcttggtgtccttgagaacttcatctttttttttttttagacagagtctcgctctgttgccaggctggagtgcagtggtgaaatcttggctccctgcaacctccgcctgtcgggttcaagtgattctcctgcctcaacctcccaagtagctgggactacagacgcgcgccaccacgcccagctaatttttatagttttagtagagacgagacggggttggccagaatggtctcgatcgcctgatctcatgatcctcccgctttggcctcccaaaatgctgggattacaggtgcgagccaacgcatccagcgaggacttcataattttttaaaaaatgaacaaaggccctgtttacatgccctttttgttcattaggaatgggaattttttaaaaggtgcttttgcctagcacatctgagaaaaggttacatcttagttccaagtcattttctccccaaggtgccatcacacttttgactctctgtggggagaccatttcggttgacaatttgatgaattcgttattttcacaggcctttcccatctttttgactcctataactacagatactgtagcagcctctgaataccctgagtgtccaaaatgttgccttacagatttcatagctcatggatgagtaaggaatattataccaaaaaatggctttctaagtttagtatattcgttttctgccctgccttgtcgtttctgaaatcaggtacattgtgaaatgtccttttcgcctataatagatggcaaatgtaaatataggccttcttcaaaatgcctccttaaagataacaatatatgctgtgattagttaacttagcttttgaaggtgaaactaaaggtactctgagtttaaaatatttttccagggcaggtgctgtggctcatacctgtaatcccagcactttgggaggccgagacaggtggatcacttgaggtcaggagtttgagaccagcctggccaacatggcgaaacccatctctac

SEQ ID NO: 87005 - DNA, 1355 bp, Homo sapiens
gtcatgggacttatattacatttatcttatttggatatgtttgcttttgttttaaggaacaagatcactcaaggtgaaggataatctactaataccagcactttgaatgaaaatttgtttctctgccacaaactgaacatcttttttttttttttttttttttggtgggggagttgaaacctaattttgtggcgtagcagctatgcagcttgaaatccaagtagcactaaattttattatttcgtatttgtacaataagcttcccaggagacgtgtcaacatttttggtgaagaacttgaaagacttcttaagaagaaatatgaagggcactggtatcctgaaaagccatacaaaggatcggggtttagatgtatacacataggggagaaagtggacccagtgattgaacaagcatccaaagagagtggtttggacattgatgatgttcgtggcaatctgccacaggatcttagtgtttggatcgacccatttgaggtttcttaccaaattggtgaaaagggaccagtgaaggtgctttacgtggatgataataatgaaaatggatgtgagttggataaggagatcaaaaacagctttaacccagaggcccaggtttttatgcccataagtgacccagcctcatcagtgtccagctctccatcgcctccttttggtcactctgctgctgtaagccctaccttcatgccccggtccactcagcctttaacctttaccactgccacttttgctgccaccaagttcggctctaccaaaatgaagaatagtggccgtagcaacaaggttgcacgtacttctcccatcaacctcggcttgaatgtgaatgacctcttgaagcagaaagccatctcttcctcaatgcactctctgtatgggcttggcttgggtagccagcagcagccacagcaacagcagcagccagcccagccgccaccgccaccaccaccaccacagcagcaacaacagcagaaaacctctgctctttctcctaatgccaaggaatttatttttcctaatatgcagggtcaaggtagtagtaccaatggaatgttcccaggtgacagcccccttaacctcagtcctctccagtacagtaatgcctttgatgtgtttgcagcctatggaggcctcaatgagaaatcttttgtagatggcttgaattttagcttaaataacatgcagtattctaaccagcaattccagcctgttatggctaactaaaaaaaagaaaatgtatcgtacaagttaaaatgcacgggcccaagggggattttttttttcacctccttgagaatttttttttttaagcttatagtaaggatacattcaagcttgg

SEQ ID NO: 87006 - DNA, 1451 bp, Homo sapiens
tctcttgggtttcagtctaacatcccccaccccttctaggctaagagcagggcctgaggtcaccatcatcctcaaagcacacacagggtccttttcccgtgtctcctgtcttcctttgaaagtactgatctgagttcccgttcctaaagcacctgtccattcacacccaaccacaaacaggaagacggacaatcaatggcgccacgtagctcaaatcagtgagtctcaggccaaggagggtaacacactagggggtgatggggactgtggcaagctagcaagtgtgtgccatctgagggagcactggcaacagccatgtggtccagaagcttggccagagaagccagaaatcttactaatcagttcacatggttttccccactagcattagcaaccagttgacttggtatgaaagatacaggtgtggaagtacggctcatataggacagcttccctccatccctcagagactctctgcctggcaggccctgatctgggaagacttaggaggttgtccctgaaatccaaggaatctcataggctcaggaaatgctcatcatgtctgctggcttctttcggtaaacccagtggcccttaggctgggcagcacacaagaatcacctgtggagccatggcattcctaacgccaggctgcacccaggccagtgaaatcagatcctgggggtgtgagccaggcaccagtctttttgaaaaaaagctcctcaggtgatccgaaagtgcaccagtggcatcggcatcactggtagcttgttagaaatgcaaaatctcagaccccaccttagatctgctgaatcagaatctctgggggtggggcccagccagctgcagtttcacaagcccaccaggtgattctgactcaatacaattccaggcgcacaatctcagaccgaggcagtgtgaggtgaagctggtgcctacaggaacatggcacatctgaaaataaccagctttacaagagatggtcaatttaaagacactttttgaaaagaaaaccttactttgattaattaattaccaggggccagggaacactgcaagttgggctcttctctcttaattcagttggaaacgtttctccctctgacttcagaatggtgaaacatcctctcctttacagtctggagacagaagccctcctcactcctccaattccaccgcacgaggctggcacatagcagatgctcattaagcattagtttctctccttcccatttccccttggaatttctagagcaggggcttacacacatcctcttgctgttttgatttatattaaagttagttccagtgcccaagtgcctggggtggcaggtggccaggtggccagctggccagggattaggaaatactgaattgtctttattttaaaaccttggccaatgccagggaatataaagggaagtgaatgaagtgggaagcaaatcatattg

SEQ ID NO: 87007 - DNA, 1023 bp, Homo sapiens
tacaggctggctccttggtcaagatcctgtgttggattcagcctaagcccacaggtgtacatccattgcctggagacacctgtgtcggggaacagggctgagctgggagcctgttctcatgttatccctccagcccaccctctcccctgaactccagacctacacggccacaaactcagcgtctctgcttggatggatgatgggcatctcaaacttaatgtgtccaccatgtgagctcctccagtcttcccccagtgtgactaatcccaactgcctccttccagatgatcaggcaaaaccttagcaccccccaccccctctcacccagcatccaagctgtcagaaaatgctgttggctctgccttcagaaactgagcccctcacccaacctccattgctatcatccagtctaagccaacatcctcactcattagattcttaaaatagcatcggcccttgccccttcatgctatccccagcatggtagccaaagtggttttattaaaaagtgagttgatagtgtcacttgtctgcttcctctgcagtctaaggcaacgccgaggtcctgtcgggcggcccctctgtcatctgctcctgccccacctctccaacaccatctctttccacggcccatttgctccagcctcactggcctctgttccttgactacgcagtgcacatgtcggccttggggcctttgcacctgctgccctgctggctatttttctggtgggaagcaggtggcttgggcaggcctctggggtacccagtatgttggaggagggaaggctgtggggtggcaggggagggagcaaggggtatcccttcttcctgaagtcccctccttgaagctccccacagtttgtccctcaccttctttacatcttcattcacgtgttatcttctcagaagagccttcactaaccaccatgttaaaaagtaaagatcaggctgggcacagtggctcacgcctgtaatcccagcactttgggagaccgaggtgggcggatcacctgaggtcag

SEQ ID NO: 87008 - DNA, 1033 bp, Homo sapiens
gtctggtcatgaagtcattgccaccttccccagcctgcacccccaccacccctgcccccatgctgacatcccatttggcaaagaggttggaaaagccgctgactcttccagaccctgagttcattgactggtcagggcgcatcggccacaggctgaccatgtggccagaggggggtttgcagagtgagggagtggcccctccaggccttcctcccctgcctcaagcctccccctgaccactaagacactcctccaatatccgcccacaccccaactatacatacctgacctacacacatgtggcccaccccctacacacttgctgcagacactccttacacccctcgtaaacacatgccaagcacacactcccctgggcagccacctacctactgaggcacacccagcacaccagactcccacacatatgtgtatgtgccactccctcatacgctggtgtgagctgttgggcaccaccagctacccacggccacagctactcctggtccaccatggcccagcctcttgggctgcatcaggcagatgcacctggcctgagccaggctctggtgggagggtctctggcctggggggggtctctagatcagaggcacaggcggccagacttgaaacgcctcatctcagccaaccccttcactgctcatttgtggaaactgaggcccagagaaggcaaggagtggtcaggggctggtcacgtcacacaggcaaactcctcccaagcgcctccaagtgtctgagagcgtggcagaaaggcgggcagcccaggctccctccgccctcaatgcgctcctcaaatgtcctgactcagtgggtcctcttccatgagttcttccaggatgacgcccaagactgggtgagcttttcaccctctgccctgggtgcaaggtcatttgaagctaggcagggggcacacccactgttgggcctcagccttcacaggctcaggatgttagtgtctcacatagccttggccttgctcagcaaatacccagcgcaggctgcagtcccacaa

SEQ ID NO: 87009 - DNA, 1024 bp, Homo sapiens
gcagcctgcgctgggtatttgctgagcaaggccaaggctatgtgagacactaacatcctgagcctgtgaaggctgaggcccaacagtgggtgtgccccctgcctagcttcaaatgaccttgcacccagggcagagggtgaaaagctcacccagtcttgggcgtcatcctggaagaactcatggaagaggacccactgagtcaggacatttgaggagcgcattgagggcggagggagcctgggctgcccgcctttctgccacgctctcagacacttggaggcgcttgggaggagtttgcctgtgtgacgtgaccagcccctgaccactccttgccttctctgggcctcagtttccacaaatgagcagtgaaggggttggctgagatgaggcgtttcaagtctggccgcctgtgcctctgatctagagaccccccccaggccagagaccctcccaccagagcctggctcaggccaggtgcatctgcctgatgcagcccaagaggctgggccatggtggaccaggagtagctgtggccgtgggtagctggtggtgcccaacagctcacaccagcgtatgagggagtggcacatacacatatgtgtgggagtctggtgtgctgggtgtgcctcagtaggtaggtggctgcccaggggagtgtgtgcttggcatgtgtttacgaggggtgtaaggagtgtctgcagcaagtgtgtagggggtgggccacatgtgtgtaggtcaggtatgtatagttggggtgtgggcggatattggaggagtgtcttagtggtcagggggaggcttgaggcaggggaggaaggcctggaggggccactccctcactctgcaaacccccctctggccacatggtcagcctgtggccgatgcgccctgaccagtcaatgaactcagggtctggaagagtcagcggcttttccaacctctttgccaaatgggatgtcagcatgggggcaggggtggtgggggtgcaggctggggaaggtggcaatgacttcatgaccagact

SEQ ID NO: 87010 - DNA, 1033 bp, Homo sapiens
gcttgtggagagtataaaacattttgagcacaatatgcagcacataacttttcagattgtgtttgcatagaaaaggttaaaatcaattctttcagttactgtattgttcatttcttgtaaaggtcttcctacatttgagacgagaccctttaacataggctgccttagtaacaaaataaaacagatgtgtcataatattaactgtcctaaagaacatgtgtcttgcaaatgccatggaactgaatatttatttccttgtgagtattatgaccgttaccaaaggactcaaccagatttagggctcttcttaattgatcatgttcagaaagggactcatttggtcccactttgtaacatgggaagagtagaagagaaaattaaatgtggaaatcataaatgcttttctaacagggttatgctattctgtaacactaaatgtctgtcttttctcttaaaagattaagttttattaattttgtcatacatttctctatttgaatatatcttaaccattttatgttccaaattcgttttttgtccaagacattctatcagaattttacttgcctctataatctgaaaaatgggttctagaatgtcccacttgctgtctcttagaggctgagcttcatttctatgagcaaagagctcatttagcaatgtagttatttcagtatttatttctattatggaatccctggggttcagaatgtaactttgtacatgagatatatataaatatgtatatgaacatgtatgaggtctagtgtgttttgttttgtttttaccgttcctggggatctgaacttggtttttatttgcaagtccaataatcttccccatcacacatgtcattcctgagggtcaggactgttgccatttggcaccagctaaaggtgagcagtggggaaccctcatgctggtcagcttggctcacgtgttcaggtgagatatgagaatagacaagagggcttaggagaaatgtgggatccctgagtaacagcccacacatgatactaaggcatactatttg

SEQ ID NO: 87011 - DNA, 1064 bp, Homo sapiens
tttttaaaaccacgatgctgcaattttttccctctcaagcttcttgaaaatgtgtgatttacccttttttatctattactctaggcaaagctaaatatgatttttttttttttttttgagacggagtctggctctgttgcccaggctggaatgcagtggtgcgatctcagctcactgcaacctccacctctcaggttcaagtagttctcctgcctcagcctcccaagtagctgggattacaggtgtgtgccaccctgcccagctaatttttgtatttttagtagagacagggtttcaccacattggccaggctggtctcaaactcctgacctcagatgatctacccgccttggcctcccgaagtgcttgaattacaggcgtgagcccccgcgccggtccgaagcaaagctaaatgtaattttatgtactgttttaacagtataaacctatgggataaaggcccccaatcatcagaaggactactgaaaagaaaagaaagcaaacgtagatgtcaaattgtctaaacattcttaagtaccactgattttttttttctggactattatacaaagatgtctgtaaaaagtataccagtggcttttatgcatatacacgattaggctagattgtgaagtacatgggatttcatgagccagaggaggcatttggatccattgggccacatgtgactataagcacattgtgtacacaataaaattgtagccactcatgtattaaaactgttttggtaaaagctgtattaaaagaataattttttgcttgagctacttagtcacttttttgcagggcaccaaaatgtaggctacttttccatagcttgtttgctatgtttttatttcatcttaaatctgagccatttttggcaatatcttttaaaaaatcattattaaacatttattggaaatgttgtatagattcacaagaaagagacaccaaagtgtttgggaattttaatcccaagaagtaaacatcccagagtcagatcccatttgctgttgttcagccatgtttgtatgactgaatgtaatttaggaaatcaggag

SEQ ID NO: 87012 - DNA, 1070 bp, Homo sapiens
atccgttctaccataacaatacagaggaactagctgtgttactgcaccagtgttataggtaacttcagtatattatgaacaaatcaaagaatgtttacttcctgcaaactggtgaattatagaaagcaatccagatgtggtttactctgccacagtctaatgtcattcacttcatttgatggggtcacttgttagctgtcactaataatggaattaatgggaaacacttgataaatgaaactgtaccgttaaatacaatagctgagttttccccagtgtattgtaaaattgacacacactaatacaagatggattatcaggatgtatctaaatgtcccgagagggttaaaagctaactgtaaattactttaactttcactttcaaatctgacaaatcttgtttatatggtatataaaactttgttttcatcagatttgggggggttttatattaaagaaattaagactacactatttaaataaacgtttcctgtttctgacttattagagctctaaagtttatgaggcctacttctctgaatattctgatgggttttttttgagaccagtctcattttcatactgacatgtctgaaagatttattatttataaagcttaggacatactctgggaagcttagaagatacttcagcactgggaggattttttaaaggaaatgtgttttgtatttcttgtaccagagaatggtgatgttgattgagttttttccatgtaaaaaatgtacttgtttgccaaatgttcctagattgctcttaacctgttaatacaagtaaaactgtagtggggatggagtctggcctaagtacagaatgagggatttaattagaaaagttattttcttttgttctgtatcaaactgcagaacagctatatacttggtattttgtacgtgaataacgttttagcttttgtgcccttttgagcttgaagggttatcctcaaaggggaaaactatgaaggggaagaagacaaacctaagataccataaagtaaaggttgacattacatattttcattcacaatgcccattaaaaaaaaaaaataggtt

SEQ ID NO: 87013 - DNA, 1183 bp, Homo sapiens
aggctgttagtgtgaactttagaaattgattccagggatgtcagcaggaatggagtcatttcaaagtgttttgaataattgactattgttgaattcccttttatgagaggagttgttagggactccacttggctggggtgatttttgtaactttgtgttggagtgcagtatgtcagttggaaccgtactgaggagtttgttaataaaatctctatgtggtttttccatttccactaaaaattccttccattgtggatcctgaaaatagaacaaaaattgcttaaccaggtttggcagtatctctagttatttccagcctgaaaaacagacttgtctttagcataggctaattttaatagtgaatatactgttgtaaaaaatcaaatttgatcttttttgggggtccatttcctttttcatttcctgtaatattttaacagtgagaaattgattctaaagtcccatatttttaatgatttaaacttaaaacttaggctgtagagaccctagcagacaggataattttcttacaagtaaaatcttcagaacaactcagaagagaaatggcgacagccttttgtctcagccagttaatttttttcattgaaattttttaaaatttaagagccaaacttaatttttttaccttctaaccacctgggtatgtttcagttcagagatgggagtttgaactgagtgttctcctctctctagtttgatattgctgtgaaaaggccattacagggctgggtaagggaaagtttggcctgcagagaaaaatgcagatatttagggttttttctcttctgttgtttctagtcaacagtatcaatattttcttttgtccagctgaaattcacatggggcacattacaaaattctgttagatcagtggaatatatctttaggtcctgtggtgtgtatgtttttaggattctgctgaagaatccatcccactagacaacttttcactgggttgtgccaaaataaccctgctctgtgacaacagatacaattgatgcaagcttgtatcgagaattatggtatgccctgcactgggtcttatggagaggagtgtggtgtaccccagactgggccttggaagccagtgtctgatcaggacaccatggatcacattcacttagccgtgatgcagaagaacctgtatcttggctgctacccc

SEQ ID NO: 87014 - DNA, 1029 bp, Homo sapiens
atactgaagcagaccttcttgtgtgcatgtgtaaggattttttgttgggtataaatctaaaagtggaattagcaacatggttgttgcgaggccagttggccctaaagattaaaccattctggttggccttatcagtaataccactgtgctcttgcttctgtggcagaactaactcgtctaccaacagaagtcattgctggcatgcttgatttcttccaaagtataattgagtaatgcatgaatgaatccctgtggggatacgtcagactatcctatccactttcaacatacattaattttgttacagtgtgtcgcattaatggctgtccagctagctcctggaggcgcagtctgtgtagtttgaccaaaggacagcagattctgacaaggaaaaaaatatcccacaattaaatcttgctaagagggttggcttagagattgctcatttgttcatagttgtgaataatatttaaaggtttctctctttctattatttcacactcaaggattctaccttagaacttaagctttagaacaaacagcacatttactagtaattttgtttgcataatctaaattaaaaataacctgtattttccttaaatatgagaggaaagccatagatttgaaataaatttaaatgttaattatgactatgcaaactcatagggcttaagttgaagacttttctcagtctcttacacaaataagcacattccttttcaagggagagaccttttccactgtcttctcagatcaaaagatttagactataatagtttgaagcaggtaggctgtgcatggtggctcacacctgtaattccacaacttggaaatcaaggcaggaggatcacttgagcccaggagtttgagaccagcctgggcaaacatagcaagacttcattaaaaatttttaagagaccaggcacagtgtctcatgcctgtaatcccagcactttgggaggcctaggtgggtggatcacttgaggtcaggagtttgagaccagcctgaccaacttggtgaaaccc

SEQ ID NO: 87015 - DNA, 1143 bp, Homo sapiens
tactgtgagggagaaaaatcagaagataaactataaagaaagactttatttgcaaatatacccatttactttaaactgtataatggttagttttctaacatgtgcattaaaaacaaaacaagaaacaactaagattcaaatttgttttttttttaactaaaattattttttaaatgaatagatgtgtttaaaaaataagcttacttattgctagactggcaaaatcccctactccatttactgaggtacttaaaaataactagcatgctgtatctctttttttcccagctttgtcttgaattggcattgccatccttgttttatctcaactggctgtagcttttagataatatcataaggattaaccagtaacctcttacattcattactgttttctaggggaaaatatttggtatttggtttttctgttgcagcaaataaaacctcaggtgtaccaggaaatcgtcctggaagtgtaatccgtgtatatggtgatgaaaacagtgataaagtgactccagggacatttataccctattgttcaatggcacatgcacagctttgcttccatgggcaccgggatgctgtgaaattctttgtggcagtcccaggtatgttagattattctgttgagatgttccatgtaattgtctctcttctgtcatctcttggttccactacctaatagtctaaggctaagtactcgaattgcaggtaatttcaatatatacgaaggaagttctgtaatggaggtgtgactaaggtgctatagggatacttgaatgaagttactttggaatatctctcccacccccaaagataaatttgttgatttttctttaggagacttgcttacttttgaaaagcagtagtattattttatcatcgtggattgccaaaaatggtcttgacctaataagagaaatcactagaaagaagcttctatcatcaaggctgcatggaggaagagagaatgcactctggtacctttagcagcttaataggaaaaagcagtgaactaggaggcctgggggtctggcccctgtgtctctgccactaacctcgagcaaggcacttaacctcagagactcatttcctcactcctaggtggatgtgattaatatctgctctgcctacttcatt

SEQ ID NO: 87016 - DNA, 1193 bp, Homo sapiens
gcacagccacctcacccagtccttgtttttatttttaaatagtctaaaatgctgggtagaaccaatgaattaagttatctcaggagtagtgaacttttatcattgaaagtgtcagacgtttcaatctaccttactcttttttttttttttttttctttttttcaagacggggtctcactctgtcacctaggctggagtgcagtggcaccatcacggctcactgcagctttgacttcctgggctcaagtgatcctcccacctcagccttcccagtagctggacaggcctgcactatcatgttggctacttttttttttttttcctgtagaaatgaggtttcactgtgttgcccaggctggccttaaactcctgggctcaagtgattggcccagacctcagcctcccaaagtgctggtgttacaggcatgagccaatgcacctggccccttattgttcttgatggaaagttgggatcattttggactcctcttctcttatttcccacatctaatctgtcactgggaactgtcaagtctgcctctaaaactgtattaaatcagttacttctttatctctaccactatccttttacccccaggcctcctaactgggctccctgttgccaccccagtctgttctctgcctagtaaccaaggtgcagatattaccttcacacacctccactgttgcctttaggtgaggtgacatgaccaggagaccttacatgttctcaaacactctccttgctcataccgacccacagctcagcaagctccttcccatttcagggtcctcacatgtgctgctgtatcatctacctgggaagttcttcttggtccctttttacttacttagctttcaggtcatagcctaactgtcataatcaggagagaccatttaggtcctgtcatactttttcttcatgggcttatcattattgtgatcgtaccagtcttatgtgattcttgtttataatctctcccctacagaccctaagccccgtgaagatcagggaccatcattgtcttgttccctgctctatctttagcacctgacctagtgttataatgattattagaaatgtcataaaggattcctttcatgaaaaatgattgaactggatcagtggttttcaaccatttagagttactgccctcagaaaaccttatttctagctatgtaccttctcccta

SEQ ID NO: 87017 - DNA, 1025 bp, Homo sapiens
ataggtggttgtattagtctatattcacactgctgataaacacatacccgagactgggaaggaaaaaagaggtttaattgggcttacataggtaacctctggggaggcctcagaatcatgacaggagatgaaaggcacttcttacatggtggcagcaagagaaaatgaggaagaagcaaaagtgtaaacccctaataaacccatcagatctcgtgagacttattcactatcacgagaatagcatgggaaagactggcccccatgattaaattacctccccctgggtccctctcacaacatgtgggaattcggggagatacaattcaagttgagttttgggtagggacgcagccaaaccacatcagtggttgtatttttacccttccaaataatctggaaataaatttgaaatagtattgccttttactgtaacagcaccaccttatgaatatttgtacatacatattgttttaaacatttttcctcctttgcctatacaggaacagcagaaggagttaaaaaatcaagaagaattatccagtctagtttggatctgtaccagcactcattcggctacaaaagttcttattattgatgctgttcaacctggcaacatcctagacagtttcactgtttgcaactctcatgttctgtgcattgcaagtgtgccaggtaagagtgagtcatgcgtttctctgccctcccctccatccacctacctgctgggcactgatgtagcagctgaagatgcagttctgcaccttgctgtcatgaagcttatgttctagttagggaagattaaaaaacaaactggaaaccattgaataaagaagatattttcaggtagtgaaaaatactgtgaagaaaataaaacaatgggaatatgagaaaataactgggagccagaggactgtttggattaattaataaggaaaggtcttctaaagttttggattaaacattatgtgatgttaaaacattagtttaaaaattaaagaagtgtatgtgatatatccatatgttgg

SEQ ID NO: 87018 - DNA, 1041 bp, Homo sapiens
ccactgcactctagcctgggcagtagagcgaccctgtctcaaaaaaacaaaaaaacaaaaaacctgaacttgatttcaaggagtaaataacagcagtgcttgctcatgtctcagtggatctgtaataagttcacttttgatgaggcttactaatgtgcctttttcactcctccttccaccattattaggtaaccaatggtcaaggtgaaaataagatgaaaaatttacctgtgcctgtctatctcagacctctggatgaaaaagatacatcaatgaaggtaagttcattgtgaattaaaaggagatgttttctaaactctgggtagttttttttctaaaaccaaaaaagtataagtattacttctatggtgaggttattgttcattttataatattaggttataagacctgtatttacaaccattagttattttaagaaaacatgaaaatgctaaacatttctagacttaatattgttttctttttcacctgagaagctgtggtgtgctgttggagtcaatttatctggtgggaagaccagagatggtggttctgttgttggagcaagtgtattttacaaggatgttgctggtttggatacagaaggcagtaaacagcgaagtgcctctcagagtagtttagataagttagatcaggaacttaaggtaagtgtgtgtactaacatttgacctggtttatgagactatgagtttaactctttcatccaaaatttgcctctgggtccagcttctaattgggattactatgccctggcttactgtccctcagcacccttttaaaatcaattttaaaatattgaggtataatttacatgcaataaagtgtgcactcgaaatgggtataggtcagagttttgacacatgtgtacacgtatgtaatcactacagtgatcaagctaatggaacattttatcattgttctgctttacctgttagttttgtgttgctgtttagagacagagtctcactctatcacataggctggagtgcagtggcatgatcatggctcactgcagtgtta

SEQ ID NO: 87019 - DNA, 1702 bp, Homo sapiens
actgtgcccaactggacttcactttccattgctgtttttaactctagcagccaagtggtagtcaacaaattaaaggaaatagtagcttacttttaactacttcactgaagtaaagaatgtttttaatttagttcataacaaaaaagtagtgaaaagagagctctgattatgatggcagaatccctaccacctcataaatcaatttggaatatcttattttctgaaattttgttgaatcacctgtcaatccagtttatcctcttccctgctgtggtcatctttccagtgatggaaaagttttagtcttgtgaaaaatgacccctcaggatgccaaagtttcaagctattttgtgagagctccgagtatagatgatagagacttttatgtaaagatgggaatttacaaggcaatattttaataaaagggaaagttagagggtatcttttcaataaaaaattttaaatatcattcaggcatgttggctgtctagcacatattacagtcctctgtcggtagactaagctctttgagggagggatgatattttatttttcttagtagaattaaagtcaatctttagcagattgactgacacatggtaggtcaaagtaactacagtatttattgaacttaattgttgactcccctctgtgtatcccatgaacttcttgggtctcttgttcttcagaaagaaaggtagaatacctcactgataaatgtttcttttcttttctttttgaatgtagggcatcacgagaaaatccagccatgcaggaaaaaaaaaggtcaagcatttggcagttgtaagtattgaaaaacaaagatgttagacagcacatgagacaagaaaattacagtcaaaatttatttccaagaatgattttatgtccattttctttccttcattttttttttttaaactaggggtaatggttaagtagctaaactgaactttttttttttttttaatatatagtgtgccaactcggtaaggctcttctcaaggacaaaaaatatgatatcgtaagctgcatcatgttgactgtgcatttgttgcaatcctctgccaaatttaaataatggggaattatttagagacttgaaaatgacctggatccccattaaataagtttctgattggctggttttgtgattgtaagaaactttacaaagtgaagatgagaaatttagtgcttgtagggtttgagtaatattgtgtatgtattgagcttgagttatgtttgtgctagaagtactatgtgtttactgtgattaaaacttacccttttttggtgaatctgctatttaatggaagtgtcaattaaaaaagaaatagacccgaaagtagttgtttaaattgagcttaatcagaaaatgtataaaatgtgtgttaacatggtaatatgtgttccagtacttgattataataagctgtttttagaactggcatactaagcttccattcacatcacacagccataaccttgcggtttaacaatcgctcttaccttgcaccaagtaggagctagcaaaaaaaccaaaatatatttattcagtaggagaagtttcctctatttaagagcttcttgctttcattatacaaattgctagttaaagaacaggcacccgccattctaagcaatagtttctcttcactgaatgtctgagtttggctacgagttactgctaaggctacagcgt

SEQ ID NO: 87020 - DNA, 1037 bp, Homo sapiens
aggaactggatatcagggttttttcttcagcgtagactgtcttaactttccagtttaaactgttttctcattatttattaaaggtaacatcaagaaataattttactttattgattgggtaatatattctgaggaattattaacaatagtaaccttttgaatgctatttttaaaatttaatcttctcactttttagtaattgatgatctgtcttgttttattcatttgataaatgagtaaaatcttagactgttgctttgtgttctttttgcatttatctacaaacaacattgggtagaatgtcttgaagtattaaattattattgtctatggttgtacagtttagtctacaaaggaatagctgaaagatggaaagaatatttatttgtaatgatgcacttgaaatatgtgtttcttagaaatgctttgaacatagtgaagaatgatttgatagcaaaagtggatgaactgacctgtgagaaagatgtgctgcaaggggaattggaggctgtgaagcaagccaaactgaaactagaggaaaagaacagagaattggaggaagagcttaggaagtaagttttaactgtgttgttctaaaccaaactctttgccagttatgccacaaagggttacagatgtaaccctgagactgagaccttctgtccactcaagcctggaaggccaagagctgcctgggagagggcaaagtgccccagcccattgcctctgctgtgagcaggcccctccagttgttagcctgtcatctaaatattattgtcttttgttttttgttttctgtttttttgagacggagtctcactcctgttgcccaggctggagtgaagtggcaaagccttggctcactgcaacctctgcctcccgagttcaagcgattctcttgcctcagccttctgagtagctgggattgtaggtgcctgccaccacacacagctaatttttgtactgttagtagagacagggtttcgccatgttggccaagctggtcttgaactcctgacctcaggtgatccacctgc

SEQ ID NO: 87021 - DNA, 1017 bp, Homo sapiens
cttgcctatagcctcccaagtagctgggactacaggcatgcaccatcacgccagcgcaacctttttctgattttactaatttaaaagaatctcaacaatttgtcctttatcttgattggtgtctcatccctcaactttcttatttaaaactctctttgctgggtttctgtgatatcaacttgcctgtgtcctttcctgtctcgactcttaccttttcagtcatcttaacaggatccgcttcctttgctcgtctttcaggtatcagcgctcctgtcctaggcctgatactttgtttaagaaatcatgtttgctctcattgtttcttggttttcatggctaattactcccaagtttttacctccatctcagatctttttctagagcccaagactattatttcctaattgcatgctagacacccctaaaatgacttggagggctttacgtttgacatgtataaagctcagtttgttatctttattgttctgtcccccaaggctgctcttggaccaacaggcactgttttagtgaatgaatagctctccatcctgcacctctcactttccctcacagctaatcaccaaggcttgtttgttccctctcctaaatgtgtgtgtgtatacatacatatatgtatatatatatatatatatttttttttttttttcttttcttgccttgcttaagtgatacatcctccaggaattctgccttgatcccctaattaaagcttagttttccctgaaatgtattcccatggcactgcattttattataccactcttcatactttactgttattttttagttatctgtctccctggacagactataagctcaatgtggctgagacaactgtgtctttgttcactgttgcatatttagcacatagcaactgagtgaatgggattgctaaatagttctgacagttttgtttcacctcaaaatcggtgattcttctccttttgggattaaaaattcttcacaggtgaatttgtaagagagcaatgtaccttt

SEQ ID NO: 87022 - DNA, 1089 bp, Homo sapiens
tttttaagttatattttctagtaaacgtaaattataggtaagaaagtcctatgtagcttagcctattgtattcattttacagcgtcaaaaaagtctttgtcatttgttgatttggttttgttgttcttgttgcatagcactcccaccaaaggcatagagaacaaagcttttgatcgcaatacagaatctctctttgaagaactgtcttcagctggctcaggcctaataggagatgtggatgaaggagcagatttactaggtatgatagctcatctgaagaaatatcatactgtttttaaaattgattttttaaatgatttaattgaaaagtcctttaaaatgtccccaactgctcagtgatacagggttattgcccttttaggtaattattgggaacatattctttgtgatcatgaaagttttaaatgaaagcacctttgcatatgggtatgcttaaaactgaattgcatttaaattcatgttttgaattcatacaacacaatttattgaactcctgctatatttcaaaacagataactacacataagaacatggtgatgtgtgtgtgtgtatgtgtgtgtgtgtgtgtatgtgtatgtgtgtgtgtatggattgatgcctagttatcccctggcttacataaatttcattatattctgttgactttaattaaataagaaattataacacttgatttttctaagttttctcagagtatattatgttttagccctatggtaaatataatcattttaaagtttgtgttctagaagaatacatggtctgaaaagaatattgcatttggctcttagactatttgcctgctgacctttgccaagtgtcttaacctttttggaccttaatttctttgtgtgtaaaatgaaggagctggaccctagttcaggaatctggcaaactgccgcttatgggccaaatccagctgaccccttgtgtgcgtgtgtaaataaagttttattggaacacagacaccaccatttacttattgtctgtggttgcctttgcctaccaacagcagagttgagtaggcaactgaaatctgaagcctaaaatatttactgtctggccctt

SEQ ID NO: 87023 - DNA, 1059 bp, Homo sapiens
tttctttggttgcttattagtttttgatacaatctgttaactgaatatgtgatatattgtataatgctgtatttcctaaaatccagtcttgcacattttaaaaaaatgttcaaatgatacctttacacccataaaaacaacaggatttttatattggggtactgtgtaatatatgtattgtttatttcatcatgtccttttttaaggctctgctgaaaatgaagaaaagtcagaagttcaagcaatcatcgaatctactcctgagctggatatggacaaagatctcagtggatataaaggttcaaggtaacataaatgttagatgaagacatattctgcgccccccacccccaactcccataaacactgttctccagtctctggacaaaatggattcagatgttttgttgaagaaatgttagtattatattctaattcctattcttgaaactggacactgtacatggtttaaattttttgttaaatgttatctttgcaggatcacaaattaggtgtatgagcaggaaggatggtgtcttagtctattttgtactgctatagcaaaataccagagtgggtaatttatatatttatttatttgtttatttttttgagacagagtttcgctcttgttgcccaggctggagtgcaatggtgcgatctcggctcaccgcaacctccgcctcccaggttcaagcaattctcctccctcagcctccctagttgctgggattacagacatgtgccaccacgcctggcttattttgtatttttagtagagacggggtttctccatgttggtcaggctggtctcgaactcccaacctcaggtgatccacccgcctcggcctcccaaagtcctgggattacagtcgtgagccactgcgcccagccttgtttatttttttgagatggagtctcgctctgtagcccaggctggagtgcagtggtgcaatctcagctcactgcaacctctgcctcccagggtcaggtgattctcctgcctcagcttcccgagtagctgggattacaggcacccaccaccatgcctagctaatt

SEQ ID NO: 87024 - DNA, 1037 bp, Homo sapiens
ttcattctacatttattaattggaattcttctatcagggagagttgtcttcttccctccttccctccagtccagtttgaattcaagggatatatacatatattattctgtgggctatgcgaacctatcatttctttggtttctcaaatttttctagctttggacattgagagctctttcaggttggctcctgtgctcttttgacataccccatccttttttgaatgctttcttccttattggcaccataagatgctctaagctgttgtattttccctgccccactcttaaaaattggactacttctcaaaggagctctggcacattttttgggagaagtgtatttaggaaccaagatctaggcattattcattcatttacttctggtttgggtttttccattagtttatacctcctttatagaattttgtattagtgtgcctactagggtaaaataaaagtagagttttaagaaaaaaatggattatgtgttgtaatatttcatattgttttgtttatgacagtggataaggaatttgttctataaactcaatttttgcttataagcttttttcctcacatatatcttcatgtgataactttaggaaccacctataggtgactgttagggtttggaaggaaaaaaagggtaaagattctattgtgttgtatgttgaccaagatgcctattatgtatgttgagaatagaaactgataaagatgtaaataagcagcactttcaaaatggcggtgtttaaagcttgtattttaaatgtgacttcatctgaggtaattggcacataggtatttattaatacttacatttactgtttaaacagacttttagaataggagaagttgtttaacattttctactgaaaaaattacctttttcactcaaaaaaatttattgatgctcactgtgttaggcacaatgccatgtactagaaatgttgttaaggtgctcagaggtccaaatattttctaaaagaggcctttataatttcttttaaaaagttattttactactcaggaggc

SEQ ID NO: 87025 - DNA, 1134 bp, Homo sapiens
gatatatggaagtagggcaattaagaaaaaagaattctgatagttgttgatagcttcgttttctagacaagtaatagcagatgttttggtctgcaggtataaatctgccacttgatagttttccacgtgtatctcatttttttccttcttctgtgagtttgaagcatttaatgcatgccaacatagtactggactaatgtttacctttcagggtttcttttcaaaagtaggattctcatgaacttgcctaattatgcgtccttctctcccttaccccaactgtatgtaatttgtaagtaaagtaaggggaggagtatgtagtaattattttttcagagttggaacattgtaacctagagcatcattgacccacttgacagatagctgtcagtctctgaagagatctcccctccctgtagagtagtttctgaatgattgatacaagcaaattaaaaaggtgggaattctatttgcaatttgggttgtagattttgttgactgttgattgtagattttgtcaactgattttgtttactttttggaaagtaaaatttggattcatagaagactccctcccccaatagttttaaactttttcaatatttgttatgtgtgaaaatgaatggcttatattttgatttctattagtgtgagggagtcttatgaagtctgtatatcatcttcctggttgtctttgcattttgagttagagagctttccattatattcagtcattaaattcccagtcaccttttgcttaactcattaaggtatgttagaaaataaataaaagtcagctagtagctcttagtccccttggattttcggttcacaaaatatggggggaaaacatcagattgacaactttttattttgtccagaatgaatatgaaaaggaaatctagctacttatcactgtcaccatcatttaatgaaagaaagggcattttaaaatcaaagaagaagaaaagatgtaatttaaaataagggtcagtcattttcaagaaagaacagggttctatagtatatgggaatgtgtatgtgtacaataggtactatattatctatgcactaaggaaataataaataacgcctcttttttcatggacttattataaaaactttgttgctgaa

SEQ ID NO: 87026 - DNA, 1051 bp, Homo sapiens
tttgcctcaaggaaggaaggtttatgtaacatatatagggctgctttgaaatgtgggtctgttctgctctagcccacaattttttctgtttatacatctgttctagagatgtcattcaattagcaattataaatagctatctaaagccaaagaactaggcgcccttaaaacataaactctgaaaacattcagggaaaggaagcctgaaggggtttaaccttaaccttttcactattatttccaaagaagataatgtcttttaatagttgtttagcacttttatgaaacacattcattgttgcttaagggaaacctaccgtggctttttaaaatttgatttaagaataactattcttaaatttaaatagtcaactattcttaaatcaaatttttgtatacattactgaatttgcttaaaagacatgccttaaagagggcagtggaagaaatataaaggacaattttgaagcactcgggcccacatgtgtatgctaatcaccaaaaactttagccctttggaatcttgggagagtctcacatcagggagtgtttgaatgcattctcattttatcctttgaccaaattctcatccattcccattttacagattgaggtttagaaagagtctataaaatgatttgccccaaattctaggctagttagtgactagatttgaagccaggtttgtcagattctattgcctgatttttttttaagagggagtctcgttgtgttgcccaggctggagtgcagtggcgtgatctcggcccactgcaacctccgcctccagggttcatgtgattctcccacctcagcctcctgaatagctgggactataggcacatgccaccacgctcggctactttttgtatttttagtagagactgggtttcaccatgttgtccaggctggtcttaaactcctggcctcaagtgatctgcccgtcccggccttccgaagtgctgggattacatgtgtgagccacagcacccagtctccctgaacttttaataacactaacaccttggccgagtgcagtggctcacgcctg

SEQ ID NO: 87027 - DNA, 1053 bp, Homo sapiens
ttgcctgtttgcggccagctgacccttaaacccagggaacattttcaactatgctaaggctttccaacagactaaatgagtaccctgataaactcctctagcaccagctttatttctccccagactgtctcccactgctccttagccaagtatgggctcctccagtctggccagtctcccctctgcctcaccaccaccctctgcctcaccacaggcatggttttgtgttcccttctctgtggtaacagtgtcaggaatgctctcattaccatctgtcttgagtactgtaatttcttcctttgtggttctgtgtggacaccacctcctccctgaatcattcctctttgctatcagttattctttcctgtggaatcctgtcctgacattctgtatctcaggatctattaataaaactttttttttttaaatatcctgaagttgtactctgtgagcactacctcaagtcagtgccactcacaaaacccatcagcagagggagctaaataaaagaagatgagtccctgaaattgaggagacctgaagcagaaaaagtacttataaacaatcaactttcacaaactgccagtgctaaagagcttgagtagtgttggaaatacattatttgggccctaatcccagtttaaaactttgatgaggtgatttgtgtttttgaaagagttaattctgtatcatgttaaaaaaaaaactgtttagggggatgacctgataaatataggaatattagagaaccaatctaaggtattccgctcgtctgaaagttttcattattaaggataatgaaatgaggtcactgctttgtgaagacttgcatatggaacactgagtctgaaagttgctaaggattatggatagcccattctgagtctaacatgtactttttcaagtaaatttcttattttgttttgatcaagtgtatgtatcttaatttcagttagcagacttgaagaaagagaagcagaactgaagaaggaatataatgcattacatcaaagacacactgaggtgggtttctaggtttttcattaccatgct

SEQ ID NO: 87028 - DNA, 1009 bp, Homo sapiens
aggtaagctctgattttgagccggcagagcaggtggctcttcctgccttaatcttatcctcttgctttttggaaagacggatagaaagagcgctcaaaatgaggctgaagtatctccatcattattctaaaggggaaattttggatttgtcttttgattgttcttttttcttgccccctcaccttttttttctttttagataacatgatttgcctttttttttttactccccagaaaattagcaattttaaaaatggcagttacttatcagttgttttgggataggatgaacagaatcttgtttatttccagttaatctcggcttggagctagttttgatgagtaaaatgacaaggttttagaattttccctgagatcgttttgaagtttaggtttatgtgataactattaaacaagaaatgaccttttaatacacttcaaatggaatgcaacaatataggtataggttaacttcatggtacttgaggctttcgaggatgtctatagtccttgccaggtgggcttttctttcctgctttccccttcccttctacttccttttcttttccctttaactgattccttagtggcattcaggactttaaagagatggctcttccacactttaaaatgacttctcaaaagtgtttataccatcttatgggacttaggccttgagtaagctgagttcattggatatgttgttgtactgagttattgtaagtattttcagaaaagaaaggttctgaatttgtattatttgatcttggtgtatgtgtgtatattttctaatattttctatgtattatatgatcaattatatatgatctttatgttacatgatttatattgtaagtacctacaaagataataataaaatttaggatcacagtatatgtaaagaaaacatgaaatacacaaagtcataaaacagtttctgttcaggttcttgctgtgggtgttaggcaggagagaatataccaccagaaaaacattcagaaaatcattt

SEQ ID NO: 87029 - DNA, 1021 bp, Homo sapiens
tttcctctaatgagaattatttaatggccactgtgttttttaccatggcagcccagaaacagaacaaacgttgaaatgcaaccataacaactagtttgaaccttacctggttggcatatttaaattgttttttttcttgatccacgttttatacatgtataattaatatattatgctctattgtaaactgtctcaaatcctttgtggaatgaagaggtgaatcagggtaaaataaatgtaagaaatttaaaataaaaaaaccaaaaacttctgttggttggttggtcattttttctggtatactgaatcatattgcagtaaatatttttttacatctacaagttttcccttctattggtagttttcttagaatatatttaaggaagtaggtcaaagaattttagtgctttttggcatataatagtttggccatttctaatgtcaatagaattggagaagtaagggttagtagtaaattccattttgcttgtcataacttatgaatttgaagcattatttacagcatattagcacacagagctgatatagaatcatttattatttgattctctcttaggaagcttctgttgccctcaggctccttggatttacaacttattcttccctgagtatagagccattgccttttgtggagaagatgaaaagatttagatgacagtgatattttttttttagtgagtacttcttaatttggtggctatgttttttggggagtacaggttttttttttgtttttttttttaagagatgagggtctaattcctgtgtttaagtgatcctcccacctcagccctcccgtgagggagcccacctcaggtgcatgccactgcacccgtggctgtgattttaagctgttatatttagactcttctttaattccgcccttccttcctttaaatgaaaattcgtctttttgaattaaatggaaaaatgttgttggcactgaagtcaaatgtgttagatccttatactttgacctttctaccttttttgtccccca

SEQ ID NO: 87030 - DNA, 1054 bp, Homo sapiens
tcttaggaatttaaactccatggttcaggtgaatctatgactattaatcacacaaccatttaacaaatatttattgattattccatcattcttttgttctctattgtacatgttatagatttttaagttgtctggaagtcaagatgcatatgcaagtatacaaaagggtttatatatttgtagtaagatatgtatatcatatggaatgcctataacatgaagtggaaacaattattttgttatttttttcttctatatttgggagttttttaaacttaatttttatagaaaaactaaaaatcaacccaaggtcataattctgagatctaagtagttaatacctaattgtgattattgattccaagaaataacaggagttgaaaatgtaaagtttaatttctctgattaaatttatattgttcttctttattagaaattcattgaatttgaagactctcaagaacaggaaaaaaaggacttacagacccgagtggaatctttagaatctcaaacaagacaacttgagctgaaagcgaaaaactatgctgaccagagtaagtaaaacatttcttctcataagtacactaaagattgggcttggccagacgtggtggctcacgcctgtaatcccagcactttgggaggccgaggtaggaggatcacttgggttcaggagttcaagaccagcctggtcaacatggtgaaacctcgtctctactaaaaatacaaaaattagctgagcatggttgtgcatgactgtaatcccagctacttaggaggctgaggcacgagaaccatttgaatccgggaggcagaggctgcagtgagccaagatggtgccactgcactccagcttgagcaacagaatgaaactgtgtccccccaccccccagaaaaaaaaaaaaaggaattggctctaatggtgcaatgactcatcctgaaattcgactaaggttctaaatacaaacttggaattgtcatcccagactcaagagtgagacctaggacctagggttagttcttttttattcacattttcacatggtacccatgt

SEQ ID NO: 87031 - DNA, 1755 bp, Homo sapiens
actgcaacctccatctcctgggttcaagcaattctcctgcctcagcctcccgagtagctgggattacaggcgtgcaccaccatgcctggctaatttttgtatttagtagagatggggtttcaccatgttggccaggctggtctcaaactcctgaccttaagtgatccacctgtcttggcctcccaaagtgctaggattacaggcgtgagccaccatgcctggcctggtatcacagttttaaataggttggccaaagaagccttcaccaagaaggtgagatttgaacaaagatgtgaaggaagtaagtagagagcaagctgtttggatatctggaagaagagaattctaggtagtaggaagcaagtgctgaggcttgaagtgtttgaggaactgcatggatgcttgaatcagagaatgggaaggagaagagggtaggaagagaagtaggggatgatgtcaaagaagtaagagaatggtggaagcatgttgtgtagatccttagaggctatggtaaagaatttaaaccactagagcgttttaagcagaggataaattgtttttactttttttttttttgagacagaggtttgctcttgttgctcaggctggagtgcaatggcgtgatctcagctcaccgcaacctctgcctcccgagttcaagcaattctcctgcctcagcctcccaaatagctgggattacaggcatgcgccccagacccagctaattttatatttttagtagagacggggtttctccatgttggtcaggctggtctcgaactcctgacctcaggtgatctgctcgcctcagcctcccaaagtgctgggattacaggcatgagtcactgctcctggcctgcttttttttgagagggggtcttgttctgtcgcccaggctggagtttagtggcgtgatctcagcttactgtaacctccgtctcctgggttcaagcgattctcctgcctcagcctcctcagtaactgggattacaggagcctgccaccacgcccagctaatttttgtgtttttagtagagaccgaatttcaccatgttggacaggctggctggctgactttttaaagaatcctcctagatcctctagaatatattgtagaggattagggtggaagtaagaagactaattaggagactttcactgttgcagtaatccaggcattagatgattgtggcacacaccaggatggtggtggaaatgatgaaaagcggtcagatctgaaggtagatttgctgatggattggatatgtgaggtactagagaaacagaagagtcaaagctgactccagagttttggtcctgagtaactgaccacagtaatttaatgagctagagaagaccaggagaggagcaagttttcacatgctaaatttaagaatttaagatgcttttttttttttttttttttttttttgagatagagtcttgctctgtagcccaggctggagtgcagtggtgcgatctcggctcactgcaacttccacctcccgggtcccggttcaagcaactctccttccttagcctcccaagtggctgggattacaggaacgtgccaccatgcccagctaatttttgtatttttagtggagacagggtttcagcatgttggccaggttggtcttgaactcctgaccttgtgatctgctctcctcagcctcgcaaagtgctaggattacaggcgtgagccaccacacccagccttaagatgctttttaaacatccaattgaagttttcta

SEQ ID NO: 87032 - DNA, 1008 bp, Homo sapiens
aaagaaattacatttaaaaacaattacatttaactaattaatataatatcttgatggacacttaataagccagccctttatttgatactattttttagacaagtactatagtcaaagtatttaaatggctattctttttcttttctttcttttttcttctgcatctttactccaacaagcaacaacctttagggaattttttttttttttttttttaactttgggagcttgtcttttcaaagtattcatttgtttttccccagaacagtggggcgaaacagtccctataagccatctggacttaaaagcattttgcttcatcacaaagcttactctttttagatcctgacataagtctgtattgtccactgatttttttttttttaacggtgtctagttgctcccaggagagttgtctgaagtcactttaatgttgttgctggcctattagttattgaaagggaagaggggtatttagtgaagatgtgttattatacctgctgaaaaagctcattcacaggcccttaatccccctagtccttaaaaaaaagtgggtatgtgtgtgagaaaaacagaaaaggggaggagtatgtgcgtttcataccaacatacctgagtgatctgacaaatgcttgtgctgaggggactctctggaatttccagggctaatgtggttttataatatgcaaacaacaacaacaacaacaaaaaaacagaaaaacaaacaaaaaaaactgctgcgcttctcctgccacgattttgctgttggcctaaccctatcgtggttattctaaggtttgccaagcgtagtagagggtgaccaacttataaagtcatgccactggcaagcaattaagtcacattaaatcattaatgactatcctagactttttatgagcattcatttccttttttttttttttttttgtatacagggtcttgatccgtcgctcaggctggagtgcagtggctcactctcagctcactgcaacctctgcctcctgggct

SEQ ID NO: 87033 - DNA, 1098 bp, Homo sapiens
gacggggtttcaccattttagccaggatagtctcaatctcctgacctcgtgatctgcccgcctcagcctcccaaagtgctgggattacaggcatgagccaccgtgccggcctgtttgtgtctttaatgcggagaccaagagtcttttataccaaagtaagtgcctcagggtatttacagcaaaagtgatttgaaagcatggaaattatccatcaccagagagagtaaagtaaattctgagcacctctgtggaaacttaggtgggtatgtagatagaatgttttaggaatgtgtgaggtgctatgatctcttgcttgcaggaattctcagcaaggcatcaaaaatttaatctttatattgataggacatattttgaataccttctgactttttcctttgcttttatttgaatttctagtgtggagctagtctgctgttttagggattctttaaaaacaacctaaagaagggctaattttagatagatttggaccggtttcagatgctaatcaagaaatctgtcatcttatcgcccatcactctctcctttgggctgcctgtgacacacctctccattctttaaccaagacccgtctgatgcctttgcccatgctctagaatgctctccttagaattttacatagctagctcctcactttctactctgtttcaatttcactttttcagccagaacatcctgttgactctatccagaataagccctgtgaacctattgaataatttattttaaaatcagtgacttttaaatttaaattctttttggagacagagtctcaatcgcctaggctggggtgtagtggcacagtcacagttcactgcagcctcaatctcttgggctcaagtgatcctcttgcctcagcctcctgagtagctaggaccacagacatgcgttaccacactgggctaattaaattttttacagagacaaggtctcactgtgttgcccagtctggtctggaactcctgggctcaagtgatcctcctgccttgtggatcctgccaaagtgttgggacttacaggggtgagccactgtgccccagcccagtgattttttaaaataaaaatctggatacaaaa

SEQ ID NO: 87034 - DNA, 1033 bp, Homo sapiens
ttttgagcagaaaggattccgccttgttggtctgaaattcatgcaagtaagtggacttcattgttcccattttgattccttcatagtataggagaacactgtgattaacctgtttctccccgtctttcttatttaaagttctccacggtagagtgaacacaagtgtcttgagacctggaaactcctcagtgccctagcgtttggctacatcttggaacaaaccaagttatttaggattttccaaaatagtctctgtaataggaggtgcattgctacgggaaaagcagtgcagagttccacatatgactgcatctctgtaatttctgactgagagctgagcatgtttgagttcttggtcttgagcttcctgagcagataattttagagagatttttttccccctttgagacaggttgttttttagcaagaaagtctttccatcatcaattactagacactaataaatgcttattgtttagcatatattaggtatcataggagctggtggaggaaaactatggttttggttttggggaggttcttcagaaacagcagagagcagatgtacctgcaagctacttacaaagcaatcttttgataaatgcaaaggattgattgaccaataacccttcttcaaacaaattctagagataatccaaattctcggctgggtgaggcatagtggctcatacctgtaatcccagcactttgggaagccaaggcaggctggtcacttgaggtcaggagttcaagaccagcctggccaacattgtgaaaccccgtctctactaaaaatacaaaaattagctgggcatcagggtgggtgcctgtaatcccagctattcggcaggctgagacataagaattgcttgaaccagccaggtgcggtggctcatacctgtaatcctagcattttgggaggctgaggcgggcggatcacctgaggtcaggagttcgagacagcctgaccaatatgatgaaaccccgtctctactaaaaatacaaaaattagccaggcgtggtggcatgcgcc

SEQ ID NO: 87035 - DNA, 1017 bp, Homo sapiens
ggtttccgaggctggaggtagacatgataccatatgcaggttgattttatcggagtttattgttttcctccctcttaagttggcgtttggctttggttgttaacatcacttagtcgtacctctgttacacgaagtgtagaacctggtacaacacactttgctggccagtctttcctgaaggctctcactgtttgcaccagcgtggccgggagggctggatgtggggagggcatttttcagccttaagtgaatggccattgtaggctttttcttttaacatggtctaatgtccatggagcttcagcttttatgctgctgtggctgtagatttctggcaatgggcgcattttaatccttctggtcttggtcatgtgactatctctttctccacccaggaacattatacatggcagtgattctgtggagagtgcagagaaggagatcggcttgtggtttcaccctgaggaactggtagattacacgagctgtgctcagaactggatctatgaatgacaggagggcagaccacattgcttttcacatccatttcccctccttcccatgggcagaggaccaggctgtaggaaatctagttatttacaggaacttcatcataatttggagggaagctcttggagctgtgagttctccctgtacagtgttaccatccccgaccatctgattaaaatgcttcctcccagcataggattcattgagttggttacttcatattgttgcattgcttttttttccttcttttcatgtacactgaataacctgacctaatagagagtgtaaatactataaaaatgatttattttgaggtctcacatacacacaggcattctttgcctgcccttcttaacccccgcatcccttccactcttggcactgagctattcaacaggcatctatggagcatgtgctacgtggccaagactggactaggtgcagaggattcatcagaaatgaaagaaaacatgagggctgggtgtgctggcttgtgcttgtgatacc

SEQ ID NO: 87036 - DNA, 1056 bp, Homo sapiens
cgtcgggccgggcgggtggggcgttcctgcgggttgggcggctgggccctccggggtgtggccaccccgcgctccgccctgcgcccctcctccgccgccggctcccgggtgtggtggtcgcaccagctctctgctctcccagcgcagcgccgccgcccggcccctccagcttcccggtaaggcggtgggggcgcatcccctggcgactcctcccgttccctcttccgcttgcgctgccgcaggtgggcccggtctgtgggcgccccccgatttcccgcaggtcccgcgcggcgtcggagcgggagattcccttgcagcttgcgccccgcgggccttcgggctccgcagagggacgccggccctgcgcggggcggaagcggccgggaagccacgtgtccccgcggccgcgcgtggtgggggaggagggaccggcggcgcccacgtggcctccgcgggccccgccagagcctgcgcccgggccctgaccgcacctctcgccccgcaggaccatggccaacctggagcgcaccttcatcgccatcaagccggacggcgtgcagcgcggcctggtgggcgagatcatcaagcgcttcgagcagaagggattccgcctcgtggccatgaagttcctccgggtaactcgcccccgtctccccttccccgctgcagccggctcgcgggtgtttttccctcccggcggcggtttgtccgcgtctgctttccgagttcatttcgctgccgcgaaatccctttgccctctgcccccgcccacggcggcttgggcccgccgaccctttcccggggtggtggggacagacgcccttgggaaggtgaagcgctggtagcgtgactcgccctccgggtttgggttccttcccgcgggccgctacctgcccacccgccgcaggggggcagcagggagcggaaaaaccccgggccccagaccccctgcgcctgcccactcgggtccacctaggcacagaatggaggcttggaatctcctttgctttagtctgaaactccgagttccagtgcggtgctcctcctttagcatag

SEQ ID NO: 87037 - DNA, 1157 bp, Homo sapiens
ctgagccacatagcaagcccctgtctctacaaataaataaataaataaataaaaattaattgggcatggttgagtgcatctgtagttccagctacttgggaggctgaggtaggaaaatcacttgagccctggaagttgaggctgcagtgagccatcattgtgccactgcattccagcctgggtgatgatagtgagaccctgtctcctaaaacaaaccaaaacaacacaccaaaaaaagaacagtctttctgttaaaatggcattagtttcatggtttggatgggatttaaaaaatatttatgtgtgtgtatatgtgtgtatatatatatatatttccacacaccacttaggaacgtgggctagaatataaaaccggacttgctaatgggaggttcagaggatgggttggagtctttccagcttagctcctaactggtgcctcctctccaatgccaggcctctgaagaacacctgaagcagcactacattgacctgaaagaccgaccattcttccctgggctggtgaagtacatgaactcagggccggttgtggccatggtgagtgctcgtggggaatgagagaaaatgaggaaaaagtgctcagtgttctttgttagacatctccctcagctaatctaaattttattttatgaatggaacctgctgaagttacttaactgagcaactaggagcttgggaggagaaagcaaatcagaccttagaaatgggaaggatgttagctgggtgtggtggtgcacggctgtaatctcagctacttgggaggctgaggtaggagaattgcttgaacctgggaggcggaggttgcagtgagccgagatcgtgccactgcactccagcctgggcaacagagcgagactctgtctcgacaaagaaaaaagatatgggaaggactttttcaggtacatgtctctatggttaaatagaatctcactgcctgcaagagtggtaaattttcgggccaggcttggtggctcatgcctgtaatcccagcgctttggaaggctgaggcgggtggatcacctgaggccaggagttaatcccagttactcagggggctgaagcacgagaatcgcttgaacttgggaggcggaggttgcagtgagccgagatcatgccactgcactccagcctgggcg

SEQ ID NO: 87038 - DNA, 1052 bp, Homo sapiens
gagccactgcactccagcctgggcaacagaacaagactctgtctcaaaaaaaaaaaaaaaaaaaattggagagagtaaaatagggaggcagtgaaattgttgagaaagtagatctatttcctgttcacctttttcttccttctgctgttccctggaatccttaccctagcatgttagtctttcttttccctcttctagcagtcttctgggatgcccttcccactgatcctattccagactggccactttctcctttcttcaccagttcttctgtgttgatggctgcataaggattctgcaacattgtttatctctgtctcagctaaactgggaagtccccaagttggacagacttttctttgaatcctagcaatacgtttggaatgcagtttttatataggcccctactctctgctggggttagctgataatcatgtcactgatcggtctcattgatgtgtcgtgtcaggtaggagtaaatgttagaccctacctgtcctgagtggcaggtctgattataaatccattttcacactttcgaggtctgggaggggctgaacgtggtgaagacaggccgagtgatgcttggggagaccaatccagcagattcaaagccaggcaccattcgtggggacttctgcattcaggttggcaggtaagtccggggacaggagggtggatgacttttatgcaacaccatttaaagcagacgtcatggcgtatcctactttcagaagaatctgtgcccttttttttttttttttttcttgagacggagtctccttctgcctagctggagtgcagtggtgccatctctgctcactgtaaccttcacctcccgggttcaagcgatcctcctgccgcagcctcccaaatagctgggattacaggtgcacactgccacgcccggctaatttttgtatttttagtagagatggtttcaccacgttggccaggctagtttcaaactcctgacctcaggtgatccgcctgcctcggccccccaaggtgctgggattacagacatgagccaccgcacttggcctgaactt

SEQ ID NO: 87039 - DNA, 1150 bp, Homo sapiens
aataagcagtgttatgtcatggttgggctttgcaaatcagtgttataagaaaatgcagcagagctggcctatgataatgaacacatcatatctagttgggatgttgatctgcagtgggtttgagtatcactgtattttccaaaatttgcggaggagtgttttatgtcttcggcaatcttggggtacaagcactcttttgatggggaggccagacttggaagcataatacagttgaaacaaggaatgttttaaatcaagcacttttacagttgtatagctgcttttaaaaggaaatgctttgggggtataaattggtctgttgcttcaagtggcaatttggctgaaagagtctggagtgctgtccattgcggtacccattaaacagacttttgcactttaaaacatggcaacttgtaattgttttctttcttaggaacatcattcatggcagtgattcagtaaaaagtgctgaaaaagaaatcagcctatggtttaagcctgaagaactggttgactacaagtcttgtgctcatgactgggtctatgaataagaggtggacacaacagcagtctccttcagcacggcgtggtgtgtccctggacacagctcttcattccattgacttagaggcaacaggattgatcattcttttatagagcatatttgccaataaagcttttggaagccggacactgtctccttgtgcttatttgatactgagctgaaagaagtgacttggttctctggctatagtagcattatgtacatctcaatcctgcttgtcaaagaatgatctgatcctgacggagtttcgctcttgttgcccaggctggagtgcaatggcgcgatctcagctcaccacaacctctgcctcccgggttcaagcgattctcctgtctcagcctcctgagtagctgggattacaggcatgtgccaccacgccctgctaattttgtatttttaatagagacggggtttctccatgttggtcaggctggtcttgtactcccaatctcaggtgatctgcccgtcttggcctcccaaagtgctgggattacaggtgtgaaccaccgcgcccggcctatttatttatttatttgagacagagtctcgctttgtcgcccaggctggagtgcagtggcgtgatct

SEQ ID NO: 87040 - DNA, 2287 bp, Homo sapiens
ctgttttaaaattcatatgacttccttttaaaaaaaaaaaaaggatacaagggtaaactggtgaaaggtttgctctctgcattttctaactttctactgagttgtgactgaatgagagcgctctagcgtttaccagtgaggttcataaactaaactctcaggaattaattgcatctgttctagaagtgcttctgggtcttagcctggcctcttcagagtggtaatattgaccatctcctctggaatataggtagggctaattagaaattaatcaaaatgattaacctctacagtccttcagcctatggaatgctttaaaaaatgttaatggaaagccccaggagaccattttaggtaagacttttgtttgaattttaaaatgcatagaacgttaaaaaaaaccagcaatttattttctaaaatattgctctacttttgggaataatagcattggtaatacgcacaggtttacctcattctatgcaagaggggttaataacataaggttttataatagctactggaagtaaaatttgttactttatagtgtaagaatgtatggaatcgcatgtcaccatttcttaatactgactctttaggggcataaatgcagatcacatcaacgcaagttgattctcatgtgtcaaatatatgtgaattcagctgttaaattactggatatttatcttaacattgctgagagggacctactgtaaatgtgacatcctcacacttcccatatctttaactttgaaaaatcttcttgtaaacttaaagcctagaagtattccaaagcaagggttagagcagtctttattctcaggctcactgaattaaacccaggactaattccacagcacaggcacaagaagcctgttgtgtagtgtactctgccagtaccttggatttaggagctccatggggaactgactaaaccaggagagagaggatttggagctagtcagtcctggtaatctatgaaatgctcatttatacccaggtttcataagcttccaattctatagcaaacccaggctctgagtgttttagaatttcctaattcatgaagtgtttcttgtcttgatcccgtgaccaacagttgaaggttggtaaggacttttctacagtctgaacacaacctaaagccctctttcattgttcacacactaactcctactgccgacgaaccgaaaaataattaatgcagaggagatttatgtcttagccataactccagttgtacaactcaatcgccccattctcttttacggttcaaaatgtactgctgaccttgggtttgtttttgttttgttttgtttttcctgttaggatttatttggggacttttggtagtttaaactctttaaccttttccttgccgtgtatgaggaaagctaaagctgttatcaacttcttattctacgatactaacacgggttttcagtgtttgtttgtttttattattattattaattttgcgtgatgtgaataccctctcccatcaatatttgtattatggtgctatatattggtaatgatcctttaatattgggaagggattttaaaaatactgtgattaaactgggtttcttcctttgattttcatattttaaataaagccacagtcatttatacaaaagaaaagcatctgtccctgggcaaatcttttgaggacagaggtcaaagtaaactgcataaggtttttacatcatttctgtatgtatttgatatatagatcaatatctgtacaaatttaatcttttattttcttggtaactcgtgatcattgagaaagtgtttgaaactttctcatgaagtgtatatataatggcgtgaaaaattcctttggaaaaatttatgttcctttcatttttaccaaattgcaaattttcagcatggatgtgaaaagcattaaaattataactttgtgtacaagatgaaaataattcactaaatttgcccttttttacacaaaataaaatgttaaagttaagctggatttgagcagttctttaatatgctttggtttggggggttgcttttctattgcgtgccctctataagcagtcagagacccctatgaaagttggatcagccccttcctcttacaaggggtagcaggcacatgagtgctgtaaggaagaattttccactagctgccaagggagccaagagtagtatggttagacatatggatgaggttgcattggaggtgggatttcatgggcagggagggaaagggcaaaaaccacagcaggagccaaggtgaatagggacctttatgggg

SEQ ID NO: 87041 - DNA, 1842 bp, Homo sapiens
ctttgggaggctgaggtgggcggatcacaaggtcaagagatcaagaccatcctggccaacatgatgaaaccctgtctctactaaaaatacaaaaattagctgggcgtggtggtgggtgcctgtagtcccacctacttgggggggcggtgctgaggcaggagaaccgcttgaaccgggaagcggaggttgcagtaagccgagttcactccactgcactccagcctgatgacagagtgagactccatctcaaaaaaaaaaaaaaaaaaagattgtacttcagaaccatgaaagaactacatcattgtttgtacaaacattgacataaaagtgaatacttaatcacaaacaaaattctcattatcccagtcagattagtgagcaccattactgcgaacatttcattgaagatgtccattacacagtactgttcctttccagaatgtttcttaactgctaatatactggaaaattaaaattaactgaagaaatgaagaagtcttaataactgtaaagctgacggaacacgaagatcacaggcaatccgagtactctagagagccttaatgcccatatgtttctctctctttcattcagtgacaacactgcagctgaaggaggagttgctggatggagaggattataatttccttcaaggagcgtctgatcaggaaagcaatggctctgccaacttctacatcaaacaagagccatgaggtggcttagaaactgagggcgggtggggaaggattttacacaggactgatttataatcaatccagctgtacagggggctactctactgggacattttgctaaacatagaagatttcagttccagatttttcaggtgggtgggggagctattttagtcgggggggcaggggggtgggaaattttcaatttataaagatggacaatttttgtgttgtatttgaagcttttgaaagaattttgtaatattttccaagtttggatttatgtgcattgttaacaagaactgaaattctaacttttttggtaacattaaagtttaggtagcaggattgaaggaaatgatttaagaaggatatagctgttaaatgcaaatgaactgtcattacaaatgaacctttttggtacctgttgggagattttgggatttttagaagttaggccagtcacatctccagcttcttttgctgcagaaatatgcaactgaactcctcatggaggggtcatcaccacaaaggtcatggaagggtcattatttctcttgttggcattttattgcagcccattttaaatgtttgtacagaaatatttttcattctgtgaaaatttatttggagttctgtatgaaactggaagaactctggatacttttatatgttctcttttaattaaaaaaatgattagaattatcctaacactaaagtgttaaactggaatggttgacaagatattcaggatctcagtctacacattgaggggttggggaaaatgtaatgttgtccttagtttattttcctttctaaaaaaaataccccacgaaagggattctgatcagttctctgccatttccctctatctgtgaaataacagcttcgtataaccacaaccaaaaacagatgttctgtattaggagaatcgaattgaaagttattcaaagccaaaataagtttagatttcaaaatcattccagctctgcttttatctatcctggatttggtagaaaactaatttgaaagagaatttaattttcttaaaattccatatatatatatatatatatatatatatatatatatatatatatatatatataaaattgtctttaattgtattcaggatttattttaataa

SEQ ID NO: 87042 - DNA, 1284 bp, Homo sapiens
ctgttttcttctcattcttctgtttgctaatatttttgcacctatgggggttttcttgtttgtttccgttgttggttttttggtggtttttgccattttaggatatgttctttagcttttgcctccctcataatgtattaggccatcttgcccccttcccagtctttttctctgaagatcactgtgatgttcttacatccagaggaaattacactacttcttttgtacgaaaaacaaattaggattgtaaatccagtgttacctgctctttaacagaaaaatgttcaaagtctaaagagcgttcctgtttcctttcttgtctaagtttttttctttttgcacttatttatgaaatagtcttgcattacttaattaagtatggatattgtgagttccaaatatatttgagcttttattggatcttggatgtattttctttaagcatgaggctggttttgaagatgtatgtcacattttgtgataggttactgattcatttaaaatggaacttctggcactggcaaaacccaagaatttagagtagacgaactagatggaaactacctggcatcctatgtgacttccttcttccaccgatgtctatagtatattctgagctggggcacaacttgtgggacttggtgtgatttttctctgatgaaactaagtagggactacattgctaccttaactatctgaaagctatggtttcattagctgttgaaagagtttattatttatgggcttcgtagctggaaaaatatgatttcagttagcttatctcctgaaatggtagtgattagtgtcaacaaagtgacttccttctaaaaacagagctgagaaaagaaaaggcatttgtgtagaaagtgacattcaaccacaggatctgttttatttcatccatcatttattgagaaggcctggaaaggagaaatgattcatgtgaagataaccagacaggctttattttagattccatgaaaacagtgaaactttacattaaaacattgcacatctgagtgagtgtttcacctttatcttgagtgactttttttagcacatcattttcatattttaacatgactagaagcataatccagaaatttgttgttagcagtaatgcatattgcttcaagatatgctttagaatctcaacttacctttcttacatttttttaaaaaacatccgtttgaatgaaacatgtttgatcttgaagcacattaattcttttctcattcatttagccatccagtcatcatagaacaagatactgttttaatcaa

SEQ ID NO: 87043 - DNA, 1487 bp, Homo sapiens
gcggatcacctgaggtcaggagttcgagaccagcctgaccaacatggagaaaccccgtctctactaaaaatgcaaaattagccaggcgtggtggcgcatgcctgtaatcccagcactcgggaggctgaggcaggagaatcgcttgaacctgggaggcggaggttgcagtgagccgagatcgcgccattgcactccagcctgggcaacaagagcaaaactccctctcaaaaaaaaaaaaaaaaaaaaaaacctatttgaatgttggaattgaggataaggaagtatagtgccgtattaagaagcagcagttttcactctaatggtgccgccgcctcttatttttttctattactcagcagtttgttagaaagttttctcactaagctttagttacacaaataagtatttggggtttagaaacctgtcatccattgcaggcagactgatataaataccagatgggctataaaaccttttgtttttacgtttgccttggtaggttatcatattctggctctgttgcttcatcttacagctcgttggtctttttgaacttaagatcatctgttagtggtatattctttggcagtgcttattgtacagaaacagctgatgagcttcattggtctagcttgctttgtagtaagttgtgttcatgccacgaaggagggataattactgacacttttgagaataagtataaggttctgccagaaggatcatagacactctctagtctcaaaagcctcttttccttaagatgtaattctagagcaggaaaagcagtactgatttctgctttaaatctcaccattttcagggactactgtaagtagtaagagtggacattgctccttgcgtttttatctgtgagtatgtggtatattaggaaaaagtcttaagttgttgctgcatgtgattttggtttggctcttgagagttgaatctactcaataacagcttaaatcccacatcattttacataggaatactgtgtggcttacatttaccttttagttttgattttgtgaagcataattttttattgctcttactcggtttattctgtcatctggaagaaaacagacataactcagtcacaaagataaagatccctttgctttttttttttttttctttctttctttctttttgagacagagtcttgctctgtctcccaggctggagtgcagtggtgcactgtcggctcgccacaacctctgcctcccggattcaagcgattctcctgcttcagcctcccaagtagtgggattacaggtgtgcaccactacttacggctaatttttgtatttttagtagagacggggtttcactatgttggccaggctggtcttgaactcctgacctcaagtgatccacctgcctcggcctcccaaagtgctgggatcataggtgtgagccactgtaccctgctgatccttcagctttcaatatgattaatgcactatgcctggttcttcaatatt

SEQ ID NO: 87044 - DNA, 1065 bp, Homo sapiens
gagtataccaccatgcccaactcgtttttatatttttatagaaatggtgtctcaccatattacccaggctggtctcaaactcctgggctcaagcgatccatctgcctgccttggtctcccaaagtgctgggattacaggtgtgatcctctgagtctggccaatttttatttaaagatattttttaaattggactggacgcggtggctcatgcctgtaattaatcccagcaactttgggaggccaaggcggatggctttagaccagcctgggtaacatggcaagaccccatctctaaaaacaaaaaaaggaagaaaaaagcaagctatttaaaaaatgtaaaagtatacttgaggattaaaactgaaacagatttttccagctgacttgccaaatatgctcaggtacgtgctgatttgcctcattaacaacctagagactgaagtggcaagaagaatcgaatatactctgttctaacctttctgatgtttgcttgttaagtgggaaacttaaaaatttctactgtccactatagtagtactttgaaaaataagttttctcccagcacaaaacccatgtcagccacacacaagtagcaacctacaggcctgtctcttgacctctcgtttataggcacaagcctcccacaggcccagaattattttgcccaccagctgcttgccaggtctgatactcacctaaaagaactttagggagcattgccaaaccagcctgatgaaagggagttctcatgtatctaaatgagtagcaagaattcacatgggaacttcatttatgtcagtggactgacaatagcagatatgatcactaagctttctgtgaagtaaataacaagtctgctttcactttctgttggataagactttggaatttcagaattttctttccaagatgtcaaattaaaaatggtttttattactcagtggctatatgacattgctttttagaacttatctgtgagttttatgtagacaattcatttgcctccctcagcgtgactcttgtaggatttgtttctgatttgtggagttaaaactgttttgaat

SEQ ID NO: 87045 - DNA, 1053 bp, Homo sapiens
acttcaccttcgtactatgtttaaatagttaaagaattatttggaatttatggtttataattatgttatttagctagtcgcttctgttttttgctttcttagtgatagtagggttgtgcattctttcttcttcataccaatattaatgttttcttctctgtgtcaggatgttccaaatcacggatttcgtgtaggaatgaaattagaagcagtagatctcatggagccacgtttaatatgtgtagccacagtaactcgaattattcatcgtctcttgaggatacattttgatggatgggaagaagagtatgatcagtgggtagactgtgagtcacctgacctctatcctgtagggtggtgtcagttaactggatatcaactacagcctccagcatcacagtgtaagttggtatacagaaaaggtgtccttttgtaaaaatcagcaattctccagaggactatctcacataagtcatcttatgagctcacaggacaagaatatacctatgtctgattggttgccaggtaagacattaagactcaacaacaatatcacagaatcagaccatgtgtcccatggcaatgtgaatccaatagtcaattacataatgactatagaaacacaacagtcaccaaattaaactagacttactattttagtgagttaaaaattacatactaaaagtttattggtaggtaataaatgcttttgagtaaatagtggaaaatgtctcatgttgaggctatggttttgtaggaacaagtacccttattttcagagcatcatgtacttaagtataatggtcttggtaaagatagttcatataagttgtatctagacaactgtatcgtctaaattgtaaacaattatctagtaccaattttccctttttatttttcagcatcaagagaaaaccaatcagcttcatcaaaacagaagaaaaaggctaagtcccagcaatacaaaggacataagaaaagtgggtcaccacgtggtgttcacatacattttctaattgttaactaattggagtcacagtattcttggacaga

SEQ ID NO: 87046 - DNA, 1447 bp, Homo sapiens
taccttaattagtgaaggttcacaccatattagtgtcctaataaatttttttatattccttccacttgttctccaaaagaaggaacttcttctggtcacaactataattgtttctttcttttattattcagcccatttgaaagatctaaagatacctttccctttccattcaattttaatcaaaatagcaagattaaatgtggttagacttaatactaagcacatgaaaacatgcttctaaagttgtaattttctaactagggaattacattaaaattatgagcattaaaattggctgaatgtatttaaaagcatatatgcacatgtactctgaagagagaaaagactattaaagaatattcaccccaaatgtagaaggcatgtcttcttgccatgttttatagtatgacatactttgtgagtttgaagccttcaaagaacgtggtttttggtcttctcacaaatgctgacagattagtgtgtaacttttccttgtagatattacaaagaaacaggatggacattttgatacaccaccacatttatttgctaaggtaagaagtttttataagaaccctcatttgtaaattaggtttgaaagagggttgtgggttttttcctaaaattacggaaatcacaattacatatgttcacttaaaagaattaagaccttgtaaattcataggtgtcacaactctttattataattattcttaaattctatttgtctgaattctctctaaaccttaatggaagtttgagttataatattaggtaggtaggagaaggcacctggtaaatcttttcacattggtaatattttaattatcaaaataacaacatttgtaacagtagatgtgctttcatataattctttaggtaaaagaagtagaccagagtggggaatggttcaaggaaggaatgaaattggaagctatagacccattaaatctttctacaatatgtgtcgcaaccattagaaaggtaagataataggttttaaaatatagaaatgcaattataggatttgggtataagctaatagaaggagtccccaagcatattcgttttgacataaaatgtgtatgtgtatatcttcactggggagaaggttgctaggaatttcaaaataaatttgaatcctctgatcttacatagtttattgtcaagattgtcattttgagtctgctacacttatttatggaagtatatcctaatttagaggaaaaatatttatttaagttacttctagacaaggctagtccaattcagaattgtaacaaggccaagtttatcttcagtttcctgtgtttcctctttaggcctttttcttccttttggtagtagtttttgctgcttttctcttttccccctcatctgaaactgctcttacaaaaagacctagaagagaaattcttgggttttttgtttgtttgttcattttttt

SEQ ID NO: 87047 - DNA, 1059 bp, Homo sapiens
attacatatatatgcctataatcccagctacttaggaggctgaggtaggagaatcgcttgaacccaggaggccaaggttgtagtaaggcaagattgcaccactgcactccagcctaggcaacagagcaagactccatctcaaaaaagaaaagaaaaagaaattatgggtacaattgaaatacatgtaaggatgccatgctctgaaaacagttgaactgtttgcactgaacagatggttctcaaagtttggttcatagaccagcagcaacagcatcacctgaggacttgttaaaaaggcatattctcagttcccacccaagatctacaaaatcagaatctctggagtgagacccagccatctgtctgttaacaaaccctgcaggtgattgtattgcagatagacactagtttgacaactgctatcagatgctgtattgttttatttaattttattttcttattatgtagtgatttatttctgggtttcaggttacaatgcccttttaagatatgaaggatttgaaaatgactctggtctggacttctggtgcaatatatgtggttctgatatccatccagttggttggtgtgcagccagcggaaaacctcttgttcctcctagaagtaagtagtttatttacccttaccgtaatttttttatatgtgtactttaatgctattttacacatagtaatgttagagtaatatggaaattaaaggccgggcatggccgctcacacctgtaatcccagcactttgggaggccaaggcagtcggatcacttgaggtcaggagtttgagaccagcctgaccaacatggcaaaaccccatctcaacttctccctagctgggcatggtggtgcatgcctgtactcaggaggctgaggcagaagaatcgcttgaaccggggagatggaggttgcagtgagccaagatcacgccactgcactccagcctgggcaacagagcgagactccatctcaaaaaaaaagaaagaaattaaaatagtttttttggtgttaagcagctttttgctggcaaggcatatacttgctttct

SEQ ID NO: 87048 - DNA, 1055 bp, Homo sapiens
atctttgctcatctttgagctttgaggctattttggtttttcctgatttgttcatactatcaagtcttttataacctcacataatccttttctttatgatcaacattctaaattgaatgaggaactgactgtccagagcaacacaaactgtttagtgttatcagcatttatattcttaaatttgcttatttgatttaatttaccattgcataagttccaagtaattgtgaattgccttgagttttaaagattaaaatataatggaaacaatactttgggaacatctgttagatttcagaaaatcccttcatgatgctcatttaattgattttccgagtccccatcttaaccatttgctgtgggaggctagtgattaccggttctaacattggaagttttctctttatagtaatttctacatgagaaattttgaaataataatttaaatagtttaccatggtactcatctccaaaactcttcaactccaccttcttaataactttatccagtgcttttccctcacgtccatctatgtggactagatttctaatctatgaatttaatttaaattgaaaattttcatttctcttattcatgttgttggaaaccacactgctgattggaattgtttttctttctgctcttaggccagatcttttaaaagtagaaattagggtgaagtgtattcactcagtacatattaaaaatttcttaaatcagtttaatcctattaaatctgctattgagtttgtaattccactcatagaaaaatcgctgcttaaatctcatattaggacagtatcagattttgaagtcagcatgaatctagtctaatatatgtgaattttctctttatcttgtttgtccctgaaactggctttttccagatagaattctaggaaacaaacggaattaaaatgacatttttagtttaatattcctattattgatggtactgcttaattttcattgatatgttttaggctttatgttaataagacaataatttaatgatttttatgtgacaggcacctatggggacctgctggggtga

SEQ ID NO: 87049 - DNA, 1050 bp, Homo sapiens
atgcctgtaatcccagtactttgggaggctgaggcaggcagatcgtctgaggtcacaagttagagaacagcctggccaacatggcaaaactaaaaatacaaaaattagccaggcttggtggcatgcgcctgtaatcccagctactcgggaggctgaggcaagagaatggcttggacccaggaggcggaggttgcagtgagccgagatcgcgccacttcactccagcctgggcgacagagtaagactctgtctcaaaaaaaaggtgagtggactttatggagaaggcaggaacagtttttcttttctttttctactttctaccagaaaattctgtaagtagttaggaactctcatttctttctacttaattttctgtaatgttttctccccttccaaataatatttcatcatcctctgctagatgtactttgcctgttagtctgaagacattttgatgatggctttttgtacatttgccatctcattgggataaattattccttcttggttacctatatgcaacctcaggtcttgtctctgcccacttacagattaatattaaagattgtatggttgtctttggttggcagctctgcagagggaaatctgtatctctgccataaagcatcgtgtgtgcagtgcatcaacctcctgagagtctgaatactagccagctgagctgttggaccatctgggaatgatcttgaagtacagcaaataagacttcccacccacttattttcttacagtcatgtggaggttgtcatacatttgtgttggggacccctcagcatttggatttggccatgtcctgcaggacctgatgacagcttaccttgcagggaaggagagtcgctcccagatagccctcacgagtggccctggagcaggaagtggtggagcagatcttccttgtttgggaggagcctgaggtggacctcgcgtcctgagtctggaaggtaaatttgttgttacctgtaaattatggttctgctagttcatgctatgccaatccagactttcagaggtatccctcctgccagcaagaga

SEQ ID NO: 87050 - DNA, 1292 bp, Homo sapiens
cctcatacagctcttagcatttttccaagtattacctctttttaagtttcaacctttgcagtattttaaaggcctgtgttatactttgttattaatcctcagttgtgtggcacttttcatctttcaagtgtaatcatttcaaaagctggaatttgttgtatatgaaaatgcctggcacatggtaagcactaaggaaatgttggttgaatccagcgtatctgccctgtttctgttgaccctttgtaaacctttcagacctcaagccactatcagaccttatagagcccatcaccatggcacaataccagtgttctctctgacttctctgtgcaggcttctttatcatttgtataggagatagaagaaatgttcaaggcaaattttttaattaaaactttcagatggcaggagaaattatttaaactgttagatgaagattgattttattatatcatcataacaccagtgtttttattttgttaattagctacctgtgagatgtgtgggatggttggcgtccgagatgctttttactctaaaacaaagcgtttctgtagcgtttcatgttcaagaagttactcgtcaaactccaagaaggcaagcattttggccagacttcaggtaacggtacagaaactttcttacttatatccattatttctatggcttttgccatttatctgtcatttgactgtgattcactgtactccacctctgcccactcagttatggttttataccacatcttgaggaaacatgtgagccccaaagtttgttcagcctataaaattgaaaaactattttaaatggataaggcatactatccaaataaactattatttgcagaagttaattaaaatatcctttttccaaataagtataaacacttttttatatacagaaattgaagacattttcctgtttccccttgtttccttttgtgttaacatcaaggtagaatctttcaacatttggggggaaataatttaatctctggttttattttctcatcgtcctcgctttgtactttttagtacaatccatttgatacattgaccaaatgtatttggttaatccaactaacctttttgacaacgctcatggtatggaaagaaaatcgtcttgctttaaatgtacatcagtgcctacaaaatgactggagacttgaccatttgactaagttcttactattgtattgtaaactactttttaaaggcattaacttaactgatttttgcagtatttttattggatgatcacagtcttctcatttaatttattattgtgatcat

SEQ ID NO: 87051 - DNA, 1260 bp, Homo sapiens
taggcatgagccaccacgcccatcccataattaaaaagaaaaaagaaatctgggcgaggcacactggctcacgcctgtcatcccagtgctttgggatgcagaggcaggacatcccttgaggcagggaggtggctcacatccataatccgagcactctgggaggcttgagtgggcagattgcttgagacgaggaattaaagaccagcctgggcaacatggcagaaccccatctctacaaaaaaaaaaacacaaaaatgtttatgggatggtggcacttgcctgtagtcccagctactcaggaggccaaggtgggaggatcatctgagtgcgggaggtggaggttgcagtgaccgaagattgtcactgcactccagcctgggtgacagagcgagactctgtctcaaagcattttttaaaaaaagaaaaaaaaaagaaagaaaatggttatttctcagggctgcgttttcatttatcaaatctcatttaccagaatttgtgctagggtcttttagggggtgtgtatgagtgttgtgtcatgtgtcactggtttctcttacttcaaagactgaacattcttcacgatctgaaaggaaaagaagagattctttcgggatgtttgacggttatgatagctgcagtgaggacacaagcagcagctccagctccgaagagagtgaggaagaagtcgctcctttaccttctaatctcccgattatcaaaaacaatgggcaagtctacacatacccagatggtaaatctggcatgggtgagtatttataaccttcacctgttctacagctttatgtttaagggtgtgttttcatttggtttcttctgtcatttccccttccttagaattattaaggggcagtttgaagagctgacgtttataattcgagataagatcactgagttggtgtttaactctttattttgcctacctcctggtggaaagcaaatacaacaacaacaaaaaaaggccagtgagaaacttcatgtggatataaatttagtaattagataagaaatgcctctgtaactgaaagtataagtgcataggatcatgggcttataaaattgaaagagacattcgaggttgggctccctcctctatattaatttcttataatttccgttttaacataactggtgcttggatattctctgactcagtaaggaatttctctctgcctaaaatctggcttgaaaaagaaaaaggaaatgaaaaaggaagcagtttcatttcttagtatctcaaat

SEQ ID NO: 87052 - DNA, 1058 bp, Homo sapiens
aatactcattagtttgttcaacgttgtggcccaattatttggccaccgtttgcagtcttaattgtaggacaggaatgttaagtctaatacttctttgtatttctggtgctaagcatagtgatttgtatatatcgttcaataaatattggttaatattaaccaggtgtgttggctaacgcctgtaatcccaatactttgagagcccaggacaggcagattgcttgaacccaggagttcaagatcagcctgggcaacatggcgaaaccctgtctctacaaaaaaaaattacaaaaattaggtgtggtggcacacccctgtagtcccagctactcgggggcagaggtgggaggattgcttgagtctggtgggagacccaggttgaagtgagccatgattgtgccactggactccagcctgggcgacagagtgagactccgtctcaaaaaaaaaaaaaggaaaaaaaaaaggttatcatcatctattactttaagacttctaagctttaaaatttgctagagattattttatacaccagagaagtagcccccttgtgtatctgtatgtgtttaacccatctttgtttaattattaacaccctgtagttactattgttcagtgattttatatcttctgagcaaccagttccaaatatattttttaaaggtaaacaccaagagaatgttatcatttcagatcaagtgtttttaggttatatcagatcaatatgatactgaataagctgttgaatttactttctcttttctttttttttttgagatggagtcttgctctgttgcccaggctggagtgcagtggcatgagctcggctcactgcagtctccgcctcccgggttcaagtgattcttctgcctcagcctcccgagtggctgggactacaggcaaatgccaccacacccagttcatttttgtatttttagtagaggtggggtttcatcatattggccaggctggtgtcaaactcctgaccttgtgatctgcccgcctcagcctcccaaagtgctgggattacaggcgtgagccactgcgcctggcccgtc

SEQ ID NO: 87053 - DNA, 1433 bp, Homo sapiens
tcatgctttttaaccatccagtttctaactttatgtaatgtttgacataaaatatttcctctaaatctactcattagaattcagcttgtgaaaaagaatcagtagaggtgtaataatagtgtttttaacattttaattaataaggagttccaagtttttttcctgcttactttaaacatgaactgtcatgacttaagttgactgactttggagacatctgcattctaaacatactagacaggaacaactggttttatttttaagacgctgccatattctttaaagctggttatatgttgaccttattatctaaacctttctagatgttctagtgctgcttttggtccctcaataatgttgaaaattaaaacaacattttaaattgttttcaaatgtaacatagtgatcaaaggaaaatataagctatagtttaaaagtgaaaacaacatattaggataaatactaaaccactgaattactaaaagccaagagtgctcagtagtctgagtaaccacattctaaaattagacaagtgacattctttgggttgctctttgtttctcagcttttcatctttaaaatgtttgctaaataagatataacctttcacacttatgtatcattagtctgagggtttcaaaattcaagaaagaataaaaacatcaggacaataaaagagaaaggacttacaatagttaaaacaagctaagatatttctcctaacaccacagtattcttaactgtgcaagatgacttttgatttcaggcaaaaattgcacatagatttaatcattattttttaataaaccttggcttaaggatttttttacctgcaaatttaggatttctcttcttgctttgctggaacccacaataaaaggtgaaaaggaaataattcccatttgaacaaaccctgaatatgagataggatgaagtgatacaataagaggggtgctggcagtgaggttgatgtcacaattctgccattgagtagctccatggcccttgttggacaagatcctgtgcctccattttctcatggcagttgaagggttagtctagtatcagcataatccaatagaagtttctgcaatgatggaaatttcctatatctttgctgtccagttacggtagccactagccacatgtggttgttgagcacttgaaatgtaactagtggaactaaaaattgaagaactcaatttttaattttgctgttttaggcaatgtaaatttaagtagccaaatgtctggcatactggacatacacacatagaacactgttttctaagcataactaatcattataatcacttcttggaggctcttgttaaaatactaaacttctctcctataacttatttagtaggtctgcagtgggtcctgggaatgtgtttttaatgtataccccagaaagtttatcaggttggtta

SEQ ID NO: 87054 - DNA, 1520 bp, Homo sapiens
agggccaatcttccgggtgtagggggaagcggcgtgactggagtggaaaatttttccaacacaatttcgcagctgcaacatattgaaaggagcgcaagaaaccccgactatacactgggacggctgaatggaacttctgcttttcctcttggctgtaaccacttgacttgacacaagccccaatacgctttccacccttcgtcttggtacggtccttggagtacggagcctgcagagggtcccacggtggaagcgagagaggagggtatgtagggaagtgggccaatcggggcgcgggtcacggcgcaggcgcgctggggagggagggctatgctaatgttgttgatatcctggggccacccgagttaaaggggggaaatccgggggctgctgcacccgccaccggtctgggcccagccgggggccccctgtagtcgccgcagtcccggggagaggcacctgcccccagcccggggagggggcgccgcgggctcggggagcacggacaacccctacccatgaggccctgatggaaaacacaaaggatctggtgagagccgagcgcggcagccgctttgtgtgccaggtgggggggacgcctgcagctctccgaccccaggaaccccgcagctccctgaccccgctccctggcctgcttctccatcccacgccctctcaacctccggagcccccctcccccttccagccgttaaacgattcaggggttcccctccccccaccccgtcagccttggactcgttggggttctctccatctcctccaccctttggaagaaaaattcgagaagaaagtttttctctgcgtcctgcccccgccccctgctctggctaggggggaaaggctggatccgagacttttccttttttagccacccagggtgggagagtggagtagtcctctcttcttggcggggagggggagcacagtttcgttgctttgcaggggaaggtgtctatctgccttgggggcagtgccgcgaggcggtttgcacgtggaggtggaaatattgaaagggggcggggtgggcacgtgcgggagaggtgggagtggtgtttgggaagcagcctccaaggctgcatatttaaaagggtttcaagtcggtggacttctgtgaccattgcgttctcctttgtgaaataagaatcctaacatttcagagtcggaagagacattagaggtcatccaaagcagccgtcccctctgcagcctctctgacaagtggtaggtagtctgaaccctgcttacacccctaaaagcactgagagctcactactgcccaggaaagcccatatttcagtagttctaattgttgtctgcctacccttattagacccttcagtctcattcatgtcctggttaagttgctcctttttttacttctcaaattttctctcacatcctcctcacccacccactgctcattggcctatattttgtgtgccaagaaagaacagcagggaagtggaggaaggggggttgagagatagtgagggctagcc

SEQ ID NO: 87055 - DNA, 1955 bp, Homo sapiens
accaggcttttcttgagagagtcccggacattgttctaggcactggaggagacacagcaatggacaaaactgacaaaaatccctgccttttggcgcttgtgtgctagtggcagagacaagatagaggagataaacgagtaaacttcaggtttgttggtgacaagtgctgaagagaaaaaaggacattcgggaaagggagatgggcgtgtgtagaggcctgtgaaattttagataaagggggcagaggaaagctcaccgagaattacccaggccatgtttattacacaaatgctgacctagttaatgtcagctgcttaccagagccgccttcgggtgcttgtaggagaagtggcagcaatctttttgggaagtacagaactattactggaaacatgctgaactgtgcgacggttttgtcgtctggaaaaggaacagtgtacggaggtgggagctgttgggtttgaaggctattagactagtagtagagcaagtagaaaccacttggacatttctatcattggttttgggaagctcaaactcacttcaagggatattctgtggtctaggtttagatttttttttttttttagactcgccctgtcgcccaggctggagtgcagtggcgccatctcggctcactgcaacctccacttcctgggttcaagcgattctcctgcctcagcctctggagtagctggcattacaggcgtgcgccaccacgcctggctaatttttttttgtatctttagtagaaacggggtttcaccatcttcgccaggctggtctcaaactcctgacctcgtgatccgcccgcctcggcctcccaaagtgctgagactacaagtgtgagccaccgcacccggcctaggtttagatttgatagtataaactttatggtataaatttataactttagaatttagatttaatggtatatttattttttacttatttagagatacggtctaactttgtcacccagactggagtgtagcggcacctattagtcttccatctcccttttgctaatagtaactggttgctcttcttgttggtcacagataaattacacctgcacaattctccgaacactttaaactcagaagtcagcttcatcctcctaggctcaagtgatcctcctgcctctgcctcccaagtagttagctggggccacaggtgcacaccacacacccagctaaatttaaaaattttctgtagagacgagatctccctatgttgcccaggctggactcgaactcctgggcccaagcagtcctcccaccttgacctcccaaagtgttgggattacaggcatgaggcattgcgctctctgctggtataaagtttcttaaggaggtagggggtcaaaaacagattgggaaaatggagatatctttgactctagtttgcctccggtcctgtaatttctgtagttctgacatttctcctccttttttcatctgcagactcatcttttgttcttgtcttacttggtgttttccttcctgcgtgttgagtgttgactttttctccttgactgttccatcttgcctcacctgtccagtcggtgccattctctgatttctccattttctgcctctgcttccagcatttgcaatggtagcattccatcccattatttcatcagagagtggtagaaaaaacattctatgagccatttggctgtaaggcctatgtgtctgcagtcatgggataggaaaatctcagtgcttgagggtgttttgtctgctgtaggttcaagaacatgaagactcgggtgactcagaagtggagaatgaagcaaaaggtaattttccacctcaaaagaagccagtttgggtggatgaagaagatgaagatgaggaaatgtaagttgcctaacttttcttctgaatccctctgtacacttaaaaaagttattttgcagattttaaaatcattctttttaccaattt

SEQ ID NO: 87056 - DNA, 1026 bp, Homo sapiens
ttcaccacgttggccaagatggtctggatctcttgacctcgtgatccacctgcctcagcctctcaaagtgctgggattacaggcgtgagccaccacgctgggcctaaggtttgctctttatgtatttaactctttgatttacttggggtttattttggagaatttcataaactgtgtgcagataagtcatgatgaattttctcaaatagtagctctccaaagtgtaaaccagatgatctgaaatgttggcaactacttttttgttcttttaggaagaacagagaagatgcatttgaaatgttcacatcttaaaaatcttgacctatattgtttcattaaacatttttctccaagtgctaaaagcagcagctatttatattaactctttaaaagttatttaaaatatgctgttctgtttttgtagggttgacatgatgaacaatcggtttcggaaggatatgatgaaaaatgctagtgaaagtaaactttcgaaagacaaccttaaaaagagacttaaagaagagtaagtgtcttttttcatatgatttaccaagaggtgtatgtaaccaatgcccagtcattaaccgtaaccgcttcttgtgtagttttccattttgaaacagtaagaggattgctattgtgggcagtgactaaatttctgtagttttttttaggggagaggggacaaaacacagacacaaagaaaatttggaaaaaaattcttaccactcaaatataatcagtgataatattgcttacttgttcatttgcatatggtacaccataattttataatatgaacattttcaaaaatttaaatggccaccacctgggttcaatggtttttaacattttgtcatatttgctttgtgtatttgggggatgtgtgtgctttcccaatgtatttgagagtaaggtacagataatgcgacacttaactcattaatttgtcaatgtgcatctcttaagattaaggatgttttccttcatattcacaataccattgtcatacctaagaaaattaac

SEQ ID NO: 87057 - DNA, 1024 bp, Homo sapiens
tcttacgaacacagctatcatgcttctgttaaagcttactttttccagagtgaagtgattctgttttattcagatgatatataatgaagttttgtatattcttaacaatctggtcagtttcttttagacgtgttctagtgtgtagtctatgtactgtggcataaaccacaaagagacttctttacatagtcctgatatctgggatgtgttgatatgaacaaataagacaaccatgtaactagatggaaataattaacaaaaaatatgtatccaggactagtttaagtgggcagaggttcatggaggtttccagtataggcaggttgggactgttctgtgtgagtaaagataataacttctgttcttaaagatagttacttctttggaagagagtccatacgtattctcaagggtgattcaacgtatatgctttaaatgtatcaagctttatggacatgtagtggttgccataaatatatttttcaaatatttttgcttagattccaacatgccatgggaggagtacctgcctgggcagagactactaagcggaaaacatcttcagatggtgagcgttgatatttctgtttaaattagtacataagtccctgttcctgttcgttattatttgagctttcttatgaggctcattaaaacctggcatttcttgcctggctcggtagctcacgcctgtcatcccagtgctttgggagcccgaggcgggtggatcgcttgagtccaggagtttaagaccagaccgggtgacatggcgaaaccccatctctacaaaaaatacaaaaattagccaggcctggtggtatgttcctgtagtcccgactacttggggggctgaggtgggaggattgcttgagctagggaagactagggtgcaataacctgtgataagtgataagtgccaccgtactccagcctgggtgacagagtgagactctgtctcaaaaaaaaaaaaaaaaaaaaaaaaaaaaaaaaccaaaaaaatctgttttttgactgtaggttttaa

SEQ ID NO: 87058 - DNA, 1080 bp, Homo sapiens
tgggtcttccatgtttaatctaacactgatgtacattgatggtttcttgggttgcaacaataaacaacagacctggcccttcacttcaggatgtcactctctgatgggggtatagatggtgaacacatggtcacaaatgtaaccattcagtcctgcaggtgcttcacagtatctgctcttggatagggtatcccagttttcttttagagaataacacttggtccagttcatgtagtttggatgggactgactcttatctccttatctgtgggtggacaaactcaagaaattagtagggcaaggtatggggaaggagcgtggagcttccgtgccttctcagggcacgccacctcctcagcacctccgtgtgttcagcaacccagaagctctctgaataccttctgttaagcctttttatgaaggcctcttgacataggcatggttgattaaatcactggccgtggctgcttaagtcagccttcagccccttggatatgtatttttaaatgaacacttgtagtgaaaagtatatactaccaggatacagggtctgtggaaataatcaaaagaaccattttgtacttctttataggttgatgggaaaacaaatcctaaaattcagagcatctatttggaaaggtttccaatctttaaggcttgttttagtgctaatggggaagaagttttagccacgagtacccacagcaaggttctttatgtctatgacatgctggctggaaagttaattcctgtgcatcaagtgagaggtaagatttctgttgaatgcacacaaccagtcattccccccaaggtgagtttatgtaacagtgtttacaacacttttttcactccataggattcttaaaaataagagtttctttaggtatagtgtttggaaaatgtctttgtgcttttgagataacacgtttgaatgaaaccagtgaacttttttactgaacacttacggaatgatcataatttggaaatatatattccccctacaccagacaagcaattgcaaatacttggctgtaaagttagcagttgatgcagcagaaaaagcatgagccatggagctag

SEQ ID NO: 87059 - DNA, 1003 bp, Homo sapiens
gccagttgtatgcattctgatgcatcctgttaggtaactttttaatgagtaacttggctctctaagcattttgatatcaggaggagtcccctgtatagtcaatatgaacctttcagtcatggaaaaagagacatgtccttttgtaagtaagttgactgtatatacctagctctcatatatgatttggttacatgtgtcacatccagagaagctagtcagtccttaagtaaactgacatattgtgaaaagttttggggttttttttgttttttgtttttgtttttgactcacaaagttaaagatgagattcctgtccatcatgagctgcttagtaagtggccagcagctagtttatatatgtttttatgtttttggctgtctctagtggcagtgtatttcccttctggtaatgaactttgtgacaaagaagtataatttatccttttagtaaattagaggtattactgcatatatttggaaaattagttgatatgtttactgtttggagagctgagtctctggcctgcagttaaaatggtgaatgctaaccaggacaaagaagagaagtttgttaagtgctttgtagtgaccttatgtttgggtcaaactcagtgatgcctgcgtttagacttattcggggtctgagccagggttttgtttaatttgagccacttacgtattttaaaaagtaagaaactcatttgtcaatagatgatagttttattgaaaactatataaaactttatttaattgcttcatttcctattttaggtttgaaagagaagatagtgaggagctttgaagtctccccagatgggtccttcttgctcataaatggcattgctggatatttgcatttgctagcaatgaaggtaaagcattattattgcttcttgttcttctcccacaagacactagtgtagggatagtcttgcaccttaactcagtgtgtccttaaatctgcatctccaagtagaggagcacaggtgggacttggagagaa

SEQ ID NO: 87060 - DNA, 1693 bp, Homo sapiens
tggtggctcacacctgtaatcccagcagtttgggaggccaaggcaggtggatcacctgaggtcaagagttcgagaccagcctggccaacatggtgaaaccctgtctctactaaaaatacaaaaattaactacgcatggtggcacaaacctgtaatcccagctactcgggaggctgaggcaggaaaatcacttgaacccgggagaaggaggttgcagtgtgctgagatggcgcagttacactccagcctgggcgacaagagaaaaactgcatctcaaaaaaaaaaaaaggaaaaaagaaaagaaatattcttagtccagttttccagaactaggagggttataataggtctgtatttgtagtctcctgtactgttaagagggactgagagtggccagtttacttgcctttcaagtttaaagcaaaattaacaactctttttttcgctcttttatgcaggggatggagaagtttatgtttgggatgtgaactcaaggaagtgccttaacagatttgttgatgaaggcagtttatatggattaagcattgccacatctaggaatggacagtatgttgcttgtgggtaagtaaagagaggttcttgtaaccttaatcacattgtgctaatgagaatatgttgaggaattgaatatactaggtggtgcatgagtagttctctttataaactattcagtaatatgaaattggtcaacccagctgagcttttttcattttatcatctttgtgcagtgttgaataataatattacagtagttccccccttatctgcagtttcactgtttgtggttttagttacctgtggttaatcacaatctgaaatctatgtaagatattttgagagcaagagaccacattcacgtaacttttattaggatatattgttacaattgttctgttttattattagttgtgttagtctgttactatgcctaatttataaattaaacttttttatagagatgtgtgtataggagaaaacacagtacacacagggttcagtaatccacagtttgaggcatccactgggggtcttggaacatacgccctgccagataagaagggattactataattgcagttgaacacctttttagcaaagaaaatgctggcgctaccttatatcattgtattttttcctatttaaaatacctgtttgatcacatcaagttttcctataattattttcagcttcttgtcattgatgaggagatagaataagtaactttgggtttaaatcttaaagatacctaaagcatttttcctttatccagctgggggtataaataaaaaacatgttcctaggaaataccatttgatagtattgtagaaactttaaaaatattatctagaacacattgtactgtgctattactgaaaacattggttattacactggggaaaagatggctgtgttctactacttgattctgaagatgcagggtgagaggatgaggcattggatacttcgcagtaattctaagctaccttactaaaccactaattagaacccataattctgtaacttcaagaagtaggtttttgtgattttcttagaccaaacacaattgagccatgaaatgatttcagtcaaatcctccctgggatgggaagtcaaggggtcttgttgtccagaaacttagcatactctctactctttgttcactctctccttcc

SEQ ID NO: 87061 - DNA, 1075 bp, Homo sapiens
agaggagtggaattgtcattgaagggaggcgggaggaggggtgatggtgttagaagagataatatgcatgtggccacccccacaaacctttaggaatgcagtgcataattaggactaaaggcactgatttggatgtggtgggtgataggtggtctgtgggagtaaatgagatgaatgagacactagaagtaggttggaaatagaatcctggggacaagaatcagtggagaaagaggtgactgtgaaggaatcaggatgcaagaagagtcagtaaagtttagccttcaagaagtcaacagaagggggagaatttgaattctgttttcaacctgtttggttggaggttctataggacatctgtggctatagtggtgatagctggtctctttgtaacatgattcctgtaaataccagtttgtggggttaaatctatattcacttaggttgtgaaagcccttttacttggtttttaatctattttaatccttttctctttgtagttctaattgtggagtggtaaatatatacaatcaagattcttgtctccaagaaacaaacccaaagccaataaaagctataatgaacttggttacaggtgttacttctctgaccttcaatcctactacagaaatcttggcaattgcttcagaaaaaatgaaagaagcagtcagattggtaaatatttcattacccctttattattgttattttttaaatttaagttgaaaacatgcaagagtaacaggaaaggagagcgttgaattatttttaaaacagtggcttcttttgatataggaattattagtattgtagcttttggatgtggttgttggaaggatgcacagtagccaccacatttgattatgtcacttctttcagtaaagctttgctgtccattctcaccattcctaaagtggtcctcattttcagaggtttcttttagtattaatgttaaggactatatttaaggcagacacttcattccttcacaattttctttcctcatttacctttttaaggcctgttgtcttaacagaacggaggcaattctcgggttttgaaagtaagttgaact

SEQ ID NO: 87062 - DNA, 1021 bp, Homo sapiens
tgacactcaaagggaaatggacaacgtagttacgccgttcttgcagagaggaaaaataaaacacatcgattgttcaaaggaagcaaggtttttcctagcaattagggttaaagaaatttctcatctggggcttccttcaggaagacccaatgacacaatgtcctttacaaaatgccaacagcaattcccccaaactgctcataaaattaagttttgcaaagcaaaatgaatcttaaatgtgtttgtcattgcagggaggggacacatttggtctgtaagttatcgcctttcaatttatcacttttgtcaagtctgaactgttctatgttaaattttcaagtaaaagccagtctctgcagtgaaaagaatgtgggtggaagacataggtgataatgcaccttggctagtggaagaaaagtggagacggctgtgggccgattttgaacctaaagcattatgtgacattacgtggttccacttgcccctccaggcgcttttaatctcagtcaagaggccatgctctaggtagctgctgcctcttcaccctgggccatagaatacatctgaccttgacttgaagcttgaatcagacctcccccagcagacctgaagactcatgagcaagaaatacacgctgatgttttataccactgagatttttgtggtggatagatagcgttattgcggcaataacttactaacaccctgccttgacgacttcatgaagttgtgcagactaagtgagagaatgctcttggatattattcgcatatccaaattgaatgagcaaatgaagagttagagaaaatgattcattctgcatagcattaccagatccattagttgacatgttatatggatgcttctgtattgcaataggccctggttgtatttggtctgccaagcaggaatgaaacactgagttgagactgctggttggaatgatacaaaaaggacaatcgagaagtgcaaaagaatgagacagaatagtaatgagctacagaaggagtctgaaaaccaa

SEQ ID NO: 87063 - DNA, 1046 bp, Homo sapiens
tttcaaatttacaattttgtgagttttcacaagtgtatacagtgctgtaaaagcaggatatgtaatatttttatgatcccaaaatgttcccttgtgcctcattgtagtagaggaactcctctgaccccttcacccttggaaaccaatacaattttacatttcccagaggttcatattaagagaaccatatgcatataatcttttgtagcatttctttcccttagcatggtgcttttaaagttcatccatgttatattgttgactgtattagcagttcattcctttatattgctgaatagtgatttattctatacatacatcacaatcacatattgatgaacagtttgagttgcttctagattttgtttatctgaaataaaacttatgaacattcatctgcaaagtccgtgtatgaacatatgttttcatttctcttgattaaatacctaggagaggaattgctgcatctatggaaatggctgtgtggtcttttatttttagtgtgttaaaatggtgaattaatgatttgtttttgaatgttggaccaaccttttatttctgggatgaactgcacttgactatgatatattattctttaatatattgttgtattccatttgctaatactttgttaaagatttttgaacttatgttaaagaggtatattggtctaaaagttttttttctatataatgtttttgtctggttttagtgtcaaggtgattctgtgtctggtttctgaaaggagctgtaaagtgttccatcatcttctattttctagaagattaaatgtttggtagaaaggcatcaatgaaaccatctaggcctacacaatttttataaagatttataactacttcaatatcttgaattgttatatgactatccagattatttcttctacagtaagctttggtagaaagtattttcaaggaatttgtcattttcatataagttgtaaaatttattagcataacattactcattatatccttttagtatactttcggtgtctgtagaatcttagtgataaattccttccttcc

SEQ ID NO: 87064 - DNA, 1048 bp, Homo sapiens
gacaggaagtgagaattttggcttggcctgaaggctcaatgtaaataaaaatctaaatagctcagtttttttttcttattactaagctctgcctgtgatagaattctttatcacttcagcccttacaggaagaagctgacataggtgccagcctgtgccagaatattcaattaactatgcatcaaggtgacccatttgtccagtgggtgccaaagctgaaatttttttaaaaatccattatttttccaggtgaatgtattagataaacttgcctgccaacaagtcctttctgacttcataattgttgatttgtgatttttttcaaggacccatatgctaatctatagattacagctacaaaatacaataataataatatttgtatgaggcttcagagttcacaaaagtcattttatatatcttgcgtctcataacaattcacattactttaggtaaataatattattgtctccattttatagataaggaaattgagatttaatttagttgaagagcttgtccaaggttactaggcaattgatgaaactggtattcacactagaggctgttagctcttttagggtatgtattttactgtctcatgttgctgtgtaattgactatttataaatgcccatggttgacctcacttaacagttactaattaataaaaatcagtaaattacagttttctccaatagctgcaaattgaaaccctaatccttttaattttatcatttcagaactgtttttgtaacattaaagaattctgagtttcacatattttcaatatctctcacaagtgtctatcacatatttcacatcatcaatcacagatgtgttagtgggaaaagtctcaaagacactcaatagaatgctattctgttagaaaaactgactttgctaagaaaatactgtggtaactattttgttaatagagatatgaataatagtcctccaatttgtatattttgtaagtttaaatgttcttacaacaatggttcataaaatctggatgcttacttttcctaaagctaggaagaaacact

SEQ ID NO: 87065 - DNA, 1028 bp, Homo sapiens
gtttcttcaagattttgaggcatggaaatctgatttaaaagattttatattttcctagcctttgaaaatgagcattttgcccatggcattcaaaagtagctttctctttctgagtggggtacataattattgatctcttattttctatcaggagcttaagaattgtgttttcggctgggtgcggtggctcacgcctgtaatcccagcactttgggaggccgaggtgggcagatcacaaggtcaggagttcgagagcagcctggccaacatagtgaaaccccgtctctactaaaaaatacaaaaagtaagccaggcgtggtggcgggcgcctgtaatcccagctactcaggaggctgaggcaggagaatcgcttgaacccaggaggcggagattgcaatgagcagagattgtgccattgcactccagcccgggcaatagtgtgagactctgtctcaaaaaaaaaaaaaaaaaaaagaattgtgttttggttttgttgctgttttaactctggaacttttttcatctcttgaattcagacttggtcacagggcttcccaggaggtgtggatgtaagcgaagtcaaagaagtatacctcgacctggttaagaaaggcgttcagtttcctccctcagaagcagaggctgaaacagcaagacaagaggtaggaggcctttctttgacccatggagactatagtagtgtatcacttgggtcttttctcattacaggagacaaccctaaatccacccagcttaagcaaaaagatgaagttattagaaggatattgcaatatctcatagaataaccgagacttgggattttgctacttaaagtgtgttttgctactaaaagtatgaaagtttgtttggcatgttccaccctagactaatcagaacctccctttttacaagatttccaggtgttttctctgcacattaatgttgagaagcactggcctagagccttgagctttcacctctccacccaaggttggagatgtggcattgacccaaggagggtcattgat

SEQ ID NO: 87066 - DNA, 1074 bp, Homo sapiens
gtattatttttttcttatataaaaatgcatgtgactaattcctcttagaatttaatacaggaagaaaaggtgtttctttattccttcttctttaataccatgagaactggataaccctcatttgtttttcttttaccctattggttgccaagaaactcaggataacttttgccattttatccaggtttctggtaccttcttctgctaggtacctggtacttctcccctctccatattgggttctaatctttttttttcctttcatttttaaaattcctaaagcatattttggggtttattacaagagatctcaagtccttttagaaggtgacaaggtatacatttgtaaaataactatatgtatatttatatgaaattaaatttaagtttgaaaatattaaattttgcaaaagcattttttcatccagcaaatgtcccatgggggcaggaaacaaggtagttattctttgtgtgtcgcactgactggtgattgtgttgctctctacagattggaaaactgcacagtgaattggatatggtgaaaatgaatgtgcgagtgatgtccgccatattgatggagaatactcctgggtctgaaaaccatgaagacatagagcttctgcaggtgttgtacgatttcagggactatcagtcaaagtgtctcttaaagttattctctaaactttgagtttggagatggaagacaccttaatattgtctagtacatcctcctacatcctgatttcagttgatttctaaacttaacaaaaatatccaagaatgactttgtcagaaatgcagtagtaacttagacatggtttttagcctcttgcaacaaataatttattataagttataaccttggtcatgtacaatcaattctctagttgttttaagtatgtaaaaattgcctctattttcatccactcaacaaacattgagtaactgtgatataggaagggatgtagaaatgagaaggaggctattctagtccttaagagtttatgcctaatgagcaagattggtttgtaaacaacaaacataatgaagtattatagatactgtagtataaat

SEQ ID NO: 87067 - DNA, 1015 bp, Homo sapiens
gtgggcttaaccagactggcagaggggagctgttgaaaggatataagctgaggggctacataaccaggtcagattttagaaaaatcctctggtggtgttgtgatgacagattctcaggaagcaagacaagactctagaaaacaacttaagagagtatttctcattggttgtatgctgtgttctgtgggtagaaagtggcatctttggtcaaataagtttgtaaaaccaattgtctactgtatttctcctcttggagatgcataaagttcactgatacagctaagagtctttgtttaacccaacatttataaacttatttatccaaagaatcccaatttgccaaatatctgctaatattctgcagaacatcagggtagtataccttgagaaatgaatcagtattttggatccgtggctttaagtatattatttttggaatatcttagaattgtaacattttgctaaggatccttggggttcttgaccttaggcaagtcatttactatcactggacttagtttatgtataaaatgaagagcttagatgacagtaagcaagagtaatattaaatatatcctctttatgtgggatgtaaaaaggaaaattcatcattaaatagatttcaaaggtagtagtccacaatggcggcttttccagatataaactttttaacttatgatgttaacacgtgtgttaaactaaaattgaaaaattaaatatcaaagtaaacggatatgtggcagataatattttttaaatagccacagcaatatttctagttccacctggtcttcctgggcctttcagagctctaaaatgaaatgatttatgactttttctctcatattctcatccatctgtggcaaacaatccttcagtaaaaacacactgaaacatttcatttaaatatgtgaatccagttttatattttattccaatctgaagtgctttgtctcagggtgtttgggtgcagatgtttggttgaatttttcaaggataatgctaatttgttggt

SEQ ID NO: 87068 - DNA, 1034 bp, Homo sapiens
ggctggttgtccaaataacatccattaacaattcacgccttctccaatggttttaaatgcccctttatcacatacggtatattctaattcagggttgtcttctagaggctattctcgaggctattctcgtcccttgacctatttgtgcctaacttggcatcatactattttcattactctaaagatgtgtttttatgctttctagggtatattagcaaagagatgacatacttcatttgggtaatttgaagaaagcttaatcaaaatactgtttatttagtaagatgttataaagttcagggaaactacaagggcttgatcgctaccctggattattaactaatatccctagaattacatagacaagaagagggcacttttgccagaacctagaggaaagaataatgtgggggagggcagacttgaaagcaggggtgcctttggtggaaggagtggaaagaataaatatccagacctcattctccttccttcctcctgtttcctgccagccagcatgcctgttggctgaacacagaagcaagaagacaggggatctggcgatgtgatccctacaagccaggccccagggcacagagttaaggcagaaagtatggacagtggatctggagggccaaggaaagttctccagcagaaaggaagagcctccactcaaaaatttcttggctgctcttgcacatatacttcaccagtgaccacagtcttatagtatcagtttattataaaaccatcctgaggccagatgcgatggagcacgcctgtaatctcagcactttgggaggccaaggtgggcagatcacctgaggtcaggagttcgagaccagcctggccaacatggtgaaaccccgtctctactaaaaatacaaatatcagctgggcgtggtggcacgctcctatagtcgcagtcactcaggaggttgaggcatgagaatcgcttgaacccgggaggcaaagttgcagtgagctgagatggcaccactgcactccagcctgggtgacagatcgagactccctct

SEQ ID NO: 87069 - DNA, 1459 bp, Homo sapiens
gaaaggactgtcagcatctttgagtccatctccctttctttgcagttgaggctgcatatgcagaaagaataattgcccacaccatgacaagtggtggagctggaaggagaacttctttctcatgagcttatgttctatccattagaccaactagtttctcattttgaacccaggactgattttctagtatacctggctaacctattgtgttttcatgtgggtacgtgaggcaatttcaaggcagcaaccaagtcctgtactatttgcagacactgttttgttggaaagaagagttggaaggactttaatatgttaatgcttttcttaaggattatgctgacaatttgtcatttgactgaagcctgtataaggaaagagactatatgagcaagttaagttgaaaaatgtttagttttagagtaggtggggagagtatttactttgagcagatagagaaattggggtttcttgcgctttggggaatactgggatgaagaaaatatgttatgggctgataatagggatattgccatacagatagtatttccagagacattttaaagcaaacacatttcttcgtgttttggctctttcaagagagatattcaagcatttttgtgtttctttttattgagttgccctctcttggtcaatgtgggatgactgtagttggaattgaaagtgcagagggatctccttccttaattcctgagtgctctatggaggagtaagagccatctggatatcagaagaggaagctcttaatgagctcctttttgttttgctccaaagacttttgaattgattgttaaattcactttaacttagaagcttgcctttgcttttatatggtataaaaggaggcaattccggggtctccgtgatggacatatgcaccagcagctgttgttctgtattttgacttgctcccctggctccccacatccacagccctgcaagtgcctgctatggggaactctgacctatcccttttgtccatggtgcttgatcttggcttggcttccaggtggcttggccctcctctgagacagacatcaattgcaaagatgagagtgggctggcttttgaagacgtttttcacattctggtttgcagacctgttgagatgtgctactcctttcatgtttccattccatctgtctcttgaaagggcaaagggagtgtcttcatgtgactgagggctgttgatgttggcttcaaattcatttcaaattaatttctacatttttgtcataggtatcagccattgcattcccttgatcttgacattgttctagcaaggctgccagtgagcaacaagaagaccaatttctgtacactctttaaagcaagaacaaaggaaaagttctcattcattacgggggttatattaaatgccattcttaattctttgtagaagattggatcctggataatagcatattacaggattgtattc

SEQ ID NO: 87070 - DNA, 1049 bp, Homo sapiens
tcattacacacatctcatttgatttttatgtcaacccttgaggtagatgtggcaaggggtataattttcatttatcaatgagaaaactgagatttaaaaaacatgtgtttttttttttttttccccaacatggcacagctaataagcactacatttagaattcccatacaacacttctgggttttagtccagtattattttcaatgtaccatattattcttatgacacctattttgatttttaaaggaaaatataatcagtttatgactcactgccttccaataggaaggataagctgtttatagttaagtactttggtagtgccccacaggctacttaacgtggaggtgactgtaggtatgcgcagattggtgagtcagatgtctttatagaatgttccaagtgtggaagaagaaatctctctcctttctttgacagaaactctataaaacaggtcgggagatgcaggagaggatcatggacctgcttgtggtggtggagaacgaagatgtaactgttgagctaattcaggtgaatgaggatttgaataatgctatccttggatatgagaggtgagcagatcatgtaccctctttacccctcttccatttctactttcaccaccaattactcagcattcttatcagagtgcctacaagtgacccctctttctagattctccattctcaataggaaaggtattggcatgtggggtgggacagttttcccttgtacagctcctactcagtaaatgctagaggtctttctcctagttaaagtgacatttcagcccagcatggtggctcccagctataatctcagcacttttggaggccgaggcaggaggatcacttgagcccaggaattccagaccagccctgacaacatagtaagaccctgtctctacaaaaaataaaaaataaggccggacacggtggctcacacctgtatccccagccctttgggaggccaaggtgggcagatcatttgaggtcaggagttcgaaaccagcctaaccaacatagtgaaaccccatctctactaaaaat

SEQ ID NO: 87071 - DNA, 1674 bp, Homo sapiens
aagaactcatggtcattaattcccatgttctgctcagtattgtgttgatgcgcagcccctgttagcaagatggtaaggatcaaaatttttttggagtttgtatttgctatctccacttcctttccttgtattctctttgacttcagacatgctcttctaccactctatggacataactcttgtcaaggtcactggtgacttctgtattgtgaaatttagaactgcagttccatagtccctcattttatcagcaacaaatgacaaagttgatcacttcctccttcttgcacacatggctttcagacaccagtcactttggttcttctcctgcctcacgttcatttcttctccatctcttttggtggctcttcctcctctactgaccttttcttgttggagaccccagggatcaggcttcagacttttctatctacattcattcctctgtggtcttttggtctcatatcttgaaataaccattcaatttttgacaacctacaagtttgtatctcttgtagcccagaccccttctctaaactcagaactcatatatctactttccacttaatgtctcctcttgatttcttcccagtctccactctcaacctgcccttcctgcagacttgccacctcagtcaatggccactctgctctttgctgcataggtcaaaaaccttgggtaatagcgcttgacatccacctttttacttttacttttgccttttacttttaaaatatgtcaattattcagccacttctcaccacctccacttctgcatcttagtccaagtcaccatcggatggacattgcagtggcctctaagggaagccctgtttcaacctttgcctcccttcgcatccctcccacccacctcataatctgttctcaaaacaaaaacaggggcattcttttttaaaaagtgaagtcatattatgtcactcatttgctcaaaacccacctgtgattttcttcctcactccattttactcagtaaatgcctgaaatgccgatctgaccgcacccgtcacctctccaggctcacctcctgcccctctctaccttggctcactctattccaaccacactggcctcccccacttcagagactgtgaacttgtgtcctctccagtaaccacaagactcactttagtcaggctctgcttaaacgtccccagtgatgagacatttcctgaccacgacctattagagcagtattccaccccagtctctctcccacccactactctgcttttatattagagcacatgccattggatatctgttcacatttgttgattgtctgagtcatgagggcaggaacttggtctgctttgtttattgctttattaatagtgcctggcagctggtaggtggccaggatatatttgtggagtgaataaggaaaattatgagaagagatatttctaattaagattctaatattttatcaatcctgattttgttgtgtcactgagtgcctctctgtagatttaaattttttttttcctactcaaggctgagattttatattcagagtgaaacaacagagaatctggcctgagccattgaatctgcttcatttttaaaagcaatatatggtttttttttcacagtttctatgggaaatagggtgcattaggcataaaatcagacaaaaatatagtaaattcttg

SEQ ID NO: 87072 - DNA, 1023 bp, Homo sapiens
ccccagagaccaaggcaggaggatcacgagcctaggggtttgaagctgcagtgagttatgatcatatgatcatgctatatattctagcctaggtgactgaatgagaccctgtctcaaaaacaagaatttactatatttttgtctgattttatgcctaatgcaccctatttcccatagaaactgtgaaaaaaaaaccatatattgcttttaaaaatgaagcagattcaatggctcaggccagattctctgttgtttcactctgaatataaaatctcagccttgagtaggaaaaaaaaaatttaaatctacagagaggcactcagtgacacaacaaaatcaggattgataaaatattagaatcttaattagaaatatctcttctcataattttccttattcactccacaaatatatcctggccacctaccagctgccaggcactattaataaagcaataaacaaagcagaccaagttcctgccctcatgactcagacaatcaacaaatgtgaacagatatccaatggcatgtgctctaatataaaagcagagtagtgggtgggagagagactggggtggaatactgctctaataggtcgtggtcaggaaatgtctcatcactggggacgtttaagcagagcctgactaaagtgagtcttgtggttactggagaggacacaagttcacagtctctgaagtgggggaggccagtgtggttggaatagagtgagccaaggtagagaggggcaggaggtgagcctggagaggtgacgggtgcggtcagatcggcatttcaggcatttactgagtaaaatggagtgaggaagaaaatcacaggtgggttttgagcaaatgagtgacataatatgacttcactttttaaaaaagaatgcccctgtttttgttttgagaacagattatgaggtgggtgggagggatgcgaagggaggcaaaggttgaaacagggcttcccttagaggccactgcaatgtccatccgatggtgacttggactaagatgcagaa

SEQ ID NO: 87073 - DNA, 1045 bp, Homo sapiens
tccagttcaaagttcttggaacaatgtacttgcaagtgtaggagtctcagtaataaaagaaaagcttaatgtagaacgtttatatgaacatgtgttatgctttcttcagtttctggaacattcaaattcagtgtttctacagccagttagtctacaaaccattgcagcagcaccatcaaaccagagtctgccacctttgcccagcaatcatccaggtacatgggaccttattattcgcatcaaataaggaaacttatgagaatatatgagtctgccagagattcattggtaactgaaaataggagaaattagagatgctcttttgtatttttaagctaatgaaacaaattcagggcagataccattatgactgacttataagagactgtaaaaatgcttgtgttaaactgagtattgtgttttgaatgctaaggtaaatgaatctttagttgaggtttggaaacctttttgatacatacagatttgttgaacttgggagtagcattgggacaccagtctgttttggttgtgtttattaggatctaatatttgaagtctaaattataaaaagaatatcaattgcgtgtactcctcaaaaagcacaatatgtttactggtctctttttttgcccaaagcgatgacaaaaagtgatctccagccacctaattactacgaggtaatggagtttgatcccttagctcctgctgtcactacagagtaagtcatttacaaaatgattaatttattttttgtcttggttccctttgatagcagagctaacagggcttggttatacatttaactttgtttaggtcttggcagaaattgatggccttattaaaaatgccttatgaggttttatggcagctgttactcttaatggtcttatcgttccggccttgtgactaaaaaataaaaatgctggggttgcatgttaagaaataactggaactaacctgcttaatggactcctcatagatcccttggcagaaagtcatgttctctttagcttgagaagggtactagtcactgattggtgacata

SEQ ID NO: 87074 - DNA, 1040 bp, Homo sapiens
aattctgttacattaggtgtaaagcactattaaaaagtagtctatgggaataaaaaaatttatagtaatggaacccgtcagtattttgaaattaagtttagatgagtgaaacagttgggagtagcagtaaccgtcaggctatatagcttcctgacttttcctcaggcatagaagacatgggaaaaatgtggaaaagcattggttacaatgagtagtttactggtttatatcaaaagtatccctgtccttctaaaagaaaacaaattgagggcctttgaaataatcaataagtagtaaatagttatgttatactccagtgagactgagactatacctaaacgctttcctaaaattttaaccaactgtaagaaagattttaactgaaatctcattaattgaggattagccagagtgagttaatttcaacccatattggaaaagccttataaatattagtgcttgcccagtttagtaaacatgactgaatctcttaataaagattttataggttatgattatgaatcttctccaattacgtggtagtatacaaaggtattagtggctgaattggtacaagtgacagaatatcctttggaaaatttttttaagcctcgctattcccttattttctccaaagtattaacactttgtggcataataaaggttctagtcagtcagttttattctgattttaaggtaagtttaatgttggtatctttttaaaaaaaatagtcaatcatgacattcaggtataagtgttacagaaaagttgggctagggctgtgatatgattggcttggacacattttaaataatgtaatttgccgattattccttgaagacctcaaatatacaagaggacagttcataactaattatggatattagaacattggttcttcattgacatatgcaagtaagtttttaaactcagatatgtttatgggtaatattcacaatttattttgctgaaccctacattagattaggtattatggtctgatgaataggcaaaataatgagactaatttagcagggaa

SEQ ID NO: 87075 - DNA, 1027 bp, Homo sapiens
gaaacgcattttcctaaatgttaagagacgttctggcgagaagcgaagtgggagtaacagtcacaaagcaaaacgcaaacttacccgtaatctggcaacccggcctccgtagcccgactgcaagcgctgccacctgaggagcctggtagccaaggcagcggcaggctcaacccagatctcgcgagacggagcacgcctcgcgagatttgacctctcgtccctgagaggcgggtgggtgttagttcagagggttatgggagggctctggcgtcctggatggaggtgcgttcctttctgtggctggcgctggatccaccctgggtctccaaccagggctgcagagagggtagagccgtttcttaggccagagtggagtgggacaggaggtgccgagagaggactgaggtggcttgggacatggaagcgctgcagccttcgagcccggcatccagcattgcagccgccgcggcggcctaagagctcgaaccctttcacacgcgcgcaggaggaggagcggcggcggcagaacaagacgaccctcacttacgtggccgctgtcgccgtgggcatgctgggggcgtcctacgctgccgtacccctttatcggctctattgccaggtaggggccggcgccgcccgcagggtggcgcagacgcgagaggtgggggtgcaagacaaatcccgggacaagccctcgctctgcgggtcgtaggtggaagaggtttccgatattatctacctaagaggagagaggttcaaaacagtcacttaacacccaaagtcaccaaagaaattggtgacaaaactgcaagtagcatccagttcttagtgattgtgcttataccatgctgcagagtgaaacccctgatctatgaactgcacctcgccaaaaaaaaaaaaaaaggtccgcagcctctaaccgggtatctagcagtctgccttaccctcctgcgcacacacgcttttaaaatgtattattcatacattcactctgcaaaccacatgtggtttatgtgccaagggtaac

SEQ ID NO: 87076 - DNA, 1047 bp, Homo sapiens
actttttgtcttcttgtcactattaagtaatttttttcttgtataatagatgtaacattgtattatttataaagcatctgtattgctgaaaaaaaattgaccttttggtttttaagtgatgaaaaaaagatatttttcatcccatctccacttgaaaatcatcccaaaataataatgaaaacaagaaacagaaaaacacatacaagtaaaatcacaatatctaaggacagaaaaatgggtgaggaaagtaaatttgtgagcagaggcaggtaaagcccaagtgtgtgaagatagaggaaaatcacaatgaggaacaagttgatttgaccctaaaatgatttaagaattgaagacatcaagtacttctggagactgagtttttaggcaggatattaaaacaggattgttggaaatctttataaggagaattatgcatgctcttctctgctctttctcaagtagtccggcatctcccaccgtacacctccaggagaaaagaagtatattcctttgagaaattaaaccagagatcgtggacctatagttgccagctgcaagggagtttgtggagtatatagtgagtcatcactcgtaatatgcacccagattgctcagggaactttgctgccatgtttattactataggcagaagactatggtattctctctgaagaagctgaacagaaatgtcagctggccaccagattgccctgtagtgaaagctgccagttgacaaagcaagttacacacacaaaatttccaaccaacttttttagtgcccgattcttaaatatgaactcatagtcaagagtcaccagagatttggagaaatcctccaacataaaatatagaacccaaaactatcagacaaacagaaaaaaggaactcagaaaaaaagaaataaagaagcacagaagagaatttcaggtaggaggtcaggtgcagtgactcacacctgtaatcccagcactttaggaggccaaggtgggtgcgtcacctgaggtgaggagttcaagaccagcctggccaatatggtgaaaccccgtc

SEQ ID NO: 87077 - DNA, 1067 bp, Homo sapiens
cagaaagtcttcaacattttttgttctaatgacaccctttctgagttgctaatagtcttattaacttatatatttctttatttttgtttctgttttcagatatacttttaaataaatgatatggtcagtcaggttctttgaatgctgctagaaaccctaaattcaagcaggagaatagatatgttacatatttttaataactttttcttttagttcaagtttaaaaacaaaaattgcacttttatttcatggttatatttagagctctactgttttcaagtgatatgctttactgacaggaagtttgaatagtgtttattattaattacatgatttcaaattccagaaacacagagtatataaatatataattaatttattgaacaaataagtctgaccactcatttaaaaaatgatgcatgtcactttttttaatgtttcaaatcactttgttctcttttgtaagcaatctcttttactgctaagcatgttgcccattgcaatcacccacagatctggttgttctgtaaccctcaggagagtgcccagttctcccagaatgaagcactgatttatcagaactaattttgtcgcatttattcaaagagaactaaagctgtattcaaggcgcacagttttcattctgctgattcaggtgttgtgtattaatctacctaatgttgatgtcagggagcattgttttttactgccaaacagttctcagagctgccatgctcatttttgatgaggaaggcaaagatggttgggtagtttacaacaagccaatgaaataggcaattcagagtattttgtatgagcaagcaaatcttttttagcagctgcagatggatggtcatgctccaggttagcaatttatttcctccttaccaatataattttagggcagataagaatgtgtttatagtttggaagttgttgggattaaaaaaaaaatatgttcaacctgtgagactttgacagcaaaagcaaagcgctaatggcaattgtgcaagagtcactaattccagacatgtcaataattctgacatgtcaatgatttccaattt

SEQ ID NO: 87078 - DNA, 1085 bp, Homo sapiens
caatggggctatgtcctgatacacccaatccaagtttaaaatatcaagtagaaaatgtgtttaataccccagtaagcctattataaagtcaaaaaaaacattaagtcaaaccatcataagtcagggactatctgtatatgtatattttccctagctctgtcaacttaaagggctaagaaacagacaccctaataacagtgagcacattactatatctaagtgtccagataccactccccactagaagaaagccaggctactcagagaaatgacaaatttcagaaatgaggaagggtaagtaaaatataagcctggaatatcttaatatgccagaaaataaggacgtgctcaaaatgacaggggcatatcacaggaactagcttgaaggggcttccactggccaaatatggaagaacttgagtaccaaaataatttagtacagtaatgtattgcagactatagaagaaatcgtaattcacggtatcattcgtaaattgattaattaattaatagggagaaaggagtacttttgcctatagtaggatgttgaatactgactggtaattgcagagaagctgctagatttggaaatcagtattttatatctattttaataaagacttgatcaggcacaaatcattcaatgctaaatttagggaaaaattttgatgaagagcagaatatttacatggttttaaagtatctctctacaaactgcttattaattgcaagggggtaaaatagcagttatacagtggagaaatcagaaaacaccttgactaaatgttgctaaatgtgctaaatgttgatatcaccaatgaagaacatttgggcattgtgtgactccaaatatgatgcccaaaaaatgactacaacatcacctgtgtaattttctgggcgagaatgtgtaacctgaatctaaccatgaagagatgtcaggcaagctcaaaatgagagaaagttttgtttaaaaaaaaaaaaaaaaaaagacgtgtatgacgtgtgtgtgtgtgtgtgtgtgtgtgtgtgtgtgtgggttgtattctttagaaatgtcaatgctattttcttaaaaaaaaaaaagg

SEQ ID NO: 87079 - DNA, 1063 bp, Homo sapiens
tcatcccagctactcggaaggctgaggcacaagaatcactttaacttgggaggtggaggctgcagtgagctgagactacactgcactccagcctgggtaatagagtgatatttcatctcaaaaacaaaacaaaaacaaaaacacagtgaattggcctaaggataagtgcagtagataatggggtttggagttatacctttggtttataccctgaccctgctccttgctagcttttgacctttgtcaaactacttcacctttatgggtctcagcttcctcatctgcaaaatgggtttgataatgggatccttcacaataacattagaggtattaagataatacacatagatgataatgtgtatagcacataccactcaacaaatattacaaataatagaagaaaaaatattaagaggtggaaatgatttgtattaactatttaataaagaggaggaaaatgtaattttaactgagggcataaggggacttttcatagataaggtggcacgtgagctgacccagacacagaaaggcagagcatttcaggctgagaaaacagcatgaaaatcatggcataaaaggggaaatttgcttgtgtttgtggtcaaaataaaccttttctatgctaactttaagttatttgttaatatatttctgtcttcatgtctgaaaaagtgttaatagtacctaccttacaattttttcataggacttgagaatttaagagcctaaacctgtcaggaatctaattttgaatactagttttgacatgtattcttttatcaacatcactatcaaaggcccaggaacataagggaaacacggaaagatgaagctgttaggaaatgacatttgggtgggtgtgttggggcctacacatataagcagttgaataccagcctaagatcttagaggactgccatttaaaatatttgacaaggagagaaaaatgaacaactgtctccacgtataatctgaccccactctttctttcatactccataaccaacttgttgggcctactttttagaaatcacagaattttgccacttttcaccacttc

SEQ ID NO: 87080 - DNA, 1032 bp, Homo sapiens
attgtgtggatatactacgtgtaattatccattctgcatttgatggacagtccaattgtttctgttctcttctgttataaatggtgctaaaaacattttagtgcatgtatcctgctccacatgtgtaatagttacctgctaggagtagaattgctaagttgaataattgtaagtttggctttactaggtaatgcctacttgtgcttgaaagtgtttgaactaatttgtactcccaccagtaatgaataagaattattgtttaccccgcatacttgctgaccctttgttttattttaattttattaatctggtagttgtaataagtgttacatcattacagtttaatttgaatttccctggttactaatggctttgagacagtgatgtgctgggaccaactgacactagctcatgagagctgattgcatgcatctcttctcaactcaatgtacagtgatatcaggttggtagcttgaaatcagctataatggggttatttctacccataaatgttataaaccaaggtttcctcctccctggtagccagttgagcatatatttatctctttattaggcatttgtgtttctctgtgaaatgcttcttcatatcttttgaccctttttcagtggattagttgtctttttcatgtagatgtatagtgattcttctggttactaatcctttgttaaattacatgttataaaaatcttcttccaaatttctggcttgccttttcactctatggtaaaatggacacaaatccagtcatccctcctgacttaatttccatttttgtcagtattttagttctttctttacttttaagaccacaaattagacattgattatttgttttgtgtggtcagcatttgcttaatagactccatttttaccattttctgttaagcattcttacatctcagaccttctcacttggtttctttcttcatgagtacatattttagaaattcatgtagtgaggatctgatgataataagctctccccattttatttgtctgaagaacatctt

SEQ ID NO: 87081 - DNA, 1091 bp, Homo sapiens
ctattgcccaagctggagtgcagtggcgcaatctcggctcactgcaacctctgcctcctgggttcaagcgattctcgtgcctcagcttcccaagtagctgggattacaggtgtactccaccatgcccagctaagttttgtattcttagtagagatgggttttgccacattggcccggctggtcttgaacacacacaagtgatctgcccccctcggcctcccaaagtgctgggataataggcatgagtcaccgcacccagccaaaactgtgtttctttaatgaaagtcagctatactattaatatttagaatggacattatggtattttcctctacacaaagtaattatgctatttcttctcctagaattggggtgatgttccaagcattagataatagcttattatatgattctgtgtcacttgagagaaattttacctgtttttgtaaaacagccctgttctctggtgacttgattattcaaagccagataataaccacaacaaatatttgtggcattttgccattcaaggaaatggcgaactcacatattctcctgtgttgtttcaaactgaaagtaggtcactgttgtaaggttccattaagaaaatatatcaaatttaatcttgggagttttaagttggcaaattattgccagcaacaagagaaataattcttttcctagtacaattttatttccagaaaaaatgagttaaagagaaaaacatatcgcttaagaaaaggtaatgatttacattcattatttccttccttccagaactatttgttgagtgtctacaatgggccagaccctaggataacaacacaaacaaggcccttgctatcaagctgcttaggtaaattgtagtgggcagagatggacaagcaagttcacaaataaatagaaaacgtaattgtagacagtgatgagtgttatgcacataataaaaccagattatgtattaggaaagatgagtaagtggagatgctacattagattaattgacaaataagtcttctttgaagaggtaacattgcatcccagactcagccaggaacaaaaactatgggaaggacctttcaggcccagta

SEQ ID NO: 87082 - DNA, 1039 bp, Homo sapiens
tgtaagttgttattcaaaaatggatctctctttattgataaggtgccgataaggttctgtgaagtgtattgacgtactttggcttggagagttattaaaacgtaaaatgctattgttttattgcttgagtaaatggcgaattgacattaactgaaggaaacagaccactgtaggtttttctaagtatcttgcagtaaatcaacctccaaagacttccttaggaagcacgttgactttaaaaaatataagtgcaacacatgatcatagttctaaaaccacctagctctttttttaatccaaagataggaaaaatatatcagtatagaatatggctttctgtagatttagagaaaaagctcacctgtttctaatctaatcagtcttatagttctttgtatgttttcatttgttcagggttgactaagagtatggttgcatttgtgtaacaacttgccttagctcatcttaagttttcttctaaagagtgtgtaattatttaatgcttcccaaatagaagtgcagattttgttcatatattttctgaatttttaactataccctcttttttattctttggagtaaacctttgtttgttttctctttaataaaatgcagtgatacaattactgcaaaaagtttacttgcatattttaatctgtaacccaatcacagtttaaagtaataattcctcagcgaaactcttccagtaatgaatctgaaacttaaattttaaggcaaatgcaaaggaatgcagacctgaataataggaacatttgttatgatacagcaatgtcatcctccagcatctagggttatttttcaaatgtacaattcaggattcaaagctgaactaaatttgactaatcagacatgatttatgttctaggtttaaccatggttggaaatgacagagtaagactttaccttccaattcttttctgaattgttgaggaggttgtagtttggtttaagacttggtaacccagtataggtgtaaagacaaactctagggagcggtgccttatttgattgcttccat

SEQ ID NO: 87083 - DNA, 1048 bp, Homo sapiens
aatcagaagtcctatttttgtataaggtaggctatttgtgtttttagtttgtaattggacagtgattgttttctattagtgaactatcactgagagattaattactatcattttagtctctaggtctgtcttttatataatagattatatgaaatctgcatgaactgtaagaaactattcagtctcctaaaaagaaacacttattttctcagaacagagaacatcttctaaaataagttatacatgttatttaatatgcagggatatctttatggctgcagtcactgaataaccattgtgacttaaatgcctgtgaattagtacctttataagtctgttataaagttataattcttttttaataattgtaaggaaataatcaaggcagaaattctattctgatggcacaggggatgtggtaatccaatgttagtgtcaattttcacatgatcctgtagattaaaagatactgtcttgaaagtgtccactttatttttattagaacgtatctgtgacttaagaaattagaaggacagacacagttgtactgatcagacaaattatttagcgggcaaaaattgtagtcacattagaataacttcctacttaacttttagctgcctttgtcttattgattggaaatcctgttatttctgagcatttttgtcatgaaagcaaggttcttaggtacagtcatcattttcttccctccaggtgaggggcttgtcagtgatgaatgaagtaatctataaaagaagatgcagaaagtgtgaagacagaaaataaatctacttgaactggtgcagcagagcagtttatcatggcgcatctggctgagcatgtgcttgcagtgaacactagaggagacatatagtgacagtcactaaggggcttttagggaagccagtcatttgcttaagccaggctctaggaagtgcttattttctacttataagaggaacatttgttcattaagagagaatagaaacttcaaggtggcctgtgttaatatacaaaggaaatagttacagaatttttgctcaaggtg

SEQ ID NO: 87084 - DNA, 1022 bp, Homo sapiens
ctgaatttcatatggtgtataatacagatttatatggtaaagatatacatatacattgtgctcaactatacattcctgaatccatttaggatttgtgatttatgtcttgagtaataatataaagtcaactccagactgataggtagtcattagccatgagaaatgtttcaggatggctagggaagacttgtgttttgcctgacagccatttgaatgttaggaagcttcggggagacaagttttgagagaagccccagagggagctatttccttgcaccccccagaggtgaatgaggtattctataagttagtgtctataattgtgaaagtacaaacttcttgtttttgtcaaattaatggtatgaaatttctctccccctgcttgaagagttttctaattcgtttctagtgagcaaaacaaagaaggtgcttgagtcactgaaatcaaagtactcaggcacacagcccactgacaagagacacctcatccattaactgctgttttgtaccacttgccgccctgtttctgtcaaatacctagtgaaaaaggcctaaacaattgtaatgatattatttattgggcattttgtgccatacatggtgatgagcagtttgcatatatttatttatgatcttcttaaaaccattccatgaaataggaactgtaattatccccaattctaaaagaaaaaacttagttttagagagttagtaatctttgcctaagggtcacaaagcacctatgtgtagaagctagggttcaaggcagatctgtgattccagaagctgttctctaaaccactatggagaactgcttagattcattgtctatgggtacattttataaaaaggcagattctagttcagtgtcataaggaactttctagtaattagagctgataagaaaagaattccccaggagaaaatggaaacactatcccagcaatctgaattccttacttggggaatgttgctgaggaggttcagtgtgtgaatggactgaaccagttggccactctctc

SEQ ID NO: 87085 - DNA, 1065 bp, Homo sapiens
aagcatgaaagttctaagcaatggttaataagaaatggttctattttggcattagcagacatggcataattttggaaagaattttcatcctaagatgtcattattgtgtctggttaattttgttttaagctgtatttgacttccaaggtaaatctatttccctttataaataaggtgtcccttcaacactgcagagaaaacctacttagaattaatctagcggtgagatattcaagtgatcgttacttaagatacatataaatggtgtcagggaactaccagtttccttcacaaaatcccaccctggtcatccaaggttggcaatatggaggaaggtcctatctctggctgttattcctcgcagcctacagggaaatggcagcagcaaattatcaaaaattttctaaaaggaaggtaacccttcgagggcaatgaggttcagatgcccttctcaaatgattttctttctcttctcaaccttgaaagatgtggggtttaattttattagacttttgtgggtttccatgcagataggagcaggtttgtttccttcatgggtttaaaatcactccaacattttactgcttctccttgtttctgttcagcatcaagacataaaagtgcatttcaaaaaatacccagagaggaaacaactggcctagaagtcacatgccaagaaacaggatcagaaatcagaaatccttcatgcactagcttctgggatcatcctggggtcacccttttaatctgtctgtggatcccactctccatttgcccaaagactgattaccagttccaatttaccttcaggtcatcagggatgaagactttgcgagctttcttgatcatgggctgtggcttcagttcttcctcagagaacttgcgtttgcgagggtcaaacatttcctggccagggatgctggaaagggcaagatctgctgggtctggctcataacccactgggacctggatggtgtcaggatcaatgggacttggtgtattgcggtttgctggcaacagctgacctggaacaacacaggagttttaattcatgaacaccctaga

SEQ ID NO: 87086 - DNA, 1050 bp, Homo sapiens
aacaaaaagtaaagtaatgcatttgagcatggccagactattccctaggacaaggaagcagagggaaatgggaggtctaaggatgaggggttaatttatcagtacatgagccaaaaactgcgtcttggattagcctttgacattgatgtgttcggttttgttgttccccttccctcacaccctgcctcgcccccacttttctagttaactttttccatatccctcttgacattcaaaacagttacttaagattcagttttcccactttttggtaatatatatatttttgtgaattatactttgttgtttttaaaaagaaaatcagttgattaagttaataagttgatgttttctaaggccctttttcctagtggtgtcatttttgaatgcctcataaattaatgattctgaagcttatgtttcttattctctgtttgcttttgaacgtatgtgctcttataaagtggacttctgaaaaatgaatgtaaaagacactggtgtatctcagaaggggatggtgttgtcacaaactgtggttaatccaatcaatttaaatgtttactatagaccaaaaggagagattattaaatcgtttaatgtttatacagagtaattataggaagttcttttttgtacagtatttttcagatataaatactgacaatgtattttggaagacatatattatatatagaaaagaggagaggaaaactattccatgttttaaaattatatagcaaagatatatattcaccaatgttgtacagagaagaagtgcttgggggtttttgaagtctttaatattttaagccctatcactgacacatcagcatgttttctgctttaaattaaaattttatgacagtatcgaggcttgtgatgacgaatcctgctctaaaatacacaaggagctttcttgtttcttattaggcctcagaaagaagtcagttaacgtcacccaaaagcacaaaatggattttagtcaaatatttattggatgatacagtgttttttaggaaaagcatctgccacaaaaatgttcacttcgaa

SEQ ID NO: 87087 - DNA, 1048 bp, Homo sapiens
atctcagatatgtttttatcagcagcgtgaaaatggactaattcagtcccttaattgggattcacctgattttttttttatatgattagactggtagcatgagtttttgagagcgagaccacaaagacgcaatgttattctcatcacatgttactaagggacatgacttatcacggttgatgttgaccttgatcagctggctgaggtggtgtttgtcaggttgctccactataaatgtacctttttctccctctctccccactggactcttaggaaggaaatcactatgtgcggcctgcacttgagtagtggggaattatgctctacctcctggagcatggaatgtctacataaattatatggaattctgctgcagggatatttggctattctcccccattacttatttattttgtcatttatttgtatcagcatagactcttggatatgtattttatacttcggggtataatccaatactactttatttatgttgctcaaattgctctaactttggccatgagaagctctttccattggctgattgcacttttaacccaaacaaatgttctgatgtctttttacctaactgcatgaactagagtcaggaaaactgcgagttgtttgtcacgccatctctaccacaaatttttgtgtcactttggtaaaagctcaacttgtctttccttttcttcacctgtacagtgaacttaacaccatctgcttccctttgcctctgctgtggctgtgaaactatagtgagatgacaagtaggacaggactctggaaaattaaaaacaaaaaccaaaaaacatgccaacccaaagcctcacttaaaatctccacttctttttctcacttgcatctatagagcttcacaattcaagcacacaataaatattttcatattttctgagtaaatgaataagtgaatgagcgaaaatgcatacaggcttctgagctgcaacaacagataagcaagggggaagaaaggccacaggccaggtatgctggagcatactggctcgaactcagctcatttcagagt

SEQ ID NO: 87088 - DNA, 1363 bp, Homo sapiens
agtccttgttctgtacctggggagataagctcgatatttgtccatgtgagacttaacagaccttagttttaggagctaaattcagcttacagacctaaagttacaactgacatgtacttgttttataggaggatatacatcttgaaaggttaaggggtcatcccttgtgagggcagtcatccagaggggtgcaggaggccttttgcctttgtgggggtctggttaatgtataatgctttgacacaaggttgggaagtaatcgctgtctgtttgggaaaaggatggtaacgttacctgactcaggcttaactcttcctttggcataatgagtttgggaatcctgagacttttattttgctttacatcaccaactttcaagataaaatgaaccaggtattcccaagcagccctgaagtcatcctggctgacctccctccccaacatcacccactcccctcgtgcccccctccccccagctgtcctctgcccctttgaaagaaagcatttttgtggccgagcacggtggctcacgcctgtaatcctagcactttgggaggccgaggagggcggatcacgaggtcaggagatcgagaccatcctggctaacacgatgaaaccccatctctactaaaaatacacaaaaattagccaggcgtggtggtaggtgcctgtagtcccagctacccgggaggctgaggcaggagaatggtgtgaacctgggaggtggagcttgcagtgagccgagatcgcgccactgcactccagcctgggcgacagagcgagactcagtctcaaaaaaaaaaaaaaaagaaaaagaaagaaagcatctttgtgcagtgtcttatctctcttctacccattgatttaagtatgttcctgtgaatgtgttcgtggtagaaatagcagcctacatctggcccaagtctatctttattttcacttatcggcattaggagctcgagccagtgagaaataaaaggctcttcacagatccgttttggggaatgtgacctggcaatcagtggagaggaaagagacaagcagttgacttggccatgctgagccttgatttcctcatcttgaaagggaggattatgctgtcagcctcaaagggctgcagtgagatgatttacataaagtatctagcacaggacctgaccatcaatatgtgctgaattccattcccagctatgcaccttcatcagaggtgctctgatgaatgttgaatagcccttggttatgaagggaaagaggtacaggtagattgctctcatatttatctcctttcatttcatattagggaaaaatggccctccttctatcaaaggctcttcttcaagcccatcagctatttggaccttat

SEQ ID NO: 87089 - DNA, 1032 bp, Homo sapiens
ccagcattatcttcccaaaataaaatctgagcatgtgtctcgatgctccaaaacttccactgactattatcctataagattcacgccagatgctttagcatggactcttcacatgctgactccgcctgatcggccctctccccagctgaaccccacttgacatcagccctgctagtgattttcacagcctcccccacaacacacatgccctcatggtgcttttgcagctgtgtttttgtacctgctgttccttggcctggaatgcccttactccagcccctttcctacctggcaaatagttgcttattccaagccttcatcaggtgccacccatctcccttgtgccattgaccaagttccccctggcatgagtagtagtgccctcctttgaccccatggcacagatattccttcatggcccctgtcatggtgcattgtgattgtgtttactgtctttacctctggtcttgggactgacctccttcaggcagggacagagtctcatccacttctgttcctagcttctagcatagcactggcttatgacaagagtgaagaagttttgttgaatgaaaggggcagggtcgggggaaggttggagaatgttgctgtggaagggaaagactgagaataaagcattttttaggacagactttggttttagcaggtttatcctgtccatcacaagcactcttactagctggaaactgacttttagcttcttaggccttagaggcttttttgaccacaagggtcagctagaacattcgtggcaaccacaggaaagttgatgagaaaatagagtgtaaatattagaaaatatgtcctaaagaagaaaatgtccagcatttttattggtgctttcctagaaataacaatttacaaaattattttgagagaaaaaagtatttggcctaacgtatttccctctggtcctcttttctgaatatagtaataaaataaaacaattgtgcaatcattgggtcttagtgcagattatactccagaagcaacaacttaaatttttaaaaa

SEQ ID NO: 87090 - DNA, 1055 bp, Homo sapiens
tgcccaatggttaagtcattgtcacttagctttatattgtcagtttgatatttattttaaattgtggaactagatgcataaattcacatttctgcctttcctttgcatcttctcatatattgtgtttttttttttttttcctagaaaaaatatttaaagcattgtttgacaggtagaaactcatgtatctgtagtccatgagttatatcctggctcagtggagtgatatttatgtattatttttacttttctctcagtgtcttatattaagattaacatgttgttaatagttgctttgttgattaatctctcttgttggtgttttaataaatgaaataggcttgcctttagatcgggtgctgatattgcctgtttcctagtaatgggctgatcaaatgatcagtggaattcttggtttgatgataaccttattaattgaaattttttactgatgtggctttaaaagaggtttattttgtatatgtttagaactctctgattttgatgaattatatgggaatgagaaacagaagaagtggtatttgctggcgagttaaataggcaaggtacccagtgataacaccaaccaaaccactcctatctgcatgattctgaacatctggatgcctgttgttttactgtgtatattttatttttaatatattaactttgtggattcatttaaggtctactcaaaagtaacactgtcaaaaccactaatatgtatgtaaaaattgtgctgtatactacaataaagttgttacttggatttgttccactgtctctaaattagatgactgtgaagaaaaatgaatacaccctgtcacttagaactttctagtctactttttaataattgaaatgccagagtcagctcaaacattaatcaacagacattttcagtttaaaatacactagtcaggacctaatgatttcaagttttttagatgatgcatccttaccaaggtaagccttttggtttagcatatttaatattctataggactgaggtgacagtcttttatgttaccaaccagacaagtagcagattataa

SEQ ID NO: 87091 - DNA, 1045 bp, Homo sapiens
aagaatgcatgttatgcccagcaagattggcggagtctgagttgctgtaagttctgggattaatggtacgaaatattgtttgtaatgtattctcctcttgaatgagaccatctttggattaggattcaggcatttctgtgtattcagaggaaggagaagcaatagacaaagcagaaaagcttgtaaaacttttgtagaccgccagggtatattaaacactgtaagtgcttcctgctttttctgtcttcccttcatatgcatctgcttcatcttattttttgcctaaatgcaaagagaatgcaaccaattcaaaaaaagagtaaagttgcttttcacatggatctgtgcctcctagaaaggaggtgcctccccagcttttcatttctgcttacagggtgtacattctgatacatgtagctgacatctcctgttatcttcacagctttcaccctggtgagactgtccagatctagtctgtaaacccagcttagaagcactgttgtaaaaatgactgaagagcccatcaaggagatcctgggagccccaaaggctcacatggcagcgacgatggagaagagccccaagagtgaagttgtgatcaccacagtccctctggtcagtgagattcagttgatggctgctacagggggtaccgagctctcctgctaccgctgcatcatcccctttgctgtggttgtcttcatcgccggcatcgtggtcaccgcggtggcttacagcttcaattcccatgggtctattatctccatctttggcctggttgttctgtcatctggactttttttactagcctccagtgccttgtgctggaaagtgagacaaaggagcaagaaagccaagagacgggagagtcaaacagctctcgtggcaaatcagagaagcttgtttgcttgagactgaatacgaccaaatgggccattgggcctggaaaacgtgctctgactttgtcacccaattcacccagaaccatggtgggagagaacagacttggcgttggagcagactggaagaatgggggtgggagggt

SEQ ID NO: 87092 - DNA, 1017 bp, Homo sapiens
tgcgccggggtcgacctccccgcagggagtgcggggcggcagtcgcggaagggacaggggcgcgtcttctccggctcaggaaggagctccgcccggaccctgtctcaagctctggagctagcgcaggggcggtgcctccaagtgactgccgtgcagatccaggggagttggaaggtcacaggagttcagcctcaggtcaggcccgacggggcatgtagttagaagttaatgacagttgaaacgtgggtcagctggttcctaggcccgtgcacacgtctgcaagggacgttgatcctcactctccaatgcgtgtcagtggcatatgggggctggggtgggggaggggcggtatcttagggcttggatataggaggaaaagaaacagaacttttcaaggactggatgtgcagggtggtgtcaggggttgccgagaagggccctactgttttagtgactcgtttcttttggttgttgccccttccttccaagttgctcttaataagttgagtccgaatcttcaggcaggagtaaagatgtaggaggaatgggattggttgttgaagtctttggaatcaggtagccatccaggtggaaggcattgcccctgaggcctgtcatccaaggcttgtcatcagttgctttgtgtaatagtcgcagcatggcaagtaggttaaaagtcgcctgcaggtaatgtgggtgaaactgaagtttcctaatacaggaccaggatattatagtgttagagttaggaggatacctcatgctcacctggttaaaccccaggtttcataggtgaaagcaacaggcctcaagggtgaagtcactcctgaaatggcccagataagtgaatagcagaggtgggattggagggttcatgatcttgtgaatgtcaaacatgtggttgcctttttaggcacttgcatttttgtttacatcaaatatagtgtttttatattttaaaacagaaaacaaacgtttgcaatatttagaagttgctcacctgttaaacaggaatga

SEQ ID NO: 87093 - DNA, 1037 bp, Homo sapiens
ggctaattctctacttccaacataatccttttactatttgaattgtaggaaactaaatgtcttataactggagcattagaaaagtatccattatattttagtctagataaggaaattgagccactgttagaggtggttttctggaggagcttcaggaaaagccaagaatctcttgagtaagcttctttggagtcatttattcaaatgttagtaagcttggaaaaataaaaccgatattgcaaaagatttatatctctaattttaagagatcttacacatcagatcttattatagtagcaataaaagttttgccaaataagttttgctttttcatatcaaattgtttgtataaacaatggtgcccaacgctggtgagatgctcctttggaactggtgagaggaactggtgagagtacacacttggtgcacacgttctgcaaggtttgtaaaaagtataaagagccttaaaatgttaatctacttatcctaaaatttatctgtaagaaaacatttgtagtaaaaaaaaaaatagaattatggaccaattattctatacaaacataaatattctggaaattttttttcataaaaatatttggaaacaaatttttttggagaataattgagttaggtatggagtcttcataacctcagtataatatttagttaaaaataagaatacaaactatttataccatgtgattcccgtttgataatgtacagatgtatttatttacttaaaggaaatatgtcaaatattatcagtagatatttttggattatggggttacatgtcaccttttaaaaattctttttgtcatttttataaactttttaattataaaaaactattttttaaaatatgaagtaaaaatgagtgtggttgctgagatcctttttaaaaagaaataatgggtgagaaaatgctttgattcaagaatgtggaccaggctgttcagcgcttggacattgtattgatgaagtaggaaaggtgttgccgtgttatggagcatttggttcctctggagctctggcat

SEQ ID NO: 87094 - DNA, 1041 bp, Homo sapiens
tcagttttcttgaataattgctatttgtctcccttccaaagcctatgatgaaaacaagtgtgtatgagtgtaaatgtgtgggtatgtataaatccttactaagttcaattgtgtgtgtgaggggagggggcaagagagagaagatgtttatcttcctgacatctctcatcagaccctgaggtctgcccttctactggggcatccatggcatggcacataaggggttcagatagactagtttgatatttgctggttggaaattcttggtataaaatcacatgcttttagagctggaagattcttatggattcattttcaattttacattcattttttgccaggtactttcacatacatctgagattcctaaaccgggatgtatttatccctaggttataccacccaagctagaagacccttaaagcttcaggatctctagaaagattcagcatgtttattccttgacttcccctcaggccatggcacagtgtttacagagagggcttcattcatgcatgattaaccagtaacacggccttagcacatggatgcaagagttcatccaaaagtttatgttcgttcatttgtttctttgcctttgtgttgaaattaatctaatagccattgctttaattttaataatagagcctttaggcaaagctgagggtcaggaattgtaaattgccaccgtacagagagtgaaatgtgtgatggggcaactctaggccaggaccctcatggacaagaatatggcttaccaaggaaacaagggaactctcttgtactttggaatctagaaaggccttttcccaaatcaaaggaacttatatgatttgaagcagatttcttttgtttttcattttcagtcttttatacagaatcaaaaagaagcagttgttgaaaaattctgtcttggaattgataaaacaatgtgttgggtttcactatgccacatggctatttaaaatataacctctctcgagaactgtagctgcctatgtgacacccttacttggatgcttaataaacatcttaaactca

SEQ ID NO: 87095 - DNA, 1025 bp, Homo sapiens
cccctgcctggctcttaccaaaaccacaatcaggcaatccccgcaagctgagcttatcactgggatcctggcactgtcaaaggggctgacccaagcctgtcttacactgcctgcagctagttgcacaagccgctgacctacatggaaagcattgcatttcatgagaatgaaataggacattggacaagagctccacatttcctgccatcagatttacttcattttcgggaatggccctgctaacctatgatttcaaaggagtccaaagaattttggagtctagcaatcagttacactggtagtctcttttttcctctatgtctctgtgtggcatgttcctttctgcatgtatgcattcacatgcattcgtaaagacaggcttgaggaactctctgctccacatacaccaaggtgtcctgtggtatgtcagagcagctgtggtataacgaaaggagcacaatttttggcatcagaatacctggattaaaatcctaggcttcttacttgcaatgtgacctggggtacttctctgggtcttagcttttctaaatggaaaacaaagctaataaaccctacttcataaagctgctgaaggatttaatgatattacagatgggtgacagtgtgctcagtgtgctgtcatgaaaagagacctgagttcaaatccagaatctatctcctaaaggccatgtgaatcaggccaatgtattaaacttctcttttcttcagtttatgcatctctaaaatgggagtcctaatgatacctccacccagggtttggttttggggtcaaatgggacaatggctcaaatcctctagtgaggtccccagtatacagcagtgatgcagtaagttgctgtctttctagccttttttcagccattatgtgaaaactcattgtacacttccaagtggtgttcaaataaaagatgattctgtaacagtggtagttgccaaagtaagtgacatgactcattttaaggaacctagtaaaagacaggggtgtgcactttgaaacagagcag

SEQ ID NO: 87096 - DNA, 1071 bp, Homo sapiens
gggatttggtgtacagattatttcctcacacaggtaataagcattgtatttgatagtttttcagtcctcaccctcctcccaacctccaccctcgggtaggccccagtgtccattgttcccttgattgtgtccatgtgtactcaacatttagctctcacttatacgtgagaatatgtagtatttggttttctgttcctgcaataattcacttagaataatggcctgcagctccttccatgttactgcaaaggacatgatctcatcctttttcatagctgcatagtattacatggtatatatgtaccatattttctttatccagtccaccattggtgggcatttagattgcttccatgtatttgctgttctgaatagttcagctcatatttttaccatccctcaaaccatgatgtttttcagagaatagtatgtgtcataggtaactggaatcatttttttctgggtgatttgcttttacaacctgcaatatccttgatctgacaaagtgtggaattattattggagcagatctccttgctgtgaaaagggccacttatgtagtcctgtagacataaagatatataaagcaaataggcacctcattgtcactggggaaggagttttgaaggtttgtcaaaggccaccctatcccataccttttgtttgtggagctcaaaggctctggtgaaggaacgggtaaatttgtgtagcagatcagcagatccaaatggaaatcaatgctttttaaagactttacttttttagagaaattttaggttcacaacaaaattgagagaaaggtgcagagacttcctctataccccctgcccccacacatgtttagaccctcccactatcaacatccctcaccacagtgaagcattcattacaatcaatgaacctacattgacacatcattctcacccagagtccacagtctacatgaaggttcactcttggtgtacattctgtgggctctgataaatacataatgatatgtatccaccattaccatatcatactgaatagtttcactggcctaaaaatcctctgtgctctgcctagtcatcc

SEQ ID NO: 87097 - DNA, 1059 bp, Homo sapiens
cgccgtgggaatcaggatttcatagagtggtgtagaggcctgctttaatctctgctgatgacctaaactcattttgaggaaacaagctaataaataaacatccctgagtttgtgcaagcgtggcagctttgcagtagtcatttgctgagacgatgcatccagcctccactcctcagccagcctgcccttttgggtaataaaacttggctcctaacgttaatacagaggtttctaagtggtgcctgcttcatggccactgtatattttagcttttgttcctatcgattatctccttattttaaataaggaaaaatgaaatatggacaaattaacttttcccttcagccgcaaaactgatgggtcacaggttttgtactatgaatgtgcagtgaaaacaagtgtcattccaaggcagcacttttatgtcttttgctaatatagctgttggtaccatagcgaaatatactcaaaaagaacactgaaaggaatattccttttgacgcttggtctttcaggacatgtagaatcttagataagtgaccttgattaagccaagaatattttaatgtcttttatatacacactggacaacacatttttgtccttaaatattgtttgaaaataggtgaagatgtcctttgctgatgttggaaattggtaaaggagaatgctgctttgcaaatgatctattctaactcagttcacagttgagaaaattaaagcccgttaggtccactctggtaaaataggactggcctccaggatttccagctctggactaacacttagcctcctttgagccttaagtctggacatcttcattgtaatgggttttatttctgacaagtagaaaggcgcataaacatgcttaagaaatgaaataggcagtaaataggaagctgctttttaatttttttaattttttttgcagaaattctttcattagcatgaacgctattataatgtcaatacctgtttttaagtcttattttaaataattttacacattatcaaagaggcttaagaataaatgttcaaaataatgtattctagacaact

SEQ ID NO: 87098 - DNA, 1011 bp, Homo sapiens
agtgaaaccccatctctactaagaatataaaaattacccaggcggtagtagcacgaacttgtaatcccagctacttgggagactaggcagaagaatcacttgatcctgggaggcagaggttgcggtgagctgagatcatgccactgcactccagtctggtggacagagtgagaccctgtctcaaaaaaaaaaaaaaaaagtgctgttagattaaactgccaaatatgttcaaaccttattgctccatttcactgtgcagatagtgcatatattttatttgccaaatgttatggtaagtagtgataaaattatgttttattttttaacaaaaatgattgttttgtgggttatcattgagattatggtttaaaattagttaatgcttgtttcttccttccctcaggtgcatttggtgccagaaaacagtacatgatgagtgcatgaaaaatagtttaaagaatgaaaaatgtgattttggagaattcaaaaacctaatcattccaccaagttatttaacatccattaatcagatgcgtaaagacaaaaaaacagattatgaagtggtaattagagtttatttctctaatatgattgatttttaaaaagctgcttaactcattgtttgagatagttaagacagtatgtaagaagaattggtgccaggaataaaataaacttaaataacagatcaagaccaaggagagaaataaaatgctattatggtaagccataaaatcctacctagttcctagagatgggtcaaaaattttggctcttgagttctttcatgtctaaaaggaaattggaaatgttatattagtggtttccaaatcattgcctgcatctgaatgatttagggagctttttaaaaatacagatttctgagtagtaccttcattgccatatttgatttagtaggtatagggtaagtccaggaattcatctttttttttaaggtcctcagaagattctgatgaacagtcagttttgggattcatgattattgtcagt

SEQ ID NO: 87099 - DNA, 1257 bp, Homo sapiens
tagcctctaagcttggaaagcagtggaccccattaataatcctggccaactctcgtagtggaactaatatgggagaaggactgttgggagaatttaggatcttgttgaatccagtccaggtaactaaagaaaaaaactttttatattaatgttttcattttccccaaaatgcaatgattattaatgcttcaagtcactaatcacctgatcataggaaagaataataattacaaaaagatcagccatttaaatatgtggataaacaggcactcttgtgggaatataaaatggtacaacctctttagaagacatcttggcagtttcttaaaaagataaatataaatttattatatcttctagcaagtcctctactaggaatctacccaagggaagtgaaaacatatttctcacaaacatttgcatgaaaatgttcacagcagcattattcatgatagctgaaaagcataaacagcccagctgttcatcagctgatgagttgataaacaaaatgtgatgtagccctacaatggaataccatgaaatgacaaaaaggaacaaactactgatacgtatatattacaataaatgaacctcaaaaacatactaagtgaaagaaggcagatacaagggaccttatattgtatgactccacttatgtgacttgtctagaaaaggcaagtctgtagaggtagagaatagattattggttctagggctggaaatggggagtgattgcgaatggacattgagggatcttattgaagcaacaaaaatgttctaaactggatgatggtggtggttgtgcaattcagtgaacttaataaaaattattgacttgttcacttcaaatgggtgaatcttatatgtaaattatacctcagttttaaaaataaaagggatcgttaaaattgaatataattttactttgaaaaattaaccaaaaaacaaaaaaatacaaaaaaattttaaagacaacccattgtgtagcaattagaagtgcaataactttgtccttccaatttgtattttttacactttcaatattatacagtttaagaaaattataaaaaatacagagaaaatcatttgcaatttctccatacaaatacatcagttctcttttttcttgttctttccattaattatctatgcatttactttacatattaacagtactataacaataatctagatacaaatttgcattctgatttttttaattttaatggtataaatatttttccttgtttcaacata

SEQ ID NO: 87100 - DNA, 1079 bp, Homo sapiens
ccgagtagctaggatcacaagcacacaacaccacactggctaatttttgtatttttagtaaagacaggatttcaccatgttggccaggctggtctcgaactcctgacgtcaagtgatccacccgccttggcctcccaaagtgctgggattataggcatgagttaccacacctagccttgtatttcagcacttaattacctggacaatcacaggcaagtgatttaaccttcctgcacctcagtttccagcccaatagaatgaggctaactcttgctttgtaaagtcagtgtggggatgagctacaatgaatataaagagtctggcagggtgcctggcatattgttaaatacatagtagccagtaatgttatttaactgtatctctactcatctagagggaaatcatcattacagatgaaggaaaatgttggataaaaataatttgtctttttcttttgtttctaggtttttgatgtaactaaaactcctcctatcaaagccctacaactctgtactcttctcccatattattcagctcgagtacttgtttgtggaggggatgggactgtagggtgggtcctggatgcagttgatgacatgaagattaaggtattagtctttaagaactactacagaaggacttctaagataaatatactatacatatatatatatatatgggttttgttgttgttttgttgttgttgttgttttttcttgagatacagtctcgcactgtcacccaggctggagtgcagcggcgcagacacagctaactgcaacctccatttctcaggttcaagccatcctcccacctcagcctacaaagttgctgagactataggtgtgcgctaccatgcctggctaatttttgtattttttgtagagacagggtttcaccatgttgcctgggctgctgtcaaactcctgggctcaagcgatcctcccaccttggcctcccaaagtgctgggattacatgggtgagccactatgcccaacctaatatagaatatttttgctttatattttttattatgcagatgaatattagacattgccagcttcaaatagttaaaaat

SEQ ID NO: 87101 - DNA, 1050 bp, Homo sapiens
tatagatttccattgctgctcctagtggattccaattttaccctttaaaattactagaatggaggtgttggatagggccagaggttgcacaccaaaagtatcccctttggttgcccttcttttcatcagcatctagtctaccataaggagaatgtgtgcttcaacattcttaaagggagctttgatacagcgtattttttcttattgtttacagggttagattgttttaatattatattttctgtccatttttcataggcggtttacttattctatggaaccaaagattgtttagtgcaagaatgtaaagatttgaataaaaaagttgaggtaagctattaacactttttattttttaaagttttaggtggtctctggattatgaagactttttaaacagaaatgctaaactttgttaatatattttgccagcatacatagagtatttatttgtgtgccaggcactttgctacatgctttatacacattgtccctctaaattctctccacaattctataaggtatgtattatatattcacattatgcagaaaagaaaactattttaaatgaagtaatttgcccaaattctctcatttaatgcctaaatgcacatgtaatcaagatgtgaacccagatttatgtaaatccagtctgtttaactattagggtgagtggcctccattcatacatgataaataatttacagttatctaatacagtgcctgactcaacataaagacacagaggaagtttaaatggaaagtttaattcagattatttttgtcgggtatctctcttacataccaaaataaaaatgtataaatacaaaaaaaaaaaaattagccaggcgtggtggcgggcgcctgtagtcccagctacttggaaggctgaggcaggagaatggcgtggacccgggaggcggagcttgcagtgagccaagatcgcgacgctgcattccagcctgggggacagagcaagactccgtctcaaaaaaaactaataaaaaataataaaaatgtataaatagtaaaaatagaatattaatgatt

SEQ ID NO: 87102 - DNA, 2878 bp, Homo sapiens
atagaaaagggcagatgagaggccctgagtgagaggtagggagcatcttctacatgtgcatctctcatatataagcacatttatgaaaatagatgtgaattctaaatggatgtgtgtggaaattgtgtatcctgtagtcactatctatttgtatttctttaaagctagaactggatggtgagcgagtagcactgcccagcttggaaggtattatagttctgaacatcggatactggggcggtggctgcagactatgggaagggatgggggacgagacttaccctctagccaggtatgtacatttgtggtctgtttttttatgtcactattttatttaaagcaatctcttgtttatagactttaacatttttcctcaaattttcttttttgtgtatctcattagttataaatattttttaagttgatggtccaactgtgttaaaaagtaattgctctagcataactgattttttattgcatcatataatccatattttctttttccaattttaggcatgacgatggtctgctggaagtcgttggagtatatgggtctttccactgtgctcagattcaagtaaaactggctaatccttttcgaataggacaggcacatacagtgagggtaggtgaaatatagctgtaacaggctaatttgtcccaatccaattctaagctgttgatatgtaaaatatacatgctatacttttctttaaacagtggtttatggctcatgcagctggtcactgtacactagcggctagagtgggatgaggaagaaacagaaacatggctcaagatccatgagataaaacgttcacttgaaaaaagaattccttaatcaatgaataaaaacatattcagattaatattttctaaaaatgaaatgcataagggttaagggattgtggatggtattattaaggaagacctttctaaatttggggggactgacttttaaacattatttgttccctaatatcagctgattttgaagtgctccatgatgccaatgcaggtggatggggagccttgggcccaagggccctgcactgtcaccataactcacaagacacatgcaatgatgttatatttctctggagaacaaacagatgatgacatctctagtacttcggatcaagaagatataaaggcgactgaatagatggatgagggagtgaaaactttgcatagaatcctcacgcaagtagatacatgttcatccaaaagtattaatagaaattctctatcagctattcagtcttaatttcactagtagtataatgggtatacatttttgtaaatagcatccccaaaccagccagccttcagttatttacaaatgtttgttcttttttcagcaaaatacttcaaatgaatagtattaacttacaaaaagtcacaaaaacttacatgagagtgaaaatttgttatgactgttttgagagtgggactcactctgaagtatgtgctgtctcatgtcttatttttgaaccatgcatatgatggacacacaatggatggacacattatatctccaacaaggtgtgggtggaaagatcaaattaacctgcttttttgaaaggaaatgattactgtcaaaccagcatggttaattgtgagcatcctcctgcagcatgccccttaagattttctacaacccaaaccaagtgtatgtattgatttctaggaacccccaaaaggagaatagtaaaaaaagatcatacttaaaatttgtattacaatttttattttaggaacttattcagacacgtaaatgttgtttaattctgtaggtaaccatttgagctgcaattcaggatcttttttataacaccagtgtagccaaaagagaaacagataagtgaattggtaagaaataagattcagagcacttgggattgtaagttataggttctgagctgaactgtttatcagccgctctttttattaaaagacagtgtcaacacttcaaaaaacgtgcttaaaggagacaacggtgagattaattgcttagaaaaagctcaaggctgactgataagttttaaaaatttggtggtcttgtagtattttgaaatacagtagtcttttaacagaatttccccttagggaggtaagtggacagaaatctttgctaaaatgtttatatcatatttattttaaaatgagagagatatatttttaaattatttattatttaccttgtggtatggtacctgtgtttagtgtttacgttctgtagctttatttaataagttaaattgatcacataaattctgctagtcacaatcagatagaaatttagtctattaattaaaattctaatttaattctcctgacagaaatctagatattcttattcttcacaaatattcctcattgtattgaaaaatgaaggagggcatgaaaagcactagggaactacttttggataactgaaagctttgtttcattgttttatttgcccctcaattgccacaaacttactgaagggctagtttcatggttcccattagagggtgcttgttcgctgctgttgaccagcccaagggtcgtgacccacaggtcggctgacccagagggcatccagcctggtgtttttctgacacatggcccaggctttgtggtctttcatgacattaatctctgaaagatcagaatgtatcccccaaaataccattagctatctttgagggtctattatgaatctgtcatccatgaattgccataaacctaagtttgcctcacctcaggcccagaccatgttttcaaagagcaacttagtaatgtatacagtagtcagtacattttatgaaatactctattttgctaaattaacctcttgcagatctcctcaggtgatcttaaattctagtct

SEQ ID NO: 87103 - DNA, 1373 bp, Homo sapiens
atgtatcattatcttgtttttgcaaaattcacttactttttgggcacatttacccagcatttcaaataagtgtataggcatgtgccttgtttaagtacaatttataagacttcatgtttgcaagttacatattagggtagtgattgtttatattaccagggattctacactttaccaaaaaaaattgccataagattttcctgttccattttaaattgtcttgatatttaaaaaaataacttctacattctcaggaagaaatacatgaagtaaatcatatctccatgtctgtttccagatttctctaatctttttactatcccaatacattcctaattcctataaacgtagtggcttaaatactgaatacctggcagctcttaaagatcccttaggcagatgatgataattttcagtgtttcgtcatgtttaatagaaatcaaactgacttgtgttttaaaatacaagttgtctgctagtaaagttacatgatttaggtgtgttttaggttttctgcaacaattagctgtgaacccctaatgtagctaagtttatacaaattttataatcaaaattatttatttttatttttttagagtatgtcaaaaacatatagtgtttgctttgtgaaatacatttgcttagagttataaaatatactgtgactcagaaattgtaaagtcagtttgcgttgtaaaaatgaatactaccagcatgtcaaaagaaaaataatttacatttgtaatataaagtaaaattgtatttaatatatttattgaattttaaatttgcactaacttgaaaactttaaaggttatactaatttaatgattaatgtggacccaaatacataatttggccaaaaaagtcattagaatgggtaatggttttgtgtggttttccttcaaaatgataatattgaagcaagaaccagcattttatattgataatttttttaatatttctacccagttgaggacagtggaatataagtagatatatttaaaatatctagatatttaaaaagaaagaaaaggttgtttatcccaatctgaattcattctcagcaacaagacagaaaaggtggtttgggttttgcttttaaacagtgtccccctgtctttttcaatttttcccttgaagcctttctcttgttcttcagagtacgcgctgcaggctatctgcagcatcagaatgcctgggcaggctgttgaaagtatggattcctgagcccaacccttaacttaatgattccctgtctctggagatgcaacatagaaatctctgtttttattaacaagcgcctcaggcgattcttaagcatactgaaatttgaaagcttctggtctgaacctcatgtattcacctagggc

SEQ ID NO: 87104 - DNA, 1937 bp, Homo sapiens
gcagtgagccatggaggcgcctgccttctcactgcagtcaatgcagccacacttgtgtatactgagtgctgcttcagatctcagtagataaaataattccacatttaaaatgattctgctattttttataaagggtttgaaagccactactataatgactttgtcacctaattgattttctactaatttttacatattcagaaacttcgtgtttttttggtggacagaatattttggaggtctccgtcgctgtttagaatgtggccacttggctgtttcacagtttttaaagctattttattgaatagtaaagcagtgaacttagcctttgttctttgtgtttctaatttaagcatatagtctatttaatttttgatatgtaaatacacatcaatacatatatatttacccatgtggccctgtgtagtcagtgcatgaggcttgcatagcccagaaaggtacattccagggttctggggaaagaattttaaaatgccatcctctaatacagacgtttataaaacttaaatgaaatgattgggcttaaccatatgcaagaaagtctgcagaaaataaatcacctagaaactataaatagaaatgtgctgctgaggctgggcacggtggctcacacctgtaatcccagcacttggggggctaagggaggcgtatcacctgaggtcaggagtttgagacaagcctggtcaacatggtgaaacgccgtctctactaaaaatacaaaaaaaattagccaggtacattggcacatgcctttaatcccagctaatcaggaggctgaggcacgagaattgctcgaacccaggcggcagagcttgcagtgagcggagatcacatgactgcactccagcctgggcaacagagcaagactccatctcaaaaaaaaaaaggccgggcgtggtggctcacgcctgtaatcccagcactttgggaggctgaggcaggtggatcacgaggtcaggagatcgagactatcctggctaacacggtgacaccccgcctctactaaaaatccaaaaatttagccgggcatggtggcgggcacctgtagtcccagctactcgggaggctgaggcaggagaatggcgtgaacccgggaggcagagcttgcagggaggcggagcttgcagcgagccgagatagtgccactgcagtggggcctgggccaaagagtgagactccatctcaaaaaaaaaaaaaaagaaagaaatgtgttgctggtatcagatatcagaccaagaacacttcagtctctctaaggatgccctgagctacctcactgttaaaggacgacatcaacacagaatgcactaaacaggaaataagctgtaatctagagaatttccattatgtgttactttttggtgactaacatggaatgttgaaaaggaagagctggaaagctcagttgttttccttgttcctctgacattgtccaggcaagagggcatcctgatcagatgagtagatttggctgagaaaaaccctagagtaaggcaggcactttgtggaggtggatgatgatggctcataaaaacgtttgttctcagtccagttcagggctctgccagcagtctttcagatctgaactgcttaaacaaaccctacagataaattggcactctgatttgtaattctgtttgtacaagtttagagcagcctagctcgagtcctcaaccccagtcctcttagaagtgaactgattgcactggatccctaaacccacaatgttgaggacacatgtgatgactccacttgctcagccagctggcctcttgcactttcccctgcccaccacttgtaactaccacttaattatcttgtgttaattgcttttgttgtgttgggtctgtatttttgtggtcagtgcctgcaggcagaaatgtgaaagcatttggtatgttgaagatacttgcttc

SEQ ID NO: 87105 - DNA, 2589 bp, Homo sapiens
tggaggaacctttgtatccatctgacttctcattttgcagaatatgatgagaaagtagaggatcgctctgttcaccactcttgctattccattagtggggagatgcctgctagcatgtgtgaggggaacactctgatacactgggaagtatcggaaattcccagaaacacaaacataaaataactctcctagacccaggtactggggactgtctcagtccgtgtggcatgataaataaaaggttaggatcaagtctttgtatttttcaagatgtggtagctgattattcctgttttaagtactctgaaattgatctgtgatcaataatactaatatgttatcttttaccgtattctgcctctcactattgattttaattagttaggagtatttgagctgttatttcttgagcttaatatttttttagagttaactctttaaggagataatcatggctgtagacaaggccagggctggctgacgtgccttagaaggtttgaatgcaataaagcggtgtttggcgttctcctgcattgtagtgcgggtacaaaatgctatttgttcgtcatactgttgtcagcagatgagccgcccactacagacggctactgcccagggacctgcccaggccccacccaagggctcccaagggttgagatttctgcagacctatagccagcacacttagtcctgccctatatagagttcctcttcgggaagcttttgataaggaattctcagaccgataggatgtctgtctgggctttgctgcgggacagtctaactgtgggggctaggggaaagcaggagagtatcgatcaaagagtaagccacacacggataatcagttactagggatggaggtgtgagggttcattatattattcattttactgttgtatatgtttgaaaatgtctataataaaaagctttaaaaaaaaaaaagaaacaaaaatagttcaggccagcaatgggccctccatgttcagtggattttatccttgtttcaattggggtaggagttccaggaggtgtggattggaggttgtctaaagaattgaactggcctttgtccctgcttcctgggagggagactttcagtccttgacatttccagggtaataggagtgtctttgttatttgtgaggccatgggatcacacctgagcttatgctaaaaggtgggatgactcagagctggggctggtcaccagacagactgaccatgtgattagaggtttgaggctttgagtcagcctgacctatggggcgggggactggaggctgagtttaatcatctggccagtgctttaatcagtacatcatgaaaccctaataaaaactctggacactaaagctcagcatagcttcctgggtggtgaagctgtggctatgccggcagggcagtgtgccctaattccacgaagagggggcatgggagcactgtgctcaagacccttccagacctttccctgtgtcttccttggcttgtggagctgatttgtatcctttataataaaactaatcataagtatagtcctgagttctgtgatttttagtgaatcattgaacctgaggaagatcatggtaccctcctgggattgtaggcagttggtcacaagcgctgatggcctgggatccccacatggggctggtgtctgaggtgagggcagccctgttggggactatgtcccttcgctggtggcatctgatctaactctgctggtcgttgttagaattgtggtgcggtacaccaggtggtgtcagaacagaggcggtgggatctgcacaccttgagtaagcccttctcgaccagcctgttggaacaaaacacactactcttcatgggagcctcctgagtttcttctcacctgtgtgaagtcccctttgtttactgtcctgagttttgttctcgctcatctccaacccctcttgtagttttttcttcctcactgtcactgtaaccataaaaatactcagtatgtcagtgatagacttgtctttctattcagagatgactcttcaactgtccggggacacttttttccaataaaaagttcaggatggtaatttgtgactccttactaaaggcaagctgggagtgcgtgtgtgtgtgtgtgtgcacgcatgtgtggtttttaagtcatttgtggtctgctggggtgacccatgggctaagtttggacttgctcataggttttacatctgttttctcatcagttcccaggcagtcttgaaatgccatagcatcatgaataaccgaaggatctccaaccgttattgaccttggagttgcagtctacctgtattttattgtagatcaattccaatacataaaatacaggaagactctaaaaaagcaaatcaaagagtgaaggggaaatgatacatttaaaaagcctattttaaagggggcaatttggaataaatgcacacacaaaatgggtccttttgctgatgcctctgctgccttattgagctgtatgtccttattccaggcacatctcctttctgagtcttaactttgcctgcattaaaggttccatgaggaccagatgaaatttttgaggtaaaaataggtcgacattta

SEQ ID NO: 87106 - DNA, 2627 bp, Homo sapiens
aatgaatgaatgaatggataaatggaaaggcagaaggatggatagataagtggatagatggatgaatggaagaatggatagataggtagatagatgggtatatggatacatgggtagatggatagatggatggatggatacatggatggattgatggatacatggatagacagatagatggatgaatagacagacagatggatagatgagtggatggatggaccaatgggtagatgggtgcatggatggataaaactagtgaataaatagtaccactttggcaaaggtctaaaagagcactttgggccccttgtaattaattccttggggtgatgttttctcagattacattaaagtcatcctggactacaacaccgcccacaacaaagtggctctgtcagagtgctatacagtagcttctgtggctgagatgcctcagaactaccggccgcatccccagaggttcacatactgctctcaggtgctgggcctgcactgctacaagaaggggatccactactgggaggtggagctgcagaagaacaacttctgtggggtaggcatctgctacggaagcatgaaccggcagggcccagaaagcaggctcggccgcaacagcgcctcctggtgcgtggagtggttcaacaccaagatctctgcctggcacaataacgtggagaaaaccctgccctccaccaaggccacgcgggtgggcgtgcttctcaactgtgaccacggctttgtcatcttcttcgctgttgccgacaaggtccacctgatgtataagttcagggtggactttactgaggctttgtacccggctttctgggtattttctgctggtgccacactctccatctgctcccccaagtaggcaggctgtaggcacttgggctgactgcctgcagaagtcccaagaccctagtgaaaatacagcaggcagaactctccttggataattccccaagaggtcccaaggattgggagcatgggaggggagctggcgggagggtgggaggtgggatttagccaggaaaggggtgagagtgattgtgttgtgggcgaggaggcgtttccaccccctggtgcctatcagggcagggtgacctactccccattgttctggaaatctccaggctgctgggcagctgggcagagctctgggaagtgaagtcatgagtgcccgattcctcttagagaaaatccatagctactgtaggttctgtcttgggccacttggatctgaaggctgcccctttgctctctggggtagccttcagatcttggtgttttgaattcttactatagatgtttttaaagttccaaagtcattgagtttcaatgttacataaactccattacccgcatgttggggcttgatctcctggttattatctgtgcttgaggaaacacccacagcagtctctacccagaacagtttcctaaagaggcataccctcttcctccactggaaaatagtgcgttcccttcctaccctgcacacccatcgcccccacattgatggttttcaaacagcaaacttttcagctaaagcttcaaaccatgattggaatcagcctgtgttggatttgtgattcagggtcatggtgaccctgatccagtttgggtggaaatccttcctaagtatcataagaagcatcttggcagagatgctttggtggcagccatgagctttgctggaggccttgcttcccatagccttggctgtggggcaaggaactctgccaggcgagggggatgctgccctggatcaacagaagcctggtgggtttgctcgtgttagagtgtcctgccttcttactgacaactcttctcggtgatagcctctcttccctggattgtgacatatggaatgacagtgcaggtaccaccgaggctagcacagtcaagcctccagctaagctggatccctgaagcctgctatcatgcagacaggctatgcggctgcctcggaccatgctaggccacttgctggggtgtcaacctaccaccaaaggggtcttttagcaaacctcatggggaacaggaacattcctgttcatccctggccacaggctgcagacccagcactggcccttgcgtgagtcagagcctggggctggccctagccccttctactgacttcctcatttaagccaattatataagctcacattgatcagggagggagggaaagagctaaagagggtcacacaagtggctattttccctgcagtgtttctgtgtggtgaaaataacccagtccactaaggggcgggagtgaatggatggctggattttccccaagctccttatagcctaatgttgtcaggatgtgagtatgaggaatttagcctcttatagtgaaatgagtccaactctgggctttgcttagaggagagctcctgtcaggcttcctataatatgaaaagaagtcaccattggggaactagagaccccagaccttttcatatggatatttgagaatgtaatgcatctcaggcctcgtgctggaactctagggcactctaggcaggctcagaacacttgatattcctgacagctacacacctgacatgcaggtacatacctgatcggtgtcatctcctaacaaggattttcagttc

SEQ ID NO: 87107 - DNA, 1675 bp, Homo sapiens
tgcatttcttaggggttctctggtgatgtcactgcagctggcttgggcaccagactttgagaacgactattttagccaaactcagttcctgtaggtagacactccagatatttttaaaagacttggcaagcatttttttttttttttgagacagggtctcattttgttgctgaggctggagtgcagtggcaagaacacagctcactgcagcctcatcctcctgggctcaagcaattcttctgcctcacctcccaagtagctgggactacaggtgtgtgccactaggcctggctagttttttctttttttttttttttgtaattttgtagagatggggtttccccatgttgcccatgctagtttctaacgcttgagatcaagtggttcctgcaccttggcctcccaaattgctgggattccaggcatgagccaccatgcgcccagcccttggcaagcatttttttttttctgattccctatttggtttttgtgttttttcctttatggaaatataatttacctgcagtaaatctcttttttccctgcagtaaatcttaaatgtgcagttagatctattttgacaaatgcatacatgtgttaccattgttcaaatcaagataaagaatttccctttctccagaaaattccttcatgctccttattagtcagtccccgcccccacgaccgctcatgctggtttctatcactatagattcattttgcctgctgactccttctgtttttcaaattaaaacatccttttatttgtctgggtcaaattcatgcacatgaatgttattattttgaaaatgtcattgtgttgtgccttaaaagaaattaaatctgaaaactttcttttgcagaagaggaaaagaaatccaagaaacctcgtaagttatgcatttctgcaactgttcgtttcttgagactgcccgagcacagaactaaatgctggtagtgagagtcgacctctctcatcagggttctgtgatgggttctatatgattccattctgtaatggcagcaggcctgaggctggaggggaggacaagcataagtgagatgaataaggtgactttagccttgtctgttttcccctgtgttgtcctgctgttcaggcgtgtgtttgtagaagtggctcttaatcagtgtggaagggagtagaggccatcccgttgctctgtatcatatttccctttccttacccccagcccctgtccctgccttacccagcaagcttcccacgtttggagccccggaacagttagtggatttaaaacaagctggcttggagggtaagttatcatgggcaaggagctttggggtgtccactctgagtttgttctgcaaatcactctctgtttcctctcccagctgcagccaaagccaccagctcacatccgaactcaacatctctcaaggccaaggtgctggagaccttcctggccaagtccagacctgagctcctggagtgtgagtagcttcggggctggtgcgcggttccactggttctgtctctcctgcgccgctctgtgcagctctctgtgaggccagctggccggctatatcagccactccccttcacttgtcctctactttgttgctcccttattttctcccagtcatcagtgcctttctttacttttcctaactagctcagatttcacaatcggtc

SEQ ID NO: 87108 - DNA, 1023 bp, Homo sapiens
tcctgcctcagcctcctgagtagctgggattacaggcatgtgccaccacacctggctaatttttgtatttttaatagagacatggtttcactactttggtcaggctagtcttgaactctcgacctcaagtaatctgcctgcctcagcctcccaaaatgctgggattacaggcgtgagccaccgggcccagcctaaaaaattttttttgtagagccagggtctcgctaagttgtccagactgatcttgagctcctggcttcaagtgatgctcctgccttggcctcccaaatcattgggattacaggcttgagccactgtgcctggcctgtctgatttttcttcaacgctatttccctagtgcctagcacagagcctggcccatagtaaatctctgttgtgtagtccaagattgggcttgaatctcagcttggcctgccgagtgtccttgcagaagggcttctgaaatcggtggcggtgcagccccattgtggaagtgctgcgtgggggcaaagctataggtggctggtatgtgggaggaggggagagaaagaatagtgggaaaggaacaagtgttgacccagcctccgctacatgaccttgatctcattcaggagtcacatcaaccatgagcaaggtgaagtcatccccattgtgtgctcgaagaaaccaaagctcagagaagtctcagaggccacagagctgggtgctggtggaaaaaagacttggcccttgctacattttaaaaagtcagagaaaaaagggaatacaccaaactggttcttagatcaccttgtttgtagctcttgtaagcgatgggatggggaaggtcggaggaaatggctgtctgtgtaaaccctctgcctgcccaccgacccatggcaaagctggctgctagggtcagtgagaggagccgcacacactgagcccttcttctctgacacaggtgaccctggagagcatgacccagcgtccacacacaaatccacacgccctgtgaagaaggtctccagtaagtagccccac

SEQ ID NO: 87109 - DNA, 1035 bp, Homo sapiens
agatattccctggctgcaatccacatcccttgagatgtccctgtctgttaccagaatgtgtgattagagctgttcccctaggattggggtggtcctgagtttcctgtgcttttccacctttagctggaaaagtggaaagaacattgtcctgggggatcggaagatctcagtcccagctgtgtctgtgcccctagctggtggagttcctgccatgtctagacctcagtttccccatctgtaagatgagtgacctctggggtcccctccagctccagattactgtgtcttcaagtgtcatttaaactcctggtgacctctggcctgtaatttgagaaggccaattggacttagcactcttgggcataggggagagcctcctggggttggtgaggactgagcccaggtccccgtttcaccagagctgcctgcactaaccccctggcatgttccagaaagcatcaaaactgcgaggaatctcaacaaagccagtctacatccccgaggtggaactgaaccacaagctgataaaaggcatccaccagagcaccatagacctcaaaaacgagctgaagcagtgcatcgggcggctccaggagcccacccccagttcaggtgaccttagcagccccctatgctgccccctgtggaaccctgcaacccgatgggtcccctaaatgttttgggatgggagattggggcgtgatcccgagcactggggcctgagtttcagggctcctgaaacatccgccctctgtctggaggctggtggggagtctgcttcatcctgacattttaggatctttcctaaagcatttttggggacttgatgttaatgcttggactttctggacagataggctcttttggcctgtgatcttgaggccaacttggatgggttttgaataagctagggcttgttattgtgtttggtgggggaatggcccgtttgggggagaaatctagaattcctctttgacacccccttttcatcaccccatatccaatccattgccaaatttcacttctttcaatctc

SEQ ID NO: 87110 - DNA, 1892 bp, Homo sapiens
ctcagggtgtagtgctatgagcagctcttgaaagtgaagcagttggcagccttggggtgttctgaggtctcttcttgctctgaggccagcaaggccggatgtatgtaggcctggtctttggcccacaccttatcttggccactgttagaggccaggtcgaagggcagtgtcacagaggtcaagtttgaaacatcatgagcagcttgggcttttcggattgagttagtgtggccttggtccctgcctccaacccctacatgtgactgtcactgggttgttcaaatctagattcaagatcaggttccgcccagaatatcttgggtggagttgaagagtctgggaagtggaagagagagccagagtatgttgagcctgctagttacgggaaggaaattttttttttctagaaatctccagcatgctcagtttgggcatgtgtctatgattttaatatcgggatcttagctgtgccagttactagtagtgtagctggggcaagtcacttaattgttctgtgcctcagtgtccttgtctgtaaaggctgggtaattcctacctcatagtgttgttcttagctttaagtaagttaatacaggtaaagcactagaacagtgcctggcatacagtaagtgcataataaatactggctgctgctgttatggtggtggtgattttccttcccatttctgtgcagtattcatctgagcagggaggtaggagactcagatattgattatgaaaattaattgaaatcagatgaggatattagcttccttcatatacagtttgcctttgtttctggaggtggctaggactgagcagatttgcacctgggcttcagcccctgtgagctacttcatctttttttttttttttttgagacagggtctcactttgtcacccaggctggagtgcagtgatgccatctcagctcactgcaggctcaacctcccggaatcaagcgatcctcctgcctcagccccctaagtagctgggactacaggtgtgcaccaccacacctggctaatttttgtatttttagtagagacagggttttgccatgttgcccaagctggtctcgaactcctgagagcaaatgatccacctgcctgggcctcctaaagtgctaggattacaggcatgagccactgcgcctggctggctgattcatcttattcccagcccttggtggtcccagtctgcagtgagccttggactctgatttctgtctccctgccctgtgaggctgacaaaggctcccagccttgttctgggattggcagatgcctctggagagaacatcctagatatcaggcttatctctctgggcccccttcccccttctcctggaccttgacttcttaatcctctgcttgattggctctccagcatcttttagcagatctccccgctgccccattatttggactgctttcctggctgtttgcagtgggaggattggtctgagtggccccacctgccattaccgaagcagctgtcccagctcgttctgttcctgtgtgagcttggccacctttctgtcctccttgcttgagtttcattggctgtaaaatgggtaattagagaaaaactcataataatataagctggcatttagtatgtttttcctaagatccaggcattgggctgagtacttacattgtttcaattaatcctcccaatagccctgtgagctggggacagttgtatctattttgtgtccaagaaaactgaggtgaaggacacagttgcacagctgggagttgggactggaaccctggtctgtactgtcctctgaaaaggatgaagggaagtagtaagtattagaatgcttcaaaaagctccaagcaggcaagactcgggtgacaggacttggggtggcaagacttggg

SEQ ID NO: 87111 - DNA, 1071 bp, Homo sapiens
tcagcctcaagagtagctgggaccacagcctcccaagtagctgggaccacaggctcgctaattttttgtagagatgaggtttcgccatgttgcccaggctggtctcgaattcctgagctcaagcgatctgcccacctcgacctcctaaagtgctaggaggtctttaaaggcgtgcaccactgcgccccaccatctgatggtgtttagtagagggttttgaatgtcaactatgaacgttggaggttacctctgttccctcacgaagtcctggtggcacccaggaggtggatatgatttagtttcattttactgttgaggatactgaggtccagagaaatgaacttagcctgacctaatgcagtaaatagccacgcaggcattgtgacccgggttggttcgatttcatagtttgcatttcttcccatggaccagcctcgtatccaggtccgtagagtccggagcaccaaacagtccaggaagcttgaggtcatgtaagcaaaagcctttggtgggccggagagttcctgtgatcaggaagggttgttattagaggcctaagagggagggtgggcagcgtcccagtaatcactggatcagagccacagggagagccaacactcttgcaccatagtgtcctccgtcctggccgtgtgactttgagcatggggtttggcccctggacctgggtcctcaccagtatagtgaggctgtgggactaggtggattcctaagggcctttcaggtctgcaatgtttttaggtggtttggggatcataccttccccttgtggcctcaaagcagaggctgaaatcaaaccaccttttgttacatcagcctaagatccaaagcatggcctgatttcatttcattctcacagcaccttcagggagaacaagacccgtcttcgtgttgtcagaggagacagtagcctgagcaaggtcagagttgggggtctgcatccagctttgtgtagcatataaacttggctttttttttcttttcttttagagacagggtcttgctatgttgcctaggatgttcttgaacttccggcctcaagggatcctccca

SEQ ID NO: 87112 - DNA, 1587 bp, Homo sapiens
gattataggcgtgagctaccatgcctggcctctttttttttgttttgttttttaattaaaaaaaataatagagatggggtctcactaggtttcccaggctgatcttgaactcctgggctcaagcatttctccccctcggccttccaaattgctgggattacaggtgtgagccacagcgcctggcctaaagagttactatactgcaattgaactcagtttattggaacccaaattattcccgttcttcaatcattctacacagacggaaaatttacgtggctgaattaaccggtatgacctcaaaatgaagtgcctaaactgggtattttgtctttttcctcagatcactgtattttggaaagagttgattgacccaagactgattattgaatctccaagtaacacatcaagtacagaacctgcctgagtatgacctctccaccttatagtttatgaatgtcttgtttgtgaaagtgactataacccaaacttttttttttttttaaagaggatttggaagttgtatggatttttttgttatcttcactttactgcataggaaacaatctacctcatcatttaaaatgacatgggtgtcggttttgtagatctttggtttttttgtcaggtttaatttcagttaacaaaatgtaaaacatgacattccctgcagatattgttgtataccagtatggtttcttctctttctttaaatgtttttggccatcaagtagcagtcgtcagtaggagtttataataccaagaatgtgctgcgtatcttgtctcaataagttttaagtaacatttaaaaatattaaagcatgttatttgacctaattttttagcatttgagttgttccattaaatggagcatcttgtaaatttcaagtattttatacttgcaattgttaagagttaacaggtagttggatttgtcgcagacaatgagttaaggaatcctttcacgtttttcccaactttaaaattaaggattctcaggtccctgtgtagagcagtgaaaataagatgtgcgtatgtgtgtgtatgcctggagaattggtgtttcacttcagtgagaggattggctgtgagcttcagaccaggaaatgtgtcatcttgccaggcacctggctgagtgtgctggagtgaggatcttgaacagaaacttccttttctgttattattcactacgaagctaaaatggccaaatatataccgtgaaaattggtttcatttaacaaaagatcagatccctccttcagctgtacacatttttaaataaaatcatattgaactaaacatctctaccgagttatcatgttgagtattgcaaattattgtcttattttacaataacgtgagagattacaattttctgtaataagaaggtttgctttgactgatgagtctgatgttgcaaagtttggttcagtggagttcatctgatctgggagccactgtgccagtggagatgctggccagttttactttgcatgacatgaatgtgtttcaaaatgtgcatttattgatttgtaatgagaagtattactcccgaaaggatgagagtaatgtgaacggtgggatctt

SEQ ID NO: 87113 - DNA, 1052 bp, Homo sapiens
aattctggtagtactaatgacagttcatcaagcttatgaaggaaagattttctctgataaatggctgagaagtccccctggtccagagtttttctcaggatcccccagtattgagcaccctgtgctttcctgtacatacccagccttcacattaattgacagtttgtttgtggttgttttcttaatgatataaattccccatagaggaacatttttaactattgaaaaatgacttactctctttcctccctatcttcttgtttcagccttgagagaacctgggaaatttgatttagtttatcacaatgaaaatggagccgaggtagtggagtacgctgtgacacaggagagcaaggtaggtgtgcttctcttcttgcgttgcttggccattcgttctctcttgaccaattacctgtggtttggaaggtgacattgcactacaggccctggggggaatctgaccttcttatggtgtggcaataccagtgccaaatcagggcgccatcttggccctcatagagcctatgtgacaagatgcacaaataacaaacttttctttaagagtgtacagttgtttaaaattatagctatataaggattccagtaggaaagggtagcatatttagaaactttattggcatacacgttcagagaagtgcatataactacatggcttgaacaactttcacatgaacatacccatgtaaccagacccagatcaggaaatagaacataacacccactcccagaagcctctattatgtccccttgctgtcaccactatcccccaagtgttaccacagttccaacttttgtttttttgagagagtctcactgtgttgcccaggctgaaatgcagtggcatgatcttggctcactgcaacctccacctctcaggttcgagcgattctcatgcctcagcctctggagtagctagaattacaggcgcttgccacctcacccagctaatttttatatttttggtagagacggggttttaccatgttggccaggctggtcttgaactgctgacctcaagtgatctgcccact

SEQ ID NO: 87114 - DNA, 1736 bp, Homo sapiens
tgcaccagtgcactttggcctgggtgacggagttgggactccgtctcaaaaaaaaaaaaagaaaagaaaaataaaaataaaaaaaagaaaacggacagttactttggagctcggcctaataagaacctggcatttaccttgcttttcagctttgttgatgctcttgagagcatcagccaagacattcatgtgcaccactgtggtggtatggaaagagccagcgtaattttaaccagatatctggacgtccaatagcccggacaaattgatacataaaattaagcttcacagagtgttgtggaattgtacagatggctgtcactaccctagagaacataaattgtttagtattcacctaaattaaaacaggagtaaaatcttattaaagaaagaagcccacattctgaaacaaaatggataatcagcattatcaccttttagggtaggtgacatgcatattgtagaaagattgtgagtttgaagttagacaaactgaagtttgaattgcgtttctgctacttatcagctctagatttggggcaagtaacttgtctgagctgtaattttgcgatctgtaaaattaaaaatacctactttgtgttggtgtttagattagagaaaaacgtattaaaaatgtttaggatgcagtagctattcaataaataaaactagccatttgaaagttgactgtgagtaatgctacataggccattttgccagaaagagtcttttgtctttaagtgatgtgacattttttcattgactgatggtagttacattttgtagagtcatctcagtatataactatgtcctggagatgtgtttataaattgctcactctagctttctctcttgttcttttgacagagttaaattagaagagagaggagttgctgagaattctgtagtcatcagtaatggtgacattaatttatctcttagaaaagcaaagaagcgggcatttcagttagaggagggtgaagaaactgaaccagattgcaaatattcaaagaagcattggaagagtcgagagaacaataacaataatgagaaggtcttggatctggaaccaaaagctgtcacagatcagactgtcagcaaaaaaaacaagagaaaaaataaagcaacctgtggcacagtgggtgatgataacgaagaggccaaaagaaaatcaccaaagaaaaaggagaaatgtgaatataaaaaaaaggctaagaatcccaagtctccgaaagtacaggcagtgaaagactgggccaatcagagatgtagttctccaaaaggttctgctagaaacagccttgttaaagccaaaaggaaaggtagtgtaagcgtttgctcaaaagagagtcccagttcctcctcggagtctgaatcttgtgatgaatctatcagtgatggtcccagcaaagtcactttggaggccagaaattcctcagagaaattaccaactgagttatcaaaggaagaaccctctaccaaaaatacaactgcagacaaactggctataaaacttggctttagccttacccccagcaagggcaagacctctggaacaacatcttccagttcagactctagtgcagagtcagacgaccaatgcttgatgtcatcgagcaccccggagtgtgctgcgggtttcttaaagacagtaggcctttttgcaggaagaggtcgtccaggcccagggctgtcatcacagactgcaggtgctgctggatggaggcgttctggct

SEQ ID NO: 87115 - DNA, 1024 bp, Homo sapiens
tgttgtagagacagggtttcgccatgttgcccaggctggtctcgaatccctgggctcaagctgtcctctcacctcagccccccaaagcactgggattacaggcgtaagccactgtgccagccttccttcccccaccccctttaagcttcagctacagtgaattaattccagagttgtgaaccaggctattttctcttgctgccctttgtcgttgaatattccttaccctcaagcatgtcagattccgtaagatttcttcagaacatcagggaatttaatttggaacagtaactgcatctttaaatcaggatattatgatttattgaataatgttcaactgtttcaaatgacaatttgaaataatccaaatttcaaagagttttttttccccctttttattgactgtgaaataggtctctattctctctgcaattcaaggattatttaaatgttacaattctaaggattgtgtcccatcctattaagtttactttctgaactgtctcttgcctaatgagttaataacttgtgctaactataattatactttaatgaatcatgtgggcattacattcttcataatgaagttaacaatgacaaaaacaaaccatgaaaactgttataagtaataattacaacacgatgacaggcaaatctttcctaaatgcttcaaatgcacagctgcatgtggcaaaaaatacctctctagtggcttcagtggcaaatgggcagaccgtagaaaaagatgaatctggaaagttcgtctttgtttttgttgttttatgtccacaatcattgtttttccctggcaaattcacttttcttcagagctacggaagaacacatagtctctattctcaaagtacccaatattgttggactgggacccaaataatgagtctcatgcttttgtatattaccttctgtgatacagacaattagactgaatagttagaccaagttatatggtaagtgcagaagctggttgagaaaagggagatcagcatggaacaaaatggttagg

SEQ ID NO: 87116 - DNA, 1249 bp, Homo sapiens
caaaacgtttataacatacataactttaaaagaaaaataatttaaaaaatacatatctgaaaatgaaaccccgctgtttgccaacgaccagctggcttaatctgacttcgcagatgtagcagtgttggaaaacgtcggttcttttgctgagggaaggaagagatgggaggggtagaaagggcggtggttattccctttagtatttcgatccggtcacacaacctaaatccaacatctgcatcaaatgtctcctttccgaaatactctccctaaaatgacagagaacctggccaggcggacagaacggcccctgcgcatttgcaggggtcctggtgggcttgccgggcagagggcgtgcgggtctcagcaagctgccgggtccgcccaggccccgccccatgcccattcaggccccgcccccgacccgcaggccccgcccccgacccgccccgtccgcctccgtcacgtgatggggcgccgggtccagcctgttgctgatgctgccgtgcggtacttgtcatggagctggcactgcggcgctctcccgtcccgcggtggttgctgctgctgccgctgctgctgggcctgaacgcaggtaggttcaagcaagaggcgcaccagctgccatgcctcttttttctccaggcgtgagagtttgttactgggtttgtgcttttgaaaacatgtctcttttccccggttcttaccttgtgtaattatattgcttttgaatctcactcttttttttttttttccttaaaaaattcaaagtgctttttttgtccttttctggctctgggtggtctgagtgcttccgttctctcctacgcctagatagaagctgtgtgcagaaatgtatgatttggggaaactgctggtcaatgaggtttccccgattcaaaggccatgattggctgctaaatgaggatataaggtcgttttattttaagctgaaatctgcggtcaaaagtacccttacatcctaccacgaatgggacatttcattgagataaggccctttcttttcttgatcaaaacaaacaagataacatcttcccccacagcgatcttttttggcaaaaaacagatttgtgtttaataggatgacttgcaaattgattttcagcaaaacctctcctagtctgaagcaagcactgagaattggaactggccacaagcttgccttgtgaccttaggcaagttgttgaacagttttgttttccttttctaaaatggggatcatctggcc

SEQ ID NO: 87117 - DNA, 1083 bp, Homo sapiens
gaccagcctgaccaacatggagaaaccccatctctactaaaaatacaaaattagccaggcgtggtggtgcatgcctgtaatcctagctacttggaaggctgaggcaggagaatcgcttgaacccggaaggcagaggttgcggtgagccgagattgcgccattgcattccagcctgggcaacaagagcgagacttcgtatcaaaaaaaaaaaaaaaaaaaaaaaagtgtttcatatttattgttaaaaatccaaacattacagaaaagtgtagaggaaaaagtgaaagcccctggcctcctatgccgctgttaagtttggtttcttttttcatagccgaggttttttccttattcctgcaatgtactggggtggctaaattaccaaactataaaacaaatcatctctagcctagcatggctgtctctaccaggcttggaatttacctgtacattaggcactcttctggagagtgaaattgaacttctgtttcaggagctgtcattgactggcccacagaggagggcaaggaagtatgggattatgtgacggtccgcaaggatgcctacatgttctggtggctctattatgccaccaactcctgcaagaacttctcagaactgcccctggtcatgtggcttcaggtaaagtagcttcccagcctggcctgaggtcaaagccaagtctcctctgtgtggctctttgcttgctttttgggctgatgtctcagcagtgaagggcggatttggtccagcagtgtgacctgggggttcggcgtgcttctgaggtaggctgaggcaatggtatagccaaggaggctaaatcagagggcgagggggttctagccttttgccagagtctctttatatttccagacggtcacaagaaggctcactgaaaactcctgatgatacatttgaatacatagtgatagaaagtgttttgaggccgggcacagtggctcatgtctgtaatcccagaactttgggaggccgaggtgggtggatcatacgaggccaggagttcgagaccaggctggccgacatagtgaaacgctgtctctactaaaaatatttaatacaaaa

SEQ ID NO: 87118 - DNA, 3073 bp, Homo sapiens
ccttcaaaaacctactacagcagacacctgggaccctgtgttatgcacgctggccatctccgcggcctcagacaccatggttgcaccctccagccacagcccccagtccttttctctctctcctatcctcctacttgtatcttgacttcccctttcaatgtctctcttgctgcccttctcacacctccccctcattcttatcgtctcttccttccctcacccctctgtggtcaactcccatatccttctccctttacagccttgccaaacccagccttgggtcactcccactgtccacctgcttagcccttacgcccaggctgcccatgggcagaactgcacacccaccctggggctgctgcacagcgtgggccccactcagggcttgtggctgttcctctctctgtgctcccactctcccggctgcacctattgctatgaatgttctccactttcctcagtgctcctcctccagcctccctctcgcattagaagctaagctttctgctctttttttttttttttggaaatggaatgtccctccgtcaccaaggctagagtgcagtggcacgatctcagctcactgcaacctctgcctcctggattcaagcgattctcctgcctcagcctcccgagtagctgggattataggcatgcgccagcacgcccggctaatttttgtatttttaggagagacggggttttaccatgctggtcaggctggtcttaaactcttgacctcgtgatccacctgcctcagcttcccaaagtgctgggattacaggtgtgagccactgtgcccggccactttctggtctttctttgtttttttttttctgtttttttgtttttgagacagagtctcgctctttcgcccaggccagagtgcagtggcgctatctcggctcgctgcaagctccgcctcccgggttcacaccattctcctgcctcagcctcctgagtagctgggactacaggcgcccgccactgcgcctggctaattttttgtatttttagtagaggtgggatttcaccatgttagccaggatggtctcgatctcctgacctcgtgatcctcccacctcagcctcccaaagtgctgggattacaggcgtgagccaccgtgcgcggcctctggtctttcttaagtgcttcctactcttgcctcagggtctttgtacatgctgtcctcttggcctgggcctttcctgtgcttggttccaacagaagtctcacttccaggagtggttgtagagtcatcccctacctccactccccacccccattgtccccaagcctcctagaactaaaagggccatatgagtgaggaccatggtcccagtcctgatgctgccactgcctgtccgatcttgtgaccttaggcacattctgggctctttctgggctttaatttcctcatcagcaagggacatggctggactgtgtcattattcaggatcttttatatgtaaattttataactttcaacctctttggaaaaggtattagaataaattctgctcttgcagtgtacagagaagccaggacaatgtggaaatttgatgcatttccaagaaaactgatgtgtgtccagactttgagtgtcctctggcttcttcgagttagtgcatagactgtctctgcatgcttctttctgcgctagtttattacatttagtacatttgtattgtatgaaaagcaacagcccagattatttgatccccgtgtgtgttaatctttccttcctgcctctccctttttttttttttgcggcggcgggggcggttggcctttctttgtttttgtttttttttctatgttcctgtcccttatttttaaaaatctcttttagcaacagggatatcatcaccacgctggtatcctcacatgtgtgggttttgctgagctagtagaaaatgatccaaagatgattggtgaccaaatgtctgattgcaacatttcgttttcctccgtggtacatagctccaggctgccagtctcctatttgtggataatcccgtgggcactgggttcagttatgtgaatggtagtggtgcctatgccaaggacctggctatggtggcttcagacatgatggttctcctgaagaccttcttcagttgccacaaagaattccaggtaagcaaagactcaggaacagctaagtaaagggctggcaatatcaactctacatccatcagcataaacctgaactgcctccagagtttaatgcctagctgatttcagagaaaactttttaattcccaagattgggttgtggacttttgtttctgtcatctctaaagttgatatttaacttgaaagaatgaccttggagtgagcattctaatcagacgcaataatcagatatggagtggtgggggaggaagacaaagcagatttgttttttctggtcattacgtgcaatagaaatttgaaattaatttgtgtgactcaaaaagcaatcaaggtagttaattctgtgtaattccttttcttgctagacagttccattctacattttctcagagtcctatggaggaaaaatggcagctggcattggtctagagctttataaggtaatggaaaataactttgttgttatggttttggacagaaaatcaattatgttacttttatgtactcacgtgctattaaatatactttgaatagggccatgtacatgcagagtacgattaaatctgtagtaataaccataaaaagtttttaaaagaagaatgaagattgccctgctagatctggaacaagatataaagcatgagtgagtaaaagaatgtggtactaacatagcaatagacaaataggttaattgcaacaggatacagaatccagaaacacacacacatatatatgtatgtgtatcatatatttgtattttatataaatatatatgatcatatataaatataagataacgtttcaaatcattggggcatggatataatgtcgataaatgttatggagacaaatacctatcactttggaaaatagaaaacttgtattcctgccttgtataaaatattaattctggatggattaaaatctaaacata

SEQ ID NO: 87119 - DNA, 2023 bp, Homo sapiens
gattgcttgagcccaaaagttcgagaccagactgggcaacatggacttagttcctgcagaactaagactacttgaaacctactttgagacactttgccttaaggagccattgaatacttttaagctaaggagagacatactcaaatgtgctttataagttgaggtccttgattctttgttggcgtgtctttcaatagcacttgtcttacctagtgatacagtatttaatagttgtgagcttgtctaaaccaaggtcaactactattctctttgaggacaggcattatgttactcacatttatatcttaagcttttgctgcctctagacccttagtaaattctcaatatgtttgtgggatgggaataagccaattggcaatatagccatttgcactgttgcaaactcattagtcatcttccttatttagctccttggcagaagctaatatctccaaactggaggagcaaataagatgtagagcagaaatgtgagggtggggaaatattttaagctgtcaaaaggcctagaggtccacagataagagcctccacctgcatacctacagcctgcctgtggggatgctgtcatcggcaatgactcacttgctggaccagtatcaggccaaattaatgtgccattagtcttaagagtcaacagaaaggcccccacacccttatcccaccttccagacactgagacatcagcccgcctcctgcatgggtacaggtgaattgaggagccttccaatccaaagccaccgggtttcttgcttctgtctctttcttctttagagagaagacagtaggtttgtctttggaaagacagaggtatgacatacttgatttgtacatatgtgatttcctttagattcggtgctctcctggggaccttacctgtacagcatggtaagtagatacacatctgcaccctctgggcaaacagcccagcagatctcttctggctgtgaccccaggaaaagagatgctggatgagtttgcctatgtggttgacactgctttttagggactagtcatccacatagagttggagacccaaagcaagagctcgcctcagggacaaattgaaagaaaatcagcacacatcacttttttccagatataagaaacacatttttccaatgccctaaatttttattacaaaaattttcaaatatgcagaaatgttgaaagatcacggtgaatacctacttaggttcagttaacaatttgctgtgtttcatccaataaacatgtggcttgtaacaatacactttgatatgtgagctcccgttctccttccttcccctctttctcctacccctccctaactgcagcaataccagattgacgttcccaagtaaagtgggtctttttgctcttggtttgcattccagtctcttctcgaagacaaaggtctggcagaggtgtctaaggttgcagagcaagtactgaatgccgtaaataaggggctctacagagaggccacagagctgtgggggaaagcagaaatgatcattgaacaggtaaaaaggggaaacactcagaggcgagcctgcttggctttttctggtgggtacagggcccatggttggtgttgtcaaacttggagtctacactgaggctccccacatatctgcaaatgattgcatgctggataataaatctcttgggtctaagcagtgatgtagtggctccttacagagtcagaaagccacccaggcctgcaagacttgcttgtccttcactaaatgtatggattctattaaaaaaaaaaaaaaaaaagactgtcttgcagaggtgagtgtgtggagaaaacacattcccttattgggacccttgccaagcaacattctgactccagagagccagaaggaaagaatgcgtaggctaaggacttgggagtgtaggcccctctgcagctctgttctccctgtaaattaacacctaggcccttggttttttccctgcagggcctgatcactgctcatatgagatgctcaccactccagggagagtgggctga

SEQ ID NO: 87120 - DNA, 1020 bp, Homo sapiens
cccaaagtgctgggattataggcgtgagccaccgcgcctggcctctttttcctttctttcttttttatttttttttgagactaagtctggctctgtcacccacactgtagtgcagtggcccgatctcggctcactgcaacctctgcctcctgggttcaagtgattctcatgcctcagcctccagagtagttgggactacaggtgagcaccaccacgcccggctgatttttgtgttttcagtagagaggggtttcaccatgttgaccaggccggtctcgaactcctgggctcaagtgatccacccacctcagcctcccgaagtgctgggattacagacatgagccaccaggcccagccaaagctctatttctttctgatccaagcagatatacaaaattaaacctgtccttggataagataaagagccatgtgtccttctgtttggcagctttgatgataggaaaatgaaacaaacagccaaataaacttttatatttcagaacacagatggggtgaacttctataacatcttaactaaaagcactcccacgtctacaatggagtcgagtctagaattcacacagagccacctaggtgagtgaaccttgaagttattaaagtccctgcctcagcctccatgcaaaaagaaacctgtttattaaaaaaaaaaaaaactttattaacatataatttgcataccataaaattaactcactgtaagtggttttcagtatattcccagagttgtgcagtcatcactacaatccagttatggagcatttctgtcaccccaaggagatcccacgtgtctgcttgcagacagttctcattcccactcccagccacaggcaaccactcatctgccttctgtctctctagattttccttttctgaacattttatataaatacaatcgcacaatagttagtcttttgcactggcttctgtcacatagcatgatgtttttgaagtttagaaaccagcttccatacaccaaattacaacatcagttcaagactg

SEQ ID NO: 87121 - DNA, 1022 bp, Homo sapiens
tcaaggtgacgcttttccttttccagctgaatctgaaaccctccctcttgctgtgcagcatccccagcagcttggtaaagatgtcctcatggccaggcgtggtggctcacacctgtaatcccaccacttgggaggctgaggcgggtggatcatgaggacaagagatcgagaccatcctggccaacatggtgaaaccctgtctctactaaaaatacaaaaatgagctgggcatggtggcgggtgcctgtagttccagctactcgggaggctgaggcaggaaaatcgcttgaacccaggaggcggaggtttcagtgagccgagatcgtgccactgcactccagcctggagacagagagagattctgtctcaaaaaaaaaaaaaaaagatgtcctcttggccttacttccagccctttgactcactatctaccagtttggttttagtttgtctttgtcagcgccacgtgagacacctacaacgagatgccttaagccagctcatgaatggccccatcagaaagaagctcaaaattattcctgaggatcaatcctggggaggtacttatatgacctaattaagtgccgtttgtacagttatggggagaaaagaggtgcaaattcagagacctgaatttgtagggtgggttttgttgttggtgatgataggttataggtaaacaatattactatccacgttttgtaggtgagcaaatagatacagagacagtaaatgacttgtcagggctggatgcagtggctcacgcctataatcccaccactgtgggagactgagttgagaggattgcttgaggccacaattaagcaacatagtaaagccccatctctttaaaaaaatagaaaaattagctgggcatggtggcatgtggcatatagttctaactacttgggaggctgaggtgggaggattgcttgaacccaggagtttgagggtacagtgagctatgattatgccactgctctccagcctgggcagcagagagaaaccctgtttcttaaaaaggg

SEQ ID NO: 87122 - DNA, 1050 bp, Homo sapiens
aggtttgatctggtttattataaggtaggcctacctgttcagaacttgaaacttggccctggtgttactcaaaaaaacaggaaaactgacattggcccaaagcacaatttattccctgagtgtaccagcctaatgagtatttcctgggcctctccctccctgtttccttggacagtagcctattccaggtgtcaattcctcattaaaaatggtgcctgctgtcatcacaagctctcaagagaatggaccacatgtgctatttatgtgtgccttacacctgaccagtcggcacaaatttctgggctggttcatccctgtttgtgaagcatctgtgcattcagtcgttgttcggtgctggagcccaagatgctctgggctgaaaggtacctcctgttttggcagattccaagctactccctctttctccttccccatgtgcaggccaggctaccaacgtctttgtgaacatggaggaggacttcatgaagccagtcattagcattgtggacgagttgctggaggcagggatcaacgtgacggtgtataatggacagctggatctcatcgtagataccatgggtaggaattgactctgagaggcacctagaggcagttttatgggttcaactggaagggaactggccttggacatgtcagtcttgcggtgggtgatgttgaaatgccaggtggaaggccatttcccattacatccgtctaccccgaccttgattattcaaagggtggggagctgcacgtggctgtgacccctcagaagcctgagcctacctgggtttgggggcccttaggtatgattaaagaaaagaacaccacctgtctctaccacaaaacttagacattttcctggttattgggcaaatgcgctgtttaattaagggagagcctcatttttgtgcgacatcacagtcgatgttgaccactgcagagtgaattaaaactaaaccctaatgactgtaaccctgaagacccaggggaaatggtctttgtggaatcctgactcctgccctatcacctaccacctgtttaatttgc

SEQ ID NO: 87123 - DNA, 1408 bp, Homo sapiens
cttccttcttccttgaacaggctaggtctagtatcattagcatgacccttaccaagaaatcaacagatcagctccaaatggagtagaaggttcttgtcttaaatgctgacttctccaggtccctgccacccagcccagtcagggcccagaagagctttcatccagtgcaggagtcattttcaggaaggaccctctctcagggatgtgcccaggtgtctgcacaggttgctgtcacagagctggctcccttttgggagcaaggtttcaggatgttgcctctgaccccagccccaggaatagcaccaggagcactaactcagatgttgtttttttctaggttccttctgaccaaggggacatggctctgaagatgatgagactggtgactcagcaagaataggatggatggggctggagatgagctggtttggccttggggcacagagctgagctgaggccgctgaagctgtaggaagcgccattcttccctgtatctaactggggctgtgatcaagaaggttctgaccagcttctgcagaggataaaatcattgtctctggaggcaatttggaaattatttctgcttcttaaaaaaacctaagattttttaaaaaattgatttgttttgatcaaaataaaggatgataatagatattattttttcttatgacagaagcaaatgatgtgatttatagaaaaactgggaaatacaggtacccaaagagtaaatcaacatctgtatacccccttcccaggggtaagcactgttaccaatttagcatatgtccttgcagaatttttttttctatatatacatatatattttttaccaaaatgaatcattactctatgttgttttactatttgtttgacatatcagtatatctgaaacaccttttcatgtcaataaatgttcttctctaacatttttaatggctgtggagcattctactttatggttgtactctagtttatttacaaaattcccagttgtttccgacaagtataataatttctagtttgttgctattatacatagtgctctgttgattcaccctgatagttagatttttttgtacctccttattttcttagaataaattcataaaagtgtaattatttagtcagaggattgccacatttccttaaaatcaaaataattagctcaggacttttaactttttattcatagctcaagatctacataaggaggtttgatgccgtggctcacacctataaacccagcactttgggaggtcgaggcaggaggaatgcttgagcccaggagttcaacaacagcctgggcaacatagggagaccccatttctacaaaaaaaataaaaacattagccgagcatggtggcacacacctgtagtcccagctactcaggaggctgaggcaggagga

SEQ ID NO: 87124 - DNA, 1378 bp, Homo sapiens
cacaagggcgaggggcggggcctgcgtcgcgctgcgggcacgtcgccgcgcgtcttcagtatttaatgtctctgtgttccacccgcctgggctagcacgtgggggagctgcggaagcgcggcgctgcgggccgggccgcggggcacagccgggggccggcggcggcgcgcggactccgcatcccgcaccccgatggtagccgaggagctggtaggtcgggggcagctgcgccggggaccccctgccggagacccgaaggcggcggggtcggggcgatggggagcctgaggtgcaggtgcagggtgcgacgcgccctccaggtaccccgggggcgggacgctccggacgcagaggtgtcctgggggctctcggccgccgcgcgctgtcaggcaggcccatctttccctccctcgtctgcgccccctctcgtccttccccgccggttgtctgcccgcgggctcctgacagatcgcgtgtgcgcggctctgggcggcgctctgcggccgcgccgtcctccccacgcgcgtcactgtcctcgggggcggggggcgagggcgcgacgcccgggtcgcctctctgcacctcaacttaaccggagcgtgcacacccgcctgcgaggctgacccgagcgcgtcccacccaaggtcgcccagccccgcgggcgtttacttttcaaaggtcgtgtgtacacagtctgagccggagctgccccttcacttctggagcctcgcccaacttctcaccctcggctcgcccgccggcgcagcccctgggagttccgtgcggcgagccaggggaactgggaagatgggccgggacatcggccggttgtgatccaaccgtgtttcgggctgagggaccgttcgaaccgaattggggtctggaggtcggaggctcaggggcgtctcggggggaatttgcattcgtagcccctgcaggcgtgtccggaggggtggaggccgtccagcctggggtgtctgccgacctcacgcccgggggccccgacggtcacgtgtccggccccgcctgcggcccagggcccggggtctgcgatctggagggaccgcgccagttttggggttacgatgtgctaggagaggcagtggctggatgcctcgaacgcgggctttctggcgttcaactcttttgtgccctagctgaaggtcttcctgtttcccttccagggagggataggagaagaaaggtgctgatcgtggtaggcggtgctgtggcgactcggaacggcatgggagccctgggcgtttcgggatcttcctctcctgggggatgtcctgggtggcggcgccttcctgccgccgttaacacaaacccggtggacttcgctccaggtgcgagtcgaggcctctcaagctgggta

SEQ ID NO: 87125 - DNA, 1437 bp, Homo sapiens
gctgctggacctggtgcaacagtatctgttagttactgatcaaggaacaccgttcacaaaaagctattaattctggcaactagtagccttacaagctcttgtaactgctaagtccttcccaaattagtaccttttttttttttaactctttatttagaaagcaaagcttggactcttagcaccacccatccactttgctcttaaaggtacagaacatctttgaaatgaagaaggctgcctgacttgatcatttatataattcctctgatcttggcattgaagtggttcacctgctgattatttaagaccctgagcactggaagcaagtgaagttatgttttgggaaccttttgacttgtgttgaacttttctttaacctctaactagttttgtaggttctgcataattcttgggtgtattctctttgaaatatggccctaggttagaggaggtcctctggatcctacaggcatgcaaatcactaaagcttgagtccattactggattaataggctctgtcttcatgcatgttgtcagatgatggctcagaacttgcaggtaacagatcctagccaatgagtgagacaggtctaatggatttgtgtctaggtctagttccttgtaggaatatctctcccatctcccagttgtttctaggaaatgcattctcacttggccactgcagggtgacagtggaggtgtctgttgtaagtggcctgctcaggtgctgaagtcgatatgtctccagtgtaaggttgctgaacatcaatatttaaaagcaatttatcttgctgcctggtaacccaaattattcttgagctttggacataggctgggttgcagccatattttaggggaaggctggtgttagcctctacagtattcccttttcctgtcctaaagacaaatggagatcatatttgtgatactggggactgtgataggtgcttaagcattgctcttcccctctcctccctgaacaatccctgagactgactttgtttctcttgaattacttgagtgacttgaattctattaaaagcacccctctccttagcctctgacccagaagcttgtttgggaggaaaaacgaattggtttccctaagctttgctggctagcctcctgctcccagcctgcaacatgacttgattgtgtgtgcatttcagggctttgaagagcaggcagcttgtagccaatgtacccagagagctggccgtagagttcccctaggtcactccttcctaatcttccctgtgagtctgaatgattgggcctttctgtagcttggtctgttttcctattgtggggaagtcagttgtttcaggtatgagttaataccttcagcttgtcattctcaggcgttttcttccactatggggaggtagtagatcctgtgggcatcttgtcccattgaaatcatctcatatactgttt

SEQ ID NO: 87126 - DNA, 1072 bp, Homo sapiens
atctcagtgcggcccttctcttaaacgaggttgtgttttcattctgctgtttccagtccacctaaatgttaggggccattcttcacagaaggtgttgggggagagtggggccacagcgtggatgctaacgtgttctgttgtggcaggggtggggagttctttgtttccagatgccccctcttctagtcctgggtgtgctttgtttgaaccctgctagattgacctttggtatatataatgtgagatctcttttcttggagccaggcagcataaaggacacttactgatgagcacctactggcatattagtggcttttttttttctgtgtcatttttattctctgtcagccctatgaggttagtacagtgattagtttgtgggtgaagaaacaagatccgagtagagtaaactggtccctggacacagcaagggctggactggcttggacctgggctggggcgtgctccccacctcctcctctgcccctgccgccccccatgctcattggttgttgcttatttactgcccctttatcaccacatcctcattcaggaaactaaactgggttttacaaagattaaaatcattgatcccacatatggagtctgacttaagtgtgttcagcctcgttacaactctgtgagggagatattccctattacagaacatcttcattttatgggaaactgaagtacaggatcctactcttaactctcttgtctttccaaagccatattttatcatcagaattatgcaaccatcgggtgcttttgaaatgcacaagtaatgactatgaataaaaaaagctgtgcctgagggctcagggaaactgctctgaagactgagctgattgaaaaagacaatcctgaagtcactaatttcccgacacctgtcagacctcacttggaggtcacagaccatctcctggccctccaaaggctgtcacccagcagtagctggcctcctgattagaggaggcagtaagatcttttcaagcacagccccagcccccatcccttctctggcctgggcctggatgtgcctttgtgaggttgggtcgatgacagatct

SEQ ID NO: 87127 - DNA, 1183 bp, Homo sapiens
tttttgtagtgatggggtctcatcaccttgcccagacccatttcaagactcctaggctcaagtgatcattccatgttggtctcccaaagtgctgagattacaggtgtgagccaccgtgcctggccccataacttcatttttgtgtgaagttgcccagcctaaaggctggccactaaatggacacttaaaaactctctaatagtgtggattggtgggcagtctgattcctctggcttaaaccaaaatgcaaacatgaaaggaggcatggccatagacccccggtgagaattctttactgtgatgacacagaagctgaagagggatgaaaaagcagtttgaccagcaagcttgctggttccctaggccaccctttcttctctccttttcagttcctccttccctctaacttggagctgctaactccagcccatctaactgtttctgattaagaaagcttcaagccttataaggccctctgttgcctatggtttatgttggctggagagcaaggttgttttttgcaaagtctgattcaaagaagtggcaagggcttacgtaggctgtgtgtgtccgcctcctggggctggactgccttattggaacaggttcctttgagggagcctgagagtaaggggggcttattatcccttacccttagtggtggctctgtaaggctaatgtgtggtgtggccacagggcttcctggcaagtgtattcgctgagaacttaaaggtaaaagcaagcccctgtttacctacacagtgtacctgtcatgctaccagccacagaggcatcctgtttcaggaatcaagtctggaagcagcttctgcttattaattaagaactaaagccccttggctcttcaggcacatcgctttcccctctggagaaagtttggtggaccgtgtcccttggggttcttgcgagtccgactggccttccgcgcagtgatgttggagagccctttttctgagagccatgctctgcctcatcttcacctcccctcttgctacctcttgagtcagccaagcctgttcctgccttaggactttggcacatgttcttcctgcctggaactttctccccgctctcctcctgcttccccccagatcttggcacagttctcaagtgttccagttctgatgccacctcttccaagaggcattcccgcctcattctgtct

SEQ ID NO: 87128 - DNA, 1116 bp, Homo sapiens
gtagctgccagctgcaggtggagagttcaagttaacctaaagtagaattcagtgccctagtcacactggtcacatttcaagtgctcagtaacctcccatgactaagtggctgccagtattggatagcagtcactcttgagggtcaccgagacctttacctcttgtgacctactctactttaccatgttgcaactgctgcgactatggctcctgtggcaaaggtcaaactctttgtctcgcctgaccagcacttcagctcctaggatttcttcctgttttactttgggactcactgttccctcccatgcccaaagatattagaacctcaatttatgtcctgtccccctccctacccacccactgcagcctaaggaaatcctggccctctttgagaaagccttcctgggctccctttgcccacttctcagctgcttgtggcgcaggggtgtgtgtgtgagtgagtgagagagattgattcttccatcagaatcgtgtgcttctggtgatcagaatcttctgcttatagcaacttaaacatatttgaatgaatgagcaaggtgaatgactgtgacctgatgaggaaataggtaaatgcatctgatacaagccaagaggcgcttttggaatcttgcggagaactccgagtttgtgattttcctcgaccaaactcccatggaagggagtatgcctctgcctggccacagactgctgtcattctctgaatgcagtggctgaagtgctgggctttaggttctgattccctgcccttggaagacccccttcaaggggaagagtccctcagcaggaacttaatgagctgggcactctggaggtggagtgtcttgggcaggctccttcctattggtagaacacctggggacagcctttgtcagtgtgaacactggaataatggaagaaatgttcaaattccagtgtaaatgttcattcagaacgcaaagtggatgtggcttcactgaccaggcccaagcccacattgggcttgttgggcacttggctcctaagctgttgtttttatggtggactttcccatcagttacatgcggctctttttgcagtcactgcagccaaattggcttagtcactgggaccaacact

SEQ ID NO: 87129 - DNA, 1451 bp, Homo sapiens
cagtatgcatctattcccaggcaaatggacctgctaaaaataagcaggcagctatttaattccaacagattcaaaatgacagagtgtcctccccaccaaccctagggcagggctctgcagcatccttctgggaggcttttctctgactgcagacaggtctgcccttagtcctgggcctgggggaggagccagcctttgattagcttgtgagtaggaaggctttggggactactgtgataccacttaaatgttgagaagttcaggtttacaaaaaaaaacacctcagggcaaagagagcaactccgaagagtctggcccagtgcaggaaggaagatgtcagaagagccttgtaaggctaaaggggtatgtgtatgtatgaaaagaggtggcactacctgggcactcaggaaagcctgatgcattttataccacctcttgtagccctgtcggaccacgtaaattgggcaaaatggcatcttaccaattccaagaagtctgtttgactgaggtgagagtggctcaggggtgagggagtgaggggctagctgatttttttttttttttttttgagacggagtctcactctgttgcccaggctggactgcagtggtgcgatctcagctcactgcaagctccgcctcccaggttcatgccattctcctgcctcagcctcccaagtagctgggactacaggtgcccgccaccaagccccgctattttttttttttttgtatttttagtagaggcggggtttcactgtattagccaggatggtcttgatctgatctcgtgatctgcccgcctcggcctcccaaagtgctgggattacaggcgtgagccaccgcacctagcctagctgatttcttgactagtgggaagtgggggctggtagaggggcatctgtgaggtgtctcctggcaatgggtgcccttagtgagacccagccaaggcctgctgatcccagggtctcttggctctgttcttgttggaggatggttcacatctctaggcacaattccctggtaacaaggaaaaaaacacatcttccactctgctcttcggggatctggtaatctctgttctcaagtgctggtggagcgcttcaagccaggcagtttctgttcctggaagcaatggtgtgagaagggctttatcttgagccactcactgcatagaagcagtgacacctggttcctgattgctcagccttgggtctctggctctagtccagagtgcggggtgaaggctggggagagatgggcactgggaatttaggtgggacatcctggattctgtgggttgggtgaaatgggtagcagtattcagtgccttctaggaggccatccctggcttggaaatgttgtagaaaccatgttttccaggcagtaattcttcagtagctccagtgactataggggtgactctagaggtggtggtctgagggcttagag

SEQ ID NO: 87130 - DNA, 1122 bp, Homo sapiens
aaatggttagaattagtgagttcagcaagtttgcaggatacaagatcagtgtgtagaaacttcccctctcctacaactgaatggcttgttgtgtgtccttcccagtttttccatgggattatgtgaacatagacattccatacacatggtggtctgtacctttttgttttacgtatccaggtgattttttccatgtcggcacatgagatcaacttctttcggtaacatcggtatgtcagtggattccataatctacctagcagtgattcccctgaaatgtttgttaatcccaattttgtttcaaatgatgcctcagcctgtgcagaggtacgtgggttaaaaacattttgaaaaaaaattttttaagggactagtctcactgtgttgcccaggctggtggcaactcctggacttcagcgatcctcctgtctctgcctctttaagtagctgggatcacaggtgcttggctttgtggatttttctttgttgtggttttgtttttgtttttttaatttaaagatgccaagtgtgggatttcagagttgtaggatgtggttatgagcttttaagagctatcataaggctctccggaaaggtagtacagacttccccttttcttggctcatatagcgcctcttccccacagttctagaataatgggttccagatttaatgtgggagagaatttaggtacccatcccttggctgtatgccttgagcttttttttttttttgagtctcgctctgtcacccagactggagtgcagtggcactatcttggctcactgcaacctctgcctcccgggttcaagtgattctcccgctcagcctcccgagtagctgggagtacaggctcccgccacaactcccggctctctctcttttttttttgtatttttagtagaaacagggtttaacatgttaaccaggatggtctcaatctcctgacctcgtgatccacccgcctcagcctctgaaagtgctaggattataggtgtgagccaccgcacccagcctccttgagctattttaaccttcaagatagtaattcatttggctgggcaccgtggcctgtcatcccagcactttgggaggccggctggcggatcacctgaggtctcg

SEQ ID NO: 87131 - DNA, 5247 bp, Homo sapiens
atggctccagctctaccctgttgactgtcttgcatgtgcggttgccagtatcctcctacctggctctgtaacatccctcctccccgctctcctgctctccccaggtgtaattacttcaagcctccaggatggcaatccagttccgttcgctcttccccttggcattgcctgggatgctggcgctcctcggctggtggtggtttttctctcgtaaaaaaggccatgtcagcagccatgatgagcagcaggtggaggctggtgctgtgcagctgagggctgaccctgccatcaaggaacctctccccgtggaagacgtctgtcccaaagtagtgtccacaccccccagtgtcacagagcctccagaaaaggaactgtccaccgtgagcaagctgcctgcagagcccccagcattgctccagacacacccaccttgccgaagatcagagtcctcgggcattcttcctaacaccacagacatgagattgcgaccaggaacacgcagagatgacagtacaaagctggagctagccctgacaggtggtgaagccaaatcgattcctctagagtgccccctttcatccccaaagggtgtactattctccagcaaatcagctgaggtgtgtaagcaagattcccccttcagcagggtgccaaggaaggtccagccaggctaccccgtagtccccgcagagaagcgtagctctggggagagggcaagagagacaggtggggccgaagggactggtgatgccgtgttgggggaaaaggtgcttgaagaagctctgttgtctcgggagcatgtcttggaattggagaacagcaagggccccagcctggcctctttagagggggaagaagataaggggaagagcagctcatcccaggtggtggggccagtgcaggaggaagagtatgtagcagagaagttgccaagtaggttcatcgagtcggctcacacagagctggcaaaggacgatgcggcgccagcacccccagtcgcagacgccaaagcccaggatagaggtgtcgagggagaactgggcaatgaggagagcttggatagaaatgaggagggcttggatagaaatgaggagggcttggatagaaatgaggagagcttggatagaaatgaggagggcttggatagaaatgaggagattaagcgggctgccttccagataatctcccaagtgatctcagaagcaaccgaacaggtgctggccaccacggttggcaaggttgcaggtcgtgtgtgtcaggccagtcagctccaagggcagaaggaagagagctgtgtcccagttcaccagaaaactgtcttgggcccagacactgcggagcctgccacagcagaggcagctgttgccccgccggatgctggcctccccttgccaggcctaccagcagagggctcaccaccaccaaagacctacgtgagctgcctgaagagccttctgtccagccccaccaaggacagtaagccaaatatctctgcacaccacatctccctggcctcctgcctggcactgaccacccccagtgaagagttgccggaccgggcaggcatcctggtggaagatgccacctgtgtcacctgcatgtcagacagcagccaaagtgtccctttggtggcttctccaggacactgctcagattctttcagcacttcagggcttgaagactcttgcacagagaccagctcgagccccagggacaaggccatcaccccgccactgccagaaagtactgtgcccttcagcaatggggtgctgaagggggagttgtcagacttgggggctgaggatggatggaccatggatgcggaagcagatcattcaggaggtaggagggtctcgggttcgtttagaggatggggcgctcccagtatttcttggagaaaggctgccagtctgcctctcccttctgctacttgtgcagcaaagtcatagtgctcttcagctctttatcgcaacctgcagaggtctggacacggcgtagagctggtgggtaactgaggagttagattgccctgaaaccccaagtcatgggagctgtaacttggttcctcaaccggtgaccttccccagtgagcccttcccaaggaactagcgccaagttgggctcgctgattaacattagtgtgcctctttttctttgtttaaaaaaattattattattttggtgcagatggagtcttcctttgttgcccaggctggtctcgcactcctgggctcaagtgatccttccgccctcggcctcccagagtgctgggtttataggtgtgagtcactatgcccagcccatttttttttcttttttaaacactaacctctttgtgtgtgcgtgtgtgtgtgtgttttaatggagaggcctccttagctttacttcccttgagtgccaggtatgggtgtgagtgttttgaatggtttttatttccttttaatcatgtgcttgttcccatgtcttcacctgctttccttctccagaagctcttacagggtaagtgcccaaagaacggccacagctttgaatacttgtgggaggcttgagcttcctgagttgtcgctgtcacctttgcagaaagcctcagccattttctttctgtgcagttgcagctccacccccgggaaagcggggcactttgataacgaggtgtcctgggtttttcgagtgctgaccccagcgtagacagttcagaccgctaacttacaggtcagcagctcctgaccctgcttctgcaggcaccctggggtgttttcatttatctcatggagagaggccacgaatatcccgagtggctctctgacttgtttgtcctggagccattccctcccatttcagctccgggtaggttgggaatctttattgggaattttaccactttcagcagcatctagtttgtaccacacgctacattttgtcacctccaagatgctgttaagacactactgtttttatgtaccttggaaagaaaaaagtgctgccagtcatgattatagaaggcaagatactatatgatgcatcctaatctcgggatgtttaaatgtttcttaaaatactgcatctgaaaatgggtgatttttattttatttattttttaagaataaaggagtttccctttgcttactgcccctcagctgaattaacaagccccgcagccttgtctgccaactctagatggatagtagtagctactcagacctgttgaagtcttctgagtttaggcttgaacctaagccgtggtgatgggcagggaggtttagggatggcacgtggaaatgaggtaatactgtccacgagcatgcggtgggtgccaagcacgaggttagtgcctcgcatgtaccttcatgtcagccctgctttgtttgtgaggaagttgaagctgagaaggggaccagggaccaccccactgagggagctggaagctggcctttgagtgcagcctgctagagtccgggtgtggttctgagccactgctgggagccatcgggatggcaggtgttagccagtcccattctgtggggcagaggctggatactgtgagtgagcagagctccccgccccctcgcccagcccctgtcagcctgttatgcttcccgcaggctagccaagcagtcttcccccagaaggggtacttttccctgcatgaatcctgttcgaagcgcctagtgttaaggggggaagtcattttgaaggtgattcttccttagctgggagcaggatctcttgggccttagttctctgcatccagtgtatgggttacttggcaaaggattatactcagggtttggagaaaccatgtggaaggtaacctaattggtagactctcaggagtgatctatttctggtgattgagtcatccatatttaagccagggccacttctcttgagctgatctggacccgcttttttgtgacggtccctttggcacgctcttgagtgagagtggaacagcccaggtcgggagcagagtctgttcccattgggttttcttgggcatgagctttggctcagtcttttgaccaagggagtatttgagccagaagagtgttcagagttgcatgaatcaggcctaagcaaagggaaaggagactctccttttttagtccacatatggcagaggaacgagcgggtccccgctaggtataagaatggggccctcaggcaggccagtgaggactttgtctagctctgctgggctgaaggccagtacctatgaccctgggactgggccctggggacaggagactgacccttggtctgagggggtaggatagttggaagggtgtcaaggtgtttgtggtccatcggtctggctctcaggaccatgtggacctcaagcgtgtctcctcccccgccctctgggctccccttccctgggcgcagtctgtctcttccaagttcaccacttgtgtctctgctccagcagctgtggctgggtgcggctgccaattaagcaagtgggactgtaagtgacaggctaaaattaggtgtatcgacacccccagttctcctttcattggggttgttctgagccttctagactgtaagttgacagtcacctgccaagcttgaggagcgggtgtggggcagggcctcctgggaatgtgagtttgggaagttcttggttactggctgctctgagtggggtctgtgtgtgtgcgtgcctgctgcttcttcccctgcaggttctgacaggaacagcatggattccgtggatagctgttgcagtctcaagaagactgagagcttccaaaatgcccaggcaggctccaaccctaagaaggtcgacctcatcatctgggagatcgaggtgccaaaggtaggggcggagtcccccaggctggttctgtggtaagcccaaagctccctggggccagggccattagacctcagggagggagggggctgggagagggacagtaaaccagaaggagccctgggtcagccaaaggccgcagggaaaggacacgctacactttgccaaggctcagagagcttcctgcaacatggaattcctccagctgcctccaggagcatcttattcttgtacttctcaaactcgcaggcctgtgtgtctcccttgggggtggttcttgcatattctggggctcagatctatttggaaaaaaaacaccaaggccgtgggggccagccagaatcccttcactgagctctgctcaagtgctccaagtgtattttataattgagcaaagcataaatccatattttagagaacttgaaaag

SEQ ID NO: 87132 - DNA, 1808 bp, Homo sapiens
gagcccagggttcttagaccttcattttcaaatcgagcccctttatctttggatctgagtagacttgagggagaggggcacgagaaatcgagaaactgtgtgctggtgaaacttctcagcatggcttttagaggagaagatgctgctgcctttgcagctttccgggtctgggccacattgttgggatgaaatgggaactgcttggtcctggagccagactgcctggttcgacttcctggttagcagctgtgtgaccttaaggtagttacttagcctctctgggcttgtttccccatatacagaatggtgataaagttatctgtgtttcacaggtactatgagtaaatgtaagtgcttagaatagtcctggaaaataaatgctgacatggtaacagctaatatgtttgagcatgatcttgtgtaaaacagaagtaggtctttgggtgtccagggaattggtttccctttaaccctctcatctctttttgtctttctggaagcacttagtcggtcggctaattggcaagcaggggcgctatgtgagttttctgaagcaaacatctggtgccaagatctacatttcaaccctgccttacacccagagcgtccagatctgccacatagaaggtcagtaacatctgctgcttgtattgcctcttacctgaaatattaaatagaagtgaatagcatctgagtttcaattgctatctttttggaataggaaaccctgcttctcatcccagggaagggagcattaggtatcttccctgcagccttttccccatttcaggtgcctgcgggagactcaggtccctccctactctgatctttggccaggagaagtgtgggtgcttggttgggcggggcctgggtcctgggttcatagtgcccaccaccccataaaggcttctctcaaagcagaagtgccctgtgtgcaattcccccttggcattttcacagctgcctgcctcttctgttgcattgaaagcatggatcataatggcagaggtatcatttgaaaggcttagatgcctttcttcctaaagcagagcttaagtgttttgttacctcaaagatgcacttgaactctatgcaaagtccagtggagtggggtctgtggctgtgtttttgtgagtgtgggtgtgagtttcctcttacagtgattgtatgtcctgcccccatccgctatttaggctctcaacatcatgtagacaaagcgctgaacttgattgggaagaagttcaaagagctgaacctcaccaatatctacgctcccccattgccttcactggcactgccttctctgccgatgacatcctgggtgagcgtgctactgggtgatccggacttcttgccactttcccccaaacctaccccaaacaagaaactccccagacctcaggctaagaaggccaagtgcacatgagtgcctgcgccctctcttctctggcctctgctggtcggttctgctatgggactgtgttctggggacagggcttaggtggtgatagcgctggcaggaaaccagaggcctcttggtccccacatgggaggactacttttcctggctctccccctgggcaccttttaagttttctaggcgtttgcttagaaaggatggtgtagttcggacaggagattgggtgtgtccagggtcgccgttcaccacctgagacctgggtgggactagaatcatgggtttggatggcgcttgttctttcttctggttgagtcaggccttaacagtggccctggtgaaggatctccttccccttcccctccccaggaggtgcctaaattacaaagaa

SEQ ID NO: 87133 - DNA, 1041 bp, Homo sapiens
gctggagcacaccctaggtatgaggatgctgagatctgctgcacttgatttcttcagggactttcttttaaatgtaaggctggccctggcccccattccccgagtgctatatttacttggtttattcctattcatctgtgtccctcttgggtcccagaagttttggagtaatggatctagactgaatgcttctcagtctggatggcctcgggggcggcacacttgctaggctgaacttctcacatccaggtttttccctcggctggtcttgggcttgggggaggctttgcttggggccggttgctgttcctgtcccctgcactgtggaggttgcaggcctctgagaggtaacgcagggaggtgggtagtggccaggtggcccttggtgccctgccctggcccaggcgttccacgcactctgctccctaccctgcagtaacggtcatctgtgccgcccctggtgcggacggggcctggtggcgagcccaagtggttgcctcctacgaggagaccaacgaagtggagattcgatacgtggactacggcggatataagagggtgaaagtagacgtgctccggcaaatcaggtgagcggagatgcctcaggcaggcctacgccctgcttgttctgggatgcgtgatctctgcgtggctggctcagttgtgccagggcttgggtgagggttacttcttccctcctgctgcctactgtgttttagcagagtctgatagaaacaaactcgattactcgcttagccaaactgagctagaaggcctgtattgtggaagaatccccagcatcatccttcaaaagtgaagctgggccaggcgtggtggcctgctgcaaatcccagcgctttgggagggtcacttgagtgcaggagttcaagaccagaccgggcagtatagcgagacctcatctctacaacatcaacaaaaaaggaaaaaagtgaagcaggctcctttttaggaatttgtcataggaagtccctctgaggtcaggcttgcagcagggtcggctggctgtgtttgggtgtgctg

SEQ ID NO: 87134 - DNA, 1045 bp, Homo sapiens
cttgggaactgacctttcaatgccttctttcctgtggcttggccctggattgaccagcagtatttaaggaaaggtgcatgaagtagctaatacttgatattagtctgttctcacattgctgtaaagaaatacctgggactgaataatctataaaggaaagaggtgtaattgactcacaattctgcgggcctggggagacctcaggaaacttacaatcatggcagaaagggaagaggcacgtcttacatgatgggcaggcaagagacagtatgtgaaggaggaactgtcagatacttataaaaccatcagatctcatgagaactcactatgacgagaacagcatgggcacaccgcctcatgatccaatcacctcccaccaggtctctccctcgacacatggggattatggagatgacaattcaagatgatatttgagtggggacacaaaacctaaccatattattctttccaccccccttcttcaggtgacaagttacagtccaactggtcttcctctgattcagctgtggagtgtggttggagatgaagtaagttctgcccttcttttccttctgtgttgctggcccgaagtaatggattgattaggagctggtcctgggatttgtttcctcttgagttaatcagaggatataactgtagacaagcacctcctagggaacactttggatgtcctgattggcagtggtgatgtcagtgtcctctagtgggtagaggccaaggatgccactaaacatcccatagtattcaggacagccccccacagcaaataattatccaaccgcaaatgtcaatagcgccaaggtggagaaaccctgtgcgagactttctgggaccttctgtctgttgagtttttctgtcctctatcttatggtatgaaagcttagatttcttcagcatattaaaaagcctatcctggccaggtacagtggctcacccctgtaatcccagcactttgggaggccgagacgggcagatcacttgaggtcaggagtttgagaccagcctggccaacatggcgaaaccc

SEQ ID NO: 87135 - DNA, 1551 bp, Homo sapiens
gcctcagtaactgggattacaggtgcctgccaccacacctggctaatttttgtatgtttaatagagacggggtttcaccatgttggccaggctggtctcgaactcctgacctcaggtgatccacctgcctcagcctcccaaaatgctaggattacaggcatgagccactgcgtctggcctacactgttactctcatacatctgttgcctgcagtggcaaccggggaggggagaactcatgttggctagggagatggccccaggatgccatggacaaaagctttaagggaactttcttttctaggtggtgttgataaaccggtccctggtggagcgaggccttgcccagtgggtagacagctactacacaagcctttgacccccatgctgcttcctgagagtctttttttgcactgttgaaattgggcttggcactcaagtcaaagatgaacatcggaataacaaacattgtcctctccagaaagtcctttctttctccatactgtagtcctattgagaagacatttcgtctctgagaaaaaaggatggaactatgggttctcttcgcaaagccaaaggatagtgtttaacaagccagctggcttatgctggttctcagctgtttaaaaaaaaaaaaaaaaaggaatagaaacagtttcaaccagattgtcctattccccctgttccattcccctcttcttccttctatctccttccccggcaaaaaccaaacaaactggcagacaggccagggatgtatgttgcttgcttgagagggtttcttttacttcaaaatctttcttcagggagcaagacatgaactgactaattggtatccactacttgtacagcttacataaatgagttgatgatatttaaccagtttttataaacttcatttaggtctctaaacacagactttttaaattgcaactgtaaatatgaaatggtcatcacatctgaccttggtcagtggggaggggaactggtatcctgccaagcctggttgtaatttgtaaccattttctatttgtgcaaactctgtaaatatgtgtttaaacaaatgtaatattttgtacaagatacactggagaacaaagggaactcaagattcttccagccacatgtcacctgtaggtagaagtaaactctgcagtgcagcttctgctcttggcccctctggccagggcccctgtggcttcctgcacactggacaggtgactgtatggtagagactgtgatctgggaactttttgctgtacaaatctgtttaaaaaaaaaaaaaagtaactcattgaattaacttgcagtggtgtgtttgattcttttttagactggcttcagcattgtgcagtttaaaaataagtaagtaacttacataaatcttcaattgtatgaactgcagctttgagtccatttttttccagtggtgaagaattggcggggggggggtggtgagtgtggcgagctggatcacaggccccacacaactgcctctgcaggagacccatggttttttgaagacaatttggccagaaatttctatctggcc

SEQ ID NO: 87136 - DNA, 2714 bp, Homo sapiens
gggtgaggagccgcagcaagctccccgcgcctcccctcccccgatccacccgccccccgcagcccatgtgatccagggaagtcggggtgcgctccccctcgccctgcgccctgccggcccggaggcggggtcccctccgcccgcggggttcgcgcgccacccttgtgggtccggccgtggggggccgagtgtgcgcgcgcgggcaggcgggggccgcacgggggtgcgtgacgtcaccggcattggttacacgacgttctagaactccgccccacgtgcgccggggaggagggggaggaggaggaggagatgggggtggggaggaggagggggagaggtggggatgggccgggggggcggggacgggggggtgtgcgaggcagcggggctgagctaagccgagcccacgtgtgacggctctcgccgctgccccggctccgccgctcgcagagagattcggaggagcccgggcgggggggaggaggagggggaggagggagcggagatctcggggctcggagccggccgccgctccgctccgatcgctgtggggcttggttttttgggggtgggggggcgggggggctcagatatggaggcaaatgggagccaaggcacctcgggcagcgccaacgactcccagcacgaccccgggtaagtttccagccgctgcccaccgcgccgccttgggctcgctctccttgcagcggcggggacggcggtgcgcggagccgggcatctcccgcgcccccccgcctctcccgcgcgccccccccgtggaagttacacacctttggattgcatttcgccgtcaccttctcccccaccccacctcccggctctcgctcgctcgctcccccccgctttccttttagcttttgtaagttacacgtcaaaatggccgatctgacatcggtgctcacttctgttatgttttctccctctagtaaaatgtttatcggtggactgagctggcagacctcaccaggtaagggagggagggggggacgcctgggtcccccccttcttggcttctttattgctctttgttatcccggtgtaggagcccccccccccccgccattggctccccacttctcctgtgcaaggttattttttttaaatagcaaatcctttctgagccctctatgcgacctctgttgccgaatttcccccgcgtgtgcaaaaaatgcaaaaacaaaacagaataacaacagaaaactacttttggattttgtccttgatcaaaatttgcattgctttttttttccacaccttctctcccccccccatctctctctttctctctctacagatagccttagagactattttagcaaatttggagaaattagagaatgtatggtcatgagagatcccactacgaaacgctccaggtaaaccattcccttctggattttgtctttattttagaacaaagtttaagttttatttttggaggtgtcttcggaagtagctaagcggattagaatggggctcaggcgcgtggctgatctcgaacggcgctctataccacccccaccgccccctagtaaccccagaggttattgttaattggagctgaactctggatacagagatacccatctctctgcttttaagtcattttcccgtcgcttctttttctctgtttaaaatgacattcagcttcatttactttcgcatagtttttttttttcttttgatcttaatgtgtgtttcccccacactcccagctccccaaactcttaagatccctcttagaaagatggtggtaaatctcttctaagtgccgggctttcttcggaataaaacaaagcgttaagaaagggaaggggaggaggagaggaaactgaggtggccaaagagtggaggcaccagcattttccaagttacctccaccctccctgcccccgttccacttcccccgttaaccttgatgttttttcttgcgaggtggagggctgtaggcaggaggggaattggaggaggggagtgggaggtgggggtgcgtggggggcaacttttgctcctcattcagccttaggtctcactcctggttgctttcaatggtgtcacattttcttgtttgtttttctccctctttgtctcctttcagaggcttcggtttcgtcacgttcgcagacccagcaagtgtagataaagtattaggtcagccccaccatgagttagattccaagacggtaggttgctttttgttgttgttgttcgccccttttcaggaacgatctgggcattgacagccccatttaaagggacagtgccttcttttgcttctgtgctagaactgggtagttttaaactgagctagcgagttggctcaaaagtttgctgctgtggctggctttggggttttctttttagagcctgtcccattgcagcttcagaggctgccaaggttaggcttggggaggagagggttcggctcctggagagtctgccttcccggcctggggactgtgcagagaaactccaccagagagcaaatgcaacttttctttgtcagccaagcacagcacgcgttaccaactgtggctgtggggatcagctttgagaaggcacagcctgctttgtggccaagggggacagcagtgggaaggaggggagagggcgctaattacaggtccaggcaacaggtttctcttggggcacttgggatttggaatgtgctttgggaagggaaggggacgctg

SEQ ID NO: 87137 - DNA, 1059 bp, Homo sapiens
atttcgtggctagccatttcaaaaagctagtgaaattaaagaggaaaatcttttcaaggcaaatttgggaatttatcatccaccccctcttgctacctgggtgggagaaacagtatttggtttctgtggtggctggtgggtcatattcctctgtatcaggtgcaaagcctgcagtttccctctctgattgtttatagacatgttttggtcactattatttagtgtaacctagcttttgactttgtttcaacgttcagtgcaggaggcagaagcggttggtttattgacatggaaacgaggatcttgtttactgttaccttaaaagctttgtttaggtaacggccattcacatccaaaatagtaccctagtcttttcctagaggacttgtagatacagtaagtagagctgtacctaactaactaatgttttaatttttggtagttttcttttttgtttgttttttaaaaaatagttgacagggatgtgcaaaaggttgggatttgccatgcttaacttgacccttcctctccttcagagatctcagcgtgtaaactttgcacactgaggaacttcgatcatgatataatgctctgatacggccacacaccatccaggagttctgaattggctttttcgttttgtgatttaaattttctttagtacttcactttcttcattgcaccttacttcttccagctcctggcacctccctcaacataccccacacctgttaccccataaacaaggtgatttctgattgcaattgtgtgccggccaactaaaaaaaacaccctctggggagtatttataaaaagacacctctgtcttacgtacgtcaacagaatggaaaatccacacctgttgtatttctcttgtagacaagcgctagtcagtgctggacacacctgtagatgcagtaatgttaatctttatgaaagggtagttttctagatcagagatttttgtctattttagtttttgaaaagtaatctctcatttctcaggtgatgtttaaaggtagggaatgcaatgcagacttttattaggtctttaagccc

SEQ ID NO: 87138 - DNA, 1022 bp, Homo sapiens
gaccctgattgagcatcatgcgttttgcaagtgtgtgatttggactggaggatgtttttccactcggattgaggttggggtaggggaattccctacttgttgcactagattctgactacttcttgtattcagtaacttttttttttttttggtgccctccccatgatgggatttcttttctaatttgggtttaggttgcttatagatttttactccctgttgtttttaaaatccaggtggatttagctcacatgcttcattttctttacttcaaaaaattattttttatcttttgaggtatagctacagaacagatgatctttttggttaatcctgggtaactttacttttgctaaaatgaattaattaactcaagcagagcactgtgttggatgtctgtggggagtttttggatgttgttgatttaaaaaatttttggaagctcctttccctcctgtgttgtttagttatcatcagggagaagaaataccatccaattacctactgctagagaatacttacatttaattttcaggttatgatttttttcccaatgataatgatgctcccatcttttctcccagccacgcatagcaaattagatgtagataccatttaatattcagtgtctggaagaagaagcccttgcctaaataagaattacatgagatctggtttattaagagcatcacacactgaaatgcatggtgggtcatttcagaaaggctagctagctatgttagttacctgatctgttggagggatggttaaagttgagatcaaagtttaagaaacttttgagttgcctgagaagttactaaaagctggattataagcctgagaaatgagtgattaataattaggtgattaatcatatattttttccttaaagtactttattgactcctgcttttctattttttttcccagattgaccccaaagttgcatttcctcgtcgagcgcaacccaaggtaagtaggagaataaacagtaggattttagcactcagagatgattgcca

SEQ ID NO: 87139 - DNA, 2019 bp, Homo sapiens
taagtcagggcatacttgaaaccaacagtgcttcttatttgtgcaagtgctggtgcctgggtggagaagtcctgaaaatgttgtaaccttgtaggagtggcactacaagacttgcttaaagaattgagatagggcttcacttttttagaagtgtgtcgttaacatagttttcactgagcttgccaggtgtggctatgagaacacagttgcttgaagcctaaggttaaattggaagggcttatggcttacatgttacatttacactttttagttactatttttcttccttatgtagcactggaagaaatgctttttatgtatcttcgggatttgtcattcttttagggaaaggggaaaagttgaagcttctaagtcggaaaaggttgtggctttagcaaattcagtttatttctttatgcacagtctcccagaagtggaaccttttaatcgtgtaaagagaggaatggttttgcacattagtatagaaaaagttggtgattgtgatggtactttgagaatttcaggtctggggcataccacttgattgattgattccttccttccctccttctttctctccctccctccttgttctcttctcccttttttaaagatggaaacacaactttttaagtaaatacaatgaaatattttcttcaggcatttttttgtaatgcttaagcaaatgataggaattaatgattaggttatttttgtacttagcacaaactttggaattgcccttattgttttagttacttcccaaactgtctgtgatccttcacatttcagagggcttcccagagttagcagtatttcctgggtttggaggaattgctgtttcttccataagtgtgaatcttcaaatttccaggttagtcatttgatcactcagagcttggatcagattacccaagagggaagctggaaaaatcccttacttggtaaaaccatgggtttgacctgtttttctctcccctttgttgtcccccttccttaactttgtttttaaatgagaaaagcaatatttcactttaatacactctgcagtgatgcattcaacttgaaaacgagacagaatgtttctcaaacttgtcaaagtgtgcattcctttcccaaccctcaactccacatctggaatgtttgtaggtgaattaacatgaaaccacttgggggagaacatctttccatgaattctagggatttaataataacaccttactgtgtatgacatacttcactttacggaggacttggctgttcattatctccatctgaattccatctcctggggcatttggctgttgtccctaaccttctctcagtctcagtgtgctcatctgtaaagtaggagtgatgacatagctctcccagaaggtttttgtgtagagtaaaagagcatggtctgcgacaaaggtcttcgtcattgtcattatttttcttgtcggttttctcatcattgttccggttgttgtttgcaagtgggacagcctgggttcggatgctggtggtgccactccttagctgtgtgaatttgaacaggtcgtttaacttccttgaaccttcgtttttccatctcatagagtttttctgcagattacgtaaattaataaaggtaaagggactgaaaaaaaaaagacgttgcatggtaatgccatagaagcgttaacctgctatcttatttatttatttatttatttttgagatgggatctcactgtgttgcccaggctggtcttaaactcctgggccaagctatcctcccacctctgccccccagagtgctgggattataggcgtgagccactgtgcctggccaacctgctatttttttctgccatttttattaagtcctcacatcaatcctgtgagaggttgagtaataataatgatactagttgaatttatatgccaggcactattgcagagactttattaatccatttaattctcatgcagccctatgaggagagtactagtatgagctcattttgtaaatgaggaaacggaggcacagatg

SEQ ID NO: 87140 - DNA, 1263 bp, Homo sapiens
tgggcccttcaccactgtgccatgctgtgggggtacctcaggggatggcccctctgctatgcgacaggagatgggctcggagaggtcagcgggctgtgctgagggaaccatagccagaggcccagtactttgaagttctgcgttcctgggcctaggtgatttgccttgccccatcatgttataccagtgtgtgacactgtcttgtatcttttgatctgacccctcaggccatcttttcagatggttctggagttactcaaccccagtgaggcaacagagtaaatgccaaggttgtatggtggttgggaattgggacagggtggggagaaagtgtcttccctgtctacggttattttccaatagaatttgagcctggccaccgggatttcagactggagttagcgctgggggccaaaacccaggagcatagaactttaagtcgaccctgatttatttatcgattatctcccttcaataaaacttctgtgtttttgtgttcaggtcacagtggcagagggaaccctgcccctcctcgtgggatgggcgaggagcttgtaaatgatatgtcagtgtgtgtttcagttaaaatgagtttctctgctttctggctgtccctccttgctaacgctcgccagagaaatattccgtggaggtgttaaaacaagactagtggaaagaaatggtaacttaaaaagaaagaaaatccatggcagtgaagaacagatttcatattagtactgtcataatattctctaatgtatcatataaataaaaatctgtttagaccagaattttaataagtcaccaaaggaaggttttgaatcctacagtttatgtatccccctttgcgatgtaaatgttcacatctcaagtgaagtagagtggggagacgcttcggagactagaggctgttaattagtgaggtatattttgatcagggcaagaagactggttcattctatatcttcgtatttctctggatgattatttcattttgtaaaatatgtaagagttcccccccagccccttatctttttaaaaattaaaatggtcatgctcttctaaaaagatgacttaatttgaaggctttggagacatgaggatgatggggatccatcactccctgttctttgctccctttggactggagtgttggctgtctggaagagttttgcttgagctcgtgggttattttcttctatgtggaggaaccaagagactctttagcatctttcagcaagagcgaggtctgggtgtactcac

SEQ ID NO: 87141 - DNA, 1787 bp, Homo sapiens
gctgggattacaggcatgagccaccgtgcccgaccagataattattttaatagaataaaaaaaagtacaatggtgaaatgactgaaggaaaatcttaattggaatgtaagctccctgagggcagggaactgttggtggctgctgtttggtaactaaatgaacgaactgagtccagcctgcttttttcaccgtggaggtagctgctacccagtaaagttacgttggttgcttcagatccacacttaggttgtagcagggctgagctagcagtcaggttttcctgttcctgtcttgtcctctgacgtggcttcagggccctggaaggttctctgctaagcacgcatccagatgggtgcaatggcagcccgagcgtgtacacgcacacctcctgttctgggggagtggtttcttggcagcttctcaagggcgaagggtgagttttcggcatctggccttcccttgctgctgtgggtcgggtcattctagcatcttgccatcttggatgatctgcagctgtcatctcggcagccaccatgaactggcctgccagtgggttttctcgttcccagcgaggatgtggtggtgtgtctgcagcccttttccacagcagcgaggacctgggaggattagtggcttagcttctttcttgtcggtgagcaccgctccttcctatgttccaagtcagtagcaggtgtcagcttaaggaggaggggcaccttgtcctacaaatgtcctttccctggattttgccgttcctcacatgctttcgtttcattgttgaggtcagtctcctaggactatgaagctcctgtgttctttgtcagatgatttttggcagacaggtgagcctcctctgctgcccgggaagggaggagaaggcagtctcggaggaaccagctgaccatctcaggtgccgcttggggcagcgtccattctttgtgtcctattttgtatttttaaacccggacaatcttcggccgaaaaccccgagaacacacaggggagatgtagttcatcatctctctcttcccgtttgatctagtgtgttcatttaacaagagctgggttaatccttgttcattgccaactgtatgcgtgcacccacttttggagggattcaggaaatactcggtgcttcctgatgtgcatggaacacagtctcgacgtcttagcttggtgcttaattaaggtccttcaaaatctgtaccagggtcttttccaccttatctctcaattcttctagtttttgctgccttgaaactgaatgctcacccttctttgagaaacctgtccttttgcagatttccctctctgcactgcccttcccttctctgtacacaacagaccctctttgaaagcccagcttcatcattatcttttccacgaagctgtccctgcccctttgtggaaacagtcatacttctttggatttccacagcacttaccttttctttggttaagccccttccaacaataataaattagcagaaacttgtggagcacatacatctgttgcatgttgtgctagacattcactcattcatttattcaccaaacaagcaccgaccgtttgccagatactgtgcaaaattcgggggatagtgtggagaatatgacaaagttcctgctgtcaccaaacttttgctctagtggggcaaataagcagtgagcaaacagataagtttatgacatgctctcaggtgtgatcaccaaagccagggaggagcgatggcgggagtggggtggaccatatctatggtacagtcagttgccactttcagtagttc

SEQ ID NO: 87142 - DNA, 3839 bp, Homo sapiens
ggtgggtcacgaggtcaggagttcaagatcagcctggccaagatggtgaaaccccgtctctactaaaaatacaaaaattagccaggcatggtggcgggcacctgtaatcccagctactcgggaggctgaggcagagaattgcttgaatctgggaggcggaggttgcagtgagccgagattgcgccactgcactccagcctaggtaacagagcgagactccatctcaaacaaacaaacaaacaaacaaacaaaaaacaccccatccttagcccttacttctgcacttttgtacatcgtggacttccatttaggtagagcgaatgaaaaatgccagaagaaacacagttcttgtctttaagaacatcattagctccaggttgggaggagggggtgacctgtgatactggaaagggtgggataagcacagtagaagaggtaggaacagcattttgaggaagggcaatctaagcttctaggaagaggtggtctttgccccaggtcttgaagatcagataggaaggaataatggcaggaatgctgttcttccttccggctaggcactaggaaaggtcagggtgtgcaggtgttgcaaagggtatgtgctgcagagtggcctggcatgaggcttgcaaagtaggttggagccagtttgtagaaggcctcaagggcccaataaggcaaactgacaggtgctgtggggaacctgttgtgtgtctgtgcgggtgtatggggatgccctgtggaatgttctgagctcattcagacccatatagaagctggggtcactgataggaccatggcggatgctgttgcctggagaacttccaacctgggcttgtggcttaagcttaatgcaggctatgttctctctggccagagtctctcttgccatagactcttcttcttcaggagtgatgctcttagcagatgccacctctacctttggggtgtgtggctgcttacaaagagctctctcattctcttgtttctaccttctgttctctcctcttttcctccttaacaagggaccatgatatagatacaattccaaagtcctgtactttgtccttgtttaagccgtgatcgtgacctcaccatgtgtagacagtgagatgtcatttctcaatgtggacatcacagattgcctgtataaccccagtgtgtgtcccgtggctcagagcagtctgacctgtgacttcatagatggtatctgcttggggtcgcctttggctgagtgtctgcttggtgaagaatatgcatttttggaatcatgatctctgctttccgtgtggtgtgaagtgcgcaggtgtggtcttggggctgagcaccctgtggtatgttgtagcagcagcctcacttggtcggtccagctgggacagttgtcccactgggtccagagtaggataagatattttccattctcccttcttttgaagatagcaccaggcttccaaccatctggaatgttagccttagggtggatgcctggctgctatcttgctttattttagctgtgagattttgaatagttaaaaagaaaaatcctaattcagaataatgactgtcatttattgtgagtttatatgttataggcatagtaccgagactatacacttagtcttctttaatccttacaacaatcctttgaaatagttggtattatctccgtttgacagtgggtaaactggggcctgagagggcagacagctttctagaaccatagaactagtaaggttcagggttggcctttggaccaaagtctctctgaatcccaaggctttgttctcctctctgctaagccttgctgcatccaacatgagtgggcagagttgaggttgccactttgcctgatggctataaaatgctcaggctgaggaatagaatttgtgatagtctagctggaaagcttcaggttaatttttgttacctgttttctgagagcttgtttagcataggtaagtgccacttaccagctatggcattttagacaagtcacttagtggttttgcacctccacttgtacctgttaaatgggatagcaaccgtccctccattgtagaattgctaagggtaagatggactgagctactgcatatgaatggcctagggtgatagctgcatgttgtgggtacagtataagcattcatcatctgttactgtccccgaaaaatgtccctgcccccatcatcaggggaccttataaccgagcagctcgtgggttgattagcactgttgctcctttctagggtgagggatagaacagcacattgagattggaaaattctgtgtcagtggcttggcctgctcatgaggtcctggctctcgaggcgagatagcatgcagcctttatcttggggatgcttgatgggcattaggaattcatttccttttccgtatctgatgcctgtgtttttgctgcctctgagagtaaagtcccggggagcagctagggaacagctgagacactgctgtgtgagaggtctccccatgagtcttctctctccctgtactggtctttatctgcccgggggtagctctaccaatgactgatctgaaagcatcacattcatttatttgtcactggctgtgacaggcaagttaatgctaatggattctttttttagcctgttgtctgggatgagtttctctcaaacgtcctgaaatctaaggcattaggagaatgtgtaacttttatggcaggggaggatttataaaataaatagggttttgtgtgcaaggaccttaaatttaggttaggggtatgagcagccaaggagcgggggtgtcgggcaagcacagagtcttctttttaagaaatccattcaagagctctaaattgctgtttctgtttcaattatgtgacaatttcaagggtttagaaaaatctaataaaatggtcttgatgatgcattctggggagagagtgcttcagaagatctaggagaataaattccttgggggtcaagagattctcgttcctgccaccttgggccttccttcatctgggtttttacatttttattgttttgaagggcagaaaatggtgtaggaatgtattcagggcttcatccataccctccaccgaaatgaattattctcttttggcaattgcaaaatagacgggccactgcaatctttttttttttttttttttttttaagctgacatattgtaaacgactttcagaccatgatttgtgtgtgtagtgatgttgaataaagcaccaaagaaaagaaactgaaggaggggaaagagtgaggagggaggcgctataaaagtttttttcttttctgccatcaaagcttttgatagtttcctaaagcacagaagtttacaatggaagcgggcttttgggccgcctaggggaacagagtgcagaaagacctagtgtagcaaaatgtgatgctgagtgacattaatgaggtgaccgctctggtgggagggaggcaaggaaccagccaagtagcagttcccatgacttgctctcagctgagtgtttccttctgcatgcttgcatgggcgcctgtgtgtgtttgtgcatgcacacgttgtgtttcctaagtcttcagatggaatttttaacaacaaaccctgtttggtttactgtggtgttctccaccctaaagaggccgtgaatgttgagttttgtcctttattcccacctgctgaaaagtaaagttttcaacttagcggcattttgtttttactttctggatacctgccggagcctggctgggcggcgtgtcaggccaacatcacagagctgggcactgttggaacaccaaaccaagagtgtgaaaagtcaatattctcatttctgaaatgaattccagggagag

SEQ ID NO: 87143 - DNA, 3472 bp, Homo sapiens
aaagtaatccgtatttccatgttgctcttgtgcaagaatttccactcactcaagaacaagaaaagctgcaaccttgggggtagaagaaggtgagaaacctaggtcttgctgatttcctggataggagctcgagagtacctggctcagttgcgaactagtttcagaaaggaagctcgtattttcatcccattcctcgccatggcattagagtgaccattctaaacagtactgggcgagtgttctgaaaaactgctgcgacatcttaagaaaaatagccagatagggcctggtgtatagtggagtgggtggaaacacagtgtgtatttactgatacactctattttttaaatccctttcaactcagttccctctgggatatctctcaaatgtgtcctttttgtagctagaggcaaacaagcaaaaaatgtttcaactttcagatatactacttaataaaaactaactagtggattcatcatgtcttctacctggggaaaaaggatcaaattaggatgcttgcacctaggagagaattgggttgtgaatctccacgagattgctacatgtatatgtttcctcttctgttttccaaagaagataattggttttagtaagaacttctgacttgattagggggcccttaggaaattagagtgtgtttgaatttcacaagtataattttaattatacaaattttgcattttttcactagggagccaggttcagaacttgttttcctgtactaataggggtagtaaagctgattatggcagaatgctttacttaaattgctttgaaaataaaaatccttggatttgatcattgtttttccctgcagtacacgatgttcaggttaatgtccatacacgtcccatattcttgttaaaaatgatttttttttttttttttcttttactggattcacacaactgcagaacagactgacatagtggggatgtgggtggggggggggacctcattatgaatttttctgctgcacttgctgaaagaattcaattaaagttcttttgagcacaagtcctgcctgggcagtttgcgtttggcaggccatcgccttagcatgttgtgattgcctttattgccacgtcatcctgtttgctcaaagcctgtgcattcacagcattagccctccaagcggcccctctgcagcatgaccccagtggattagagtagaaggtgccgtggaaacagtcacctgggtctttccccaagctataaagagacggtggagtgaggatgatcagaccccctgggcatcccaagagaaggactgattgtgttcatgggaaataactgtttttttcagggctatccagacaaaacccccaagtgtcagagcgggggaactgctctgagagtttgaactcaagcatcctcaaacatctaccccagtgtggggctctaaaaagcttcctagagacctgctcctggggccttctgggccttgtctcagatattgacaggagagattcaatagaagaattcgttcacaatagagaaatcatgaaaccagcttgtgaatgacgtgatgccacataggccggggcctgagaatatgggaaaacaaaactgcaaatagaggctggatcctactcaccccccatcaccctgcattttacacattgaagtaaaatgttatttttactgtcgttatttttattactttctctccaggtgttctagctgagcgtttaagagcatggactctggaaccagactttgaatccttgctctgccactgcagctgtgtgaccttgagcaagctatctaaatattctgtgcctttgttttgtcatctgtacaatggagatgatgatggtatcaccttcatggggttgtcataaggattatgggacttaacataataaagtgtttagaatggtgtctgcaacataaggaagtgtatgggtgtgtgagttgtggggttgttagaaaggagcacgtcctgtggcaggtttgggtaagtgctccgtgcctgccttacgtagtagttggagaacgctaagtactgctgtcttctgccttacgtatttttccttaagtaatgtttgagaaatacaaaagaagacacacacacgtggttgtgcgtttatgcatataaatgtatgtgacacgggtagaattgcagtgtaatttggattcagacaaattcatgtgccataacgaagtgtgtggtttgttggcagcacgggctttggactcagagggacctagtttgaaacttgataactgccactaactctgtgactttaggaaggtgttccagcctttctgggtttcaattctgtacttaaaaaaaggggaatagtagggttgtggggattaaatgagccagtataaataaggcaccaggtgtatgatgaatactgagaaaatgtgaattcttttctccataaacaacaaaagaaaaattttaaagccatctcgaacatgggaaagatacaaagtgttctgttcttgctggtgatgagagtatctgaagttagttgataagtccttagaggtctgagtagagaaaagcaggccataaaagagggtgttgtcatccttaatccacatgccaaagggctgttttagcaacttcatttcacaaaagccacattttcaagggcagggaaatcatttcagttaggaaccttagatggtgtccccagcctttgaagatgcctttgttcctttgacacttggtaggaactgggagcacagggctggatggtccaagaggagagagtaacttcagagacatgaaagagccccagctaggagggagcgagggagaaccttgggattgagggcaagggttactttttcatagaaacttttgcttggggatatggaatagtaggttttgatctacaaacccatgagccctgtcctgtgagtgggaagaagattggtagagctcaggaaatgaacacagttcccagccattggcctgggagatgctgacgctcagacctattgtcggggctgggaaagcccccagaccccttggggcatcccctgtatgtgggtccctttcacttcatgtccactgggtggaatttaccaggtattgctgggaacggggaacaagatcatgattataagtggatcctggacaggggatggagtgcgtgtgaatgttagtgtgtagaggacggaaagggaaggagagaaggggtggccaggaggagggaaatagcagtagattacattgactaattatagggaaaaagccatatttgctgctccattaagtgatcactaggctatgaagcagtttattgtaattaatgcagaaacagcaagtaagtgtttgagtttggagtggagggtcttcaggaccccctccctccttcagttctctgtgctcactgtctccctcccctccctcaaattcattatccttggagagaaagagtcttgggggagcatctctttgggaagggctgtttagcacagtcttgga

SEQ ID NO: 87144 - DNA, 1124 bp, Homo sapiens
tcattaaacaacttattgcatgattcactacttttctttttctttcttttttcttttttttgtgagacaagatcttgctctgtctcccaggctggagtgcagtggcacaatcaaagctcactgcagccttgaattcctgggctcaagcggttctcctgcgtcagcctcccaagtagctaggaccgcaggcacacatcactgtgcctggctagttttttaaattttttgtagaggtgggtatctcactttgttgcccaggctggttgaactcccgtgagctcaagtgatcctcttgccttggcctcccaaagtattgggactacaggcgtgagccacagtgcctggcctgattcatgattgaagtaccattaccataaatgctatacatccatgcattggatgttaaagggatcataacaaaaaaaaaaaaacagtgtcctttgggttttgggaaggcttcctggagaaataacgttgaggctgagcttgatgtagggagggaagtagcagggtgcatttcatgtgctgagggaagagagggtggctggaatgcagagagtgaggaggacagggggacaggcgaggtcacacttgcgttggcggggataaaaattcttatcttaggagggttggggaagccatccatttaaaagtttaagggatgggatgggaaatgatcaggtttgcgttttgaaaatatctctctgacagtctacacgaaaagtggcttgtgggtaccccagggggctgtgggggaatcagtgagtaagttgttgtggtgatccacttgaggaaggatggctgcttagctgagttcttggaggtagtgatggagaccagtggatggatttgagatgcatctgagaattggagcagcagcttggtggtttggttagttgaggagtagcaagtgttaaaggtgagaggcaaatttgacttctcattgatgtgagcagagcccccaacccccacctccgtgagattgagagtgttggcccatgcaggggacaggcagggcaggtgtgcctggctcagggggttgagtgtaaccccttggctggcaatcggcatactcttagtgacggacccctattggtaaacttgtttttgagcttgcactgtat

SEQ ID NO: 87145 - DNA, 1668 bp, Homo sapiens
aatgctttaaaaagccttgtttcccaatatactgcgtttcagttttccacgagtgcagccatgctcgggagaggcgtacgagctgcttttacatgtgagaggtgaacaaatcaaaggtgagcccgttctgcctcagtgaggccttttgtgtaaaaagggccttctggagtaaagcaatcaggttgactgacaactgccgaggctaccagtgacagtcctgctccgtgggataacttggagaaaaatcagggccaaaagcagacaaaaggatgtccagaaactggaggtggggaagcctgagtgagatcaaacaacctgaaaatgtgtcttccatccatttagggctttatgtgcagcgaggttggagtggctggctgaggatgtcaacattttaaatttgtcactgctttgacttccctagctttatctcccttcagatcaaagcggggagactaggagttgtcactactggatttggtttcagactatgttggtgtacccttgctttatgaccttggggtttcctgtctttgcttggggtgacgggttcatttcaaacaagtgagatgtgtgttgtggtcttttattcagagtggggagctcttagaagcacccacagaggctttgaaaggactgggaagcagcttggagggccagttgcgtattttccaaggattcctgaatatcaggaatccagaagtttctatttgttagccttgctgctcctccaaggagccatcctgaaggcagtttagtcctgcactgggagacaaggcacaggcctgaagaattcctgccccctgctgtataataaatctgatactaaaattagtgctggcctcctgagccatatttcttgctgagatgataaagaagtgtgtgtgtggcaggctcatctttcaggattggaggatgttgctttatgtcagataagtgcccaggtctcgagatcatttttttatggcagcctctcccccatttccctgcttcctctccctgttctgttttgttaggggtaggagtaggtaggggtggataggggagaaatattttagcttgtcttctggttttgtgtaagtctctgtcaccgtaggtagatgttccttgagaatctttctgaaggttttataattgagtcttttacctccgtgacaagatattattcactttctctaaagcgtttactttatgcttgggctggggttggggggtggggggcagactttttttttttttcagggaactctgtctctagaagagacttgccgtcagggcagttgaatggccagcttacgactttaataattgaggcggcatctgggccccttgctgaacggcagtccttctggcagggcgattttgcttttaaaataaccatgttcacctttaactgcaaacggctgtgacgagagttgtatttaattttaaattgcccatgtccagtaaccctctgtacctctttaaataataaaatgtttttaatcttcctgcagctgtgttctctgtgtgggggcttgccatttttggaagaggagggggcttctgtgcctcctctccactccctttcttttccctttcaaactcaccgggacttctagaaaatgccatttcactaagggcggaatctggcccgtaaagtctctggagtgagtgctgggaagtttataa

SEQ ID NO: 87146 - DNA, 1134 bp, Homo sapiens
tagaagtttcttcttttcaccttaaaaaaaattgtttgcatccttccccttagataaggaaccgtcaacatccttgttagagcccagtgcggaggggaccctgaggcacatactgttttcaaggttagatagcaacaaactttcagagtagccggagtttcaggggagggagggttctttgggttcaaggttacccatttttcccctgctaggaagaaagcctttttgttttcttttgccgacttcttccaatagcttagagcaaatagattagcaacccagcagaaaccaaaccaaggaacaaataaaggggaagtttgcagagggcccttggctgggggctggctgctgctgaggaggccaacttgcggttttccattttcacggtgaaccgcattgtctcagcgttcgctggtattcacaaaatcagaaagaaaggaaggtggtggtgggagggcgcacttttcaggagaggctggggtgtggggaaagtatgcccagctgcatgttattagcagccttcaaataaagtttgtggaaggttccggcccccacagtcatgcctgggaagcttctgtgttcttagtaggtgttttgaattctgtgggatggaactgaatgtttaaaaacagttacaggaacgtctccccaagtaggtattcctgagaatttctgtgtacatggaactctattttcttagcaagcatcattatatttttagaaatgttttcttttctccttgcccgtcagttagccaagcctcctaccactcactttctgttgtgtagttctgattttccgaacaggtgtttagatgatgaggggttatattaagaaagtactaaagaatacgtcttatcacgtgaatcagtatctttttattcaacatggatggagtgggagtggagaccaatctgttttatattcctgcaatctgatgagggtaagaaaaagttcatgctgttcatattagctagccagcctctttctgtctttccctcccttccttctttcttctttattttttctttctttcttttgtctaatacctaattccttatctcatttttgggattttgagagaataattttcatgtggggcgacagaactagtggttgtagtttcacttgttt

SEQ ID NO: 87147 - DNA, 1825 bp, Homo sapiens
agtctggctcattaaaatgccgaggtaggtttaagctgattgccaagtgcgggtcctgcaggtcagagtgtgatgcccagaaacaaagcaaggcctagggagaggctggcctggaggcaactggctcgcgccgcagagagttttgaagccacatttcttcattggaaatttaaaaagaaagaaaaaaagcagccccttttgctccatatttatcatctctatagtaccctacaaataagtggtctcaaaaagttgtttttttttttttttaatttgctgaacctttataataggaccctttctgagggccccgtgagcccaagaatgcctccttgcaatgtgagtgtgggaaattagtgcaggcccaaggaaaggaagtgtgaaactgcttccctcagtgaacacccagcctggcgaggctgtcctgtgtgtcttggaagccctgctgggcctgagtttgggtgccatataatttgctggcctagcaccccttccatgggtccctctcggccagcctcaaggaaggggtcctgtgggggacagaatagtgtgtgtgaggggctgtctgcgggtggaggactgccggggcttaccatcctaacttgttgctcagtcgcggagtcttgcatgttgactctcctgggcttggttggccgctgctgctttcctgtggttgttggtttgtgttaggtgtttggtcctctggtttgctttgggtactgggactttagcccagggaagaggcctgtggtgcttctctgcctttcggctcctacgtggggcattggaaagccctttccctgcctggttgaaaccttcgcaaactgcacacctggccggcctggcagtcaaatggattccatggcagcccctgcctagagcggagcaggatgtctgtttcggccggttatgaatgaaatcagagtcctgtgctggcaatgccattgtgcgtaaggagtgcaaggaatgcactgggccatcttcccagagagaccctatagacgaaacagatgtggtcagatgagcccctggagacagcagtagtggggagtgtgggagagcaggccagggcggcaccaggaggagcaggaggagctccaggaggattctgagcctcctcctcctcctttattcctccatccctctgtctggggtgggatgtttgggagaagagaggcaatgtggtatggtagataggcctgttctttggagacagttctgggattgaatcctggctatgtgacctggccaagtgacataacctctctgagcctgatgtgtgtcatctgtaaaatggggataataagacttgtgtggcagctctgggaacagacagaactttctgtagagcacgtagcacaattcctggcatctgttaggtgcttagtcagtgttgattatgcagccagcctggacccagctgttgtcgctgggacagggaggaggtcgtgcagttaccgaaccctacaccattgattttactgctttggaccgagaggcccgagtgtgctgtttagccttccaggccctgaaaggttagttgtacccttctgactttctctacagaatcttccccctaaccttcctggtgtttgctaaactgagagttagcctcacagagtcccagcttctcctgggtcatcatccttttctctggcctctgcctgagagcagcgtgcaccggagactgagggaggttggctgtaatcagcacagacccttggctctcagctgagggtggatcccagtgtctagatgatagatggtgcagtttggtttctaattcctgcttgatttagagaggtgctgggagtgagtggtgtta

SEQ ID NO: 87148 - DNA, 1751 bp, Homo sapiens
ggagtgcattgtatctgtagtaggatgtttagcggcatccccggcctctacccactagatgccagtagcaatccctccctggttgtgacagctagcaattgccacgtgtctcctgggggacacagtcacccttagatgagagtcattggtctagcactataggtcacttctctataagaaggggaaatatttgtatgttttctgaggttctgttctgcatggattggaacctggacaatgaaatattcatgaaattcaagagcaggaaagtgcctggagagatcacctggtccaggccccagcctcccgcaggtggctagccacatgccctgggtttgatttccacggctcctgctggtcttcccttttggttaagtgaaagggcagggagaggggacgtttccacccaggccagcatctctatagagctttttggagtgggaacttcttttagcagaatgactctgcactcctgggctcttggcagtcctgtgtttgggcctctaggagtttggttgcaagctccacgagtttgatttgctctctcatccctggcacacacaaatttgtcactcagagggactggcttttctgcatgcactgaatggatttttatttgaaatgaattcattaaaaaaaaaaagttttgcttgccaggactctgccgtcctctcttcccttttatttctctctgtcgtctgtaagacgagcctggaaggagctgtctggtgggattggttggccagggatttttctaggccctgattaaaggtaaattatcagatgaaagttggaggttgctgctgtgcttgtaaaaaagtcacttgtgtgccataaaatccatcacagctcccttggtgagaaggaggaggccgtgaaacactcagtgatgctacttcggcttccagtgatttggcttccctctgctgcaggagtgctgcccggcagcccggtgcaccctgctcttgtgagaagctcgctgaatcacgttggtgggaagctcagagacagaactgtgtgttgccggcaagttgccatgaagtagttttagatgttggacttaggagaaccagatggctttatggagtagaagcggagcccatgatgtcttggtgacttttgcctctcttttgcttagaaccaaagaaggtggttgtccagttggagagggtgtggggagtctggccttggagaggcagtatagcccatggttgacagcatggatgcagggaccagactgcccagccagttatagaggtgggactgtgggctagttatttaatctctctgtgcttcagttttctcatctataacatggggatgagagtaatagtacctactctggggtcatcttgaggaatttgtgcaagaaaagggctgagcctatagcctggccaggggtaaggaagtcatccttaattatattatcattggttacactattctttttaatttattttagtttttctttttagagacagagtctccctctgttacctaggctggagtgcagtggtgtgatcataactcactgtaccctccaactgttggactcaagcagtcctcccacctcagcctcccaagtattggcactacaggcacatgccaccatgcccatttaatttttaaaaattttttgtagagatggggtcttgttatgttgcccaggtgggggtctctaactcctagccccgagtgatcctcctgccttggcctctccaaatgttgggattacaagtgtgaactactgt

SEQ ID NO: 87149 - DNA, 1018 bp, Homo sapiens
cctggccttgtcctgcttgtggccagaagtttaagtggctgcctattgaataggttttttttgagtgaaggacgggggagctggaactgaagaccccactgtctacagccataccaccctgaatgtgcccgatctcatctgaagaccccagcctcattctcccccgccattctaactaaccaggccaggcaggagaggatttgttcatggagtgaactcactgattgagcctttaccatgggcagagtgctgtgctggagattgggagtcagggatggaaacaaaagctagacagtccccctcctcaggagggctagtgggcgagacctgcgtgaaaatgcaggatcgtagaggaggggacgcattcaccgagaaggtccagtggattgggggctagggagaccctcggacagctgcctgggggaaggggctagagaatgggaggggaggctggactggtgatttaggggcaagagcaggaaaagttctgcattccgctcaagagatagagactttgcctgaaggcagtctggaatcctggcggcttaggagccagggcatcatcacattgatattttagagagaaaattcttggcagtgttataagtcatggactgggggagaccagggagctaagagaacagggcctggaccagagcagggggcagagtgagtatgaaaggaggaggggtgagaggcaaactctcccatgtgccttagacctggtgactccagtggggttggggtggcagggtacctggaggaagggtggatttgtgagcagccagtacttccatcagaacccctcgggggtgcttgttagaaatggaggttggtggggggtccctcacctgtggatctccagttgctaaggtgcctggacatctgtgactgaaaccaggtccccaaaggatgctgaggcctggaaaccttggtctcacctggagatgtggctccacgatgcccttgggagcgagcgagtcatttcacaaagtgttaggagggaaaggagcctttc

SEQ ID NO: 87150 - DNA, 1483 bp, Homo sapiens
gcgcttggctgtaccttgccattacttgattatttgcagaattagaaaaggctcaagtatctgatcataattttttcctggatatatagcacatcctctgaatatgtaatcagtgctttattgtttttttgtttttttttttgtttttttttgttttttttgagatggagttttgctcttgttgcccaggctggagtgcaatggcgcaatctcggctcactgcaacctccgcctcctgggttcaagcgattctcctgcctcagcttcccgagtagctggggttacaggcatgcgccaccacacccggctaattttgtatttttagtagagatggggtttctccatgttggtcaggctggtctcgaactcctgacctcaggtgatctgcccgcctcagcctcccaaaatgctggaattacaggcatgagccactgtgcccagcctgtttttttttttttttaaaggaatatgggctgttagatgttgtaaatggataggcaatgcatgttcactttttctgaggcttgttcagggaaactgaaaaaagttcctctgtcaccttgtgtgcatctctgtggtactgtctctccagggtagtgtgggatttagaggagaggggctggaggggaccctgcagatgtccctatgttctggaggcggacttgtttatttttgacagaatgaatcttggacatgggaggatctggctctgaccagccacaaattggatatttgtttgacctttttattccagtgagtgggaagagatccggtacctcctttatcataaatcttgccttgttgtttgctccagtatagcacttcatctgggtgctgtttgagcatctggctttcatttttaagtgccggcaggtgcaggggcaggcatatctcagggggccgtggcagatgaacgagatgtggcaaaagctggcgtggcactgttgggggtgagtttcacgggagaaaaaggagttgagcttattcttgggcaactctttgccttcctgctaatgtttccaagtataccatgcaagaatcaactccaaggggctagctgaagctggggaaggtgaagaagtgagtctgagttgtctagaacttgattggtaacatctcagggtactgccagctgctggaccaatgtggttctcctccttccctgcctctcaccccttcaagatgagttgtcttgtctctgacccatcctacaacagccacaagtcagtcgatcctgtgtttgtgctcccgaaggacttggcgacttggctaacaaggagacatttgttatttcatttcctcatccattattcatgcagtgagaggtaattagcatttagtaatgtggtttctggggtaggtgagttgggttcattcattgagcaaacatttcttgatcccctgctctgggttgggtgcaggccagggggctagggttacagagatgagggaagggcctagtttgcctttgagtgtgtgtctg

SEQ ID NO: 87151 - DNA, 1376 bp, Homo sapiens
ttttctttgttctagccaatgttttattgctgatatgaatcactgaggggcttggagggagaaaggaaagggtttctgtataaacagctgtcttgctgattcaatctacaaagtggattttatagctaaagtatttgttcttgctttaaaatgccaaaacagcaccgtcatttcctcagcgaaaagaagggtctttgagaatatggggctttctgctcccgtcacaaatctttgcttgggggagaggaggaaggaattccatagaacttttctttgaactggtctttctaaaagaatctcatgctcagaggagaagaattttctttacaaagtttgagttaccagttcacgcagccttccttttttttttttttttttttttttttttttttttgccttactacatgttctggtttaaaaaacaataataatcctctctggtcatcacagctgactacctgcttaatgtttgcatatagatatttcattttctttttttatgcaagatttcatcgttgcattatctgagatagttggttgccctgagattattaataaattgagacagttaatggtgtgtgactcagaacatacatttaaaaacaagttggaatagaaataggtcttttacaaaattaattttttgttaggctcctctcttgagcctttttgtttgaagccggctggctttgtagtgttcatatatggccgactgcaattaacataaattacttttaaataccagttagttgctgtggagagaggccagggtggtggctgcttatggaaggttaagaggcttggtcattgtctgggtttttatctcactgtggatcaaattctgttccctttggaggccagaagatcgtgtcaaagattgctttctttgacgatagggagaaggattaagtctttgcccagagtaccagtacttaccaaggaagaataaataatcataaaatgtttacatatttaaaaacaaataatattaaaatgcaacatgtatcctggattggatccttgaacagaaaaaagacatcagtaaaaaaattgatgaaatccaaataaaacatgtagtttagttaatagtattgaatattgaatcagtgttaatttcttagtttgatcaatgcatcgtggttatgtaagagatgaacattaggaaaagctgaatgaggggtatggggaactctaagctatttttgcatttcttctgtcattcaaaaattattttgaaatattaaggcttttttgttttttgagatggagtctcactctgtcgcccaggctggagtgcagtggcgcgatctctgctcactgcaagctctgcctcctgggtttacgccattctcctgcctcagcctcctgggtagctg

SEQ ID NO: 87152 - DNA, 1050 bp, Homo sapiens
atcatggtggaaggcgacagtcatgtcttacatggtggcagacaagagagaatgcaagtcaagcaaaaggggtttccccttataaaaccgtcagatcttgtgagacttattcactaccacaagaacagtacaggggaaactgcccctacgattcaattatcttccactggatccctcctacaacatgtgggaattatgagagctacaattcaagatgagatttgggtgaggacacagccaaaccatatcagtgaggcaggggacagagtgtatctctcacttgttaggtcctagaaagtctttgtaagctcctgtttcttctctgggagaggcggggctgtgaggagttcttagacacggagaccttccttatgtaacaaaacatcccagaagccttatcagtgttgttacaaccccagttagtgaagtggtgtggatacagggatttttctagaataaatcttgctttgtggtatggatggattgattcatttccctttgattttgtgtctccttgatagaagtttgacttgacacaagggaaaaaggtggtagtaagtactgagcacccttaagaagtaggtttctttagagcggatgcaaggtcccagaaggacagtgatggtgctgagaggagaggagtgcaacctgagtttagttgaattttccttcctcacatataaaatatcgcatacatacaaaaacatgtgagatctccgtgtaaataggaatactcacatagtcaccatccggcttagaaggagaatattaccaatacctttgatacccctgggtgtttcttcccggttttacctgcctgccttcctatcacatttgggtttgcctgcttttcacccttgtattagaatacttttttccattcatgtggtgtttgtggcattcattcatgttgatgcaggcaactgcagctcatttgttttcattgctgtagcgtgttcattgaatgaatgggccaccccttgtcttttcttcttttaagggacatttgagttgccgagtttaatttttggctagctcaaaccgtgctgc

SEQ ID NO: 87153 - DNA, 2475 bp, Homo sapiens
ctcgaactcctgacctcaggtgatccttctgcctcggcctcccaaattgctgggattacaggtgtgagccatcgcacccagccaggagaagctattaagagtttacccagaattcctccctgagattcactatttgtcagtagtcttaagctatttttgggtaggtcctctttcagcatagggtgaaacctctggaccctctcctaagaaaaatccccttagaactacaagaggtctcccacagaggggttttcttaaggaagactccccacagcccatccttggcagtgtagcaaatatgtatccagcatctactgagtgccagatgttttgtgggacggggggatacagtaaaaataagacaagccaggtcttcgctctcagagagcttatagtctaaatggaaggacagatgctgaagacgtgattacaggcaggagagtgttattaggaggtagaccagatgcttgggaagagtgataggtggccccagcctttaggaaaggccccctcagttgggattcagaatgaggatatttaggggtacagaatcccacggtgtgagttgcagaagggcccgagcatctgtctggtggcaccttctcaggaggaacctcactgaccggcatgggtgaaccgttcagctagggtcttggggaaagtcaggcatctctggagcctccgatgttgaggatagggtaagagcagcattgttctctggggccctttttccttagtaacacacactcacccggagccagttgtgccttcttgcaaacaaacagctttcaagaagagttaataaattaatcttctgggaaaaagaatctgctctgcgccagcaagacctctagcagccagggccagagacttgggcaatgtagtcaaaacacacgctgatcactgtgtgttactgctgacgaggttttaggcagccagttcggtgcgtttgatatcgggcagttcaggcagggtgaaggaagataaagtgtgttaaatggagctctcacaacaaccctggaggatctagtcccattttacagatgaggagcctgacacacagaataaaatcgacttaaggtcagctacgagtccctggaggctagggttgcgtattctgttccttctctgccattgagttggctttccctttatccttttcttccgcttaataataataggtaacatgacccacaaggtactgtgaaaagctctatgtaaaccatcacttcttactagaaaagcatttcaaaccatctgctcaatctatatttaaagagggtgtaatgcccatactttattaaggtctaactgtattaaggtctggatatactgattcattcaacacatatttattgaatgtctgttatgtgcccctaggacatgtcagtgaataaaactgacaaggatcctggacctggtggggctttccttctgcttggccatacagagtagagagaagcctggcctttgcttgctctgggggttggggaagcaactgggagcctctggggacgctgaatcaggtcccactggctcctctggctgatgaggaagagcttctctggctgcctcttgtgtttccttctccttgtgccttaccacctgcagaccttctggggcttggagttcactgccgcctatagagaagatcccttccttcctactaatgagagagagagaaagagcttcccactgagatctgcttgttaaaaagttagactcatctgcaatttcaccaaacagatgaccttacagtgattaagtcacaaaacgaagtcctgtccgcccctttatgttggcttcctttgtagacacgtcctccccacattatcttccctctccccagtgtagattctggagttcccatcagggttctgcaacttgctcaaatgaggatgaggttggaagattcaagggtgtgacactgtcatttgtcctaaatggaggggcaggaaagagatcctgtcacccctcctgttcccaggaactgggggtgtacctggtgacagttagatgtgtatacatgtcatcgctgttcacatgctctgctgccaattttattttgttttatctatttatctatctatttgtttgtttgtttatttatttatttatttttgagttggagtttcgctcttgtcgcccaggctggagtgcaatggcatgaatcttggctcactgtgatctgctgccaattttaatattccttagtatacacaatgtgtctgccctcatgaaaatgtggtgtgaggatacccatatcatattcaaaagcaaagtgatgggctaagtaattatttggtgttcagaaagattcactggagctcctttaactagggggtccccagtttgtttacatgaggacttggtctttgatacatttgtgcagtttttgaggaacattttgagcttcggatgcctgcttattccttgggctgtccaacatttcctaaatccttaggagtttttcct

SEQ ID NO: 87154 - DNA, 2140 bp, Homo sapiens
ccttggttccttagcaggctctcctttacctccttggtgtggtcccagggacccagcctgctctctcttcctctggcactgccactccatccctgagagtcttctcagagactggctcttgagaaggtacaacccccctcatttccacttccacgttgtccttgaggaggagctgtttttcctggtgagttttattgttcatcattgaaggcagaagtttcagtgatgccacaggcgagggtacagttgggctattttcttttgtccgtggtaccatggaggaaactgagttcagttactcgtgcaaggccacagagctgtcacctggcaggcttcccaggttgagggctgcctgtattttcatcagcatgaggggatatcacctcctcagctattagctcatgtgatcctacaggctacaactgagtcttctttgtagtctcaacgcaggttttctgtggactggagaaagcctttggaaagaaatgttaatactctttaataagtgaaaatgcactgtagaagaatctttgaacataagtagttctatagatcatctattctactgggcttaatcatcataggggatttttgcctcaagtttggggctaaggaacttgtaagcatttctgtcttacccatgagctggaagctgtgttcagagcaagcttctcttatacttggatcatgcccctggtgccagctttattctgaaattgctttgggctttctgacagctcatattccccctctgccaccagttagcttccaggatgggcttgcagaataagtggctttaatcgtctgttggccacttgttatatatccctaccatggggaaacgtgtgtaataaaacatgaatatattggggcgggaggactttgtatgtgttaaacatattgtgtaggtgtataatggtgaaagaaaagtgcatgcaataaatattgggaaatgtttgcacaaatgagcaaggatttagtctttgtgacttgatcatccttgaggggaattccttctcaggaaagcaggtgttagtgccagatggtcacgtgtcagtttcctgagatcctgctcaggaaggagtcgttggggaagaggaggcagagagggccctacttggggagtctcaatggatgacacagccagaagagaggagagagggaggcacgactcagtggcagaagggttctcgaggcccgagtggagtgctattagtaatcaatagattcagaagcagcctgggcctgccacgagaagctggcagtgttggtctctgtccgctgggcctcagcttctctcctggcagacggtgatgatgggggtgcaggggctggggagtatgaagggtttgggctttgatgagtcagtgaatttagcatttgtgtgtcagttcagacccggctggcctggaagtccaggtggcagagggcaagtcaagccctttctggtactgtattctccctctttccggcccagcaggcctgcctggacctgtgttctgcttctgtatcctggactgagaatcactgtgctgcctcctgaggagctgctgctggagtggaccttggggcagctagcacattgcctgtcttcctaaaggcatcggtgcacagggcacctgggaatgacagcgggcctgagagcagagctcagtggagatgctggacccctgaaggttgtgttattttttttttttttccgagttggaatctcactccgtcacccaggctggagtgcagtggcgtgatcttggctcactgcgacctctgcctctcaggttcaagtgattctcctgcctcagcctcccaagtagctgggactacaggcacacaacaccgctcccagctaatttttgtatttttagtagagacggggttttaccatgttggccaggctggtctcgaactcctgacttcaagtgatccacccgcctcggcctcccaaagtgctgggcatcagccactgtgcttggccgactgtgtcattttgtacttgcagcacaggaaggaacttgtcttttcctcgtgaagggttagaggcactttggttcttcattgggcctcagtttacctaccagtgccacggggatattaatgagtgcctcacttgactctttctcccacatggatgctgtgcaga

SEQ ID NO: 87155 - DNA, 1089 bp, Homo sapiens
taagtgatccttcccaccttagctgcccaagtagctgagactacaggcatgggctggctgctatgcccggtaatttttaaaatttttttgcagaaatggggtcttgctatattgcccaggctggtctcaaactcctggcctcaagcgatactcccaccttagcctcccaagtagctgggactaatgcaaccacacctgattaattttgtttgttttgtagagactgtggggatggggagtggttctcattattttgcccaggctagtctggaactcctgggatcaagtgatcctctcaccttggactcccaaagcgctggaattacgggcgtgagctatggcatccggccaggtattgccttttgatacctgctttctctggagacaagtcatagcactcaagcctggaagggtgatcactgtgttcaggtcggagacagagcacagtcccagcagccgagccatcaaccaggatattgcagggagaggcccttggccttgctgtcagagagttatggagagtgcaatgtcaagagaactacattattgtatagtttcttttcgagagaactacattattgtatagtttcttgatgcctgaaggcaactttgcaggaaggaaaggccttaaatcttaagactgtgttgggttgtgtagcaattcctgcctaccttctatacttccttcctaatttttctttttcaaaactgccaactggaggaaacctggtgtggtggtgtttgagaggctccgggtgggtgctgacctctggcttcaaggctgcaggctccctggggcccgggttgggatgcctcccctggggaggtgcctgatgagagagaaagcaccctgctgcagtttcaaggctgaccagccttgtaaccttcaaaagagcaaaccctgcagtcttccagagtgtaaattgaagagaaagtgaccctttcatatttcaggtcctgtgtgagaaggaaaagaaaattctctgaagatgcctgggctgtgtttttttacaggcttggaagccaccataacttttaacttgactccctcctctctgctctttgcttgtgaaggattttaggattttg

SEQ ID NO: 87156 - DNA, 1746 bp, Homo sapiens
ctcctgactttgtgatctgcccgcctcggtctcccaaagtgctgggattacaggtgtgaactcctgcgcccggccgcgcctgcgtttttagaagatgccccaagtaaatcatgtgcacagtgaagtttgagaaacatgagtccagagctgtggttctcagccttggctgcaggttagaatcatcaagcggagggatgctggtctctgaaactctgatttacttggttgggggtgtggattgggctttaggagcttttgaaagctcaccaggtaatttttctgtgcagccaggattcagaactgctgtttgggcagtggggagccaggaagagtttaaagcaggggtgcgatgtggggtggaaagtatagaaactgttttctgccctctcttgaccaagagcaggagctcatggtctttggagccaaaagcagccctgccggataccaatgtcttgtcctggtgtcctttgcctggggcaggtcaggcgagtaaaggagaaacacaggcccagctgatttgcctgtcattgggggtgagggctctgatttgagtgtgtcctgtcgactcaaggaccacagacgtggggcatttgactccattgctggcagcgtttcttgggggcttgggggtcggtggaggggagcctgtgttgggggaggcagggcagatatgcgggtggaagaggggagttcccagccaggttttctggaaatggtacattcttatttcccatagtaccaaaggttcttgaaggctgggcccactcctcagaaaggatgctttttgtggctgttgcatgcaccagataagctctccaaagcccactggtggtaaaggtgatctagagcaaacaaacatcagtgaaaaagcaaacaaacccgaacacccaaacagcatttatcccagtttagcggcgagacttggattaggcaggtcacatggcccacaactttccttcaatccttgggagacttcttccgtggaaacctttttcggcagctttgcaattctgattttcagttaattagatttgtgctgtttgggagacttggttaatgcatttcaccccacagagctaatttgcctctgtctaaattaggtccttgctgtggcggagggtgtacacgggctgtgtgaatacagactcacgtggggtattgagagaccattagacagtaaacaggagagggctttgaaatcacatttgtcatcatcatcattattatggaatatctgaggtcccaccgagagaatagaggtgttcttcagagaaaggccatcatgtgagtacacctggtcttgttacatgtctcttgaaatacaaccaggtgccctcttgtactgttaacccagggccatagcatgaaggagaagggaaatctatctggagggtacaaagtagtagatactgctaagtaatacatttacaatctctaaatttttagggctgagagggaccttaggagctatcttagccagtccctcactttataagcccaggaatctgaggcctagggttattgctactttttttttttttttttgaggcaaggtcatctgtgatctctgtcatccaggctggagtacagtggcatgatcatggctcactgtacccttgacctcccgggttcaagcaatcctgcttcagcctcccaagtagctgggaccacaggtgcatgccatcacaccaggctaattttttaatatttttgtgtagacaggatcttgctatgttgtccaggctg

SEQ ID NO: 87157 - DNA, 3255 bp, Homo sapiens
tcgggaggccgaggcaggagaatcgcttaaacccaggaggcggaggttacagtgagctgagattgcaccactgcactccaacctgggtgacagagggagactctgtctcaaaaataaaataaaatggaaggtggaaggtgagaaggtgagaaggtgggaaggtgggaaggtgggaaggtgggcaggtgtgagcatgtcctggaagaggaggaccatagaggtgaggtgggagacccggggaggtttttcactgttgatggactctgtgctctgagtgctctttcatcggagcctttcccccattccggattcttcactggttgtctgtgtctctctcatgggaccgtgtcctgaatgtcagtctgaagactctttcctcacttctgaggctacccctgggctctggctttgggggagtgctccagttttcattttcttcgcctgtttagagagtgtggccaccatatcacagaggactgggaatgggccggagaaattgtgggctgtgtcagggttggggcgttggtgctgctcataagaagcttgaaggcagagggtgctgggaccttctgtgtgaaacccgggtctgaaaaggtgcctgttgtggggggtgggggcggagggtcccggggagaaaaggtagctgacatagaagcacatacagcacgttcctgaatccaggccttggagtccgaggagtgcctttgtggcaagtttccccctttttaattttcttgtgtcgtttctcctgttaagtgcaaagaagatgcctcgctgcaggaacatctgtgctccttaggattccgtggctgatttgttacatataaatttcctaatgtaggttatggagctgttgagggagagaagcagggaagcaggctagggaaacatccttctccactcaacttaatattggtgcctgtggctccagggccagcccaggccccctgcctttaggtgtgtgggccctgaaaggacaacttttgtgcccactggaaagtgtgtgtggggagctgtggccgtagtcttgctctcttctgagctggtgatggggagcagccggtgattatgcagagcagggccttctgactctgggcgggctgagacaattgcttagatggttgtaaaggaggtgttcagaaatagtgcgacaggggcgaagcctgtgctgtcactggtgactggggatgcttgttagcattttctagggctgaactggttatcatttctatctcttcatgccaaggaagctgagattcagagaagcgaggtgaccttctcaagatcacacatgtgtttcggtggcatggccaggacgggaacatgaatgtccagattccccctggaaacaccatatttcctcaattcagaatgcacttttgttcacatttgcacttgaaaatccagtgcatcttacaaatggatggcatcatgtcagaatgatgcatcttatgatccacctgtgttagattcaatcaaatatggtagagacttttgatcgagagctgctttatggctggtattgggctttgaacacattttctcaattaatcctgaacaaaacaaaaccctcttgagtaggggtttgtttttgacagggtctcactctgttgcccaggctggagtgcagagacacgatcatggctcactgtagcctcgacttctggggcttgagcgatcctctcacctcagcctccctagtagctgggaccataggcacatgccatcatgcctggcgaatttttgtatttttttgtagggatagggtcttcccatgtcatccaggctggtctcgaactcctaggctcaagcaatctgcccaccacagcctcccaaagtgctggggttataggcacgagctactgtgcccagccgagtaggggttttctgctcagtggtaaagtggagcgagaggggcgactgcagctctcagatcccttattgttcctcaaatgagtgagctgtgagtcccccacccctcctacttggcccttccctttgcatcgtctcactctcagcttctctggaatgacagtgctttcttcctttgagtgggcaccaggctgctgccttgagttttctggacacttgctgctgaactgtgttccgatcgaaagaaatacaattactctctgagatttgaggggcgattgtgagctcttgcagtcaccttcttgttcaatacttgcttggagtgtctctcttgagaggactggaaatgcatctttgggtggaggttgatctgtatgaggactggctctatcacagggacagggatggtctgctttttgcctctcttggggagggaggagagttatttttatttaggtgtgaatgcgggggcttgaatccagggcagaggtgatgtctcacttctttcaggtgcaagccagtttgtaggaagataatagggaggattgttaggtatgctggggctgttttggagaatcctcaagggagaagccacgaagaggaggcactgtcagatgttcctcactagtttgcagagtgcttggaggtaatattttaagacagttgggaagggtcagaggtttctacccttagagtctcatcaaagcgctgagtgatgcccaaaggggatgaataattcttccagaattcggagtcctaagctttcctcttgctttcttgttgaaataggcaggctggttgagggatgcccctggccccgtcttagggtacatacagaaagaaatactaagcggactcttgctgtctttgcaaccaagcaaaggggtcctgcagagggtgtgtcaggaagggagaaagaagagacatgggtacaaagggctctggcagctgtctcagccatatatgtggtcatttcctagagatgagagtggacgtcttgtcctcctgcagcctgctccctgccatgctgccttccctgcatctgggcccctttatccctccttgttcccctcctacctttcatccagccctctagattctgtaccactcacctggagctaggtgagaaggatttaaggatatccactggctgtcttactctgggctataattggcggtgggggggatggatttgggggcctgggatggtctagcttcttcccatggactctgagtacccctaaaccctccaaacgtggctcagccagacaggctgggaaaagtgaccaggagtctcttattccagcttctgagactgctgtgttcttggtgagtctcccgcccgcggcttccaggcccaatctctccgttgttactgtgcac

SEQ ID NO: 87158 - DNA, 1030 bp, Homo sapiens
ttccataatcaaaatggaaatttaagtcaatgacaatggaaactatttttggccatttgcagactagggaggggagtgagagggcagaataattcagtcattgtaaattttaggggtgaaataacagcatagaaataaaaactccccaaggaagcataaatcaacccttaatcgaacataaacaacaaaccacgtaccactcactcaaaccaggagctgcatccctggccgtcagatttgtgcttggctgttggagtgacgtgccgcccacaaggtcttggctactaagggacaagtattgggttttctctcttctcctgaaaggctcttgttgacagcagacagcttctcagagcctctggtcaccgacctgttcttcccttcctttctcctgtgctgttttcaagacagaaagcccagctgtggcaactgcaggtctttggattagtttgacacctggggggttcccaggtgaaaatgagggctgcagggcagggagcaaagcccacttgggagttatgtgttgtgttggtgagaaacaggttgagaaagaagcagctgctgagaataatctagtgtatattggggcggggagcatattggtggggggagagggactgtgttggtcgtgagtgaccctgagtgatgggtaccgggggttcattctctcaatctcatgacttttgtgaaagtttgcaaaggtcagaagccagaaagaaagatcaaaagccaaaaagaaagggagcagctgaccccaagattcccacccccaaggcattacccccttgaatcaggtgtaggtctgtttcctcatctgttccacacagattgagtctacaaagacccaggtctcatatcctgcaggaaagtggagaagaaaaaatgtgagactgattttttttcagagttttgactgagagagtccgttttcccatggacttctggacatccatgcctgagaagcaccttgggttttccctgctcccaagtcggactgagctcagggaatctccagggaaatgcgggggtc

SEQ ID NO: 87159 - DNA, 1313 bp, Homo sapiens
ttttttccctcattttgcgggtggagtctgaggccttggaggaggggtggccgggagagtctctgagcagcacaacatgggctgaggcagcgccccgccggagcccacaccctggtcctgcgagggatgcaggagtgcctgacccaaggaggggtaccgcatgaggtggctgcacagacaggaggcagcttttcctcatcttacccgctggctcccgcggtcatatactccccggtcagtcacagacacctctgacctctgatgggacattcagtgacacttcccttgtagcccttggcttttcagttcctgaaggagccagcaggtaagatggggaaaagctgcctctgctgtcttccaagtggctgtgcatgttggcccatggatacttatatctatgtcaccagctgacacctctcttcttctgcctggctcggaaggtgttttgttttagtttggtttgtctttaataagggagcagtggccatttcagagatgggtggctgtagatcctcctcctgaaccagcagaggccaactccattccatcctggacctttccctcctccttcactttcttccagcctctcctcttgacctgtggctcagaagggcatgtgacaagtgctgtccccacctcactgacccactgattgctcttaccagatttgcttctttgagccactggggcagggactgactgggccacatgcacctgactgctgaactttgccaacctgcttgtgagctggaggagagcaaggcaggcatgcagaagaggagggttgagttgccacagctcagagcccagtgctgccaaaatcaccactttgtcatttggtacatcagaaagtggtatctacctatgtttatcacagcacagttcccagttgcaaagatatggagccaacctaagtgcccatcaactgatgaatggataaagaaaatgtggtatatatgcactgtggaatactacccagccataaaaaagaacaaaataatgtcttttgcagcaacttggatagagctggaggccattattctaaatgaagtgactcaggaatggaaaaccaattatcacatgttctcacttacaagtgcaaaggcacacagagtggtttaatggacattagatgctcaaaaggaggaaagtgggggagggtgaaggataaaaaaactacatattggatgcaatatatgctattcagctaacaggtgcactgaaatctcagacttcagtatgcaattcatccatgcaactgaaaaccacttataccccaaaagctattgaaatacaaaaattattaaaaacaa

SEQ ID NO: 87160 - DNA, 1405 bp, Homo sapiens
ctgttgtgtttcctgaacattcttcactgattgctacctcctgcctttgcatctgctggtccctctgctgggaatgcccacctgcctagttcagtggggctcccttttttccttcaagcggcagcttaaaccgtgcctttttagcaaaacatttcccgtcacccccattaggttgtttgctgctgctgcttttgtagcctctaatgcttcgttgctgtatggtgcaggttacagacccttagctacaattctcatatcccccaaattttgaaagccaaactttttttttttgtaattcatctggctacaaaatctgaactgtcttcagacacttggtagtatttcttgatcccgcttagtgtggctatctgtgggttttgcttactcccagcgggtttgatcacaggtgctgttccaagccctgggggagaggaggtgggtactgtaggctatgtgatacatgacttattacctgtctgcaagcagaaacacctacatccaaaccgatttggccccagggcttgggataagagatataggtctgtatttcttggttcaagttggcctcttcctactaaactgtagggccttggactatgtcctagtcaatatctttgtgtttccttagaggcctcatgattaactggcactgtgagagtaaatacccagtgagactgtcttggtgaatggataatagtagctaacatttatgaagctctcactgtgtgtcaggctgtgttctaaatgctttacttatttccgctcatttgatcttaacactagccctatgagaagttacttatcttatccctgtttgatagatgggaaaaccaaggcagctgctgctgaagtagcttgcctggggtcatgtggcttggaagtggagagggagatttgaattcaggaagcctgattttaaaccacggactagtagcaattggaaggactataccttgtcccactgcagtgtttgtgccttctggctgtcacagttggaatagaactgctcatctgagagtgtttttgatagggtgataaaatgactagacatgagagttaagaagggaaaaacctcccgtggttattgagtgttttactgagtgccaaatggagctcggtacttacagaaacagaccatccactggaagtaatagctgtcttcatggtcatcttgtccaacatctaaaaagatgacaaaccacagggctgggcacggtaatccaccgtaatccaagcaacttgggaagctgaggcaggaggatcacttgaacctaggagtttgaggttgcagcaacctatgattgtgccactgcactccagcctgggtgacagagggacaccccatctctaaaaaatgagaaaaagaaaaagtgacaaatctgaggcccagagaggtaacgtgact

SEQ ID NO: 87161 - DNA, 1133 bp, Homo sapiens
cccaagagtgtgttctgtcctttaaagttgctgtgttcaacagtaaattatttgattccttctaacaatacccctgtgtgggaggcatgtataaacttccattaatggcaaacaacatggtaaacccaagctcagaaatgtgtaatttcttacccctctgggtgggccagaaactcatagtggggttttactaggatgtaactgtgggtgtttgtgtggggagggttagggggtgtgtgtcactgagggtatatagaggttttctcaaagacttatttacatgagttagtgaaaaaaggtttgtccttcttctctccctctttccccggtgtttgagtcccttgtgaggagctgatgtgcacgatgaattcatctcagccagcaggctgtttaaagtataatcaaatcagaacccctgttttccgagttacgtaattttgcagaacggacacagaggctcctgggaaaaactgcctgtccgcctgttaatattaaggtccatttataaaattagaagctatgttgaacagatgaatctgaaatggaacttgcctattaaagttttttgtttttgtttttgttttttttttttggtcagatagccttatttaacctttctgtgtctcagaggttggtggcctttgcctatggtgccttcatggaaaaagttctaaatatagctcctgtttgttgttgaataatgacttgcgagggcggatggtagagtttccaacttctttaagtcagcaaactggacaagagggcatctagtccgaaggaaagccatgtgcctgagtgttcagcactgctgctgtttttactgtggtcctgggtttagtggatgttcagtacactgtgcctgtctctcttgattgtccttctcctcccagtttttacctccaaaagcctgtaactttttcttttttttctttttttttttttgagacagagtctcactctgttgtccaggctggagtgcagtggcgtgatctctgctcactgcaacctctgcctcctgggctccagcgattctcctgcctcagcctccctagtaaccgggattacaggtgcttgccgccggctaatttttgtatttttagtagagatggggtttcgccatgttgtccaggctc

SEQ ID NO: 87162 - DNA, 1711 bp, Homo sapiens
agtaaggccaaggcttttggcctgagcaaataaaagccttttcctatgatgggagaagactgtgaggaatagctttggaggtgaaagtcagcgtttggaaacctttccacattcccagttttcttcttctcttactcgttttctttgggaaagagttggaggaatgactccatctactttactgcttcttttttcggggtaatacaggacttgaatagtagttaaatcacctgtgttaccaatggtctttaaaccaaaactgcattactcaatcaggaaatatatacaggtaacctgcctttccttcattctgagacttatttcttgttcataatgcttgtgaaatctgaatgcatttaaataatgtacatatttaatatgatggcatttcattcttgaaaaaggtgttattaattggtgttgcatcttatggttgttataacatacagtaattaaagaaatattataggcattatatattgagctcttgcgtgcgaggaactaaaatgtgtgttatttgcctactgccgcgtaacaaattaccccagaatttagcaacttaaaatagcaaacgtttatcatctcacggtgtctgagggtcaggaatctggagtgggcttattagctgggtggttccactcagggtctctcatgtggttgaagttaagcagctgttctgggctgcagtcatctgaagacatggccaagcaggagcttcgccttccgggatcccttgcagggttgtttgctggaggtctcggccactctccatgtggggccctccagaggctacctgtgtctgcacagtgttgtcattgtctcctccagagcttgggcaccaccatttcttttggctcttaaaattctcttctaggcttgggattttaacccaggtttccagatgaggaaactgaagctcaaggaagttgattaccttcttcccaacttacagaagccagtattagactagggccctgaccctgatcagcctgacaagaaaacccttgttttcttttccacggccccacagagtggcccatgtttctcaaatgctgcaatctaggattgaccccaggaacccctttggggtcattacattttacttccactgtctgatggcattggtgtggtccatgcgaatactcacagctttaaaaccatctgattgtctctgagactcattttctctccactttctcggcctctagccttcacggctgggtgtctcagaggctgggctctctcctctgggaaggctgttgtctctgtgtcgctggctagcctgggtctcaggggcagtgagaatccctggcggctgtccctgtcgtgtttaccaccttggcaacaagcgctgctcttggcaccacggtcgagtccttagctggacggtgactcgggctgggggctccttcttcacatcatgaattggtcttttgccaagccaaaacagcggctgcttgcttttcagaaggaaaggttgttcatatttattttttaattagaaaatgaatgcatgctccttacagaagattcaaaacatatagaaaagtgcaaataaatgaatgttttggtatattatcatttttgtgtgcatacgtatttaaaaacagaattggaaaagaacccagaattagaatcacgctgtgttgtgtgcatgtgtatgtgcttttgcatttactagtacttagtaataattttcacgtgttactag

SEQ ID NO: 87163 - DNA, 1064 bp, Homo sapiens
ccggggagctgtgcctgcctgtcagcctctccatcttgttggtgctgaaaacctctcttcctcattttggtccctgctatggctttttattcaaggctgtggtttgagttctaccacaaagcagataatgtggcatgagcagctcacgcagggactgccctgcctccctgtcttcacctacaggggctgccgagatggggaagggccccacccctgagttcccctttgtcttccttgtctcctttgcaaggagagtcctttatttgttcttttaatgcaactggcctctctgaagaggctttccagatcaatttggcttgtcaggggtgccaggcttaagttttcaggcatctaaagaagtggtgggggagaggggatcagacttttctttctctttgtggctttcaaaagaaaatcacggacgttaaaataaatgacgcaaatatctgtattttttgtatcaaagagacaaatggcataaatgcagattatagggtattccttagaactgtccatcacacaggagctcctgggaaaggcaagcagcccgcgaggcaccacccggtttcactgagcagagggtgagtggtggcttcgcgtttgggcagcctccagggggtcggcatatttagatcatcgtctcacggattgattcaggattgtcttaaaagccaactcggtttccaagtgtttcattcttgcatgcacgcttaagaaagtcaaagccatttccattgtcttctgtttgatctgcactgaccatccttcagctcctgcctccacttgcgtgatgctttctcttctggttgaagaactggcagcgttggtttgggctgctcctccctccctcgggccccctccctgtggcacggacttgccctgctgtcgtggatgatggtctgtgtgcaaggggttgagtcccgtttgccatgctcctggtgtttctaacttctcagcctttcgtttcacaccctgccatgatgacagtatatccatttttcattctttgggacattttctctccaaggaaagatgctcatgcacgtttgcagtgggtgaactgt

SEQ ID NO: 87164 - DNA, 2952 bp, Homo sapiens
gtgttttttcttttcttgctttattttttttggataacggcaaaatcaccgcttgtgggcaccgccacagataatacaaaaaagccatttgaaaagagctttatgtcagcacagagtacttggaattgaagacctccagggatttgcctttgttgctcaacttttctctctcctctccctctttttttccccctttcttttcttcctctccttcttcctccttgttctctttctcttttcttccttctaacttgccatggaaccagagtgagctacatattgccctattttcagctgatttgcatgttagagcagagtaattggtgtttaaccagaacaaaagaggatctgttttctaaaagaaaaaagaatttttgaagtagatcctattgcatctactgcctttgtctctcctctcattaggaattgaataggatggccccgtaatgagaatgtgggagatactgctttggttgtgatgctttttgagctaattggtttgaaaattatatttgatacagatctgagggatgttggcaaaacacctctttgatacatggacatccggtccctccatcagcaggaggatgggtagtgagaggcagggttggaacgctgtttaccttcctggttgaacgctctgagaggccaccccctgagattttggtctttctccaaatcttcatgttggtctgtgcctggatgaagaaagccagggagcactggaggacaaagtttagtagaaaagtttgtagctcatgatttgacttctagtgtgttttagcgaagacatgaagttgaagaatgacttttcctcttgttcagaggaaagtctaaatctggactagaaaattgagaggatattagttaaaaacttccagactgtccgttcttcattttatatgcagaaatcactttgtcagctcacagttgcagtctctttcttctggagttaactggcatctgatggtatcatgtctttttgtgaaaattaagtgaatttttgaagactttcagtaatgtttcagtgaccacaaaaccatcttaaaaaattagaaaccaaaatactactacatgaacttcgaatgatagaaggggaaaatgagttataatcacatcattctaaataacagctgttttaaattttaatgtattaatattaccctgtcttttgccattataagtcttacttacatacacacacattttgaaatagtcattgattactttggggattgtgtttaagcaaatatttatttaataataccagttaaagagttctgtgacatttattccttttctgaggtcacccaactttgcaaaagttcaatattatcttgcaaaatctgatagcagattttaaaaaaagagacacgggtcatgatgacttctctcagaaaatgtgactacaatcaattttgctgtctgtacgtttgtttgttactttatctttctgcacagcctgtgaggtagggaagggttaagccctcttgacccactttgcagatgaaatggagctaagcttagaaggaggacagcaactgagatgagcaaagttcgaagccaggaggtgcagtccccagctttatctaccaagtcaactgtctttccttctctcccttttgctttttttttttttatttggaggtaatttaaaacttacaggaaagtttttaaggataagttcaaagaacatccttgtatgctccactcacatatatcctttatcagcattttaccctctttgctcaatcagttgctctctttttcactaatagggttttttccttgagtcattagggaataattgtacgcattgtgaccctccactcctaaatacatcagtgttcctaatggggatattcccttaccaacttcagtccagttatgaacttcagaaatccagcattgatacagtgcttttatgtaatctaccatctgcatttcagttttatcaattgccccaatctgtcctttatagaattctttttccctcaagtacaggatacaatggaggatcaggtataacatttaggtttttttgatgactctttcgtctgctttaacctggaatatttccctagcctttctttgccttttatgacattgccatttataaagaatacaatcctcccccaccttttcccaatagaacattcttgtctagtatttcctcatgactagattcaagttatgctttcctggccagaacacgacgtaagtgtttttgtgtccttctcagggtatcgcatctggagcacttgatgtccatctgcctctctttgatcacctggtcaaggtgttgttagatttctccactgtatagttactatgttttgtcttgcaacgaagaagcagtctgtggggagatgctttaagatgttcctcatggaagtttcctctgaaagctagcattcactgatgattcttgcctgatctagtctttacagcaatggttacaaaataattttctaattcctacatcccctctttatttaccacttggcccttggcatctgcggtaagcaagatcccctccttcttacccactaattttaaaatctatttcttatagatatggacccatggagtcctagtatttcaatggcttataatcattactgtacataacaattttggtgctcaaattggcccacacttggccagtgggaggcccttcattctgattccctacaacatgatcctgcgccggagtttatttttaagcacttctttactttctggcataacaaggtgttccaagctcatcttgtgtctcccctgctccagacctggagttactcacttctccaaggagctggtttcttgtagtggggattgcatttagagaccaagataagaaggttactagagcgtctttgctcaatgttactggagtgtcttcgtctctaggccatttcagtggagagatataggaaacatgagtgtaca

SEQ ID NO: 87165 - DNA, 1458 bp, Homo sapiens
ggcatgtgcctgtaatcccagctactcaggaggctgaggcaggaaaatcacttgaacccgggaggtggagcttgcagtgagccgagattgtgccactgtactccagcctgggcgacagggcgagactccgtctcaaaaaaaaaaggcctactaaaaaggaagggttcaaggcttgtttgcatttctcttgcatccgacaaccacccccatcccagctaaagacctagggtgcatagttcaaccgtgtgttcctcagtcatttggattacctcttccctccctcccacctgcactgtggttatggtttgctgtcagtttcagggttttcttccttttcccttcccatccttgttaatttaattttatttaatatatgggacattcatgtgtgtttaaaagtttactgagagaagccctgctgccatatctagatctctccttccctgtttcccaacccctgagaggtaaccaacctcacccttttctgatttgtcttgtgtttctttttgtaaagataaacagatatatgtatattttcttatttccccttcttatataagaggtagtgtagcatatactctttaaagcatcttattatttttaaaaattaactaaagtccagctggatgtggtggctctcgcctgtattggggactgaggcgagtggatcacctgaggtcaggagttcaagaccagcctggccaacatggtaaaaccctgtctgtgctaaaaatataaaaattacccgggtgtggtggtgcatgcctgtaatcccagctactcgggaggctaaggcaggagaatcgcttcaactcaggtggtggaggttgcagcgagcctagatcacaccaccgcactccagcctgggcgacagagtgggactccgtctcaaaaaaaaaaaaaaaaaattaactaatgcctgactttattccaatttccctagtttttccttactgtcctttttctgttctaggacatcatttacatttaatagccctgtcttcgtaggctcctcttgcttgtaacagtcgcatcttattttttgaaatgtatcaataggtaggtagcggttgaacaagacggagaaagagaaggtgaaaggtgagagatgaaaaatgttaggtccatatcctgcaaatgttgttatttatcacttctgtgattttctctatatccacctgctacatgtattattatttacttaatacttttctttttgttgatttattttatcaccataaaaacattttgtaagaaaactttacatcattactataaatgagaaaccacttgctcacttgtatttcgtgagaattgcatagaaattgcagcattttgaagtttaaaaagtttaacagcgaagtaaccccttctcatccttatttttaacaggacttgagacatgtaaataacacattttgggggggggggtctgatttttttcttaatgaagatgta

SEQ ID NO: 87166 - DNA, 1411 bp, Homo sapiens
tatgtttgtgtgtgtgcacagtttacatttactctggttatctttaagataatgccttaaagattcagggctgcatcttaggcagatcaaacacatatcagttatgcttatgtcttttcatggagttccaaatagaaaatttcccagcactctactgtagtgacttcttaattaagcagctattagttaatacccttcctcaccattgttcctggaaatgagttctagaagccctggcccttaggttgccatagataataaggatgcagtgtgtttcagactagcattgtagaaagaagtgggaattatcagagcaccccacagtgtaccatcttatcaagatttgaattatgagacctgtattccaaaatagctcttttaaaatgatcttagccgttattttaaaataatgagtgtggcattatagcaccacttttcaaattttaagtgaagaaaagaaacacatctacccatcatcctgcctgtgggtctcattgctttccagccccatccgcatgtgttcagaccccttcatgcaggcattattggagtacagatgtacatgcttctgtcttgcgtttctctctcagcatcatgtatgttgaaacccatggtacttatattggagttgttctgtcttcacgattgtacatgtgatgttcagcgaggtcactccctgggatttctacccccctgaaagcaaagaagtggaaattttgtcctggtttctctcttggtagagtaggtttgtctctaggttctccacaatacctgcttccgtggaattggctggagtcgatgatgttagcaactccttctcaagtcatttcagcgatccttcagtctttttcaggacattgggtttccacgtatctgaccatttcttctttcttctgttcactgaaccaacactcagaggctgtgccctttgccaggccctgggctgactatggcgatagagcggtgagcaaggtaagtgcatttggtctctgcctgcgggagctcacaggtcatttgcacagttgtgtgcacggtgcccttgtgctgcgctgcgtgtccagcctttctcatctgctcatggatgcacacatcgcattagaaggggagagaaggtgacgtggctgtaggaagactctactctgcctttctaaatgctaagttctgtgcatgctttggcaccttcctagtggtacaagttgcttgtgatacatctcacttggacatatctatggtagtccaaggagtatgagggtggttagactaggggttgagttgggagtcacaggaggcaggcagggagtgatggatgcctgggttgtcccttgggacaagaggccactgctcagtttcaggagttctagtgttcagctcacttctgtacccagggaggatgactgatgtggttcggata

SEQ ID NO: 87167 - DNA, 1903 bp, Homo sapiens
cttctctttcccaactcacatcccctctcagggtgttctggcttcttagctttctgttactttctgaattaggaaagatctgatattatttacactcgtgcctgttaactctcccaggtgctgtccaagccttttatctcaaattgtggactgaaaagctttatctctggtttaaggcttcaagtcctggccagtagactaaggagatatttaggggcacagagaagccttcctgaagttcctgaaataagagcattctcgggctgccctcctccatggttcctggctgaccacttgtcttctgcctcggggttggaagcctgggatgaggactccaggctctcgtctcggagcccttccttctcctgttactgggattctcctcagctcactgccttctcccttttggtcactgctgcccgactcctgacccagcagcccggggattttcagtgtgtgtctccgtgtgtgtgtttgtgtgtgtgtgcacgtgcgcttccatccctgagctcactagagaggcatagggcagcatgaacactcacggagaacgaatgctcatgagaagcgtgtggtaaactcaaagtttttccatttggcacagttgaggagtaacgtttaaatcttcttcttaattaacatttatgagtgatcctgacagtgattaaagaaatataggaaagctctcaacatatgtgtatgtcaattatatgtactgggggaagaagaaagatgaggaaaaatgaaatacttgaatgatctgctttagaattgtgtacatttgtgtctaagtaccatgtcatgaataatagtgctaagagtacttaagaagatgaacagatcaccttttatcagttttatgacaggagtcaagttggtgcactgcacatgtgtgcttagttccagcctgtctgctcacaaccaggaaccacacaaaaagagttaacattagtcatggtaagcttagcaagcagatacacttcaaaattttttctccttgaagctttttaaagccaatttcaggaagatatatactgaaaaactcaaaggagaggtgacggttgggaagccaagaaataattttttactctaagaatattctagaacccagtagtacctgaaaaatctctcaaatacatcctcctttgctgcccttttggaaagattaaagcatatctggtgacaccagtaggtgtcatctgatgggttcttgctgcctggcgctgtgtgaattataaatgaaccatatggaaccactttatattaagtaacttacgtgttccagtgatagttatttaggttgtaatcttctcagaatctgttgttaatgactggtttgttttcacctgaggttgttaatgctccaaagcctattgttaacagtgccagaggtaggggtgtgtgtgtgtgtgtgtgtgtgtgtgtgttcatagaaggatgttactgtggaccatatgtaatgggctgatagcttttatttttttgccttagagtccagacatggtgctctggaatagccgttgtagggattatgtttatttgtcctgcatgaatgccaattttcggtttgtgcaaggaagggatgtgtctggaaacacttggagtactggatggcctctccatgtgattggcctttggagaccgcccattgcctcaggataaagtccaagtgctgttgcatggcctggagggtggccgtggtgtgttcctccctcctccccagcagggtcatttctccctctcacaccccaccacactgagccactggcagtgccctgatcacactggctgtttatgcttccctgcctttgcgcaggggatccctggcccggaaagtgctcaaccccatcttgtcaatttggcttcagcatcacttggtctctgagcgcctcctgatcccctc

SEQ ID NO: 87168 - DNA, 1930 bp, Homo sapiens
gtctcttcttggtccatgtggatttaacttggatggaatccctctggctaccagtttgccttggccagaaggagaagggctcctcctagcctcctcctctgctgcttcagccctgctgggcactgagcaatttcacagggcggtgttaaggatcagggtgtggagagtaggaaattagtaatgactggactgggtgagggtgactcttgtaattttaaagaaatgtttaaaaattaatcggttctctgctctgcagctttaaaaaagtcaagatggagaatttcccactgtgacgccttttatttctggaaagttgagtcatttaatgatgatttgaatatcaacagttcattggcccatctttccccagatagctcccgaaaatgcgctctcctccagagaaggacacttttcattcctttagttttctggcaactcaagtatagcctggcctcctgtgtttccccagaccattatcggagttgtactgaccaaatgggagtgggttttcacttgtacccactgctcctgtttaagtcttccttggaccaactgtgggtaggtgtaaagcaggcatggctgtgacttccacattggatggaggcttgattgattcgatgtgattccttgggttttcttggggttgtactaaggacttgtgtgcccaggaggacacaaggctaaagatggacttggtgcactgatacatggttcagttaggaacagatagtggaggagctcctaagacatttacctaagatattctaagggaaatcgtagactcttatttcctttgttatttagggagtagttggtggagatgtaggtggtaccagtgatgccatttctcttgtaggagcatttgctgagtcaaagtatctatttcctctggagggtccttgaatttaagagcttccagtaccagtagattgaagatttagtctgattataattttttccttgggtctcagaacattaagagtattcgaagacctggttctcttgtttcctcattaattttggtcctggatggtgcaggggttggactgacctattaagtctccttttcccccatccatgagcagtaagtctgtcatggggatcagcaaactctttttttttatgtgtgtaaagggtccagatagtaaatattttaggctttcagggatcaggatgcaatattgaggattttgtgtaggtatttaacataacaagagagaaaacatttacggagaatttttactgatgaaattcaaaatataatgacaattattgagtacagttttttaaaatacacatttgctaatgagaagaatggattttgtttcagggggcataacattttgctgaattggagtacaaagttactgttttctattatcaagtcagttatagatgtttgtcagtaaaaaccattcttagttctcaggtaagagaaaaacagatggcagacctgatgtggactgcatgctatagtttgccaacccctagtcagtagcatagctctggtgatgttagttttggtgtggaaagtgtaaggacgtggtatggcccaggaccccatgttgctctttgaatggctgggaaggtgtttgaatgccacaacactggaattttgtgtatttaataaatagtggtagagaggccaggcaatagaaatacagaagtgagcaggatggtcaaggtcaatgccctgggagagcttacattctaagagagatgataagtgaatataaaatttgattccaggtgggggaggggtgtttaaaggatgtctctctgggaggtgatatttggatagagatctgaactaagggagggaatggtcgccagaactttaggtgaggcagcagcagaggcaacatcttgagataggagaaagcttgataagtgtgaacctccaggaagtgcaggtgagagcagagagggt

SEQ ID NO: 87169 - DNA, 3075 bp, Homo sapiens
agctgctgggcagagtagactctagaaggcaagagtggaagtggttttatggggccacaaaactgagtgttgaaaataaagatagtctgaaaaatgtggagtctgtgaccagcatatttttaagattgtcttctgtgtcataagtcaggatccttctggtttcaaataacccaactcaaaggaacccaaccagaaaggagaataccttggcccacataactgtaaagtccaggagttttcctggttttgtcacagctggtcccagggctccggtgatgtcaccatggctctctctgtccctcatctctcctctctccttttctctgtgggttggcctcattcactccttttgcacgtaaatgttttccatgagttggtgaagtggccgtcaggattctggatgcacataggagcttggcagctcccatggaaatagtactgctttctttcagcatctgcatatcactgtcaggaaagttccctgattggccttgcttaggtcacaggtccagcccttggaccagtctgtgatggatagtcccttggaactgggtaggttccctgaagacaggggtgctgaacagacacaacagtgtatgtccagctttggtctgtcctctttggtctcccttatttttctcttccttttctgcctcagacctttctgttagggatgcgtgccaaaactcaagtggaactggtgtctttaccctcaaaacacagactcctgaattataatcacatgctgattttcgtggttaccactgatcatgaccacatgattcttttgctctgagggttgggccaaaccccctcccttgttctggcaatgctattttgagaggccatgggggcaggcagggcctggcgggttccagactctggctcaccttttaataacttgctctgtgaccctggatgtgccatttaacctttctgagacttagtttctgagctgggtgcatcaactaagatatccatcaaatactttggaagatgtaaagtggcatttagatgacataggctatgtttcccaggctaggacatgggctatgtttcccaggctagagtgcgatggcacaatctcagctccctgcaacctctgcctcccgggttcaagcaattctccctgccccagcctcccaagtaactgggattacaggcacccacccccacgcccagctaattttttctgtttttagtagagttgggttttcgccacgttggccaggctggtcccgaactcctgacctcaggtgatctgcccgcctcagcctcccaaagtgctgggattacaggcttgagccaccgtgcctggccagtcttttttaatcttttgcttaggaaagagagtgacggggaaagaaaggtttaattctggaccttactacccacacataccagatctcccctctttgcataacttcttttttggcgggcatgtttcttcatttttatcttcttgataactttgatgccctggttggactcttaagcagattatccttgggtggggacgtcagcagggagaaccaccccagactaagacaagttgtgttttgtctgtcagccaaaagcactcttagcaatccgacatagacatcattttagatgtacagagaagaaagaacaacacagtattgataagatttcagcaagatcccccctcccccaaagacgaaaacacacaaaacttaatgcattgctctgtaatgccttggttcctagtttcctaattaggcctgtggtttagcagagtgcaccatctcaatacacagatggtttttatgtaaaaaaatttttttcaaatgttaatttccagtgactgatgttttatgcctaaatcattttccattgtttatatttgataagaactgtatttgaactgctcctttataagttggagtcttttgtaatgggatttaacttactggttttacaggtgtatgaaaatgttaagccgtgtattgtatttgagagtttgaaaattcttcgttgcagctaatttaagaaaaaaaaaattaaacaggtgattagcagctgctttcggttttgaatgtcctcgctttggggttttgtgtttgcttattcgtgtgcaaattggtgtggttattttggaccggttgagacgctccaacattgcacctcccaggccagctgcccagggcccattcagtagacccttccccgcttctcggggctgatttgttctcatcttgtgtgctcgagagcttgctctctccttaatgattcaggccttcctgagaaaacaaagcagctctggccccgtttctccttgaggacagccttgttcactgccacaaagaccctgctttctccccaagcagaggaactgcctctcggggcagccaagaaccacagacccaggcggctgcagctcctacttctgaacttctggtctcccgagtgacagcttctgcatggtcttaagctccaggacccccaaggccacccagagtcagagtccaccgccggtgggaaaaacaacattaggaagtgggtggtgtggtgtagaaggggctgcttagagcttctggccttcggagctggatccagccacttgagcttcattcggcagcacacagacacctcccctccctcctgctctgccccagaccttgtgctttcttggcaccgctgggtcgtgcctgctcagacctggtcagtgtgcttgccagggcgaggagagctttgcataggccgctgctgcttacttattaacgatgacgctggtgggagctgcgccaccagctccctatccaggcctttgtggttgcatcctgttcacataaaggtgaaatcatgacctgcccgacttgatttttcagttgaggggcttttgtgtatgtgtcgttcttgatccagtaagaggattgtgctttcattcacaaagatttgatcagtaaataggaagagaaaatactcaagggagaaatgcttagtgttccgattaatacattaatctttttttttgatgagctgaaggtgctctgttgtttctcttgactgagtctttgcccttacctttgaccttagtgacttgatcatccagcc

SEQ ID NO: 87170 - DNA, 1901 bp, Homo sapiens
tctgtgtgtgtgggggggtgtgtgtgtgtgtgtgtgtgtgtttatggacagcatttgtacctgtaaaaccagaatgactccttcaggcattttttctcctgggtggttgcattcatgggctgaagctggctcttctgaagattgcaatgatatttaaggttaagggcttgccaggtaacaccttgaatgactcaaggctctgaggccaggctgcgtccatttgaaggaaggaagcatctttttctgattcatgcaaaggcatcttatggactaatggtcatcctagaaagtcatcactagtacaaggatcttttggaaaagtgagattggagaaggttgagtatgaaagtgatgtattagaaaggtgaatatgggatgtgagatcctagtcattagcgtttggagggggccttggaggtttgttagatcaaagctttcattgtgcaaatgaaatggcccagtgaggttaaaagagggaaggtcacacaaattccatgaaaaccataagtacaaggtttgaggaaaataattttaggacaaataaaagaagtgctgattttcattgcacttctaacagttttatagaagtgtctgtacctaaagtgttgtacatgttaaaatgtaaatatggtcaagaagattgtaggtgaaatcgaagatgatatgttgctagggcccagccctagcaacgtatcatcttttgaggagtgttcctcatactttgagattggttttatagagggctgttccttatactttgcgattggttttatagagggcaactctgttcacccacaaaagtctcttgatgccattgctggccagaacttgggtgggagaatgggaactgttcagcagagcaggtgaacaggtggtcctgccatcccagtggcaggggccccttcctttctcccgccactcccggaggaatgaccctgcatcttatgcactctctccgattccccaaatcccctaggtcccactgcttgggtttggggagtggggcacatctctgctgagagccagcccatcaagctgtctgggtctcatggtggcatatctttgttccaactcaatatgggcattttaatctttatttatttttaaaatttaattttattgaattcagctttaatattattgaattcagctacaagggagatagaatagggtgattgatagttaagagcatgggtcttaaagtcagaaagacaaaggctccaagtccagttaccaacttctgtaattctgtaattctggggggcggacttacctgtctgagtcttagtttcttcaactataaaatggatgtcccagtactgcctccctgccaaggttgtctgagtgagtcctcaataaaagctggtagtgagattaatagcacttgatggcaaagtttgtacccagtcatgggtaggggaattgcatctgccatccagtggctgaggtcaagtgatgacaccccaaactataggatcctggcagctacagcaggcattgctgcttccctttcggaaatcccaattgttgaggccctggctgaagccctgtcgagcccttggtgaccccactaccatttcctttatggttggcttactctgctttcttttgcaatgaatatagtttaaaatttctttatgagtgttctcctatttgctgccttagcctgtcacccactatgctgagctccccacccctcgtgatgccactcagcacctttatttgtgatgtggggtattctgggaaactcttcacaggcaactcagggagcctggccctccatcttatctcttaggaaatcctcaggtgtcccagggtttggcaccagagaagtgctgtagaccctgttttccagaaagctccgtgccttcacgtgtggtgagggagtggctgcccagagc

SEQ ID NO: 87171 - DNA, 1118 bp, Homo sapiens
gtgttgttcaaggtttgactgtacgttctgagcccaaaattggaacacatgccctaaggccctgtcctggatcattttatatatgtgtatggtcaggcttacaaagatagaaaaatggaattccattttcttacatatttctacaaattattttggtcaaaatctagaaaatacataaaactgaggtctcctggaaaagccagaatttatctctgggattgggataattggctattaggaaaggggtctaccttgttggcctgtggtcttgacttttccttctggaactgagaatatgtgaatggctcgtggaactgcacggaacccagtggtgggcagtatctttgtaaacaaaatgaggttggctttcaatggccagggaatgaatgtggaaccaaattgcagtttgtagaaacagagctgggctcagacatttaaattaaacgtatatttctatttgcacttccattttgttcggtaatagtgttggatatgggaaatcttgtctttgtttatatttgagggaactgcagccttcatttcctaaacggaagatcctgtggcattcctgcaatggaagctcaccagatgatcagaaaagggagagatggcgaagtaacttgtctctggttaccctcccattgtggaaattaatatctgacccaattctgtttgcccagtgagtttatggcttgctaagtggctgttgtaatgatccgtcaactgttgcaacagcattttctaacaattttattttacagttctgaagttttagtccataaattttttgaacttaaggctttgagttggaggagccatgtggttctaggggggaaaaaagtgccagatttattctttatgtctgtgagctgtgccttccccccattcttttccctctttacatgccacccctctgatattttctacttgaaaaaaaaattcatactaaagtgcttgtctttgtataatgctactcatagaatatttgtatgaaaaaagagtcaggagatgcgatgttcaacccaagtgcatgaattatgattataaagtttccatttaaaaatgaaggctgttggaacccttacgtgttgctgatggaaatataaaatggtgtagcc

SEQ ID NO: 87172 - DNA, 1028 bp, Homo sapiens
tttttctccctgctctggaaatgcgcttggctccaacacagcaggtggccgaggaactcaatctgtggaaggcatcagtgctttcagtgcaatcaaagttaagtgcagaaatttaattaaacggcatcaaggatggcagaaactttgtaaagctgcaatgcattgtcaaattcaacaattatttcaaggaacacaatccacagatggtgtctaattgataaattaaggttctgcttctctaatgggcttgtgtttaagcccgttttccacccatacaataaccatcacctccaggatgccccctttcccctctccagcttggacatcgctgcaagaagaaagcaacccagctcccccagatgacattcgggaagcctagggttgggtcctgaatgtttagtgggaaagacctccagctccttttcctgtgatcccaagctcccttttgggattgagtcttgtcctaaaaacagaaacaataggatttcttcgggcctgtgtgtccttttctgctctgctaacccggatgtgttgctcagagatggctgggttatttatttattcattttttttttctttttcctttttagcattgctgactttcttcctccatggcacaggatttttgcccaaaacaaaagtctcaatttatttgttctttaaaaaaataaaaaccacactgaacaaaaacctctgtttttcagaacttgcttcctgtctgttaatagtagatacccagctaacttacttttatttcgtaagaaaatatttgcgatctccaaacatccagtcatgtgcagagaaatgtatcctgtgttgagatttcatttgaaaggaaacctgaagatcttgggtgtttaccagaacttcattttgcagatgagaaaactgaggcacaatggttttttatataccttgctttgggactagttctgtgaaacatgatgtttctaaagctggaggagaggcagttgagcacatctgggctacctactttaaatggttatttcatccattcgtttgttcta

SEQ ID NO: 87173 - DNA, 1549 bp, Homo sapiens
tcccaacttttcagttggggaagttgaggtggactgaaggtaaatctgctggccccaggtccgagaccaccggtggggtgggtttctgtgctggacagcatctgtctcccccagcctgggcccttctcacgcctcttccctcccctgaagggatcacacgtttgaatgacttggagacttggagacacattctgtaattcataactctgaccacatgctgctcttaaatttccaccccgtgaaggaaagaagaaatgagagacaacccctaactttttatttttacacatatagtagaggtggagagggccaagtttacaacagaacctttgcaaaagcagcagccagggctcaggacctcactgggtacccttggccttgtctttgctccctacgggttgtcctggaacaggaaagcaaaggggaggagcgaagaggtggggacagccaaggaacagatcatatttacttatttgtttgtttatttctaacgagtagctgtggggaatgccactgcagaaccctttctaattgccttttatttatttatttttgccatagcgtgggtggcttttgaaattgcacgtaatttacggaggcgaggatcctgtgcctgggataccagatgatgtggctgaatggctgttggctgtttatttgctagtctgtcgttaccaacacagtattcttgagttcagaggcacaacagtgtttgatccccctcctctctcctatctaaatatatccaactagtcaatcagacttggcagccgtcagggctgtggctgtcagattgagtttgccttggctcctctgaactattggcttgttttccaagctcgaaagtgtatacaaatagtgatatctaaattagacttgcaaacacacacccaggtaggggccctgaaggggaagaatgaggcagcattttggtatgaaaatgacatttccttctcctccactatctgttggagagcacagacgaagctacactgaggggaatggcttcacgcttggtgaacaagatgcgtgggtgtgtttttctgaattgtgattaaaatgtttttttttccttcaaattttaagttgtatcaggagatacaagtggaatattaactcagtagatgggggaggtctggagtgtctcccatctgcttcccttctgaagggatctcagctgaactgaatgaggtatatgttgtgagcagttaatatacggttggtccttgtgatgttgttgtcttggctgaggattcaggaagactcttgggccttggagaggcctttggttccatggcctgccccattgggccggaacagcccctttcctcaaagctgcctcaggcttttcctgtagcttaggaacagcagaccgagctcctgggcccctccctggaggcttattaagggggatcagtggaaagaaaatcagagcatcttaaatccctacctgcaaggtacccttaattctccagggagaaaccttttataaataaatgtcatgagtgctcatcccccgagttgaagcttatctgcagagatgcttcac

SEQ ID NO: 87174 - DNA, 1050 bp, Homo sapiens
atgtttacctagaagtggaattttggggttaaaggctatggatattttgaaggagattttacatataaatatatatgaaaaatatataaaggagcttatatatatgagatatataatctcctttacaatatcaaaaaatttgtaatatatatacttatatataatctcttaaaattttttttatcttacattggccctcccgataaggagaatggtactattttctaacctcaccaaaagtttgagagattaacttaatttaaaaaaaattactgtttttgtaaaaatgatgtgtttatggtaaacatttttatatgtgctgaaggggaaggcttaatttaaaaagattggggtttcttggatcaacttgaattgcttattttaaacagccctcttcagtgtagtttggcaaagctctctctttcgggtttatttgtttacttacctacttatcttcaacacactgacctacccacctgtgtatcttatttggttaacatttatccaagtttgaagatggaaatagttttcctctgaatcagaactttcagtgtaactgttccaagaaaccgccaccacagatgtgggaagagggaagagaatgaggaagattcctgctgtctttttaccgcttgggtttacaaatgtggcaaatttggaaaatgtcaaaaagtaggaaaaataaaatgaaacctgagatctcaccacacagaaataattatagtcaacatattgatatgttttctctttttggaggaaaaaagttacagatgaacagaaatttgaaaacaagctgtgcctattttctgtttcttttattacacattttattatcaatgaatactttctgctgtaaaaaatataaatgatacagaaaccaatagtagtgttcccctttctagaagaaactataaaagggtgtactgttcatcgcccctattcacgctttaaaggagatgtccagctccagttgaaaatgaagttttcttacctggcaatctggtgtttctgaatgtgatttgaaatccgccaccccaatgagaatgagga

SEQ ID NO: 87175 - DNA, 1028 bp, Homo sapiens
agggatcgatcgtattgattaattgactgcaaaaataaattcagaattatgaaaataaagggcatctggatttagaattaccaaatatggctgggcacaggggctcacgactgtaatcccgacactttatgaagccaaggcaggtggatcaccttaggtcaggagttcaagaccagcctggccaacatagtggtagagacatatctgtctctgccaaaaaatacaaaaattagctgggcgtggtggtgtgtgtctgtagtcccagccacttgggaggctgaggcacgcttgaacccaggagacggaggttgcagtgagctgagattgcgccactgcactccagcctgtcaaaaaaaaaaaatcaccaaatattaggtgtgttaagatcctgggagatcaaatttcaccctctcattttacagataagaaaactgaggcccaacaaacattagtaattgcctcaccccaggtcaatcagccagttaggaacaaaacagatttcaggttctagtttgtgtccttttttctttttaaatgaagatattgatctattttttaaaaacaagaacaaaggccgtgtgttagtctagtttcagttgcagagagctgaatccactcccatctggtttaagcagaaaggaatttgtttgagggcattaaaatgcttccagaaatcatcaggagatacacggaaacctctaggttgtgcttttgggaacagccctcagagctatgcagcagatctgggtcttcaaatacctactgtctcttctgtcatctggaagtccccaccaaattgggaagatggtgctacagctgccaggttcagaaccacagccgcactgtccccatccgaaggcctccatggctgccactgtcctgctgtgatctccagcaaaataggttctccatgactagtcagtagagacagaggatattgctgcagaataacctaacacctccctggccatgttgccaggggaaatagttaaagtacagaatatactactttccctttcatacctagc

SEQ ID NO: 87176 - DNA, 1025 bp, Homo sapiens
tctacttaagaattcaataatgacttcaggcagtgttattaaggcctgcccagcaagaatggaggcacagaggccactctgagtgaacatatttgggggactctgagatacagccatttcggggaatggggagtggtgttgagtgcaaataggagataaatttagagataaaggatgacgagactcccctgcccccatccttctcctttcattcgcgttgcccttacaggtagatgtctgttcctgtagccaaggcaccccaggccgcgttagccgatgctcactctgaccgcccaggagcagcaggctgagtcagcctgtcccgcctttgaacttgtgtgcagctgcttgctttaattaggtgatatgtgggttcccttatcttcctgagagaagatttctcgctttaggtgatcggctattgacgccaatgtgggattagagttccttctctccagtttcccctcaggccctgttacaggatgtctgagataggaaaatcacatgtttgaacaagtggtgggtgagttgcttggcaggtcgtcaagactgatacctccagtgccctttcaggttggcaaagcacattcacatagaatctgatttgatccctggagaaaaggtatacaatactttggaaatgtcccatttcatagatgaggaaacgaaggctcaaagggatgaagagtcttgctcagggccaagtagccagcagacagcaggtctgggaaccctatcccggtctggatccaatttattgccctctccttcagtgcaagctggtgtccacttggacttggttttcattgctcaaatcccttctcgcctaggtagggagcccctgaagggcacacagtcaaatgggccaagcacggcaggtgagaccctgacttctcatgaccccgtgttctggagttggagaaacttctgctagattgactggagatctgggttttcggttgtgatttttccattctcctaaaggtagacagcagaaataaaaatcctgaggcccaccgttgtct

SEQ ID NO: 87177 - DNA, 1413 bp, Homo sapiens
tgcatttgttgtgatctcgtgtggccctgctctcagctcaccccacttctcttggctgccaggtttccgtgttttgagaaaaacctaaaaaaactaccacctgcctctactactcgatctactttccccaaacccttctctgagtcagggttgagttttccctcccgcccaccctgggctgggggagatgtggtctctcactggtactttatggaagggtgtctttattcaatttgactgttgctattatgtggcgaagccttcaataaaagtcgtgatttatgagatgtgtgtggctgtggttgttttttcgttttctttcttctttttttttttttttgctttgtcatctatcagggagagaaaagccaggcctgatactttcttggcatatcctgtgttcagttaagaatgtcagctgtcggccatcaggaagttacttctcggattggcttctcctcccttttacctctcaccacagtcccctcttgaaacaggcagaggcccctgctgtcctgcaggctggcgataaggggcctgctggatgctgtggggagagaagtggggcccctggagtggcccctcgccctcttaaccctcctcagtggctatgcgttcagcacccggtcagctcttgattgtttaataggaagaggcaggcagtgctcttccaggggtttccagagttttctttgttctcgaatacggtgactccccacccctcccaacttctctttgttttttggcctggccactttagaaatcctttcttttctttcttttttttgttttccttttcctttttcttttctgcaaagtatgtgcatgttagataaaggctcttgaatagaaggcctagcatattgggtattggctgctgaaaataggctaattggagatagaagcaagttgtcacagaggtgccgtgctagggggtgggaggaggatgaaccccagccaatgccaggatgactgtttccacctctcccctcttcccgctcttattattagctgtttgctgaaacgcacccatgtctttgtggagccacccacaatagcattaaccacgttgtgccctgcatcttaagcacctggttaaggccctgttctacgtctggaattggtccatgctgagcccccagagcgtgcgtaaatcaagtctttaacccacagcgggcggcctgggcaggaccgtggaaggtaggcctgctgaacttgagtggagtgtgtgcccctgggtttctaagcggcggcttctgaggcagagccacccagactttcattttggttagtagcggtgcttgtcagcaagttagaaacttggaaggcccccatcgttctggcctcctaacagggagagtgaagcgggggcaagctgggggacctgtaagtgcccactgggatttattcaaa

SEQ ID NO: 87178 - DNA, 1045 bp, Homo sapiens
ttaacttccattctagagggtgcattgaccacaacccttctgaagcttccattctggagggtgcattgaccatggtcctcccttctgaagcctccatgctggaggggacattgaccacgaccctcccttctgaagcctccatgctggagggtgcattgaccatggccctcccttatgaagcacaccttctgtggggcatcctgatggcagctgatttgactatgagtccctagcccagtaccttgtacgtagcagacactcaacaaatgtttgtggagggaatgattaagtgttgttggacaaatgaggtttaactgtacagatttttctttcttgagggaagggaaccagattttgttaagtgcttgccaggtgcagggcaacttccccttagaagaccctgggcttccaggcagaagtgcccttcagagagagccacacgccatttgctgggccatgtgtctgatttgacagccctccagggtgaactacaaaatgagccctccatgttccggctgacagctacaggtccccagttgcctctttgcctcaataaacagccagcccagaccagttagctgggttgggcgcattggggaatatatcttttccttttttctttttcattgtttggttggcctagtgcaagtgttttaaatagaacagacatcatggctataaaacatctgtaacactacacatttagtaaagttcctggcggactgagttctgtttgattggtgatatttttgctgcgactgttgtttccttttctcttctgtttatccctctggaaaataagttttcttttatgtgaggatttatagaaatatgttcctggcatgtggagagcatggatgtattaggatattggtgtagcagagaaatattacctccgaggcatggccagctttatctcatagagagtgatcttcctaatgtgcaacagtctgttactctttacagggtcaggagctacctaggttaaggcagataaagacactgccttgtgttgaggtagcatatcatttttgctagagcatct

SEQ ID NO: 87179 - DNA, 1046 bp, Homo sapiens
cttcttacagagccctggctgcatattagaatgttctggggagtgtttaaaaatactgatgcccaggtctcaccttgaaccaatgagatccctgagggtggggcccaggtatcagtaagttttaacgacccccaccccgcaggccatgcgaatgtgcagccagaattgagaacctctgcactacaggagtgtcagtgtgtggattaggtaaaacttgctcatcagaaactgattgccacgtacatctaaaatatggtaatgaaggtaatcaaggctaagggttgaggctgccatttgttcttttcgtgaaatcaactggagggtttgggggatggggtaacttggctttagaacctgcctaccagcaaagtttttatacactcgctcctaagaagagcaggccagattgttgctgatgagaacaggcctcgttctggcaggtggctcccagtttactggagagatgggctctggaaatcctctcttggtctggcttctctctgaagcttggttttccttaagttgtggtgtatccgagggtctgtagtctcggccattccttctaacatggtttctcagcctgtctgtgatgtttcccaaatgtcatagtgaaggactcagaggttccccaagatgatagatcgggggtggctatttacttctgtttacagggaactttgacatgctcaacttttgtgtagaaaccattttccctggtagttgctacccagataaatggaaatgttttgggaaaagagcaatttgggagctctgagcttgtcaccaaggttgtgtgttcctaaatcctgcagcctgtacttgggctggtttcttttaccctgagcacagccggtgtgaagagcctcaggcatttctcagcgtgggaataggcactgaggagattccagccaggaggagaagctgggagaaaggttgcgctggaggagacagaacccttgtgtggatggtgttctcagggttacgatttcacatttgttgtttcagcttgtgttatttcagccagtgtcctaggcctgttttataga

SEQ ID NO: 87180 - DNA, 1054 bp, Homo sapiens
gtctccaggtgcgaggtcagcgtctgtgttgcttgcagacgtataccagcaccaagcacaaacagctcagcgtagacagcctgtgcgtacttttgaatcgtgtgcatttcttattgacaggttttgtggatggtttctgggcagcagtttttatgcatttgggtctgttttgttcacgtctcttagctttaaaatagcttgacatgtgatttttctctttttgctagtccatcagaatgaagttgcgtgttgtggctaatgaggttctgaagtctctgtgtctgtatgaaactcaagcttttaggttgccatctgaatgcctgagatatgcagagtgactgtctctagcatccttagacatctaaacgcccgcgccatgcagcttgaatatatctaaaattgccttcctagagaaatgtggagagcagattgtttcagcagcctcttgagccctgctttagataacctggttaacccatgcctttctcttgtcatttcttgcagatggtcacaagaacaaagaaaatatttgtaggcgggttatctgcgaacacagtagtggaagatgtaaagcaatatttcgagcagtttggcaaggtaagcgctggatggggttggatggcacatgccagaagtagcctcatcagtcctaagaagaggctaccgtggcccccgcccctgctacagctgtgtcctcaagaaccttgtccttgaacctggccatcatgatttaagtgaaattcagcagaagctgagatggaagagtctggcttgcatttggtgtgatgtcccacgtgctggcaggagcagacagagtggccttttagtgcagttttgcgggcatttgctggccacacggggcctgggctgggagctggtggtgacggcagctggggagggatgtggggctgtgactcgcagggcaggagctcccatggaagctgctagaggcctgcaggttggtgctgggcttctcccttctgtgcctgtttggaaaatgcattgagagctgagtctccctggggccctttgcagctgaaccctcccctgtcaa

SEQ ID NO: 87181 - DNA, 2429 bp, Homo sapiens
gacatgtcaccgtgggtgaggtgtttaattcggcctctttctagtgggtgaagggagatggtgccttgagagtgggttcttgctgaggatgacacattcctcagatggccctgttgccttaggagggctgacccttgttggcttttgtgtataccaccctcctctggcccctgtggaaatggcaggttcaaggaggctgcgtcctgcatctttgagtaattgtggacatcgcgtgggagcccaggtctgggacagtctcctcctgacaggtttgggtcttccctgctgaagggctgacatgggagagagctgctgaggcgtcctgagaagacacagtgcccgtgctaagctccatcacttgtttcctcccacgatgggtgtcgtgcttgccatgggtacaaaggcacagccacccactggccaggctgaaggttctgtgctgttggtttgcccagggtgataggcagctatgaccctgtccccaggtgtgtctgtttgtgaactactgtctgggatgagggccatgacctttattcagcctcaaaatggagatgttcttgtctctggtattaatttctgcctggataggagaccgtgcaacaaagagaagccagcctcctccagcccagccttgcattctgagtggctctgagctgcccttccaggttggttttgaaaaggcctcccccatggccctttctggtattgtcagctggggatggattcattctggctgggtctaaagaatagccaagtgtgttgatgactgtgtacgttatagcacttctctcttccagactgatgtaaagcagtaagggggatttgtccatcacccagccccaccctgcctagggagagggattggaaataattaaatgagacaggtccggcttgcataatggaaagctctggagggtgagccctctttgctatctttctgcttttaaaacaagtccaggggtagtgtttgcaaacatgaagtgggatttctttttcgagccataacctgccttggaatctcatgggcctatttgtgtcagaaaagtcggtgctgcccagatgggcttttagagtattccagacaggcttctacttgccaacacatagcacatctctgcacgtccccaacccttggtttctttctgtctctctctctctctttcttcctttctgtatttctgtttctctctctgttgtttttcattaacacttatcattgtgacccagtatgcctccagtaagacacactgcaagctttggccatgcccacagtggccaccattgctgcccttagaacagttgtccttttgtctgagaagcagtcacaaaccatcttccctggcatggcactcgctgggtctgaagctgcccagttaattttgcagtaatgtttgtggactctggcaggatgtgcagacttatcaagtgttttattaaaagaccaaagaggcttttgaatgtatcaaagccataatgctcttcaatgctcatattttagtagcttttttttcatacataggttctgtgcattatttgtgtctgtctgcagaatggcttatttctcatttggctggtggcttgtgttactgtgtgtgtccccttgggcaggactcaccacctctcaggattctggcataacttatttgaatccagaatgatcaaagtcagggagactctgctgctgggccttgggagcactacaatgattaaatccagtggttgtgaaaggaggtaacaggtaaattgacagactgcctctccccttcggtactttatactctggttgaaggaaacagaatgaatgtgcacacacacacacacacacacacacacacacttgcatgaagtatattcacacacatgtgtacaccccctgtgcacacacatttctaactgtatgaaattgtttttgactctctttaaccaactgcaatttaatgaggtgtatgcgagtgcaaagtgtgggatactaggccaggccatttactcacattatctcatttaatttttctctggggggctggtagtggtattctccatgttgtagactgttaagtggggtcttgatgggattgtctcttggactcaaggtcacagctctccaggaggtagagctgggtgtggactccccctccaggcttgtctgataacagcatctgaactctgcaccctgtgccaactgctgatcagtccccaagatggactgacgatgggcaagatgcaaaggacaggaagatattgtgcccttcagtgtgccccggagtgctggggacctggacattcatcacctcattttacctgtgcagcagatattggtatcctccagtctatttggcgaaggtagacagtcagggccagggaggctgagtgtcagcagaggtcacccaggtaagacagtgtaagagccagaattcataccctacttcctt

SEQ ID NO: 87182 - DNA, 1019 bp, Homo sapiens
tctgtgttactgccaaagttctgtttcattaggcctacaagtcatttccaattcagtgggctgctacaatccggcctttatcacgggctgctctggttcccatgtcccttctgggccagtgcctgagtttgtggtttgacatgagggctttaaccccttcctgtgccagcccctcactgtggtggccgggaagaaaaggccttccaggaaccggcgtggaaagttacagctcttgaggtctcgtcaaagtgggagatcgctgtggaaaccaggtgaaagggtccttggagccctttgtgtcggattggggttgtgtgggggcccataaaagttaacttgagctctggagaatggtgtgtgaaagctttttaggggaagaaaaaaagaaaacaagagtgaattgttttttttaatgtaatgagaccttcccgtttatccggccagcgtgggcgattgtgggtgagtgaggcccgaggaagcgctgggtgcctgcgatctcccagctccggggttttctgtgcaggtgcgaagctgcattcatggcccccactcagacaccccttttgatactgtatgtgtgaggagagtcatacctggaataaaagtctcataaagccctttgaaatttaaaaggcatgagatctgtgagaagataaataagcctgagagtggactgtgatcctcaggtagtgttttcttgctttaaatgtgtgtcgtagataaacagagctctgtgcagtgtggttctctcagaggaggcttggaaaacaaaagtcttgtgtgtcctttgtggacatctgagctcccgtgaggctttgtcctctgaagtggttcatgtaggtgggttgcccggggagtggtcagcctcccgggcctcaccctgtcctctgctccacctttttctggagagcctgggtgttgcccttcagaccttcttcaacgacaattgtaggctggaccaggaaggaccatgcgcacgctcttccctggctgaaggctacttttgtgtttaaattttc

SEQ ID NO: 87183 - DNA, 3005 bp, Homo sapiens
tgtttgaccgcatttcctggtatgatttagctgtatttactttttctgctgcggcaaggagaggagagccagcggtaggggagcccttgggcacaaaggagttaatgagccctgggtgggtaggggcgggggggcggtatgaagtacttccaccagctcaccttcccagagtcctcctgggccctctgaagacgtcacttaacaatggagttgttagtaggagaaaataaagcctttttctccctagatgtagttcagtgggaactgaaagtgtaccagaaatcatggttcaagcttgtgccagtgggtgcaaggggtggttcttatggaggagaaagcgcagttcatttagacttggcattgaaatcgaactctgttgttcggtggagtgaacattgatatggagattcccacccgccccccacctccgtaggatacccccttacacaggtcctgtatgcttttctttttcttccattttctttctttattttcttcttttgtcctcttagaaatagtctctctgtagaccggccagatttgtcaagttaccaccctctaaatttttacagctccgtatattcagacttggtatttgtgaattagctaaaagtgggctgccaatctgtactttatttacattcgaagccatattagtgagagccccagaaaaaaatgttaatatgcaggaagaggcaaaagggttgagtttctgactgttgctaacctcaccactgcctttaaaaccaatcatgaggcacacggctgatatttaatagcttttagctgattatttttcttctcctcctctttcttttctatccaagttgacctgggtgtacttgagtggaaatgaagtcatccaaatgctgaattagaataatcacaggcctctaagaatgaaatggaagcagagattaaatggcggagggaaagccggcattaataaggaccaggaaaactttgcataaaataaataggagatggaatagattgaatttgtatatgctgcttccatttcttcctccattttgtgttgtcttcctaagtcgagttactggcaaagtgggatttgatttgccacaaggactcataccttctgcagcctaggtgatgggcctttcttctttgtgggacgtttgtgtgaccattgatgtttccaggaaggaagaatctgatggaggggctgttaccatgaaatgttgatgattacttggtacaagtagtgcgtgggagacagatgaaagagtgtggggcacaggcacagtggctcacgcctgtaatcccagcactttggggggccaaggcgggcgaatcatgaggtcaggagttcgagaccagcctggccaacatggtgaaaccctgtctctactaaaaatacaaaaaattaactgagcgtggtggtgggcacctgtaatcccagctactcgggaggttgaggcaggagaatctcttgaacccaggaggtggaggttgcagtgagccgagatcgtgccactgcactctagcccgggtgacagtgtgagactctgtctccaaaaaaaaaaaaaaaaatggggagtatgggagccagtgcaccacaggccaacttaatattatgatgattcctcctcgtagggagaagacctgggcaggatgcaggtagggtgactggttgtctgggtttgcctgtgactaagggggtttctaggaacttgggccttgcaaactagaatgaattggtcaccttcaagcggagtctggagaagtcaagacacttggcctgacactctaaaagggtcagcatcttccttgaccacctccaaggagatttaaatactccttcctgcgtgctccagaacactaacttcatacctgtttacattctgccttcttcatttaatccagctgctgggtaaacagccagcatggggccttgcgtgagcacaggccggcaagtgttagatgagcaagtggctgctgaaggcaggtcagacagacccacagtctgtctgtctgtgcacccctctgggcttctatttggcgattatttctgtgtctcttgaaaaaaaaaattctgccccaatgtagcgaaaagtgagcttcttgtagttaaagagcaaaataaggatttaattaaattaaaaaaaaaagaaaagaaaacccagcagagtggtttgtttacaggaagtcgtttttaggtggtctgttatagaagatgtaatttgtgaaagtagattagttgtaaattagagattttgggttgtcgaggtcgctaaccatcttttataattggcggcagaggtaaatattttcagatttgcttatagagtgttagtattgacaaaacaatttaaggtgtttttcacttaaggaaaaataagtgagagtatggaatgatcagagacgggcttcctgatcttattcccagctttcttatggaatgacaagggtatggaaagcaacagggagatgaaatgctggagtagtttgcaagggagcttgcagattctctgatagggaaacagttttatttatttgtttatttattttattttacttatttatttagagacagggtctcactatggtttcccaggctggagtgcagcagcacgatttcagctcactgcagcctcagtctctggggctcaggtgattccccaacctcagcctcccaagtagctaggactacaggcatgcaccaccatgcctggctaatttttttgtatttttagtagagacagggtttcaccgtgttgccgaggctggtctcaaactcctggactcaagtgatctgcctgcctcagcctcccaaagtgttgggattacaggcgtgagccaccacactcagccgatttttattctttaataagagcaacccatttcttttatcaacagacttgttttcttagcaaaaagggaggacgtattgatgtcactgctttccattcaactaagttggtatttgtgttcagatttagggattcctgtttgcccgaaccgttcatgtatcttttaccttg

SEQ ID NO: 87184 - DNA, 1052 bp, Homo sapiens
tctgtatcggagggcagggaagttccagtcattggagaaggagtttcaaagggtaaaattaggattttttttttttttgagacagagtttcactcttgttgcccaagctggagtgcagtggtgcaatcttggctcactgcagcctctgcctcctgggttcaagcaactctcctgcctcagcctcccaagtagctgggattataggcgcctgtcaccacgcttggctaattttttgtattttttgtagagatgatgtttcgccatgttggccaggctggtctcaaactcctggccttaaaaggaggtgagcatctgcccgtgttggcctcccaaaatgctgggattacaggcatgagccaccctgcccagccaggatttttctttttaaaatggggcattaagagagtatattccattatctggagcatttccttatgtgaaacccattatttccctgcatcctaggatcccttagctatttccaacccgcagcaaaagcttaatagaactaagggaatatctgggcagggtgagctggtcagtaatgcccttttcagagtcggtagattctcaggcaggtttcggcatagagggtagacacagagaagggaaggatgtcaggagggtaaaaattgggatatgcaactctgtttcatcttctctccttctcttctttctgtctttggtctaagaaaagcagtagacttgctgcttgggaggtaccagggtaggtcagtgactttgaaaagctggtgagacggtgagagcgttgactcatctaggctcatagatgttatggatcctctgggcaccagggatgggggtacttggatgggcatcgggcagtttctctcccagacttgccgtcttgtgatcagccagggtggggaatgaaaatgggtccaacaacattaagccacagcacaatcctccctgatgttgagaaatctggctgtggacatggagaatgtgtttgtgggtacatttttgcctctcgaatgaaccgaatttgccattggcatttactgccagactgtcgggaattatgtggg

SEQ ID NO: 87185 - DNA, 1084 bp, Homo sapiens
ggaggagaggaggaagcccagagtgtgacttgccccacacacccctggatatcacagtcctgcccctgcccattttggaaagaaccacatggagagggctcacttccatggacctgaaatcgtgagtttgactttgtcatcagctgcagagcaaggagggaggcagtttacatctggatgcctgcattcaccttgcccagagatgctgactgctgaggatgcacctcagggctttacagatgctccccttcttgccatgttcagtctcctccctgagatcttacccctcaacccccaagaagccacaaggcaggtctgcttgtttgacccatgagtggaacggtagatgtgatcttttcaatgtgaaagaacctcagcgaacattagtcagggtgtctcagttataattcagtctcattattgcctcccggatgtgattaacctgggatctgctcatgaagggatttggccgcccaaggaaatggacaaagatgatggatcaggtgcacctgggacagaatgacagctgaagtcagtggttttctgctaaacccataacttaaccactggttgaaagtctgtatcaggtgtcccaaatcaaatgtattgattctagatgcctttttgtaaagaggcaataaaaagaaataccatttattttcacaattgttccttcctccctgtgtctaggaattacagagtcattgttattattcctcctctcattcgtagctccaagtacatagagagcagggcttgacacactttgtctgtaaagggtcagataccaaatattttagactctgtgggccatacggtctctgtccctgctactcggttctgctgttgtagcacaaaagcagccatagacaatatgtaaatgaatgagtgtggctgtgttccaattccacttttatttacaaaaacaggcagcaggcctgtgggccgtaagttgctatcccctgttatagacagtcctagtcgtcaacttgacgtctcaaagaaagcagcgatttcatagaactgaggatattttcaggatcagtaataaactttaggggcatggctatgctcatttgaaata

SEQ ID NO: 87186 - DNA, 2049 bp, Homo sapiens
ccacaaacgtgtgcaaaggcttgctcgtcatgcaacacttatctggccacattcctgaaagtggaaggccaaagtgggaacttttatgcagctttatgcgacgggtccttgactctgctcactcacatctataagctgagaatttggtggtaatcacttttctaaaagaggaaaaaatggatccacatggattaatctgcactgtttaggtctgtaaaaaaccagtgacattgacatgtcaatgaaaatggtggaaattaacacttggaaatttttatataaaacctttattgaaaattcagttaaacattcacacactaaaaagagctctatatttataactgaaaaactcaatttgatgcaagctgcttatttctccattgtggtcacgtgggctgaggttcttagtatgaaatgtaatttacacaaattagtccaaggcaggtagagtgtgaaattaaattgatgccttgatttctgtattctctagttaagtgtttctctgaaaattcgtcatttctgtcctaggaactttaaagtatggaggttttctttttttttttttttaaatagagcaaagaagttcttactggttaaggacatgaaacaaccttaattacaggctaaaaaggcacgttccattttgttttgtggctaaatattagagtgacccccaaattgggctgccagtagaggtagaaaacttgggctttaacgcaattattacatttttctttttttttttttgagatggagtctcactctgtcacccaggctggagtgcagtggctcagtctcagctcactgcaacctccgcctcccaggttcaagcgattctcctgcctcagcctcccgagtagctgggattacaggtgctcatcagcatgcctggctaattttttttttttttttgtatttttagtagagaagggatttcaccatgttggccaggctggtctcgaactcctgacctcaggtgatccacccacctcagcctcccaaagtgcagggattacaggcatgagccactgtgccagccagctagtacatttctcaactagctgcaccaagccatctaatttctttggttgtgatgagaacaggttagggctgttagctgtgtagacctagaaggggctttgcagacccttttacagatgagaaaactgaggctcatgaataacattctgaccttggtctcttcggtcaggacgccgtggaccctggctgggcctgcttctgcccctgagtccgcactgctgcctctcactgaggacagttgtcggtgttggtgtcagattgtgtcagtaatcgtagtaagaatgaatcaagtatggggtatcctggttcaaatttgataatccaagaggaaggagaatcactacttgcccagaaataatggaaggccaagatgatctgacgaccttgtaaggagatcaccagtgctctgggactgaacccatctgctgggtcctggggtagctctgttgactgccctctgctgaaaaggagtcaggttgcacctctagggtccaggacgcaggtgattgcattttatcagcatctttctcacaggccaccctccagcaaggtagacatgggtcagccctgccaactttggaatgaatcatttctttcaaataactagcgactgacgttcggggcagtctgaaaaatgaattatgggctctcacgatttttatttgtccatggtggcataggtggtatttatctctcttgtccttgctctcccccacttttggagcctttgtctctgtctgagtcagcatgacatggtttgaaaattgcctgtttggcttttaatgatgattaatgtccatagccatgtttcaaatttaggatctcttgaagagtctccgagaccgttaccaagagcaacctgccgagggagtcggcgcagagctccgtactttcccagcctgaattagattcctcccaaacttctccatctttccaccagcaccccgtgggcccttcttgggtctttgacaccaggagctgagctggcctgcccatctggcaagctcc

SEQ ID NO: 87187 - DNA, 1963 bp, Homo sapiens
gttctgagctacatcccaagttgcccaaagtcaggttaagtccagcataatttgccatttgttaaagtatgcctgttgatttgtcatctttccttcttgacttccctccctcagcacagatctctcatgccagtagtcaaatataaaatttttcatacccacccagcgttttgcatgggttcttcactctctcctgcccgcccctcctcaccaaatgagttctttctttgcgaagctggagccaaaccaccaaaatgccacaaagacatgtggcgcagctttttccagtttttctcttgcggtagttacaatattattaaaaatccattaaattttaatgtaccctataaaatatgtgctcttgtgaaagcaagcacagataattatttctgatgaataaaccaagaggacaagtatgtatgaagttcatgctgcagcattcaatttttattatatacatctcctgcaggggcaatcactgtgatgttccagctggttgtgtggagggctggttcttctcagagatcctttggggcagcatgaaccctgaactctccgaatgttctcagagcttgttattacctggaaagagagagccctgtgtaggagctgtcttctgttaagctcttcaaacaaaagaatgaaggactaaatgaatcaggatgagaaaaatgcagtctctctaatactccaaggtatccttctgggatgaggagggaaaaatcagacatacatttgaagatcttctacctagtagctctgttcccttgagccagtctcttagcttctctgagtatttgtttcctaaatgggagatgagcgttctctctgccttggggcttaacagaggcacagaagagcctgtgtctggctcagagtgggaattctgacttgcggtttccctctttcagtctttttcttcttcttctggagatcctttgaaagttttctcatagctccagaagttggaaaacagagctgctgcctggcctcctggagtctgtgtggtgtgaggcttgggagccattaacacatgactatctagtgtcacagctgctggctctggacatctcctgatgcttcaggggtggcttccatattggtttccagaggctgcatgcacctgccaggtggatggaagtgtttcccatgggagttgctgggcccctgtctgccttctcggggtgcctgtggcctctgtgcctgatgactctagggcaggggtctgatgactccaggacagccagtgtcatccctttgcttgcagatgaggtggcttagaaccaagagggaggagcttagcccagcagaccctcctgggatttgttggaggctgtgcttgggagtcggacacctgatctgctttgcaattttatgaggtccaacttctgatcctcagcgaggccccatttccttcctggggcagggttagtcatccggccctgcaggaggtggggcaggactcaggaagcacttggaatggcctggaaatcatgggctataaaagcctttcttcccagggtggcggagtgcactactctcacatttaatcctgcccggtatcctgaagaggggagggccagggttgtaggtgagttgcatggagttattctggaatattccacaactacagttgggactcagctgctgggatcagtggtgaagaaagtcccacattttgcacagaattgggtgatctgtaaatgaaggaagtttatttttaacagcattatgattttgtttaaaaacgaaaagacatactagaaaaaattaaatacataagtaaacagagaactaacaaatcctctcatctcatcaccatgagataacccacagtaacattttggtgtaggcttccagaggtctgtctgcacatatataaactacggttgtgtacacttttatataaatgagatcatatgtggtgtttgccagatggccttttctggtcagtagtatgtca

SEQ ID NO: 87188 - DNA, 2047 bp, Homo sapiens
accctacatggtcatatttgttgccttcattgtttctgtgatatcgatgcactatgattgacttacgcaaacccttagttaggatcatttaggttgtttgcagtatcattatgatcattgtttggtattatagccagttctggcaggaccgcccttgtgcatgcatttctctcctgctcctgcaatacttttgacctagcaattccacttctaggaatttacaataaggagataataatacgttttacaatttgctatttattgccaaactgccccacagggaggttgtactaatttacatttctaccagttaaggcagcataagagtgagcttgagcttttggtcttaggatttttgtgcccaagtctttctaaaatttacattcctctgaaatttgtcatatggaacatttttttttaatattgaagagtgaggaatctgttataccttgacttttaaatacttgttacattgcctctctgttctctgataatccatgaagttgtaaatggttttgactgagtgagatacatgcaggagagtttcaggatagaccgggggttgtgtttctgtttcagattgtcatcttgaaacaaaaatggtggcaaataaaatgttttcaagtggatgtgtttagtcgtgatttttaatgggtttttgatcattgttcctagctgcataccggttttgtcctagacaggatatagctgaagacaaatactgactttttccttcatctaatacatttggcaattacgtcttgccttgtgaaagcattaccattgttatttaaattttgcattgctcttttaagataacgttcagcttgttgcctgtttatctcttccctcctgctgctcttgtgtgcgtcctcacggcacatggggcagtgccctacactcagtagtcacccagtacccattttgggatttttctccaattataaagttttagcattaggaggtctctgagagtcaacttttccccaattgtagacatgtttttgatcttacatacattttaatttatttttttcattcagtagtaaatggttgttgagtgcttttgatgtaccaggtgctgaggtgactgtgccgtgacagtgtccccatcctcgtgcaggtgatgaatgggtgtccatacagccttggaaatgcacaggcctggggcacaggcctttttcctctcctgttgttaccttttacatctgcatttgataaaaaccttctccagagaaaggcttagagttcacagaacctttatttcaatggaggtctgcagtgttcagcgttagagtgaagattttcatgaagcatggcctgacagagaagtgtttgaggaagagattaaatggaagcaaactctttccatctcttggggaaatgggagatgcgggtgtccactggagccagggcttctaaattttaaaatcacttcttcaccaggctgaagccggggtgcccccacggaaggtactgttgaattgcttcgaaggtttctcattgagagaagctctctgtttctcctagttgggactggcatgaataaaagcagaggccaggcgtggtggctcacatctgtaatcccagcactttgggaggcagaggtgggtgggtcagctgaggtctggtgttcaagaccagcctggccaacatggtgaaaccctgtctctaataaaaatacaaaaattagctgagttgtggtgatgcatgcctgtaatcccagctacttgggaggctgaggcaggagaattgcttgaacctaggaggtggaggttgcagtgagcggagatcgcaccactgcactccagcctgggtgacagagtaagactctgtctccaaaaaaaaaaaataaataaaagaaaataaaagaaaaaatgtaaaggcaggaatgtgtacaggacctcacgggatgtggggaaaccagcctggttgcagttgagggtatgagtgggaccctacttctctcccgctgatgaatgaaatgtataaaaccaccttcctcattatgtggtcctaaggctgaaatgaggccacgtacgtaaag

SEQ ID NO: 87189 - DNA, 1003 bp, Homo sapiens
ggttagtaaatgttgccatgtcattaattattaatacattgaattacaaagttatttaatccagcctctccatccaatccatatgggaatctcatccgcagtattcctgacaaatttgatttgttaggaatctcttttaatctttcatatttgatcggcttttaatggtttaaggaagaacatttcaggagtaaaaatctgcttccctgcttaaagagcacatagttccttattttggctttgtgagctctgcagtgggacaactctttccctttcccacatattttgaataattctttaatatatattgacatagatattactatatattatatagattagctatatagacatataaaagatattttcactgtctcagcaaggggaatgcagcaggaaaacagggtgatagtggggagaaagtcagcaagaaaacgtgagcaaaggaatgtttgtatatcagtgctttgatatacatgttagtggttctcaaatttggctatatattataatgatctaaagagcttttcaaaaatacaaattcatggacccatctttggagattagatggtaggactgtggtaaaatctgaacatctttgtttgtttttatgagacaaggtcttactctgtcacccaggctggtgtgcagtggcatgatcgtggctcactgaagcctccatctctgggctcaagcaatcctcccacctcagcctccctaagtgttgggattacaggcatgagccaccccacctggcctttattttattttattttttaaaagagatgtggccttgccctgtcacccaggctggacccatgctggagtgtagtggcctgatcatggttcactgcagcctcaaactcctgggcacaagtgatgcccccacctcagcctcctaagaacccaggattataggtgtgtgccactgcttctggctgggcatctttttttaaaagtcctaatgtacagctgcaattgtgaaacattcattacctgtttt

SEQ ID NO: 87190 - DNA, 1029 bp, Homo sapiens
atggagagctagtggtccttcctggatctgcgtgtcctcagtctaacccctgcagatctcccttcatgtggggagggccttctagatggcacctgggctatgccgacttaaccctgcatttcaggctgatcccacacagcctccaaataggcactattgctctaaggtgtctgggagagaaaaggttggccccggttttggaaactttggggttttgcgtgtgtctaaaaagattatcttcagtagttttgctctcccagtgagaaaaggagaggctgatcatgtgctgccagacactgggcaaagggtgatgtttgtaatgaccatccagtgactcctgctgccgctgtccttcctgcctggatgtttttggagcttccgtctactcattcagcatccagggaggctgtgatgaagtaaggaccatctgttagggaccagatagcaaggacatttgcagcgcattgaaggttggcctggatgaccagcaagggtttttcctgccctgcatgcctggactcccacctccccacccctggttaggcttcctggttgtggggagtcatagccagtggagctctagtctgtaacaaacacaccatcggaacaacaaaccctcaggtctttcacattgattagataattaaaaaaaaaaaaaaacaattaaaatagctaagcaaaagggagaatttccggtctcatcctggagaaccagcattctggtgtgtgtccttccacactttgagcgcattcactctgcagttgtcacactggtgatgaacgtggacactgggagcaggcaggcctggctgccattcttgcccccatcacttcccaagtgtgtgaccttgggcaaattcatctgtaaaatggtgattcagtagaaagtatttgataggattgggagtcttaagggaaacagatgcatggaagtcctcagcagaggacctcacacacagtgaattctcaatccgatgtttatttaaatcatatgtgccttgttatttgtaaggatggaactccctgcaa

SEQ ID NO: 87191 - DNA, 1048 bp, Homo sapiens
atttgaagggctgccctctctggaatcaggcagtctgtccttgggatgagatgctagctggccctttggcttcttccttagagatgtttatgctcatggcctcggccactctccctcttcctccaggtttccgccggcagcccaggcctctccctgtctgactcccccactccctttctgctgggcatttccatttgaatgttccaggctcatctcaccttcgccctcctcacactgacctcactgactccagtctggtctcctgccctgagtccctgtctaggagaagaatggcgtttctgacagctcttcctgactcactcgttgagaccgatgcttatctgctaagcgattcctgtgttcactccttctctcttctgtctgctgtccccatcacaagcaagactgaaccccttctgcttcctgatgtgattccttgtcacggtccctcttgctccaacctgtgttgccctttgctaccagacgcgacttcctgaaatcctgttttcagcagacgatcctctgttcccaacttgcagtggctccctacttcctgccacagtgaatctacagtcctctcaactcagttcacgtccgtgggcccttccagagtgacaggcaccatgatcagtgctgccacctccctttcgagaaaggatttgagacctgtgtggaacaactcggaaagggaggctcagacactgcaggcggcttctctaaggtgacacgccaagttgttgggtgtactgggttgaatggtgttctctcccaaattcgtgttcacctggaacctcagaatgtgaccttatttgtaaatagggtctttgcagatataattaggtaacatgctgttgggaggagggtgctaatgcagtgactggtatccttataagaagatctgaagtcgaacccaggacacacatggggagaagaccccgtgaacatagagacagggatcagagtgatgcatccacaagccatgggacaccaaggattgctaggagcccccagaaggcaggagcaaggcatgggacagactctccccaga

SEQ ID NO: 87192 - DNA, 1775 bp, Homo sapiens
cagtggtgtgatcttggctcactgtaacctccgcctcctgggtccaagcaattcttctgcctcagcctcacaagtagctggcactacaggcacctgccaccacacccagctaattttttgtattttggtagagacagggtttcaccgtgttgcctaggctgatctcgaactcctgaactcaggcaatctgcccgcctcggcctcccaaagtgccaggattacaggcatgagccaccgtacctggcccattttaacaattttgaaatatacattaccttatgattaactatagccactatgctgttctgtagatcactggaacttactactcctgtctaactgaaactttgtccagcatctccctttgaccagcaaaccctttgaccaacatctccctccttccccatgcacccccatcctctggtaacccccattctattaatactctctgtttctatgagttagactttttaagattccacatgtaagtgagatcatgtaatatttgtctttctgtacctgccttatttcacttaggataatgtcctctaggttcatccatgttgtttcaaaggatgtaatttcattgttttaagtctgagtagtgcatatatatatatacaccacattttttttttatccatttacccatcgatgggcacttaatttgtttccatgtcttggctattgtgaacagtgctgcagtgaacataaggccagccaattttgattgagtgtcttcaacatgtcaggtgctgtgttaggcactgggggatataagatggacaagactctcactttcatgaaacatacatttcagtggagggttgaggggaaaacactcagatggcaagcaaataacaaacatagcagagagttctctttgctatgaagaaaatttccactaatgtaagagagactgcttggggctactttcttttttattattttattatttttgttttttgttgatcttcccttgagttgcaacttggggctacttttgatgggggtggtaaggcaagtctctctcagaagctggttttgaagctaagccctgaatgaaggaagaggccagctgtgtgcagatatgggaggtagtcattcccgagagggagcaggcagtgcaaaggccctgtgacgggacagaatttggtagttcaagactcagaaggaagacaggtgtgatggcacctggtgtgttggggaagaggcagatgggccacgcagagccttgtgaaccaggggaagaagtttgaattttcttccaagtgccgtggaaagcctttggaaggttttaagcagacaagtgacaagatcagtgtttttaaaggtcactcagatttttctgtagagactggatagtggggagctaggagcaccaaaggtgatctggctttaatgcccagctcaattcttctgtcgtacacctctaatccactgtcttcctcccctgagctactcgtgcacttaaagtcaatacagcatgctcaccacttaattagaaaatcgtttctgcacactaaagagacctccccagccagggagggcctcagggctatgctgtctcacgtaagtctcctttggaatgcccctcggtccttggggatggattcattgcccttccaatgggactgagtgatggattcatgttttatgtgaaattgtcggaggggtagggggtaagcccatccctcctagaaaaaattttatccatccaggaactgccacactcttaataggagacttgggggatttgctctactatacacatg

SEQ ID NO: 87193 - DNA, 1782 bp, Homo sapiens
tttagagaaaacattttccccacccttcctgtcccttctcctgggttgactccagcaactcacctctcccagctgagaagtacttgacattggattcaaggacatcagagacacttacagcctggagcctggtgtgtgcattgttgatgaatccccaaggttgagccgagacttggatggtaggtcaagtgtctgttgaatatcagcagaaatattttccatcttcctgatgaggagggaatttcaggaagaacatttttggtgtctcatttcttgggattgcctttatcaatcgtgatgcatatttttgggcagtaaccttacttttggatttattttattccccatcctaactcatttcttcgtctatttttatcgtgttgtagctatttttgtaagacacctccaatccctttggaacaaaatgaagtggaaataaagaaatgaagtctcttggcttttgctcccagatcatcagaaagatgactcaatgagccagagctctttgatgccaataatgaacttgggtcaggtcagaactcgaattccaattgaaggagggacttgacagtgggactgtcattcctggggatgatggttggcaataggatggattgggggttgaattattggggacatgcctggagggactggggagaggagggaaagaatgttttcagcgggttgccaggtagaattccaatgttcactgcaatgaacttttcttcaaacttttgtccttggctctcttttcttccgtatgggacagggatgcatttttggtggcttgttaacaagacaaaaataaggagagggatgagaaaaggtaaacagagaaccctacaagttcatgtattctatgccctgcattctgtgtggaccaaacaattcccaaagaggcctaacccaaaataagttagtatcctgcttctagtagcctgtgataaagtgcatcttttttctacttaacttaatcaataaatatgaagtgcttaataccatggagaagaaggcaacaatggtctcaccttcatggggcctaatgtggtgtgactgaccaacattagagacgcacgcagaaagccgtgcacatgcacccgtgtaattacaaagtgccacaggtgctgtgaaaagaaagcacagtgtgtcctacaagagagaaggggaccttatttggattgggtggttatggagggccccttctgaacatgtttggccttctttgcagcagcctccacctcccagcgcctgggagacagtgcaccagtagaggtggggtggggcaggtggtttagcccgagctggggtgcctggctggggacgtgcccagaggagtagggtgtgcggaaggcaggatggggtccccacagcaagctttcctctccctgactgggccacctgttgcaaacagtcaggccccgaggaatagcctccccccagggggagttcagtaacgggtaccatttctcagaaggggctggccgcagagataagaccacagtgccaagggggccataaattgttacctgtgcccttcagttaccccttcttcctccatcccctccttcctgagccagtggggttagatttagcagcagggcttctgttcatgagatggagcagaaagcagactttctggaggctgggcatgatcactgagatgcagagcactgatagggaaaatcaatttaatttctgtggctccgtgacaaggaggggtggcaagcaggaaggtcaggcctgttttgaaagccacagttcagttaagaaaataaaacactc

SEQ ID NO: 87194 - DNA, 1070 bp, Homo sapiens
tttttttgagactgcgtttgtttcattcttgttgcccaggctggagtgcaatggcgcaggttgctcactgcaacccccgcctcctggattcaagcaattgtcctgcctcagcctcccaagtagctaggattacaggcacctgccaccacgcccggctatttgttttgcatttttagtagaaatggagtttcaccatgttggccaggctggtctcaaactcctgacctcaggtgatccgcagaggcataagccaccatgcccggcctaggaattttgttgtatgtctgttgagttgagttgctcaggacttgttgcagtaggggacactttcattaggtttctgtttcccgaggcatgatttaaggcacatttctccgtccctctggttgatgctggggaaggcttggcttctggcagtttttgattgctcagatcaagcctatgtgattcatgggattttacaggttggaggctgagaggtatttgtaggtctggatgaggatttgcactcaacctggttgtggcatgtcgtagtcaaactatggcctcacctgatttagaggacgaggaggactctgcagaaagcacttccttggctgttggtagagattagatatttgcgggcagagagttgggtcaacccaagccttcatcaacatcccacagggacctcccttgaggtgactttcattcattagatggaggatggcattgcaggtcctgtgccaggcactggggagataggctttgtctttttttttttttttttggtggcatctctcgctctgtcgctcaggctggagtgcagtggcacgatcttggctcactgcaacctctgcctcccgggttcaagtgattctcctgcctcagcctcctgagtagctgggattacaggcgtgcgccaccttgcccaactaattttttgtatttttagtagagaaggagctcacagcatagtagaaggctcagactttggactatttcctaagaatctgataagtgaatacatttccaggattcttagcggatggcccgaagtcttgggatagtgtgtgagggccagaggggaa

SEQ ID NO: 87195 - DNA, 1581 bp, Homo sapiens
gcggtgctggcctggggccatcttactcttcctttcttcctgacaggtgtgtagaatggcatctcctgccggcacgctgggggcctgggatacctctggcagacagtgctggaaatttaatgctccttgaaacaggagagcctgagaatgcttacaaaaatcatccttattaaagtttgaagggatgaagaaaagcgctaatgggagagaccctatacttacaaacccaccttgaaggggttaggggttacttcccacctgccagcaccttccctgctctgaggaaacaggaaacctgatggctgggggcttcagggctctggggacagctaccgtttgcggcctgtctgcctggctgatgtctgtgcctgtctgcagctgaaggcccacttaggacaacaaaatccagccaagccggctggctggggctgagtggggccttttggcttcaggtgactttgtggcttcggccttgggtaaagggagtggggggccatgtgtggagccctctggaaggtctggactcctgcttttccttggctcttctcgttctccaaccacccccaaggttcagcagagtcttgggcgcgtctcctccgtttgtgccgcgtgtttgtggcagcagctgttggtgctgactaataggacttcctggcagctgtgccgggcacacgtggcaccggcaggaactgcctctcctcggctgcccaatctgtaccccaaccaccaaagaaaggcctggaaaaggggctgagagaggctgcttgagtgggaaagccctagaacttggtgactcacagatccatagaacacggttggaagaaccaactcccatctgcagaggggagcactgggtgcctaggaggggtctctcaggtcgaagagcaagttaggggctgagctgacacgtaaaaccccatctcctccctgccccctgaatgtgtttgctctgcccgtgtgagacaggcttgtcagggggtcagcctgaaccgtgtcactcactagctgtgtccttgggcaaagcttttcacctctctgtacctcagttcctccagagacaaaaggggatcatcattgtccctaccttaggggcttttgaggacagggtgagcacccagggcaacgtgcctgggacagtaaacctcagcagatgccactttgctttcttccttaccaaaaactgggcagatgcctctctcctcctgagtccagtggtgtctgtgtcagatgccctaacggattctcaggaattgcagctgacatccggtcatcatctttggtttggggtggatgggggcagagccagggaagaagacaagaaacgggagaacctaagtgcttgctgacttctgccccattcccctcaccccaaacccttttttagaaaggactcgagaggccttttagggtcaagattaccaaggcctgagtgaccctgcagaattcctgcacatggctaggcatcctttgtctgataatgacagccactgctcacacagcgtctacagtgcaccgtcagcagccttaggaggcagattctattatctgctctagtttacaggcaagaacacagcacgggcc

SEQ ID NO: 87196 - DNA, 1001 bp, Homo sapiens
tgatatctgggcgtttttcatagaaattccatgatggatgttttccccaggatgcactgccagtgtcccaaagagagacttatcagttaaacctgcctggctccagaggagtcgccgcagacttcctggtaaatacccccgagccaggaatgcgtttgtgaaatttttaggagatgatcccagaaaagcttccttcggtcaccaagccgcgtgtttgtgtctggagatgaagtgtgtgaaggaagatgtttgctcctgaaatgagacattttgtacatacaagccttttatgtgacattgaagtcagatgctgagctgtccgatgctggggtttgaaggtgaaagttgactttacctcctgtagtgacaaagttctgtgtcagcctgaatttcaatttcctgggacttttgtctgtctacagctcaacatggtatcctcagcacctttggggtcttttgttgtgttgtttgtttttttggtggttaggggagggatgggttagtgacagggcggtgggggggggtgcatttaatcatttattctttttagtaggtttaattgtataaagattataatgcatacaaacgtctgtaattaggggagttggttctattagacaatgttttagtgaggaaaattacagtgtttataagccgtttaaggagggggcagcatatattaacatgcaactagtttttgtgaattcataccgagtacttaccagtgttccccggaggtgtctccccgaattccaaagtgtgccccgttctatgtgcttcctgggcttccttcagcagaaccaggccatttttcagaatatggaacgctattctaggggcttaggagagcaaaccttgttctgtgacggaatgagtttcgttgattcacgagacaaatgtttaggaatgccctgtctctgccaggcactgttccgggtattggggatacagaggtgagtaagacggcaagctctttgctctcatgaagtttgtaatctaat

SEQ ID NO: 87197 - DNA, 2030 bp, Homo sapiens
ccatgttttatctgagtcctgatcctcctgtcacatgagtacggcccagctgacacagctgtgcagtcaagccctgggttggatgataagtatgtggagtggcatgggtggggggggtgtctcaggttttatagccaaactcccagaagccccttttccctctttgacaactggaagtccagatgatccaaccctcagaggatggatcatcccctgaggagtgcacgacccagtgcctgcgttctatgccattgtcactctggaaccacctgcttggcttctggaatgacacgtttgatcatcgctgtcttcctcttatctttccccagcccccactgacactgacaatttacttctgtctttggggctatgaaccatgacaggggtggagaaggagtggggatagagatgagaccaagatacttcttgatatctgtggaagcctcagataccaagaagcccttcatctgaaatatcactgacgtgtctctcctagttggtttggagcaagttgtgagcactgaggactatcagtttaggtttgagctgaaggagtggagatacatttacaagttactgaacgggaggcaggcaggcatctgtgtgccgcttccacactgggcagctgcagggctctctggtgggcatcctccttctagccttgctgaaagatgatttgctggcatgaaataaagacgtccctaattgtttggggtgtgggaaagcaatcccatgagcattaatttgcccaagcccagagtgtgtgagaaagtgcctgcctgacatgtttttcttttccattaacacttctgtgataaacagcttagatgctcagagaaaaattaatgaaactattgtaacaatcatgcacatgtaggtaatttattaaggacaattaaaaagctttaaaaatcatccgtgaggcaaaatgaacaggaagatggtgtgtggcgggttttggcagggagcctgcccgtgggtgtacggaacaggtttctcttcccatcgccctcacccccatcagagcaacacagcagtggaaagcgtggattcctgctgtccaggctgttagtaacaaacattctatgctggttgcctgttgggtgaagccagggagatgtgtgactgtgtggtctggctgttctgctctaccttccttgggacccaggtatgctggttcctgggcctcccttccaggagcaggagcatgttgggtgacaacttggttattggacttttgttgtttgtgttggctctaggagcctcgaaaccaggtgaggggcagcaagggaagcctagagaggttaaggtggcactgtcatgacgacaccagccacttactagcttggaccttggcctctctgtgtaacgagcctgagcctcagcttcctcatctgcaaaatggggagaatcgttaggaaggagtggaggattggagcgaggatcacacaagatcatgcatgctgagggcctagcgtgatgcctggcaggtatgtagtaaatgttcaaatgtttaatattctttgttatcatgagcggcatcatgattgtgttgttggctgaaagccaagctagggttgacacccacatatcaaactccaaggccagtgcacttttcatgatgtgccagtacccacccactcacccttggatcctccctccaccgccactgttttacaggaatgccaatactgtgtcctgtgtgaatgctaggatgtactcactgagcctccttgaggcttgggtgaggcccctctttggaaggatggagctgcctagcttcctcctggtctcatctctatccccactccttctccaaccctgtcatggttcatagccccaaagtgacagatcttccacactctggaatttttttcacacgtgtggaggactgggattgctagaatttgtttctttttattggttggtgacccaagaaatctttgaccttgtggaccagtggtttctcaaatgcagatatatttaataaagtcagggtctgttagcggatggtattggtccctctctgg

SEQ ID NO: 87198 - DNA, 1067 bp, Homo sapiens
ataaagtaatataagaagtcactttccttagaaaaaaatttaaacctcatagaaaaggcaaaagttgtgcggtggctcatgcctgcccagcactttgggaggccacagcgggctgatcacttgaggccaggagtttgagaccagcctggctaacatggtgaaaccctgtaaaaatataaaaattatccaggcgtggtggtgcatgcctgttatcccaattactcgggaggctgaggcaggaaaattcgcttgaactcgggaggtagaggctacagtgagccaagatcacaccactgcactccagcctgggtgacagagcaagactgcatctcaaaaaaaaaaaaaaaaaaaaaaaaaaaggtgagtaaaggcaaaagtccccttgtacaattccgtcccccctccccccacctgctggccaccacccttgatcttattttcatatgtataacagagctttttctgtgcatttatacactcttctgtatactcagagaaaataatatagtcttgttttctcaggctgtccaccctcctcccaaaactttttgccttttcctccatcctttcctgagacttagctggaggaagaggggaagtttgatggacaagttttttttaacatggggttggatggtccagtgggtggtagtggtgtttccaccttcttctctaggttctccttgggctttgtgaagcttcctcgattgctcataatccaggttaagattgagtagatggatagttggagggtacaggtaagtatccagaggagcaaagtgttgggggttgagtaccagatactgtggctgacttgagcttcccgtgcctttagctggaccctgacacctctctgaactaggaatgtagaatgaactctctgcgagacatctgtgcccattgccggattttgagcatgtgaattgtgtgacgatgtgggtgcgtgcatgtgtgtgggtgcacatttaaggaggatttctcggagaagccaccccctcctttgtcctgaaatgcacaatagagatccttcgctaaataagtcagcagatgttaagtgatggtgttgg

SEQ ID NO: 87199 - DNA, 1110 bp, Homo sapiens
cagactggggaaggattctgcatggtagatagggaacagaactgccaggccagtgctggctgagggcttgtttctggttgagggactttttttttttttttttttttaagatggagtcttgctttgtcacccagatgagtacagtggtgcagtcttggctcactgcaacctccacctcctgggttcaagtgattctgccgcagcctcccgagtaactgggattatgggtgtgcaccaccacacctggctaatttttgtatttttagtggagacggggtttcattaggttggtcaggctgatctcaaactcctgacctcaagcaatctgcccacctcagcctcccaaagtgctaggactacaggcatgagccaccaagcctggcctgaggggcttcttgcttttgcttgtggtcacttccctgcaatgctgctgtcttgattttcagggcatcttgtgacagtgactgaggcttgctctcccttctcttgctgcccaggtgatgagcactacaggccttataacctgatgatttggggttgagccatatccctagaacttcctatgtggtgagaagtcaacagtatcacggaacacttggttttgtgtctcatttcagcctagtagagggacaaagcaagaagtttaatgccaacatcagaagagccacttgagcagacacaagcatttgcctgtgtacagcatataccttgtgccgggcacgcttttctattacttcatttaacctatctatgcctagtgttccattatcggaacgccaagcttgtggggagttatttatatcctactgctcaaggtcatcaccaaggtctgatttttcacaaaaatttgcaacctccggcataaatgggttaattctcaacaccatcctcaggataggtactgtcatcattcccactctacaggtgagggattgggctatagtaacttgtttgagatcaaaaagccaggaattggcagagccaggatccaaactgcctgaccccagagctcatacctttatctttctcatcaaaaaccactggttggatgagtacctctctgggaagaaagggctgcatgaccctgtgtgctattacccacctgttggc

SEQ ID NO: 87200 - DNA, 1859 bp, Homo sapiens
tctctctctttttctttttctctttctttttttttttttttttgagatggattctcgctctgtctccaagctggagtgcagtggcacgatcttggctcactgcaacctccaactccctggtccaggcgattctcctgcctcagcctcctaagtagctgggattacaggcacccgccaccacgcctggcaaattttttgtatttttagtagagatgggtttcactatgttggccagcatggtctcgatctcctgacctggtgatctacccacctcggcctcccaaagtgctgggattgcaggcgtgtgccatggcatgtgttttcaagatctcctttgacccaggtctgtggctttggtcctttgccatggactagagttcttcataggcaagtagtccatgtggcgcttgagctcttcactagattaaagccagtagaggtaacagcgcagcccctctggctagggaagaggggtgccgctagcatcattccatctggggcttcacctcatctttgcataccagccctgcctgctgctgctcctgtcgcaggcgtggaagacctggctggaaccctattcctgccatgaccttgaggctgttcagtaacctctgagagcctgattttcccacccaccttatgaagttcttacagagcgcctagctctcattcaggtgcgtgggagatgctcagtgacttcgagttccctcctcatgcctcttcatgtggctctggggcttgtattagagcttccctttcttttagagtacagccagctgtctattgcagcttgtatatgaaacggtctctctctgtggtaactttgcacaaaagatggttttgtggtcagcctctgaataatgcagtgaagcccctgccccccaactcacacacagggagctgtggtcacagtcggaccacttggcagccatcataagacttgaaatggggggtttgaagccattgcttgtgaattagcatgtttttctctcttttgcctttgtgaaaaccaacttcctgtgcagccgcttgtgttttaaaaccctgaaaaaggggggccagctctcagcccttgtccaccgctggttcctaggaccgttatgaattaaagattacagccgttaaaaagagatcgtctttaaacaagcgcagttctctctcctcatgccccctgagtggagaagtttttgtgtatagcgagtccaaaacaaacagagatgttcttgagagatgtggggagcaggggccgagacagcaggagagcgagggcagcagagggacagtgggggagagccggggaactgtagttttgaattgttggcctcctgtctgcatgctcagagaagcagggccgcgtggagtgcccagcggaacctgctcatgctgatttgctgcgtcaccttgggaaaacgttggctttgctcctccgcagcacgcacacaggcacaggcacacacacgttcccatcccagctggtgcccgcgtgtgggtgttaggcacagactctttggacaaagctctggagatgaattgggaaagaagtgtggtagaaacatcaccaggaagctttgtgttacgggccttgtcactgcatgtgaagatagaccagacgccccgcagagacagccctcttgaaactctcacctaaaggagatgctaccaaggtgagggacctccgggcagcagaacaagaacatcgaacaaccactacggtttaacaggagcaagaaacgatctttccgaactttcctctgtggatgcaaagatgttgaagagcagttcctgcctttggcagggaactcggggtgcacacggggagacagacaagaagggatgagtccagggcacttgtatgtctg

SEQ ID NO: 87201 - DNA, 1086 bp, Homo sapiens
ggccgggcgcagtggctcacgcctataatcccagcactttgggaggccaaggcgggtggatcacgagatcaggagttcaagaccagcctggccaagatggtgaaaccctgtctctactattagtggggcgtggtggcaggcacctgtaatcccagctactcaggaggcggaggcagagaattgcttgaacctgggaggcagaagttgcagtgagctgagatcgcaccactgcactccagcctgggcgacagagcgatcgagactccatctccaaaaaaaaaaaaggaacaccacaactgacttgccctgtgttggagatggctgtgcagatttagtcttgctcaagggctttaccaagggttgtgctcagggcacaactggggctaaattccaaggcctgctgcctttgggtccgtaaatcttcattgcagatgttgatgtagtttccaggactgcatcatcttggagtttattttaggcagatgattgccttctaggtcattctcaaccatttaagtatccttggcaggagaacttatctgaatgggccaaggctctttgagttgggagcaaggcgtattttcccacccaatctccatgcacccgggtcctgtggtttcattggcacttcatttggaaagttgttggcttttgggaggagaaaggaaggagaagtttggcagcatcctgttccaaggcctagagttttaatgtgtggtcagactgtttattgattaattggttttcaagagggaaacatgttctttcaggacatagggtctctaggacaaaaataactttaaaagaagaggtggagatgttagagaacactctaataactcctatcacttcacagctgggaaacctgaacccccaaaggggtaagagattttagaaagtttcaccaaattccccatttctctggacagaattggactctagatggaggactagacattttcccctagagccgtgtttccccagggcattgagaggtgttaggagatgcaagggctccatggccgtacatgtggcaactcctaaattaaacattccctaaatgcaggacttctcagagcatttact

SEQ ID NO: 87202 - DNA, 1191 bp, Homo sapiens
tgccctcttaattgctactgataccatgtcttgaaccaggctttgttcaaggtgggatacaggtgggacacaggcttggttcacaggtgggagggtgccctgtgcaggccgtgggaggataatttgagaattcccttgcctgtccctgctccgcggttgctgggcacctggcgagagcgttgggttgtttgctttgggtaactatggcagatccttttaattgccaccaaataacttcagctcaacctcgtcagtggttgttttgctgcgtcgctcggaagaatgcctccctctttgtaagagctggatggatgggagcttggcagaggcaggccaatgctctttaatgttttccttcccatttaataagtgttgagtaaaacttgagtttagggtgtttatgtggcacaaaaggtaaaccatttgtggtgttttggaacctgggctaagtgtttctcacacacatcctcatgacatggtaatgactacctttgtgttaaacttgggtcactgtcaactttcttctgaagtgctccctgctttgttttgggggcaggggtgggaaaggaatgaggtgagagaaggtgaggtgaacatgggatgccgcacgggggcattgtcctcagtcggactttctagaaaaaggcatcacgcggcctggagacaggaagggagagattttaatcatctgctgtggcttttgctcttctgacatcagaatggtaggaggccctgaacttttgacctctggctccaggtccataaatgtcccgaggttcccaggaaaaggaagacttgttagatgggaaccctgatgtttgattagagcagcttttagtcactactgtcatgtgtttgtttattcaggcaccagttgcatctgagtagtggtaggtcctggagacaggaggcacagcctttactcatggcctcatggtaaggtagagtcatgcagaacatttaacgaaagtatggcttggccgggtgtggtggtgactcacgcctctaatcctagcactttaggaggctgaggcaggaggattgtttgagcccaggaattcaagaccagcctgggcaacatagcaagacttcatctctacaaaaaattaaaaaattagccgggcacggtggctcacacctgtaatctcagcactttggaaggctgaggcgggcagatcacctgaggtcagg

SEQ ID NO: 87203 - DNA, 1063 bp, Homo sapiens
aaggaaaaagaaagagaagaaaagaaaaagatttgatgtacgccaccatgaaagcaggtagaaggcagaggaatcatgaggagctggatgggttcacctggggagagtactaatgggacatgaggcaccccgcctgtgtgtttggagaactacagcagtttgcaatgccagaaggaacaaagggaggcgaggaaccatggcagtagggtggaggtgggcaggggcaggtcccagtggtgctaggaaacttgtactttatccataggcaggggagctgtggcttctatagccttcaaggggaggtcaccattgagccgagaagggagaggagctttctaggcagaaagcgtggttgactgaaatggcagagtgtgttctgaggagggtggcaggctctgggtggtgcatttcttccggccaaaggagagacgtgaggcaggagctgtgtgtcttccatactgtgctcactcaccatgctcaatgctcagaatccctccttgcagaggctgcagccctctttgtaggtgctttggtggaaagttaaatttgattgtcctatgggcctgtggcaggggctgcagtctccccttgtctcagtgccccatttcctctgaagagtgggcattggcaacacccttcatgacacttgagcttgtgcccatggggtctgccggcttctccctgcccttgacccggccgcagagtggactgcacagatcacatgggtgcagtgttgtcacccactcttctctgggctccacacacagacagcatttggcctgctccccgagggccacacggtcatcctaggcagctgttcagtggtaattagtcaacccaagtctcacaggttcaatgactcattgtcttaaatttaataagtacagaaaaacagagtgctgatgtattaaaaaattaatcctcctaagaggtagcctcggcagaggggcttggaatgaagggaagcagagggaatgtgcagggaagtaggaaatttctccttctggggcccgggctgctgtcgggaacagtagggcagagccccaactcttggatttttttt

SEQ ID NO: 87204 - DNA, 1065 bp, Homo sapiens
aagcccccaccccgcctgcgtgctgcccccagcctggggccctgctgttgagcatttttgttttcctcctccagacaagtaccctctcagcccttgactctgcagtaggcttcaaggtccacttctgccccagagcatcagctttctggaaagccatcagcatctggaggagaggagaggagaggggaggggaggggaagagaggggaaatgtcttcagctacaaaatgcctggctcctttctcactcagaggcttcctgcctgaggagcttgtcctctagattttgaggagcagaggggctgaggacggcagagctgagatgcagcttctctcttgctgtgggtgggcgtgcccttgctgacacagggggcgagggtgagaggctcagcagggtgttggagttgctgccggttcctgcctgtgagtgggccttgctttaagcaaggttgagagccgaaataatggatgcctatgaaagacaaattaggaggggattatcatctcacaaaagaaggcttctaaagtcaactcacgaacactcagagtgagagctggttcatggactgcctggcaggcacacctatgctcagtccagggaccggcctccttgtggcagggggcagggcgagctcaggggctgtggccctgcctgctttccctaagggctcttctggggaggagccctgcagatcagatccccttagtgaaggagtagtgactggggggtcccagaagacaaaaaacctagccatagtaggcagggggaggggcaatgccttctgacccctaattgaaggtgatgggaagggagggggccagtgtcctagagactggggacttcctttggggccaaccccatctgggctcgaatcctagctctgctgccaactggcctcatgaccttgagcaagccccttaatgtttctgagctttattttgctcatctgtaatatggggatgatactagtggtaataataatagctgttgttattgcgttgctgtgcgctgtgtgaaacactcagcgtggatcctggtacgtcgtaaacactatgtggtggtggct

SEQ ID NO: 87205 - DNA, 1214 bp, Homo sapiens
ttaaaacagctcttagaagatgatagtgttttcatttgacaggtgagaacattgagattcacagaggctccgtcatttgttgaggatcacatgggaatgtcatgggttttccagagccaagtaaggaaatacctggttctcctcccagtccccatgccccaacccatctagacctgtctgttctcactctcttccccatttaaagcttgtaaaacaagattcttctttttccaaggcctcacccccgtctggccagctgtctcatgcttagcaagtctttgagacagggactttctcatagtggggacagaaaaattctaccaaattgagcctggccttaactgtggaaaggcagggtagggtcaaaagatgaattctagaccattcacttctgttggtccataaggcctggtgtgtgtgtgtgtgtgtgtgtgtgtgtgtgtgtgtgtgtgtgtgtgtgtgtgtgtcggagggtgaggaagcaggagctgtttatctgtactctggagaggtaaacacagcaggtgggccccaccgaaggaatctcttgacaagctgggctttctcgtgacacaattgcctgttaatggattcagcatctggcagtttcaccaaaagccgactgccaatgagcctggctgctcgaaacccttgacactgctgatcacaaatgggtttccttttgacgccctgcgctgctcctgaaatggtcttgatcaaacaacagagtagtagttaaccgaaacccatgtcctagaattctcctccttccccacctcccgcaagcaaagtgatgtcgatgtctgcaggggaaaatgagaatgggccctcaccccctagccctgcaaagactgtacacatttgtacaaagcctactgagtgctctgaaagtagcttttgcttatgcattgatgcaaaatgcacccaaggggactagactaagccagggagggccccaagagaaggcagtgtgctaggtgctgggggtggagaggttggcaaaaggaacagcttctgaagctttgagggctctgagagaaagctttctcttcttagatgttggggacttgacatccctgtccctcctgggtgatttcctggcagaaaggtcaggaacaagtggcagtcatgagtggaaggcatttgaagcaagagactatcgcagccttggtttaatccatgtaaccagccccttctgcacctccaggagtgga

SEQ ID NO: 87206 - DNA, 1098 bp, Homo sapiens
gactgtgtgtgccccagggggataacagataaggaacaggactagagggaaggggtgggagtgctttggcagagtggcaccttccagccaatagagccctacaaaatgatggagacccttgggctgctgggggattgggaggactgacagcaatcaggatgaaggacactctgagaccagccccacagtttcaagccattttttgggaatggggctttgagtgttggggttgagggagaggcagccccttttgccttgcgtactggggcatgcaggatttggagatgggaaaggttagtttgacctggagcataggttccttcttatgtcatcatattcctggacaataaacctggcctttgggtcttaactgtcttctctggactcagtgttcctgattgcttctttctcagaatgggttgttttcccaaccctgctgtgggtaaaacatcccagatactccatttttatatttaaggtttaatcgtaaatgataattatatttaattatgggaaattcaacatttctttcaatgaagagcaggaaggacacatcaaaagaatcaggattagaaattctggttctcaagtaaagcaaagcagcggtgaaagactcagacacatctgcactaattggagccactgaactttgtatttttgtttgttcttcatggtgggctgtcacctggacagcaaggttctcatggccacatctgagctgccatccctgagacctactgtgggctagacaggcaccttcccacatgatccatttgatcctcattgataggtatgagaagtgggaatttaatttttacacattgggagactgcagcttgtggagattgagtaatatatccaacgttctgccagcattcaaacccaggtcagaacaactgaaatgtgttatctttctacttcacattaccaactcatgaaggtccatttattttttttgagtcggagtcttgctctgtcacccaagctggagtgcagtggcgcagtctcagctcactctgcctccccaggttcaaacgattcttctgcctcagcctcctgagtagctaggattgcaggtgcccaccaccatgctcgttt

SEQ ID NO: 87207 - DNA, 2838 bp, Homo sapiens
cctgcctcagcctcccaaagtgctggggttacacatgtgagccaccacgcccagccacgaaggctcttttgtcaggagaaaaagctgtttcaaatatcagcctagcaaagttaaaatatgaagaattaatgttggcatgttagatatcaatgtaaccattaaaaacaaacccaaaataaaaccccccaaaagctataactttcttaatatttcttaggccaataaacaggactcatgttgacattaactgaagttcaggctccaaccagcagcaggagagttttgaagctgcagaagagatttcttgtcaccttcatcagagtatctgccttaccctaagcccttcagtaatatattcagaatttcaagattggatcatgtgagcaggacttaacaggcctacctctgcctgagcttggctgggtttcagacctcagccgcagagacgaggcactataaatagacgagggaaagagatttagctcaaaaatcctgtgttctcagaattgccaccttctaccttttgggccaagctgtcctagcgttgaagccatgatgtttgcctaggtaacttggcatgagttagttttcatgccagcccacaccccagtcacagaaccatggttccttgatattaggtgagcattgacaagaaggtgactttagccttggccctaaatatgaggaatacagtcagagaacttcttccttagtggcatgcagtgaaaggagtgggtttgtattgccagtgaccattaggatgtgaagactggagatggcattgataagggagactcataggatttcagtgactcatagtacaggatggtatacacaaggcactggagaaagacccatttcctctgggttcatggtaattacaaatgcctttagtaatctccccaggctgttaaccattgtgggtgcaaggaaatctgggttttcagtgacaaggtattaaagcctgcatttccctgttgttagtagttgctgcttcttagcttgatttccttgaagagactgaagagtagcagccggcaagtaatgtctttcaaaaggatatatccattctgctgaaaagcatggaaccaaaataatctgtaacctattccacccaaataaataagtcagcaaataagtctgctttcattgtattgtcttctccataaatatcctttaaattgaggctgagtgacaagatatgcttctgccactaaaatggtatcactgatgatattgaaagagcctttaaaataccacaattgtcactgaaactatactttgctttttttcccccttctcctttgctagtaactaggtctctttgggaatttttaaagtgacaattggtagattgtagtcgatgatatttcttccacataatacttctgaatgccactcaactctgccttgattggctccaaatatcccaaagaagaaaaatgtttcatttgaaaatgtaaagcttattggaggtcatttgctccctaacttttacccctttgcagaaggggcaaggaaaaggcaacagtggtaagactcggcctcaaaggaacataactgctgtcaaaatcaatccatagctatcggcttgagtacagggtggtatatgcttattagattctcaaatgttattcagcttgattgcagcttttatacaaaggagttaagacacgggtaggaaagataatagaactataaattgcaagacagcttcttatgaaatcagtaaattattcatttaacagttcactctttgttgatttcatgttgctatggcacctcaagatggaggcgagtcagtccaccggcccaaccaggggccttacacagatgcacaaatcctggtggaaggcagataatgcattacgtacaaccttcggccacatgataaattgcctgtttatctggcaaattccaaggagatctgctggagagaactgaaagagatatctcacagtggctaacatttcttggaagagacccagccatctcagggtttgagtcagaatctgtttaagaaggcattaagaatgcattgtcttggagtgtcttgcctgtctcccgagattgttggaaacaccatcggctcacagttgctttggcgttcacgctacagtaaatgcctgacttcatttattattttgatgggcaaagaaaactgcctgccgacagccatgctccttcctaagctcttcccagacttacttttgtagtccttctctacccgtgtacaatttgatttcttgctgcttgttaaattattgtacttacgaaatatattgccatggccaagtctgtcattcgtgtacatggcgtggaagggagtttgggtgccagaggagttaggaagcttgatgctgttgttggccgtgactttggtgacagtgtgaccttggacaagttcctttatctctagggtctcagcatcttcatctgaagcatgagaagtttggggtggtcccttccttctttaacctcccgagactctgtgcctctcacatgtatagattccctgtttgtagacagcagtgctgttatggggacctctgaaggctatctgaatgtgcctgcatttagcaagtcaaggccagaccctccagatgcactggactgtggggacattttgtgtgagtgagactattaagaatttagcagttcattctgacagcttgatagatggagtggttttgcatggcatccatgtaggaattgactaaaaaggaaacattttctgagagtccggctgtgtgtgcatgctgggaggtttttctcaaatcagattttaaaactttgctctgaaagaccaacaacaataacctaatccaatatccttgt

SEQ ID NO: 87208 - DNA, 1040 bp, Homo sapiens
tgctgacatgagagtgacaaaaacaaccatgggtggtctgagagaggacggaagccaaggccatgagtagcccagcagggctggagaagctggaactacctagggaaaggacacagggcatgctccacagagggtccaagcactcagcaatgaagacaactgctttctgagaagcctcagctttcttcagaggccacagggaagaagaggaatgacatgaacacagttgtttttaaggcacacttctctaatcacagtttactggataaactgggtagagaagtgtacaaagaaggctgtggtaactactaagccagtctaatgaaaaacagatttagaatctgaaataatcagaagaaaggaagctgttgaggctgacagtactgagttccgagggggaagaaatatttgaggaatctacagaacattccaggtgaaacgtccaggaaatcactggccttccaagcttggcatttcccccgaaggagccaagggtggaggtacagacatggacccactcacctaaaggtgatgctaggggtagaggtggagggagaagatgcagggaatgaagtcctacgggcatctgcctgaggagcagggaaagagaagcgactgctaacggaggccaagaacagtcacagggaggaaggtgagccagagagaatggcctctcagccaacagcctgaggtggggttaaacaagggctctgcagccaaactacctgggttcaaattccatccctgccacccagtatgagagaccttgggaaagtgcctccgtttctccatttgtaaaaccagctctcggttccaaacccacccttttatacttattctccactagacctgggaccctacaaaccacttacatttttgatttgcccctagctccctggtaggctctgccaacagcgtgtgctagagggagaccctaaggctggaggaggaagagggtcttgctccctcccatctgctgcctgggggcttcctattggcttgtggttcctgtgagcatcaccccagcaatgcttcttcat

SEQ ID NO: 87209 - DNA, 1068 bp, Homo sapiens
tttatccagtaaactgtgattagagaagtgtgccttaaaaacaactgtgttcatgtcattcctcttcttccctgtggcctctgaagaaagctgaggcttctcagaaagcagttgtcttcattgctgagtgcttggaccctctgtggagcatgccctgtgtcctttccctaggtagttccagcttctccagccctgctgggctactcatggccttggcttccgtcctctctcagaccacccatggttgtttttgtcactctcatgtcagcaatgccaccatttccaccccatcagaactcttacctgtgctcgaagacccaattccactgccacctgctccatgaggccttccctgcttctctctcggggaaacatggtctcacctttctgtaaactcccctgggttttatctgtgtcactcctgcacaggcaaggccctctgcccactggaggctgagtctttgtctgagcagattcatatcttttctgtttctgaatttcccagggtgcctcgtgtagagcccttagtgccggctcactgcagagctgagtgtttccagttcaaatgggtgttcccagagtgggttttgtttcccatttaagaacagccttcctgtcatccagcctcaaacaggttggcctggactattctagtcttaggaaaggtggcccaggtgtgaagccacaggccacactgttgcttttagcacaagtttcacagcgaggaacagggactctgccctcagttttctctgttgggttactttcatgtctactcaattgagagttttaaatccttttatttctaaagatcgcctggttaacgtatgaagctttcttgggtccatgttggcctgttgtttaatgtttctcatttgcctgcgtatctggaaaaaaacagactcatttgcacagatagaaacaaaagattgtgcagatgggagccacgcatggaagggaaggaatactgatctccctaatgcatcttccttgcgaaacatggagctgctcaggaaagaaagggcccgtgattcaacagttggggaaatgtgggttcaacgggctccc

SEQ ID NO: 87210 - DNA, 1210 bp, Homo sapiens
tgagctgagtctcctttctatagggaagggcaaaacaaaacaaaaacctaacccagcaaaaacaaggctttcttactgccaaactggggctccgaaaatagtttgggtcattggaatcatgaaagaaatagtgtttatataacctctctcttgcagagaacttgaaagtgatttcctttcgttttatgcaaataatatatgggatttatattacccactttgtcaaactcatcttccttgtatgtgtttggaaagcttattcactggtggtcaggcttcttgtttttcttctgggtagactgccttttagacaataaattctgaagtctttgttaattccgagctgggaggatacaaatggcggtccatcctgagtgtgggaaggagaatcagtttgaaagagctcttttatctgcactccttagactttttagtgttgtttcggttattttagtgtattgccagactcacggagaacttcgtttgtccaaagctccacgaaggctgcaaagataaaccaagctgtccatgtccttactggcagggatcacagagtctagtgggtgagagagtgacagataccataatacaaggcaagtaagtactgggtgcatgcaaagtgctttgggattgtaaaagagaaagagaaaaaacccagccaagtagggaggggaaaagctgccatctgagcttcacttgcaggctaggttacatttcagcaggcagaggcaggcaatatggccctgagcaagggaagtacagaagtgggaagtgcaggggacttcagatcacggggtgagggaggaggctcactgagagagaagaccagtactgtgctctgtggggccagctcatgagaccgcaaagatagtagcagctttgatgccaggctgggaattctgcctgcgctgttgggagccagtcacgtgttccacacaggtgagtggcctgttcagattctgtccctgtgtgctccatcctagtggtacctgggagttgtcatctccgtgcctctcttttttctgtccccacatctccagttatcagtctttctattgcacccaaaaaaactgcttgcctctctccctagttgtatgtggtccctgtgtcctcatcactcatccatcaagtgacaaaactcttctcttaaccttcagccttggcctcctctggtctaccctttccatgctgccagagggatggttttaag

SEQ ID NO: 87211 - DNA, 1057 bp, Homo sapiens
gggacagaagttgtattgggttcacttgtgtgtcctggctcctaaagcaaagggattatccttgccaaaggagaaatatttggaataaaataccatggctcatgtttcaagatatcacaggccgagaagcgaccatgatcttggtgagatgccctgatgtttttttctgtggggcacatcataaaagaactttggttaaacattttggcctgctcctcatttcccagctccaatcttccagattttctgagtagctgacatgccttctaggggaaattttgcattcttcacttcctctacctctctttcttcccctctgtttttttcttttctagccaggggcagcagcttagtacttggaacctgccacttagaatggctcagactccttggagccaaggggcacgctggcggtttctgccaagcacctggccagggttccggggtggggaggacggatgggaggtgtcacactgcccctcgtgggccattgcctcacagcttgcaggtgtcctggcgctgggataaaagggcttatccttgagacctcaggagcgtttctgccaagcgctcgcattggtcagtttattcggattctcctgtagaggggagttacctgcttcttcctatttctgttttctgttacaagacctggctagaggcctctctgagagcgcagtcaggcacaaagcccggcagaggcattggagaagacaggtcatggagtgaatgagcgaaggaactctgagattctagggtgttaactcttagaatacccagatcctacatagctgcaattcagcagaacattgaccctggcagccagagtacttttcagactagctgaggtgctggaaagcagcccaggaggacacttggggcagaggcagccagcctggggttcaacatttgtggctgataatagagacctcggataaatggaatatagacatgttacatctcctgatgcagagctcctgcagccagagggtcttggcctttgggggacctctttgggagggcctggggtcagatgggggtggacttgggcctgagt

SEQ ID NO: 87212 - DNA, 1281 bp, Homo sapiens
tggaatatctttgttcttcctccattttccatcagttttccactctggggagatgagaattcgttaaaacagagtgagccagcgtaggatggggtagggaaatgaagcccactgtaaactctgtgggtgctgagaaacctcaggctcctaggtaaaaggaggaaatccaaggtggctgtccagacactgcccaactgtgccaccagaattctgagctccggccagcaggctctaaaggacaggtgggcaccttggagacgtgaggagcaatcatctttgcttcatattctacctgtggttgcctttcagcagttttgggaatgggagctttggggcattttatgtcctttgcattgtccgaagaaaggtaaaaggagcgattgctgttacactggggatttctgatctgtctctgataaaatctggttgcatagttgatcttcagcaaaagaggaagcgatgaatgaaattgctgtcctcacttgccacctccccttccttttattctttggtttttaagtgtggtgaaaatatcaataaagaggctggccattttggtcccagtcaatgaacacttgccatggggtagtccttgcccagtggagatccagcccatatgggcaccgttgcattgcctgtgggtcataatgttttaaggatattctgttcagttgccctctgggtccctccaactagatgaaggcattctagattgcaggggaggcgggaaacagtcttgagctgcgggatgatcttgtctcctagtcacgagaaggagtattggagatcccatcatctcatctgcctgtggtcattattactaaaaccttcttcagctgcccaaaccacagtaggaggtagccttgctcttcctccccttggagccattttcatgtgggcatgaaagtgattgacaggctgtgaagtacctctcccaccatcacccaacactgtgaggtaggcggagcagggaaagttttaattaccattatacagatgaaaaaactggccctctgcagaagttaagtggtttgcatgagcctgggagctggcactgcaagacaagtctacctgctacggacagagtgctcttgtaccctcggggttctgcctctggtcactctctacatagcagaagctccactggcacttttgtattcacaactaccgggtgcgataaggcagtgagggttattatgataccccttttcacaggtaaggaaacaaggctcagagaggttcaacaacagagtcataattcttcttgttggagaattcatt

SEQ ID NO: 87213 - DNA, 1057 bp, Homo sapiens
ctacaagatgtctgaactgacgctctctcttcagaaagaaagggaggcccagcaagtgggaatgacttggccaaggttacccactgagttaatgtccaaaccgggtcaagaacctggggatcctcacagctgcctttgaaagcttcatatgggccgggcacggtggctcacgcccataatcccagcactttgggaggccgaggcaggcggatcacctgaagtcaggagttccagaccagcctgaccaacatagtgaaaccccgtctctactaaaaatacaaaaatcagccgggcatggtggtgcacgcctgtaatcccagctactcaggaggctgaggcaggagaatcacttgaacccaggaggcggaggttgcagtgagccaagattgcgccaccacactccagcctgggtgacagagcgagactctgtctcaaaaaaaaaaaaaaaaaaaagaaagctttacttggcttctctatatcccctgaacatctctgacctggctctcttgatatcagtctccatgtccaattctccatgtctgccttccagcctcttccacagccttcaacctttgtggcattgattcctggtggtcccatcctagcccccaaaccttctctgtcctcaaaagtcccatctctcttctctcttcagataaacgtacatctcttcaccccagcatcccagcgccctgagtgaggaattaatgcttttatatttgaagagatcggctgctgtcatttttgatatcttctgtttttgtatgtgggaacgcagagcacaattagaatacagttatatatcctcatagttattgaagcttggattaacatgacataaagttttgtctagggagtcttttgctatggctcagggagcattttttgtgacagtaataggctacagttaatatacttgaatgatactagaatctgtgttataaggcagaacaaaaggggtttatctgaagctgaattacaaaggtggaattatcactgcgaatgatccacagagatctggggcttaattattgtcgcttgtgtcatttcggcataa

SEQ ID NO: 87214 - DNA, 1162 bp, Homo sapiens
tgactctgagatatatatatatatatatatatatatatatatatagtcatcattctgtcatgcaggaaggtctgggctctagatttaagccttctagcatctaatgctgggtcactactgtgatcagaggtcctgatgaggctgtttgcgtgtttgtgcacagaggcgcatgtgttgggaaccgaccacctacccttccccagcaccattacatacccaggctctgctctgaccttacagcccaccctccatggcccccaagtggtcttgggagcagatgcacagctggtggattgggcctgggccctggcttgctcaccaagccctgagcttctgtttatgactaattgctttgtttgttctgtatgagacacttaattttttttttcagtgatttactcctctttgtaattaggtgtggtgattagaatcttgttcctattacaatggagttttccttttaattcatgcacattcaccaggcctatctccgtctgttccattgattgtccccagttggcttttcccaagctgtcatataaatcacagttcaggggtggcttagagactgatacgagtccaaggaatgaaagagagctgatggggagttttgttatattcagctacccaatagtgatacatatttaaggatgaagtctcaataaatcagggcacaaggagttggcaaattactttaataagtgttctttactatatcttctgcatgtgatttatttttttattaaaaatgtcattacacacacatatacgttttgctaggaaaaggtctgaaaataaacactgaagtgttaacagtgggtgatttgtattttcttctctttgctcataggcagtttctgccatgtatatatgacacatgtattaaaaaataagaggttttgcaggccctcctttataacagattagaaacagcacatttgtcaactagcccaaggtcacttcacacatcagcaaaagactccaggtctttaaagttccagagcaattgctcagtccccagagctgacgttcatccgtcagtcagtcagcaagtagtcattgagtcctgggtctggggtgaggggcagagaaggcataagatgtggttcctgttcacaggtgcttatggtttagggagagagttgtttttgtttgtttgttt

SEQ ID NO: 87215 - DNA, 1040 bp, Homo sapiens
cataagcccctctttggaaggcctcttccaaagcctatagtttgcccccagaaagtgatgttttggttcagatgccatcagatgtgtgggattggcaagacatgggaaacagagtgcagctcacagatacgcgcgtgagcccggcaggcctggccaaggggagataggaactgggagatgtagggcacctgctgatggcagacagtgggctgtgctgggaggcttgcacctggctggataaagtgctgaaggagcgtgttcttgcacgtgttcatgcacccatggtcagaggccacaaggctgttccgggacccattcattagaatagagtcctcaagtcctaaagtacagtgtcatcttcgatgaaaaatggtttctgtggtccaagtgagaggacccctgagtcagatcagcatcgagtcattgcagaaatccacagggatcctcgggcagccctgcctccatcttcccagtctgagagatggggcaaagtgctgcttctcaagggttttgaggattaatgagctgacatttgaaaactgcttgggagacgaattggaagtgctaagtattactatttcatgtggaagtctgaaaataactgcaccgaagtgttctgataaataactaaattgagctagtgagggggaaatttcagccgtctagagagtgtttctcttaaatattttttctctcaagtggaaaggagtgagggggagagtgaggaagaatttatccagggagaatttgtgtgcgttatgccgcccacaaatggaagaatattgagtcggcctcaccagtctggcgtcatcttggttgcttgctttttgttttgttttgtttttgagacagagtttcactcttgtcgcccaggctggagtgcaatggtgtgatcttggctcactgcaacctccgcctcccgggttcaagtgactctcctgcctcagcctcctgagtagctgggattacacacatctgccaccatgcccggctaatttttgtatttttagtagagatggtgtttcaccatgttggccagg

SEQ ID NO: 87216 - DNA, 1771 bp, Homo sapiens
agctttaaaaaatcctctttcgggctgcccactccagagtactgatttaataggttggggtgtggccttggtgagcagtcacggctgaaaaatcactgatgtagatttcagaatgaaccaatgggattttccagtctgctccttcttctccgtccttcctctttggagaatggttaaagacagaccaaccccacccttttcaaggccagagcacacggaaaagtcttatttcaataaactacacattattcctgagctttacggaaggaaccgatttgggttttgcctaagctggcagggagagaggtggagacagtgccttcccatgttctgcgtaatcctggacccaggcagcggctgtctccaccacaggccccaggcacctgtggcctgggcagtcctgccacctcagccgagtctcactcttgtggccttagctccttgagtttacagagcataatgcctgttaagcctgacacactatagtatcatggtattgcatttgagggtgtttatttatactaacacttggagcgtttgagtgggagcaggaagagaaattcaagggcatttgttctgggggagtttggagagctgggtttcttctcttccctttcccctccctccttgcatttgaccagataatttaaggatcatctgaagtgccgtttcctgctttgttcttgatatgtgtggcttgcgggtgtgtatatttatatccccagaggagtaggacatttctcagggcatgcatcggccacagcaaagctctggagcagcctcacagcacagagagtttgcaaaagcccagtggccaagtcaatgcttccagagcatcgtcccagctgcctctggagtccatgttagcattccaggcagagagtctttatgcatggatcttaggggccatctcatagaatttcctcctttcacagaagaaaaactgaggatagaggagggaggtgactggtcctcagtgagatcctggtggggctgggattagaacctggactccctccatgcttggtgcggcactccccaccacacccagctgcctcccaacacctgctgagttacgtaccagcaacactgctctttagctgtctcctgggaacaagttttttgtgtcctcagatcagttcagcttcactcacctactatgtatttggggagccaaaactgtaaaaccttcagcagaagaggcagtggtccaggggacatactgtaggttcccacccattagccagctaactggacaatagcatttttgacctccctccatgtacctttgcattgtgtcctttttttttttttttgaggtggagtctcactctgtcatccaggctggagtgcaatggcgtaatctcagctcactgcaacctccacctcccaggttcaagcaattctcctgcctcagcctcccgcgcagctgggattacaagcacacaccacaacgcccacctaattttttgtatttttagtagagacgggatttcactatgttggccaggctggtctcgaactcctgacctcagtgacctgcccacctctgcctcccaaagtgttgggattacaggcgtgagccaccacgcccggcctgcattgcgtctttaaagttttcctattcagccagcacgtgagctgggctgtctcaagtctaacccctggatgtggtcagtaccatctggctacttctaaaatcacccagcaagaatgcctggctcacaataaatcttttgactcattagaaagagggttcactcattcacta

SEQ ID NO: 87217 - DNA, 1027 bp, Homo sapiens
cacaccccaggcattcgaattcctattgagtcccagggtctgagtctgagatatgctcatatcaccatatgctcgagtgtgactgctctgtgtacaaacacaccagttgatcttatggtgattttgcctgtgtggtgcacgggaggtggaacggctgttgtgtgtgtggccccagcaggttaccgtcggcgggggctcttgaagcctgcccaaaaggagtttgtcctgcctgggatgggcatggggatctccaaactagcattgcccactcccatcatcctggtgcctgggagagagggggcagctgcctgctggaggagccaccatgccaggccattttcctcccagtaactgacttcagaaatggggagcagaaggggaaggccccaggagcctgtttgttcaggcttggttgcttagcaacaaaagggggccctgacttgagaagagatttttaagccaggccagtccctttgaggtttatgaccggcttgcctacccccatcttccattcttaccttgactttgctcttccccctattacatttgatcgcatctagaaaaatacgtttgatttgtctgcaggcaccattttaaaccttggtttattgctttgcccagcgtcttcccctccattggagattgtagtctgggaggagtgaggcatgaatagcccacgattccttttctcaaagggattagcgccagcccccaagctcatttgtgagcctttgagtgcacatcaacggtgctcagtccttcttagccacaggcacacagtgaaattgctctgaggacagggccccccgctaacagttttaccccccctacagccacacggactgggttgtatttttaccatcaaccttgagcacaaagtaaatgaagagagtaggctgcacactggtcagaccaggtgccctcccccggtgcgtagctgaagggtgaggacaaacacctgtgctaaagatgtgtgctctgtgggataaaggagtgggtcataaatactcataaaaggagtgcattc

SEQ ID NO: 87218 - DNA, 2112 bp, Homo sapiens
ctataatctcagcgctttgaaaggctgctgcaggaggatcacttgagcccaggagttcaagaccagtctgagcaacatagtgggaccctgtctctaaaaaaataaaataaaataactgggcatgatggtacatgcctgtagtcccagctactcaggaagctgaggcaggaggattgcttgagctcaggaggtcgagactgcagtgagccgtgatggtgccactgcactctagcctgggtgacagagtgagaccctgtctcaaaaaataaaaagcagacactaaagggaactatataaaatgttaactgtatacaacggtgtggagtggaaagaccactgtttttttttctttctacttttttgcattttcaaatattttttgataagcaactattacttctgtaatggaaactaccccctcaccccccgacatgcatataatgttttgtgtactttcttaaaattcctaaggcagcctgtattctatatttgttttgcaggtggaagatgcaatgctgatgtttgataaaactaccaacaggcacagaggtaagattaccccagtgtaagagggttgcgttcaccctctcctggcctctctgtctgtcatccccagtcccactgacaaaagatacagtgaagagtccagagtcaagcaggtagaggtgaccatccattgaagatctttattcacggagagtcccagtagcacaaagagttccagtactggatagctgaaaaaccatttccttctggcctaggaactcctgtttagttatgcagccatccctgacacacatattcagatgtacctctctaatcctgcctttctgggtcccttgctaacctcggcactaagcgatccaagtggaaattattcacagcagtgactcaattgagttatcaatttgtattgaaggaggttctttaggagcagactgtcaatctaaagagccaaaaaatcaaaataaaacattgtaggttcgttgggtgtgtagtgattacagccttgggaatgctccgtggggcctctggaatgtgtagagggcatctgtacttaattgtgtttttccctgtgctgcttctgtcccatccactttacaaaaaatgggtcttaacctggagtctatgaacctctgcaatgacatgcaaaatgtcatatgtttatacttttcttgggtgaagatccctaggtttggacaaattctcaaaagggtctctggccctgcccttagtctcttccttccccaaaaagaacacattaaatttattgctttaaacagaaaaattggaggcatctagaaaagtcctccctggaggtagcagagtcaaaggaggtgatgacttagtgttctgttctccggaagctcaggtttctggggttcctattaacagggtgttaatgagcagagcttcctaagggggtggcaggaaatggtgtgctggtgccctcaagggagggagcctgtgagtgagcagcatttccttgccacttggatcgcatttagatgtttcctgtgttgtttacattcctgctgtcacctgtgattagaaacagttacccagcactgactgtatgtctttcctgtttggagaaggcagagtgagtgaaaggcaagaaggagtggagtgggaatcattgctggcggggctgggagaaggagggggatatcctgagtgcgtctggtaatctggcttcaaatgcatccctctacagcatcctcagaatgggagaatggagcattgggtgcacaacagtggtgtcaagtggtatttatggagggaagagatggcagggggtggagggtggggagcagtggagaagcagggagagaaaggaggggcatgcaggtgtggaatgatcgattttgtccactgcattgctggggagtgagagcccagtgagtgagatgaaggtggtgcccgtggtgggcaattgaggattatcctccatcatcatccacattctgtcaatctagctttatggtttccaagccggacttccagatgcatctcctaatgtgaccttcacagcagcccctggagggttgttgtgacattgggaaaaatcacttaacttctttatgcctcagtttattcatctgtaggatg

SEQ ID NO: 87219 - DNA, 1081 bp, Homo sapiens
cccatacacacgttccaacccctcaagataccggaggaggcatttctctttgaactgggtgctaaagttggtgtaatacttcactgcatttagaacattgaagagagtgaaaaaaaatttttgtttttcaaaaagaagaacatatcacagcagaggcacagatcatatatatggagcgagccggccccacatctgtggcctgatggagtgcacatttggagtcaggtgataagcacaaggaagtaaaatcctcatgcagccaccttgccccaaacttaccttcacctcctcggttcctgctgtccatgatcttatcaagaggaaagtgctgcagtggcagaagttgaggacatctccctggctggcgccgcctccagctctcttcttaaagaggcccagaccatcgacccagaggtgttgtcacagcacatgctcagcacttgtcctcagactcctagcccagccctgtggggcagcctggggcctcaactcatccttaccccaggaattttgacagctacctgtgtgtccttggagctgtgtgacatgagctgtgtgacatttgctgctcggggataaccacagggaactgggcttaacatctgatgagcgtcaggtgggccaggctcccagggcccattcagtctccacttgctgttaggagccacaggtcagggcagaatttccactccttgaccccactggtcacctcctgtccctgctccctgttggtctctgttggggcagggatgccctcagttccatctgcatggcggcagcttgtatctcccatccacaggagcaccagcctggggctcactagtgccatgggagagaacccaggacctaggagagaatgagcctcccgcaatgtatgtcttccaccctgcaagcaggaagagggtcccacgttcagtctttgactcacagtgggtggagccctggagatgtgggggctctcacctttctccttgcagatgggccttcctccagcttctgctgctcccatgacatttttcctgggggcacattccctgacctctgagcatctcaggttcttcctctaaaaaataagagacct

SEQ ID NO: 87220 - DNA, 1066 bp, Homo sapiens
catcgatccaagaccttaattttatttctgacaggaaagcaaggagtgtgctttcatttttttcccccgagttaactcaattccggaagcgcccattccggcgctgtctcttgagatattaatcaacacagtagcttggtttctgttcacctgctcttctttggagacacggagtaatacaaagccctcaacttcctagcaacagggctgggggacagggtgcccggggcaagagggagcttgcaaagccagggggagtttggtacccaggatgagctgcacttttttagccaaaatacaaatcttaaacttctttcctttggaataaaagccctggcaccaaaagggtggtgacctaataggtcttcctgcctccccctgctgtggcccacggaagcagaaagggagtgggctcagggtcagcaacttcactgacccagaagtggtttttttgtagagagggacaatgaatcttttgtttggtcctgttcccatagaggcccaggctctgactctcacaacatggtttaagatctcggtgagggcagagtgtggagatctgaagagaaaggagcttttagcatggcagcttgattaaaagcaccccctttcttagcatcacggcactgccagtggccggagagggctgggccaggggtcgccgcaagccctgggtggctgcctccccgttgggacttaaggttcctagaggggtcccggttattatgcacctctggacttcagcctctgttttcagtttgtggatcagagggtgtacgctatcccatctgtatctgtatatcagcatggtatgctgcaaagagcttgagttttagagttggtcatactcggtttcagatcccagctttcccttgggcgtgatctcaggcaagttacaagatgttttactcccttgtgaaggtaacacacccgctctgtaagagttaaatgattccgcttgcgaggtgcccactccccactccccgcaagtggagagtgcggggcagcctggtttcttcccccttcctccttaagtgaaaccacctgcttaacttctttaggcaaa

SEQ ID NO: 87221 - DNA, 1212 bp, Homo sapiens
tgtggcaaagggataagagcttaggtccagattcccactgcaggactcactttccagagcaaccactaatcaattgctgtgtgaccctggacaagttactaaatctctctgaacctcagttttctcatctattaaatggtgttaatgttattaactcatggacttgggaagtttaagtgagatagtttatctgtgtgaaacatctgatgcttggaaggctatctgtaaatgttaactttgtcattatcatattaattattgttattttactactaagaatactgtgactgtcattacttcgggaatggaggctcaggcttgctgattggagagaatgttaacaccctagatggctgctggcagatgctgtcaagttttccaccttgaagggtgttgtgggctgaattttgtcctccaaaagcataagttgaagtcctgacccctaaaagatacccccaaaagaagtcctaaccccaaaaagataagttgaaatacctcagaatgtgaccttatttagaaagagggtctttggaggtgtaatcgggttaagaggaggtcttagtggagtgaactgatctcaccatagtccttataagaaggaacatgtgaagagagagacacagggagatggccacatgacctcagaggcagggacaggggcagtgcggctgcaagccaaggattgctgaccacaccagaagctaagagaagagcctgaaacagattttcccctgagccttcaagagggcatggccttgccaacacctggatttcagatttctagctttcaaaactgagacagaataagtttctgttgttttaagctcccccctcccatttgtggtagcttgttatggcagccctaggaaaataatagggcaaagcagagtttcctgcccagtatgtccccttgctcactactggcctgcagtcctggtggtcagacttatccttctcgctctgtgccttgctagtcacaacccccctaagcaaaatgatgtgcaagagaagttagagaaaagacctttcatgcaactgagaacacagcccccgaagcctgacttggttcacaccttgcccaagtctaatttgccaaagaccttgaaagtgaccttaggatgttaaagatacattttggtagagagagagagagagagagagagagacacttcaagaagtctgaagtttacattttaatttagtggcctgcag

SEQ ID NO: 87222 - DNA, 1255 bp, Homo sapiens
gcagctggggtgggaagaggagagcagctggggttgtgttattagtcattccatgaagagattgatttgataaataataaagcagcgatattagcaacacatgcttgcaggtcagatgacttcgatgaaaacccccagttaagtgtgtgtaatggtttgacaatatatatgccttctaaaaacatcctattttaaaatggaaattggactgttcttgcaattcttagcaaatatgccaagaccattaccaaagggagcttggaaatctgaagggtgatgtttctatttaatttggcctctaccctccccctttcaaaggatgcttaaactcactttgttttcctgtccttgccttttcattttgttaactgttttgatttgtaaaatactatgcctcatactacactcctttatgatgatttactgtgctgttcttatctttcaccttaaatccttgataagagcattttaaaaatgagattgctacctgacactattataaaatcttggctggcagccagtggagaaacaagcacgtttggtgggggaggtgggggcagagaaggagactgagtttagagaaaggaaagattttcaaaggaactgtatagcagattttcccccctctgaattctggaggcccccccgttttttaagtagagcgttaatgcaacctcataagtgcctcctcactattgcctagtggaccgtggggtgggcggtgagtgaattgaacagacaaagattctttgggcaaaggttatctgcgctgaagatgaaactcccatatgtcctttgctatgaattggaactgggtggatggatggaccagacagatggatagcagtgaaccagctaccatatttatagctaggagcacgtgcccttctcaactccagacatccccacccctgtatcccaccttgttctgttccagacacatcagagcagagccccctttagttgcagcagctatggcagccgactgcccaaagatggaaacttctgtgtgtgtgttttgtctagagatctccttttatccacaaagggcatcaccgatggggggaccagtaaatagagctgtctgaagtagcaggccgttgaaattctagtattgtgacttaatgaactcttgtctttaattcctatgacttggagaagacagccattctctccccataatggagctcgttaacccatctctgtactgactggtgcttttattattattatgacgactggagaacataagtct

SEQ ID NO: 87223 - DNA, 1065 bp, Homo sapiens
ttcatccagagtgttttgtgaatgatgttgcattcaagaatcaaagcatcattgcatccaccccaacagggaagagagatcccatagatgtggacgctctttagtacgcatcgtggcatcctcctcccagtgtgtgtagaggggtttgggctcactgtgaatgtcctaggaaaaccaactctggggtccaaagccctgaccactcccttcttcttaacagctccctgggtctctcagatttcaagggcttaacctgtacagaggggcttaccctttgtatccctgtccatgcagatcataggtgggcctccctggggtgggtgcagctctgacatattaattcgtttaaaaaaaaaatcagatttgtgttattggggtgggagtgggggcttaattggggcggagaggcagtgatagccttcctttcaatttgtcaagctttctttcaaaagatctgccaaagaagaaagggtaattaataggcttgaagtcatttccgatgtgtcaggatttctgccttgcttccaagtgataatgttcgcaggctccgggcctctagggagccttccgtcttattaacttgtctgggagaaacagggagtagggacagctcgggccagtgggtgacaggaaataaagatttgtggtgtagtgagctgtaaacactagggctggagaagtttggtgtggggggctgggagcgggtgggggtggtgcagagggagagggtttgctctcaaactccacttcatgaagcaaagtcctagagtttcctgggtcagatggccattcggagtcagcccggataaccccagggaagaagtgctttttaatgagcagtgtttagacactcggcaatttttgtgtgtgttcacctcttcaccccttacttctcactgtttgtttacccttcccccccccacccccccgccaaaaaaaatcatctcccactgaaaagatctttggactttacagtggttattctcacaagccctggacattgtctgcacacatagacaccaaacttttgacttttccaaagacagaattattttatttgtttgt

SEQ ID NO: 87224 - DNA, 1005 bp, Homo sapiens
actcactgccctgctgcatccagcccctgggtcttccacctcctggcacgctctagcctaggcctgaagtagcagggccagacgctaggtgtcgccgtcctggacctgcctccatccccggaggtcttggctcatgggctttcttgatctctgagtgtcttttttaatccctattgcccagcaacggcttccttggttagagacagtctggcaagtttcctctggttcaaacttacgtttgaagtttttctacaaccagaaggtgattctctggcttctgagcttcacccaaccctctctgagccccaacatgggggaacactggtctcttctttctgtgactggtcatcttttacagctttgattcatgctcttagtttccagttttatatgtgcttaagcattataagacacctcagtatttttaggaaataagtggggacataaatataaacaacccggaaatcactgcccctagaattcacagagtggaagaaccaagctttttagggctgatgtggcgtgggctgggagacttctcttttgagaggctgatactggtctttgaatgaactctttaccccaccaaaagtagaaaaaggattccagtgacttcagaaatttttgttgttgttttgagaatgttggcaccactgggaataatgagagacgcctggcctattcaaaagtggcatcagaaacctcagtgttggaaatgcagcctttggttgtccatccccgcagctagagcatgagccccccaaggccagactcgagggctcagcgcttcagttgagtagtcctgattgaactaggctcatgggcacagagcactggactggggaccatagtggatgccaaggctcgaccagtgcaaaatcagcccaaactgaaagctgtttgggaaggcagaatgaatgtatcatctttcactcggcaatttttcaaaattcagccacaggtcttcctggacccctagccaggttttgattttctaggctggga

SEQ ID NO: 87225 - DNA, 1041 bp, Homo sapiens
gagctgcttttaaatgatgttaagaatcccattcttctccctgctttcccacttctgccctggtgttgactttgaaaaaccttccaagacaggctgaggctaaggagatgggggagctttcctgagcagctttctgaggtccgtttttttcttttgaaatagactggaaatctatctcggctctgaatcatccttcgattctcatcgcggaggggcagagaggagggtgcacgggcagcccagctcatgtgcctttgtggccatccctcctcctggccaagagataaccggttgtttttgaaagtcctgtgtttatcgcgagagagcagtgtggtcagagaggcggtgaggaaagagccggcagcccttctgtgatggatgggtagccgacttttcttgtgaagcaaaggcagcccacaagtttgtctctttcaagagaagaaatttaaagcaaagctccagagagagaagttttttcagtctggtccttcatgtaggcttaacaattctaggagggccctgaaaatggcagagacctcaattctcccctccctccctgcccctttatgggctccctaactagagaggtttgcaaagcttaaggggattaatgctctttaaacctctgcactccttcctgctcctcatgggatccgggtgctaataaagatgtactagcttggaaaggctggtaaacgctgctttgttgccacggcaacaggcgaaacaagaacgacaccaagtattgctaagaagagtccttaggatcaagagtttggggcgggggaggggggggatggttcttaaaaatgcagagagtcttggcaaggtaattagacttggtgctctcaaagtaaattcatagttttatggagcattactagagagccttgttacttgcaaagtcaccctccatcaagtagaaggaacagctgagagccgccagcatctgccgccagttgctccagtgaggctggggtgttgcgtcctgagacaccatcccccctctcctcctcagcaagtagtcaatgtgtgcacacg

SEQ ID NO: 87226 - DNA, 1682 bp, Homo sapiens
aggcatgagcagcgcctgcagcccctgctgggatgttttgctcaaacctgctgagacttccaagggagcctgggactctgctctcctactcctttcctcccttgtgtttgggcactcggctgagctccttggaaagatttctgcttcctgtgggtgagaagtagggcagtgtgaggaggcagggctgctaggctaagatcccaggctgccccactgacccatgtcccttcctgggtaatggtgcccagttgctcaagccatacctgaggcttcagcccgggccccatctcccacacatctagccagcgtccgcaccgccagctctgggtcgccctgtcctctgcacccaccgccatgctctgtttcagacacctatcccatctgtccctggcagagcagcaactctccggggactcctgcctccaggcctgtgacccatttagagggatctttctgaaatgtgattctggtcgtgccaagtttagtggctgcctgctcaggcgcctcagtgtggcctccagggtaggcgtgatggagcctacctctccattccctgtccgctggggttccctgctcagcgcagcagggaccccagcagctcctcaaccagccaggttccctgtcaacttttgcacatattaacccctacccacctttcctttgataaactcctgagggtcctcagatgggtgccccttcctccctcctgaaccccctgagcatgcctccatcattatttccctacactgactcccccagttactatgaggatcttaactgcaggagaccatattctgttcctcttggtgtccccagtacctgggacataataggtacttggtatatgcttattaaccagaagagtgatggtgtttatcctcaccaggttgctatggcaacagatgctgcagcccctcgaggccaagtgacttgagaccttggaggtccaaaggtcacacaactaccttcctggggccccacctggcatcctcctctccctacagccaggacaggctgcccagcctcagaaccaccacttgttgtgactattaaaccccatgtcccaatgatgcctggagaccatgcctcaggcactttacactgttagtggtaatggtgacacattatctgagttttgttgcttgtaaatttcttttatgctgataagcttggaactggattggaattgagtgggggacattgtccagtgtccatcaagaatgtaatggtaaacatttaatgtttttttctccttcttccccacagtatcagttttcttattgaatttgggaagcaatagcaattgattaagttgcagtggagcttgccctaaaaggaaatgattgataatccgtttaggtctggcttgctcgcttttcccctcctgatttccttggccactttttcaattaccaactgtatttagcttggtttgcttgttgtaactcatttccccttcctccaggatctgcagggaagttgtaatgtaatgttagagtagtgacatctaattatttccctgagacatcagttagaaatgtaagaatacttcttccttgaggtgggcagacgagggatgtgagtctgtgaggcagaacgtgtctgtgctgccatcagtctttggggtgggagggaggtcagggcgtccagtgacatcacagcctcctgtcactggactcaga

SEQ ID NO: 87227 - DNA, 1062 bp, Homo sapiens
atggccaccttctcagtggaagcaccgggtgtgggatctccctgtttcacaggtggattggctgaggcctgaaatggagaagggacttgtccaagatggttcagggcatggagtatggagcccactgttgggatcgccaagatgcccgataatagcgttcctcatccctgcctgaggagtgaacagactgaggggtaagccaaaggcatggcagatggtacacggaaatatcaccttcttaagaaacgttaacgatgaggggcaggccgcctgcatgagaattcctcagtcataggcaaccagatgggaggtgggctgacttacatgggacagccagggcagcatcttgctacctctttttacgcaagatgagtccaggaatattccacacaaaaaaagcacaggagtcactcaggacctggaggcttttcccaagacatcatgatggagtcttcagggtctgccccaggggccaaagccccctttcccgctcctgccagactctcatgcataacaagtttggaatgaatttggcaatgccatcaccacccagctcacttctcagttactttctgtttgctgtgtactctggaaggtgtggattacccagggagaaccctgccttgaagggtgtgtggccagggacaggttctctgggctgttggctggtaccccacagccctgggctggggtgttcccccttgtgcccatgccaaggcaaggctttctgcgtggaagtctggcaggtgtacattcgctccccagtgggaatggggagcagaggtttcgttgaggcatctcttgggagtgcacagtccctaatttctgaaataccattgatgagaagcagccccagtttgggtctgagttaatgggttaaaagagcagaactgttttcttgggcgctgaatatttcttctagatgttcaggtccataaccaaggcagctaagtcagcgaattgtcagcattccagaaagaagcgtcatctccttgggtgctgaggacctccggggctgcagctgactctgccctcacacaccctccttcttggctttcatga

SEQ ID NO: 87228 - DNA, 1585 bp, Homo sapiens
agtggggaaaatggcttgaaaattaggtgctagaacgacccaattacatttctgtagctttttgtattcaatttcataaacaattttgctcttcgctggttaatcagtgaatgcctttttccagtttgaaaagcacttttgaaattataatgcaattaaattgtgtgtggatgttctggcatagcgagtgtgaaagccaggggcttggcaggccgccatgttgtaccttgactgtaatgagtccctgggctggcagcttgcgagtgtcattcataatattgtccatgctgggttactgtaaagtgcagctgccttaaccggcagttaaccggcgactgccagtctctctctgcagtgggctgtgcgtgcctcttccaacagggctgtaccccaaagacggcagagtggccaggctcctctcagtacttgcccaggcattgggaagtcgggggtcttcctggtggatggggccactgcctcagagatgatctgattacctgtccccagggaagggtggaatgtatttatccttcttcatctccttggcctagcaggcttctctgtctacagttacaacagattatgggaaggggaagggaggagacagaagtcttaagcaccttgctctgcacctagcttacaataaatacctttactgaatccttccaataacctttgcaagagtagtattactgtctccatttgatagatggagatattgaggcacagcgggatttgatgacatcccataagtggtggctctgagattgggacctgaattgatctaactccaagacctatgttctttcagcatttctgcaactgggaaacaaactgaaataaaggctgggggagctgggtgcaggagagtggcatgaagtcactgctctccgagaggggacgtgaggacatgaaccttcttccttaggctgggagaatgcctcttggtccacacaaggatgccatatagaaaatgaaagatgctttagtttttcaccaaattatatttaaccatatttccactcctttggacatttcgatgtgagttgggatgatctataaggtgggcacaagacacaagacagtgactcaaggctgggatcatgagaagcccctagggaaaatactggccatggcataatccagtggcacaatcctgtctcagtccccagatcttgccccaatcaagaacaaagactctcgtgcctctagtgccttaggatatgaggcctgtagaaggtggtcgacccccaaagggcctcacagcaggaggtggtgagatcactctgattctagaactttcttgctgattaatggctcaagtcctaacagttaacacctagcctccacctctaatccccttcttccctattgattctttttcctgatagaggccttcacactaaacccggtttactgcaaatgagtgttattaaactcctagagggtgcttttcagcacattccttcatgttaaaattgccatagactttcaaccaaaggaggggagtacctgtggcctggttatcgtaatgcttgctgagtggaaatgacaagctttacaccaaggtgggcctccagggggc

SEQ ID NO: 87229 - DNA, 1050 bp, Homo sapiens
ttggacttggggagattgtttcctgttgtagcctcttttaaaaatttttttgactgtgtctgggagatcatgggtcaggtgcaacatctcttttgcagtaaagcttggcaaggctagggtggggaggtgaatggggtgggacggtggattagagagaggaggggagatagggcccctgggactaagcttagatttagctgggaagcatgttagtagctgccagcatgtgcttctaatcatctattcgccagatgttcccggaatgggaaatagaggggccttgcctgatagttccctgatggaaactggtagcttcaaattggaaatgggctccagtttgctgccaggtgtttgctccttcctagaacatctggaaggaggacagtagaaaaggcatctctgccccagcctggagttttgcgggcagctgtcttgctgatggatctctgaaagctggacattgtggtcatgaggagagtcatgagaatcttctgaaatgagccctccatttgcaggagttcacctcagagtttaaacttccaggattgagcctgaggctccaaaacagggcaccttgcaagcctgggctaataaggcacctatttctggagagatgcagatttttcaagatgttagaggaagaagcaagaggaagatgaagaatcagctcctgacctaatttctggtccaaagtgaaaagattgaaaaatactttttaaggtggtgactatcctaaaccagtgagccttgtggaaattccatgaggatctcacagggaaaactggaccccgaatgaattaacatggaacccacctaaccacacaagtctttgctctgggtatgtggaaccaaaattatcttcctggctgaaatgaccagtttctcaagaattttagggtgcagtgcaggatcctaagatggtgtagcaggaggccactccctgggcctctgagtgcatctgccatcagtgggaaagggtgtgaaatctgccttgggagttacagggaggtcctcagcgtagacacgagccacggctgacacacactcagg

SEQ ID NO: 87230 - DNA, 1031 bp, Homo sapiens
ctctgagcagagggatgctgtgccaagtttcatttctggagctgtggtggctctaactaggaatcgagcttttgcccagtcctgacatcatttgatcatttagctccgaggaaccagaggcaggaagcatgccactaaccttttactgcctgtcactgttgaagaggaggggcaggccgccctgggaaggggagaatcaatccacaacttgcttttgtcgtttgttaagtcttctctccccgcatttcaggctgaggggcctgaccttgccacctcagaaccatgagacaggaggatgcaggaaggggagatgctctgagggaatgtggcagcccccaccaggccccgctcctcccaggagatgggtttctggtggacctggtagtgttttaccttgcctttacctcacgtacctctggattctgaatattctcctctggttcttgtgctctctgaatattctcctcttggattcgtggtgtggtcaacgacaagggtcacctagtctatactccagtttcctcttgggttaaaatggataatcctttttgagatacttcatcgaatgatagtaaggataaagtgaaataacctacaggaatgggtttggaaagacagtgggaaagtaatagtaatgataataatgtcactttgagagcacatccagacactcctctgttcttttcctctctgttcccagctgggcaggtgagcagcttacaccaaatgggaaagccaatactttctacagccgactgcgtgcctctgccttccccgcccacatcaggagagggtcccaaaccctccctctctgcaaatgcccacttccctcatgtcctctcaatcccacctacacccaccctagttctccagacccctaaggaagggtactttatcattaggccaactaattgttcatctgtgcttcagtgggtgtggtgggggagctagaaagctgatcagccgtgccaaagagtaaatcaatggatcgtagccaagtcaggacaggtgaccctgacaggtgtgtgcag

SEQ ID NO: 87231 - DNA, 1033 bp, Homo sapiens
tcatcagtcttaagagatgagcaggacagatggctctgccagccttcaaagacacaaattctgcattctctctctctcttttttttttttttttttttgagacggagtctcgctctgtcgcccaggctggagtgcagtggcacgatctcagctcactgcaagctccgcctcccgggttcacgccattctgctgcctcagcctcccaagcagctgggactgcaggtgcccaccaccacgcccggctaattttttgtgtttttagtagagatggggtttcactgtgttagccaggatggtctcaatctcctgacctcgtgatccgcccaccttggcctcccaaagtgctggaattacaggcgtgagccactgtgcccggccgcattctcttttttaactccctccccccgccaccccccggctggagcagatccctgttctggctggtcccatcccctccacaagcagcccatggacactgaagcttattcctggagagaaagtgattgggagatccagggttttgcctggcttatagtttctgtggcatcatttgccctagatgctcaaacgtcctatcttgtcggtggaagtggcaaaaccacatttgacaccgctctaggtggcggctcaatgggagtggagtgctgcgcatctcctgtttgacctttcagtcgctgcatggctcttccaagctgccgcagcctggagaaatgtgaactttcaccaaagcctttgcaaatgagcttttccagacaaggcagatggctttgtttggccaggcctgaggaccccgggattgacttcctttctgctctttcttctcactgtcctcttactcccctgcacctcagaccttcagctaagcagattccactccccctggcccaggctctgggtagaaattggaaaaggagccgggcgcggtggctcaggcctgtaatcccagcactttgggaggctgaggcgggtggatcacgaggtcaggagatcgagaccatcctggctaacacggtgaaaccccgcctctattaa

SEQ ID NO: 87232 - DNA, 1026 bp, Homo sapiens
gcaagcaaagctttggaaaaacagccaagtgttcagcaaagtgaaggcttcgcttttcttcctccccgctcctccccttgttgagaaatcccattatccgggagaatgattgtgaaactccaatctgtctgccgctgagctgtgggccgttcttcttgcctcctccgcccctgccctggtccccttgtctatctgcagggggaagacaaatatctatatattaaagctttaagaatctataaatctgagttgattctctgctggtgacagcccaagctctttcccaccacgtttgacatgatctaatgggtttacagttgtttgagtgcttctctgaagcaaatgaaagtgcttagttaggggacgtatgaaatggcattgtttgttctgggcactacagcaaagctaggggatcatctttaaattatccaccctttctcttcagccaccccgcagaacaaggggctctgccgctgaaggagctgcaaagacagttcctactggccttgcctttctgcttgagaggtgccaggactgggggggtaggatgcatccccagctgtattcatttcgccaggaagcttggggctaattgggaacagaagaatgcccaggggatgaggggaaggggacgggagaaggatggtctcaccaaggtagaggagtgacaaatacttgcttctagcaaaacaggagtaaaaacaagagagactcctaatgagagctttggggcagtttgtgctttccattctcaggggccagcagtgtgggttggtgtgattagttgccttgctacttggcgcaaaaccaattcctcttttcaatatcaagtttcataagcgtggaacagtaacaaatcattataaaccctctgggactggtgggtgtgtgatgatgcggggttgtttttctttttccccctcctctttgataagcccatcttttcagcccaggtacatttttcccattgtaaacagaaaatggcatgggagggagtgtgtctcggaaacttgctgtattgttaat

SEQ ID NO: 87233 - DNA, 1964 bp, Homo sapiens
cgggtgcggtggcgtgtacctgtagtcccagctacttgggaggctgaggcaggagaatcgcatgagcctgggaagtggaggttgcagtgagccgagatcgcgccactgcactccaacctgggtgacagagcgagactctgtctccaaaaaaaaaaaaaaggctaagatggttaattttatgttacgtatattttaccaaaataaaatacttatttcagaaaagaagactgtgatgccaaaaggatttttcccacccatcactctatcccaaatttctgaccccattgtttttgtcctcctctgctcattttaattcattttgggggttattcagcactaagttactaattcattgtaaatgctaatgcatctgtgaagtaaaaatgattatatgttaaggaataacacttattgataattaagtgttctgttgcttctttgctttccccaaatggaataaataaatattttagacataatcaagtttgttttctctgctcgggccaaacagacagagatgttgaaatgatataggtctttaaaacactgcaaatgagtcttgacattgctgaattgttatgcatccagggtacataggcttgaaatccgggctatctcctttaatcaggaaaatcatttttgtgatacttgaattttgagtcctgtggggttaggaaaaggaccagcggggagaatatcagagtcagaatttgagatgatgccctgagtcttgccccgacccttcctggtgcaacagtctgcattttaattcctgtctcctacctcagttgcctttcttcccatctcagagtgggaaactggggcatcagagagtcctgaattaccattcagggtatggaggtgatttgtgcagtggaccaggaaggagttggtttgcagcaggaaagcagcttccatggccgggaactcagccatggcctgccatggtgacttgactttactctggcctgtattctaggatcaagtgtggatctttgcttagctgcaaggtggctttaaactaggctgtcctctggctcatggggcagtgcccttcagtggtggcactgacttcatgttctttccccatagccaggatgggtttttctcattcatccactctctcctgccttcagtccagagcagcatgattggccaagtcagcaggcctggcgggaggaggttgcgtgcagcccccctgtgtgggatatggaggcagctgaaacctagaaccttgctgtattagttttctgtggctgccgtaacaaattaccacaaacttcgtggcttaaaacaacagaaacttcttgtctcacagttctggaagccagcgctgcactcccccaagaggttctgggggacagtcgttccttgccttctggaaaaccagcttcttaagactccaggtgttcctggtttgtggcagtaccactccattctctgcctacctctgtcttcacatggccttcttctctttctctgtgtctcaaatatcccctgtttgtcttttaaggacacctgtcgttggatttagggcccaccctaaatccaggataatctcttctcaagattcttaattaaattacatttgcaaaagctctttttccaaataaggtcacattcataaattccagggattaggacatggatgtatgtttggagggccactattcaacctgctacacttgtcctaattagcagtgaggttccctaaaaactggcctatcctggcttgttttatttgcaaggtgcctgggcgtgggggctggggcagaggggtgaccttcaaagacagatgagacccagagtgccccacaggctggaagtgaggggtgagagggagacgctgtccctgcatgggatcctctgactcgtgcctgttcgtgaattgtgcaagcagagggccattgccttgttgatctccacgtccttcacagtgcctagcacaggtggcagctggtaaa

SEQ ID NO: 87234 - DNA, 2262 bp, Homo sapiens
agcactggcccagtatttggcgggtggtggtagcaaatgacatgataaagatcacgattgctgtgtttcgtggtcctagccctctgttttactggaaatggtttgagagcagatagtagccttttttattctcataccgaagaatctgctagtccctgcaggagctatgctaaaggagctccacatatcagctccctgtttcctggtgttccttggaagatggtgatgttagagttggatgcatgagagtcagaagggacctgagaaattccctctccgtcttgtgttgcagggacccaaaatagacacagagtttgaaaaggaagcatctgtattttgctcattgactggaaacacaattatcataatataattgtgatagaacagccattcagtttttgtcttcctgcttggtgtgtctggccattcagtttttgtcttcctgcttggtgtgtctggcttagtgttcagccaggttcatacctttggggagaagagtgtcttagctggggcggctataatgaagtaccatggtctaagaaaaacggtttatttctcacagttctggaagctggcagttaagagcagggtgccagcatggtcatttctgggagggccccccttcctgtgtacagacagctgccttcctgttgcatcctcgcatggtagagagaaaaaacaagctttctaatgtctttctgtaagggcactaattccatttatgagggccccatcctcacgaactcatcacctcccagaggcctgaactcttaataccatcacattgggagtttggatttcaacatgaatctgggtggggggtcggggggcagcaaggggcagccacaaacattcagatggcagcagacagccttgtgaatcctgatttgggctgtgacaggaggtgtgaaacccagggtccagttctaccaccttcatttgcagatgcaaaagttgaggctcagagagggcaaggggctcccccagattaaacataaagtagatgcacagtgagaagtggaagccaggtctcagtctccccatcagtgtgtctgcccccatggcctgtgctccctcgccatgttaacgctaccatgtggcagctgcatcccatccaaggagggtgcaaccctgcatggggccatgtggtaaagcagcacttactgagtggggtcacagatggggccacatgctggaaacgctgtcggaggcgggaggagaagaaagaaaggggcaggagggtaggagaggaactgaggatactgagcagcagtcgcctgccaaaattcttcagtgcagcttgtctagcaaagccggtctccagcagagtacatacagtggatagctgacgggctgacagcaggcatcaaacagtcttaaactgccccaaatccagagcgcttttgaagcagcagtataaaaaggatgcctgcgcggaacagaggcctgaaacttttaatagtttcttccaggcctcaggatgtcctgatgaggtattagaggaagtaattcaggaagaaaaggacaaataaccacctccgtctggaggccgacccgagggctggccagggctgctcgcggaaagggcaagcgtggccccgcagtgatccacgaggctctggttagcccacccgcctgctgccgtgcacagagccgcggggctctgacccttgtaaataacagacaagtaaatttcttgtttgcttcggggcaaatgtaaaccacacagtgcccgctgcatgtgggtgaaatcattaacttttcctcgctgtcggaagggtgctcagtacaaattagaaatcattgcctccaacctcaaggtcctcccaaggatccgcctacctacccccagaccaggaggctgtcaagacctcaggacgtcagagaaaaacctgggcctgccagaactgaactcaccccgcctctctttgttttttcttctctctcttttcctttagggtttggctttgtcacttttgagaatgaagatgttgtggagaaagtctgtgagattcatttccatgaaatcaataataaaatggtaagtgtgtaggggttgcgctgaaatggaatgccccctttctctacgtacacacccagtcttgcagactggtccagcccatcatcaggctggagtgggcaggggtggggagggggctagatgctcggggtccaggcctgtgaacagtagcagttgtttcatactgaggtggacaaactctgtaaagggccaagtcgtgaatattttcatctttgcaggcc

SEQ ID NO: 87235 - DNA, 1045 bp, Homo sapiens
tgccatcactgattgtaataaaacactgagcagaggaaacaatggatgaaattaattctggaagtggtaaggagatcagttgtggaagctagcatcgggaaaggctttgtgaactagacgcagataggccttgagggttgggtggagagtgtggggaagggctgtgtgaggtggggtgatgggggggggtggctggcagccagagacccagaggagggagcaggggttttgaagctgggggtctatgattggattctgactgtgctttgtgaccttgggcaagtcattccttagaacttctgtgtccttttctgctgtaactacgaggcgggtaaggccatcgcacagaggaaatgaggctccatgcaatgagggagttgacaaccatggacattctttgaggacttctgtgtgccaggcactgtgctttatatccattatgtgtatatgttatgtaatatatgaaaattacaaggatgttgtggctgtgcctagttatggatagcactcaataaacagtgcgtgccttcctccccagagtaaccctcctgagtcaagattataaatctaacaggtctctcaatgccttttgcaaacaggtctgggccatttataacatgcatgtgtcctggaaggtagacattcctgctgcctgcctttccctatggaagctggcagctccatttctgtttgcacagtaaccccttcctctgtagactgcatgggcaggtcccacatccatgaggacctttttgcagtagaacaaggaaagttatcatttacaagtaggtcccctggtgcttggccacacgctggtccctgtccacaaggacagtgcctgattatgatgtctgagaagggaggagggagggtctcttccgctcactttccagtatccacagtgaccagctgggaagcctgtctgtgttaggccgttctcgcgttgctataaagaaatacctgagactgggtaatttatttaaaaaagaagtttagttggcttacagttcagcgggttgtacaggcatggtgccaacatcgctag

SEQ ID NO: 87236 - DNA, 1507 bp, Homo sapiens
tggagctaaggctaagtggtctgtctgtttaataagagtttgaatcagatggcctggcatgaagagtcactggcctgagagaatgtcaggggcatttgtaaatgtgtaaagggctgaaaaatcctgagggattattattattgctattgttgttattattcacagacacatccaacagccattgtctgcctccttatctgtcatgctttctgcacgagcgtcagcctgagcttcaatctgtgtgtatatctgcagcttacgtccttgccacccctccagaacccagtttcatccttgtaggtttttccgaagcaggatttgcacaagtggcgtgttttcttaagtatttattttgcaggccatttactcggcatggctatttttacagtgggtaaggagcaaggctaaaaataacttagctcataaccagacaggttctgcatttgacatttacgtggaattcatttgcatctcatttgttcgcctttctgtttaacaggtagaatgtaagaaagctcagccgaaagaagtcatgttcccacctgggacaagaggccgggcccggggactgccttacaccatggacgcgttcatgcttggcatggggatgctgggtgagtctggacaggaccgcaggtcaccatggactgggagggctatggaggcctctactcccaactgggtcacctaccagtggggcaaactgcttcacctttctaagcctcagtttccttgtctgtagatgaggatgataattccccgttccaagacagttgtgatgattaagtgtgggtgtgtgtgtgtgcatgcatgtgtgtgtgtgtgtgtgtgtgtttgtatttataatattgccccatgcctggcttataggatatgttagactattttctctcttttccatctccttcctcaaaagaaggaaaagtccccctctatctgcctcagccctctcatctgagtgggagttcttaagatgtaaggactcctggctgacttgacttgtgtgggctaaggctacgttttctaaaacttgggagaggagggaagtggtaagggtgggcgataatcctgtctatttaaatgattaacatttttctcttgggatatcaaaatttgcatttaaatggatgttttaaatagcctgttttactctttatttgccaaaaaaaaaaaaaagatgaaagacaaagtgtgtttgttctgactaaaaatgatttctcctggcttttagagaaattgagttgcatattatgtccctttccttaaaagtatctctgtccgtcctgcgtagataattgaaaatcttaccgcttaaatggcatgaaagatggagaaagcagtggagatgcgtaatggtgtaggtcgcaacaataattagaaatttaaaggcgagagaatggtattttagtgcaagttattgtgtgtcaggaaaatactaattaagtgggataaatggtagttaatggtaaaattccattcaggcacatgagctgtctagtgttaatgg

SEQ ID NO: 87237 - DNA, 1041 bp, Homo sapiens
gccacttcccaccctccctgagggaaggtgacacataggcttatgcttttgctgtcagattaacactaaaatatttaagacccccagctctgaagttagaagcaaaggagccatttttcatctggaaagcccctaggcagccatgacttggctgtttgcatataatccatttatcaatattgttgaaatcatggtataagaaatctagtacaagatctgatttgctagcaggtgattaatttggaggagaactgagctgcctagccacgaaataaatacgaaggaaggcgccagtatgcatgtgtccatttaaggcatctgagccctggcctttgctgttcttccttccttctttctccgtcgggttgctgagctcaacatcccaccgggctcctgctccttagctagcagtcagtgcagagctgctgggtccttctgcctcgcttgggcaggcttctgtcaatgagtcaccaagcaccgggaaataagtgcacaggaaggagcaggtggcaagaccctgtggaggtagagacagttccattcagtgagtgagctgtgactgcaaatttgggaaggttctgggggaagcaagggaaaggagccacagctggtctcactcaagaatttgggcacgtcactgttgcaagggacccacaaggctttctacaggtgacaagactaagctccaagagaaaaaggaagactcctatcttaagtcgggttgctgtcacagattaccatagacgaggtggcttatgaacaacaaacatttatttctcacagttctggaggctgggaagtaaagatcaaggtgctggctgattctgtgtctggtgagggcccgcttcctcatagatggccccttctaaccgtgtcctcacgtgttggaaggggtgagggtctctctgtgacctctttgttaagggcacattcatgagggctccacctcatggcctcatcacaccccaaaggccccatctcctaaggccatcaccttgggggttaagatttcaacatagaaatttgggggaaacacataca

SEQ ID NO: 87238 - DNA, 1061 bp, Homo sapiens
aactagctcttaagagaggcatagcaaagtgggggttgctaccatttctagagagagaggacacagtcccggcctgggctgcccccgctccagtcaatgctcactgaaagtctgtcttagctgcctgtttgaatgactgttctttttctcatttttaattcttggactcatgtcctcattgcttcactcaattaaaaaaaaattattctccagtcccctcccactttgcttcttgtatgcattgtgaccgaccccacttcctcagaatgtaacggggccagagggaaacttctcacaaacttcgtagagcctcctcaggggaagctaggaagaagacatcaaatgtttttaagtcatgaccaaacaggcttgttggggacatatcatggggtgagctttgaagtgctggtggtccagaggggttgcagatacgtgacttggagcacccgtgtcttacgatggacagtgataaaggtgaacacacagagacagactattctctaagaatgtgagaaacctgatctggaagaggagctatataaacactatctgactatctttgtcttttggggccagtggctgttggcataatcacaagcctgtctgtcttcgagaagggacagtggagtcatccaggtgctgccacatgacaggcacggtgggcaccgatccacagtgggccccgccttccccagctcgcctccctgcctgtgctggcctggccttgcctgctggcaccattggagtaggagggggtggaacacagggggcccatcctgatcaggccccatctcaaggttggcactcctgcccatcacccttagaaggatcttttcccatggcttgacttccttcatttccctaactgaaatacacccactctcttggaataatgacgtaccactcagttggaccctcaagagtcactgctttgtctgtgctggtagtttgtgagaagtgacccgcacgcttccatttgatgcatttgatgtgagtgaatccatacatttgaatgtcattgtccttgagaccctacatgtgcagtttggctcatctcatta

SEQ ID NO: 87239 - DNA, 1063 bp, Homo sapiens
ttcattggaatggccactcctgcactcccatctctgaggactgagtcttctgagtgctctctctatcttcaagtggcatttggtgtagccacgcccaggtccttgagctcagctagaagaccctagagcagacacagccaatgcctggttccaacctagaggggtccaaagcacaggtcccccaccttcttcctggaagagtgagccacggcctcctttagcccaggcccagcttaccattagccagttgtctctccttgggcagttgatctgtgtgcagcctgtcctgggaccccagtcccataaatagagcccctttgctgtccacagctagcaactctaagctccatgagggcagagactgtatgttgttcactgctatgattccagtgcttagaaccgagcttggcctgtagcaagcactcagtatttactgggagggcacagggctgagaatgggtcttgagttatcagttctgctgcagctcactgcggaagttctgggtgactgcatgcaggtactgaatgctaggccccagccctctttggggagggatttagtgattcagcggtagaatgggcccagggagaaggctactgggccaaagtccccaaatagagctttctgcttcctgccccctgagagagtcgcaggacacaaactacctactgcagtgttctgagctccagctgcaagttggaattcccaggagagctttggcagtttctgttgccctggttgcacctcagacagattatatcagaatctcaggaggtagggcccaggttgtatttttcaagctccacaggggatttctggctgcagcccaggttgaaaaggtaccctactggaagaggggaggcaggaggaatttccgtggaattcagctgtgggcctggagcaccccctacgagtgggatgaaaatgccccctctcagagagactggaggaaggcgtgagctctccctccgcagcccaagacaccacgttctgttgtggagacaggttgaggttgagaccaaagcctattctcaagccgcagaatctgtttgccaaaaacaa

SEQ ID NO: 87240 - DNA, 1351 bp, Homo sapiens
cagctcccggccaaggtgcctgctctgtcaagaggccgtcccaagtgcctcctgcctgtggcacggggctgaccactccgccatgatctctgccaggagcagtgggccagcccagccatgctcagttctactcaagacaaccccaggggagccactgtgtcgatgcacggccaacagggagctcaaccctgcttctcaagaaaaaaattcctcctacaattcttgaattattgttgtgggccttctagaaccagcttctggggtgacaaatgggtgagaatcaaacgcacctaaagatgttgtgccttccggaagcctgacagccactactctgtgtccctctcaaaagctgccctgtgaaaatcccttcccactcctgtctttgtgtggagggcggggggttgtgtggcccgtgacctaggtctgtgcctggccctttcaaggattcctccatgactcaggctcctctctctcctgaccaggcttcccagcagcggcttatggaccagtggcagcagcggcggtggcggcagcaagaggatcaggtaggaaggtgtatgggacaggcgactcccaggcatgcccccagtgtgcagggggaggtcaaggccctgtcggatctgtgtggctgcatctgtccaacaccactctcaccacagccccggggagggggtggacggggagggggtggaccgggaggcgcgggcaaggcctggccacccagggcacttgtagtggggtcagtcacagtcatgggactgcaaactaaaggcagattattattctctccttgaaaaaaaaaacaaacctgagtttctttttgactttgaccatcccgtcacctgacagctagcttcgggtacctgtggtcatttccctccttggcttttgctaattcaacaggctcccttccttgggtccctgagccagccagagaagtgctaggctgtcccctgggaccctgctgcactggtaggtgggcttgctggtctggctaaacccccagagcccctgaaagcagccatgggaccagccctgggcctcagtgaatgaagctgctgtttctggagccgctgtgcctcccagactcttcttagccagactcctcagctccagctgccaagggaattgggctttctgtcccatgaggttgctccagtccttctgtctccaaagccaaccttttggaggtctggaacccctcaagtgacatgggaacactttcccagcattatcatggggtcaggccagagctgggatatgtccagggtgcccggggtcccttttgtccctctccccagaatgctttctgccttcccaggcaagcagggcttctgctgtgccctgggct

SEQ ID NO: 87241 - DNA, 1021 bp, Homo sapiens
tccagtcacacatttttttttttttttcgggatcaatggtgtttgatttgtagccatttccatcaggagcaaagtctctcccagcccattctaggtcagccatgctcatcgctgcactgttagtgaactgtattcaggagtgtgctcccagaccacctgcccacaccagcctgggttagcgcaaggagtaaatcctcaactccgaggtgcccgccccgccccacagggtgcagggtcagcctggaagctacagggcaaccctgcagtgctgccgggcagggtgtgtcaggggcttgggatgtgccccagggcaatgactagactgtatccaccatagtgagagcgctgcctaggcaggaagacacttgcctgtgtgtagccaggctaccctagttcctcagccccactttggacctggaacagggttacaggtttgggaaaggaagcgttctgcctttctttcttttaacgcattctgccagtaaggggactgtcacctcactccttctagaaaatgatcgggaagccaagcctgatgggatggccaattatttacctgtgggtggcctctccgtggcaaaagctctttgctctgaatttcgaagaccacaaagactcacttgggtgtgtgcatcagtctaggccacagagggctcactgggtgttgatggcctagtttcaccttccccagctcctgaagcccttactcaccccagctcctccccaggatgctcctgcagcctcaactactgcaggtcagcatgaactcaactgcattcccttatagggagacacagggagacattcagggagagtctgttgagtacctaccttgaacctggtaccatgctaaacctggcaggcaactccaaacagtagaaaacgtggcctctgctccccaggggctctcaggcttcatttagggatcagacatcatcctatggacggccctttttttgtctttgatttttgtctagctccaacgtttgggtttttttttttttttttccttccattatga

SEQ ID NO: 87242 - DNA, 1685 bp, Homo sapiens
gtttggggtgacattatgggtgggtccgtgtatcaatcttagagcttctgagcccctggtaccaccccgtcccacctctccccacccacccggccccagccaggaccccttactgtactttatacttgccagctttattccaatctagtaacatgagctcctgatggtggtggtgagtgtgagcagtcatatttctgttgtcttttctcttgcttggttggggctgcggtgagagtgtctctgaggcatactttcccgcctctcttacgctaggatctgcacacctcctctcaaacactcttctgagcacgctcagcgggaaggtttgtccacacctattaatcctctctcagtgtccagcttcctgttagtaccagctggtttgcatgtttttgcttgttcagatgaaacagttcaagaaacaaactcatatccaactctcaagaaatgtctttttttgtacactttcgtttttgattttttttattagttacaactccaaaacacctgttgtccagtaaaacatttcacacctcccctgcctgttcttagattgtatgtatctgtgggactgaactaaatgcatgcaccgtagtagatgtactggtagccgtagctgtagttgtagtacatgcattgttgagttgatattacagggtctttgacggctcggcacagcacggccgtctgaaggatagtgcggggaccaggaagagaaggggctccatattttcaatgtttccaaggggcttggatccatgttctcaccatcagccaccaccacctcccctcacactccccgttcccccagtccagaactgggtcaccaccctcagctctagccttcctcactgaggtctctgttgatatcgtccaattatagtgcaaaaatggagccaggattggaaggagtcttaaaggtcttccttgttcttgtctttctcatactattcttgaacagagcagatctttttttatttcttaaggcctaccagcaagactccttcaagcccttctactccttgagtcctttggcaggtcacagccagcccttcagggatacgggtctatgtggcagtcctgtctatatggattacttcttggggtggaggggaaatgagacatggtaaggaagggattgagatcttgagatccttggtctgcagacagggaatgcacttggccctagtgaatcattgctatttgttcttagggttggtgaaggttaagtagggtgagagtggtgacattcttagcatggaggtgactggcacagtttcgtggagacagaaagggaggtcggcttggaacatccaagaggaaccacccctagtttcctccagttccccaggaaggctccctagaggggaaaggagcagtcctgcagcctgtgcccttagaacaggagcacgtgctgccagtcatctttggacatgccatcttccctacatttgtggtgacaagccataagggagtgccagaggtctctcagagcttctggaggtgtccctactctttacgtgttgatgctgagtgagtagtgcctgcctcctggaacctgctctttaagtcaggatgtggtggctctgcccagtgctgcaagaacattgatggaacacaggtgggatctgaaccttcagggtgcaagttatctactgtgggagacagaagcccaggaaaacgtc

SEQ ID NO: 87243 - DNA, 1083 bp, Homo sapiens
acttatttaaaatcacacacctggttaccggagagcaaggctttggttaaaggtgaagaaccctggacttgaacccaggtctctggcctccttaagtagccctctggagaagccgtgttttttatgagggacacacctgccccccaggacaccgggcacaagcaggaataaagaccatgtaggaaaaataataaaataaaataaaagcccatgtagggacagcccaagtagcctcagcttctagctctatataggccaagcgctcagtctctggcctaaaacctcatagtctgatctttcagatgtagatttcagaactggacctacgggacatctgccatggagttgaatgtggcagatatttattaagtatataacaatagtaattattgttatatgtggtaggtactgtcctaagcctgattcaagggtgcttttgactgtatcagaaacctcccaactctgattaaacactataggttaatgttacagggaattaaatattatgggggatttattggctgacatcctggaagctccatagaagagtgggcttcgtgcctggcttgttcagggatcctttttctgcaattctcttagcttcgccctccttctcatttcaatactgtctttatattggttttcctcatggtggcaaaatgattgcagcagtttctggcatcataccgtcctgtccagaagaggggagtcagatggtctggaatgctaggaagagtccagagctttgtgctgcttggctaaggctggggttacaaaaccagtcactgagggtgggatccaccccctctaaaccgaatggctctttacacggtggtgtaaggatgggttcccaaaggaaaacctgcatgctgataagaggggaaaaggaagaatgatgccagagagacaaccagtggatgcccaccacagccctggaagttcctggaagttcatggataaatactaagcagtctccacgccattgaagatctcccaacctagtgtggaaactaatgggtaattacaataggatgccataagcccggtaacataagcctatccaatgaacagaagtagcacaga

SEQ ID NO: 87244 - DNA, 1602 bp, Homo sapiens
acattttttcctgtgggctgcgaggaccgcttctggaaggtcgctgggaagccccgcccggccttagggctgggaggggattggctgcccagttgctggggctttgctctgagccagtggcggggtggaggggcggggccaaggcgggagcagcgggcttcttggccaatcatcctgcagggaggctgggcacccggtaccatggcaaccgcgagcagggcctcatttgttttgtagatgagtaattactacacaattagagaaagctaaaaataaaggggccctttgttcctggttacttattaatattaataaaatggtctgcccaggtctgtggtaaacatttgatgcctgcgtgcctgtggcagaggcttgtgtagccgggaaaggcaccccagccccgctcgcccctctttcgggaagttatttctgactatatcctggagagggtgggcttctgaccttggggagaagaggagaggctcagtgtgacagacataggatccaggatgtcctggagtccgggtccgtcactgactcaggtggaaaggtggcggcagcgtcaccatccttcagagaaaagacagacacacagcagcaaagcagacactatggaccggtgtcagaggaaacccctagtccagttttgctgtgtccttctgtgttttctggcttttgattgatcagctccaggtgtgtaaaatagtcgttaagtcttcaatggaggtagcccccaagactccagtgactcccctcccatctggcttaaagggcacattccgttcaggcttggaaatgatctgctggaggtttacactgtgttcagggttgtccccgtggctccccatgccctggccttcgaagttaaagcagctgagaggcttgctttctattccttctccctcctagggggagaggttgccttgttgattactccagtgaggatgattaacagcttaaaaaaaaaaatagaggcagcataagagcatagaaggcagagtagggaatcagaagacttggttccaggcctgcttccacctctactaaacgaggaattcagactaaagggtccttgggagccatttcagctctacagctctgttttgctgctgtttccaaagctggaaatcccttttccttggagataggaacagggacagtgacagtgccttaagatctgagagaacaggccgggcacggtgactcacgcctgtaatcccagcactttgggaggccgaggcggctgatcacttgaggccaggagtttgagaccagcctggccaacatggtgaaaccccatctctactaaaaatacaaaaatcagccaggtgtggcggtgtgtgcctgtagtctcagctactggggagactgaggcaggagaattacttgaacccgggaggcccaggttgcagtgagctgagagtgcgccactgcactccagcctgggtgacatagcaagactccctctcaaaaaaggggaaaaaaaaagaaaaaagatctgagagaagtgagtggagagaaagccaagaggttccaggtgataggaaacttcgtgggaatttgaaaacagccatgaattgtttaatgcatgaaggcaatggg

SEQ ID NO: 87245 - DNA, 1051 bp, Homo sapiens
caactgagcagcatgatttaaaaagcatgtgccttcaagttagagccagatttggtcctgtctgagacactgtgtggcattggacacatttcctagctgttcaaacccttggtcttcttatctgtaacaggggttacacagctgctcttacaagatgttcggagcatgaaaaaagatcgtgtgaaacacctaccaacatgcctggcaacacagtaggggctcataagtatgagttccctttccagcctcacacctgcagaagctacagcttctagaactttgtgcttcttgcctcattggttttcacctccaggccctgttttgtccctaccagtatcaggcctaacaggggcagagtgatatctaattcttacatagcttttcatcatgattgagaagactacattaggctgcctcgtaagtctgtggtcccagccttggatttcacagtgttttcttttagcagcagtctgtcatgcagaaactgggcctgcagtgagtgcaatcacttataagacacaagcaaggatctgagcctcctggcaggtagcaggcagggaggtagctttcaggttgggaattggtgcctgagcacaccacagagcagcaacatgagagggtggctggcgacatgtggggaaaagccaaactgacttcttttttgaaaaaaagagacgagtgtgcttcaaagacagaggcagtcaatggatcaaagcaaagcaagggacattttcaggactgaactaggagaaacttggagccaccaaactgtaagagacagtagggagttgtctccgggcagcaagctccctgtctatttcctgtggagtctcagacctgggagggctggatgaggaagcaaaggctctggtatcacccaacaggggccacctctctgccttttctctgctgagtggtgatggtggcatctcgcctccccagggctgcgtgcccagctgctgggtggttcaatgcagcatggcatgggtgctgcaggttccggggagcctccttgtctgttattccttgcaaattctaacctgtgtgggcc

SEQ ID NO: 87246 - DNA, 1087 bp, Homo sapiens
acgttgtcctcttctgggacaggagtcataatatccaatttataaacctcagcactgtttatttattcaacaaagtgtgctccctgtccccgccccctcacacgcacaccctagctgagcagtagacaaggtgcccttgcccactaagagccatgtcccatcctctcttcccaagctgatcctggtatatgggaccaattctggccccccaaaataagtctccgtgcctggggaaaggcaccgttcgcttagaaggatcactgagaattgactggagaatgacttccacagaaagcaccctcaggtgagagatttggcttcatgccttcccccaccccccaaccccactccccacctctcctcttagagggagacgggttctcaaatgaccccctttcctgcgtagccagccagtgttcagtttgtggagttacgctgagtttgcaaaagaagaaaattgctttgtccctaatgccttcccactgtcagacagcaggaacagctactgacaagtttatgtgccgagtggcagtccccattctctcctaagcagccagagccgttgctttttatgagtcttctcaaagatgcatgggtttccagatggctcgttcggggactttaacatgctttctggagcctggttcttctgctcacagagacagacagagagaagtgtcgactgtggaaaatagaggctcctctcttccatgcgcccagccctcaggggtgcgggttccactgcccagaagcctagctagaggcgggaccagccagaactgggtgcttattgcctgctggctgcgccctctagtggggacccagcagccctgtctttcacccctggctgggggacatctgcaaggtgactttgagctgaggctccggcaccgtgatgagcaagtgcgtaataaaacgggacttgggatttgaaagctgcattctaatacagtgtcttctccacggtgattttagtgtcatttgatggaggaggactgagcaaggaggggtaatatagacctaagatgagctgcttattgtgaaattcccttcaggccgactcagaaaccacaggcctccccacaca

SEQ ID NO: 87247 - DNA, 1008 bp, Homo sapiens
tcatcaatctcttcccatccctgtgacaagtgggtgaaaatcaatccacttctggctcttccaggcccaccagaactgagggcctcaaatcacaggcccctgggaaagggaggggccaaagccaggagtgaccccacctgcatcgatgttctttgcctctgccattgaaggcaactggtcatagggcagagggggagaagccaagggaggcagaagggagaagtgattgttgcaaggagcagccctctggagccaaagatgtgaaagtgtgactctcagaatgtctggttctttaagacgggttagccgtagcccaaaggtagccagcccagactcaccttgaggcttaaaaatcagtaagaacttcctttaacaattaaaaaaatattgttttccattttggaaaagaaaataaagtttaaactactaaggagaaataaaggtgagacaaaattaacctggttaactggttgacaggctgcggccctcattagggtcagaatgatgggattgggggggccgaggcagtgtcaccttccgctgccccccgatctgcaaccccaccactctctggatttgtgcgtgtcaagtccactctctctgtagcaaaggtacatcctgagcctgctgttctcactctggagttgacattgcaggataaccaagagaaagcaggtgttttggtcagctatggtttagctatgaattggttcagtcggtatgttctgcattcatacttctttgtcttttttttttttaaacaaaaggaaaaaaagtttaaatcccccctttccttctcctgcaggaggtgagtgtgtgggtgtcctgtagaaccattggcttccaccccagctctggccccagcctccaggtttaccattcccccccatccctccctccatccccttctctccaccccaaaaggaaactctctgccgccatcattactgttatgtcaagatgcccaaactctccataacatatcccatcctccgaccacgttcagta

SEQ ID NO: 87248 - DNA, 2435 bp, Homo sapiens
attgggagctcctccctcatacacacactcacacgcacgcatgcatgcacacacgcacacagacatgcacgcacacgcacgcacacacgcacacacaggcgcacacacgcctgccagccctacttgtgcaggatgggtccttgttcagctccgctcccaagccagtatcacttaagtcagtagtctgatgaatctaatcccttcggatcaactgtggtaccaaatccagaataatattattcacctgagagctgctcaatttaggggaccgtctatcaccacttataacacaacttatttccatattcagcatccagaaacacagacccaatttgttcttgaaaaccggggtcttttgacctgtgggctgtgatgtttttctgaaataaccagaaagcatcccagtttgtctgcactgggatttcttctccccagctagagccgttgggactgcggacagagacttatctttgcactctggggttcagggcaacatgcccatcactgggggcacaaacccccgtttcccaccatccacccacgcctctgaatctggcttttggtttcccccggggtaagcagataggcttggtaggggcggagggagtggggactagggatttggagctgaggaggatgtcatcctggcccctcatggcacggtgtctcagaattacatattcatgctggcaaccacagaactagtcctagagataatttcctttcccagaatatgacaatctgttcccatgtatagcacactgatgaccttaacaattgtgcaattttagggacctttgattgcaacggcctttacaaatggataccattgagcaggtgctttcgttgccatctcactctgaggtattaccgtctctgccatgtgtctctgccctgccggtgtgtccgtacatgtatgtccacaggtcatacatgcacgtgcgtgcccctgtctcatcacatccacatctctctctcctctttctggaccccttttcaggagggtgggggcaaaagcaaatccagtcgtttaatctctcatctcttcctccagcttttaatcatgacccccacctttttgactctctctctttttttcttgatttggttctttggattctttttctgtatcttccccacccttcatctttctctgtcttgaaatacaatcaagagtgtgggaaactggaaggagatctcgtgctgtgcccgtcccagggggatagaggcagggaagcattgggcttctgctaggcctggaagcagggatgggggccagggccacccactcctggaggtcctttgagctggccctgtgggttgctgggccccttcagctccccaggccttgctggggctcagccaatggggttcatgcagtcaaacagccagactccatcttttagtgaaaagaaaacgtttttgccagtaactactgagtaattatccagattactgcacgaaaagcaaattaaattaacgacatcacctgtgtaacatggatttggatccctgccagtttcctaaccttttaaactgagctcaagttaattaaacattttttcaatcactttgatggggatatgggggaggacggaagagaggagagggaggttggggcagtgaggaagccccttgccacacactcctttggaaatgagtatctgtccttcttgggaagaacaccagcaagggagaggggttgtccttgtgaaagcgctagatgtgtactgtgttagcacgttaagtttgtgaggttggaacatggatctgtctctggaaaagagagggtgacagctgaggccagggaatggattccactcggaaaatcccacagaggcaccaaagcctttcaatcttggagttgggatgtaggagaagcaaggctggagatgaactggccactttgggcttgcacttcattggatgcctctctcgtagagagggattgctcctggctcctgagtcggaccaggtggagaactgggttgagttgagctccataaatctcttggatttctctaatgttgctgctaagggatcacctcaactaacgcaactgcctctcttaaccaaataaaccatgtgtgtgaattctcccacccctcgcctccacttccccttgagcactgacccagccattgctggccagagccagaggccactaacagtttgaaggaaagctacttgctactaattaagctgggtttggggacccagaggaagtaaggtttctctgagaacagggacaactggtatcaccaagaactctggagactgaagatggctccagccctttgtggagtcagatgaagagggggttaaacaactaccaggcacagcagacccttgaaaggccagacactggggctgcctgtgctccctccctccctcccctggaagagaaggagtggtgcagggcttcctgcccacag

SEQ ID NO: 87249 - DNA, 4725 bp, Homo sapiens
agcacatttcccaccactacctcaacaaccctatggtactatatcaaatcagcaaaagaattgaagccttgtcctctccccagtgtcaggtatggtttagatgtcagatttcccaacctgtgatctcagtaagcttctagccaggtgattctcgtgcgtattcaatagtccagtgaagtccatctttgaaactctagttaaaacagtggaggaaatcgcatacttgtctgacacttctttctcctcccctctcccctccattttatgttttcttctggacatcctggccttccctgccctgcagagcatacctggatgtccaggcaagactgggcgaagtttctgagtggccctttgtttaggtgatgtcctcagacctggacccccaccagcctcactccccatcccaaccagagatggctcacttcggatcgagggttgactacatctcatcatctcacgaatctgctgtaatataagacaacagcttttaaatgtgtatataacccatgatttcggttttgttttgttttgtttttcttgatggtttccctctccctccctctcttcccattctccttttaaatctctttgaatcacatttggtagtgattttgacttagtccagtagtcacatagctttaatatctagttcaaagctaaccatagtataattgttatattaaggagttattttttcttaaaacatttttttttgcttgttttggttctgttctcacttttaaaggatgctgagatggtaatatgactctccatattttggtaccaattctgagactgtatgaattttcaggtggaactttagcacacactgaagcaaagttgtgaagtgcagggcgggaggtgggcgtgagctttctattttgcgttgtagaagaagtgagatgtagtaagctaattaacagactttctagcagttctttttgtgatgtctctttgttaatctgagtctatctattttcggcaataaggtaaggacgacagtgttttgagtgtcctccttttctataagtgctttttttctgttgaaagaggtgatattataaggttttttgaaattgtgaattctaaaaaagaaatgttgtaaatacaattccattaactacatagaaactattaagaaagagagaatcaaaaatatttttgtgagggagtcggtcccaggcagtttgatgctctgtggaaggaggcgggaagggaacgttggccaagtcagttactgagatgaagatcgcccagctgccaggaccaccccaggacaagttagagcactgtttagctcctttgtctgtgtgatagacctaagaactgtattagtgttgtaccagcctattaacctcttgtctgtgcacagcttcaaatgttaccgtctagttagatttttatttaaaatatgaaaaactgcttttcccaagatgttttttaaaaacaaagctacaattttaatatttaacatatttaaagtttcaaagcacacctgtttggcttgggtgggggtggggtgggggggacattctttttcagtcttaatttttaaatatttgatcattttctattgtccaatcatttcagcacctccaaaggtccctaggacactttgcctctcttctccccctgccccccaccctgctcccacatctgggggcccatgggccaggagtggataagcctgcattaatacaacctttctccattcactttctatttacaaattaggaaagcaaccttttggtttatatatattttttttaatacctcagtgctgcaagtatcaccagagaggctatggaagaatttttttttaatttattgtagatgtaaacagaattttaaaaataaaaagtataaacatcactgcactgtgactggtgggaaaaactgacagtttcctctttgcacatgtttaacatttggctgttataatatatggtcctcggttggggaaagatacttatgatgaaggatattttttaatttaacttttttttaaatattggtaataggtcggcaacagcaactatagaagtacaactcaatagatggcattaaaacatattgtagtgtggatatatattttttcttttttaaaatgtgatattgacgttttattaatattttttaaattgttacgtttataaatttggtacttaaggcacagccagtatgagacactgaatgcgacatttattataaagagctgctgcactcctatttttataaattttactaacaaagtagactaatgtagacattcacagacatggtagggcaaaagcatcttcaaactaaagactccaaaatgctaactcagaaagaaagaaaaaacccgttttcaattctaatgaaacagcaacaacattttttttaattaaaaaaaaaatcatgttctttgtttttctaataaaatgttaggttgtttggtgaggtttttttgttgtttttttcctttctttgtttcttttcttttcccccaaacaaccagattaaatgctgagcgcttttaaaatatcaaaacttgttcaagtcataaaacaacaaaacataagttttatttaaaaaaaaaaaaagaaagaaaaaatagtaaattcccagaaattcagtgtttagacgagggaatttaattcctattttgtccatgttggtgatgtactgtacttcccttccttttctctgcatcccccatcacctcatagaagactctttgttgatcattgtatgttaataatgtataaaatggctatcttgtaagcgtgctgtcctggtactagtgtagcgactttttttctcctctttcttctagtacatattgataggtataacataattaaggtttaaaaaaaattagacatagttattcagatttaggaccagtaaggatagaactttctcttatttatgaaaaaaaatgctaataattttggggcagttttttcctttaattatttttttcaatttcaagtttaattttattttagctgatctgatgtggtttcaactaacccaaggtctcaccatgttaaaatgccggcggactctacggcgttttgtagatccccccccccccacccactgtgaaggggtgccatactaccttaaatgctaatgctagatatgcaaaactggatttttttaatttattttttaaaagagggaggcatggtatattaaaatgattttactaagagaaaaaatatttttttaagaatgctcagaagaaattgataatctgtgtgaatatgttttagatgtttatataccttttgaagagacccagtagcccatagcacaaatcttgtggaaatccgatatgttttaatgtggctacctaggtttaaggttcacgttagtccccccattccatctagaagtccattttgaaagatttttgtaaattcttttaacactgatgtttcagcctcgtctttgtttcagttaagctcaatggcgaacatgggaaccacctttcgccttccctgggggagaaaccctcttggctgatggcttttccccggaattatcaaacagccaccgggtgactttctggcttccagatccatctgcctgagacccccgaactcctctcctcccaagcagaggcgagtgagtggcattagctcccggacccattcccggtcctagctgggcatggggctgacggagatgaccaagccttggtctgctctctagcagcttccacagacttggctcgtggccttccttatatccactgggaacaaacagcctcgcgctctataccaaacagcctcgcgctctatcccagtcgcccattagcttgattcaaacaaagccccagcaggcctttgcgtttttatccttcataaccttcatcttaatttgaacttgtagcttggactttaaggtagcatggctctattgctgtcaatttactgtttcactgcacagcaatcacagccagtgaatgttacacacatcttgctagactagtataaaaatcattgggtaattgttggttctaatgacctgaaaggtgttcagtttttgttcttggttttgttttgtttttgatttcttgggggtgggttttgcttgttgttccttttcatttgggggtttttggggaaaaaatttatttttggttccaaatagaaaaacaaaacctattttgatctttagtgcaaacgagggctagggacttagcctcctccaccacctccacactgcttcattctgccattcactcactgcagcatattcaagaataaagcaatatcgtttactacattttttattgaaggtcagccatgctttctgtattatattgcatatgaaattgtttacaaaagaaacactaactcatacttctctttattggttgcaagtggcacgcaggaacagagggagagtggggggctggtgggggaggggagatttttttttttttttcttgaatgtgcttcgcaagccaggctatcttccaaggaaggcagacagtgggagagcagagggactgactgcaggcaagcacattgaagaaagacactggcgggtttccccaccctcaccccaaagcagaaaactagcagacgtcagctcagccccgtcctgggcacagacactacacaaggagacgctggaagttaagcaatactttaatactgtaatatgtttgttttctttttctttcttttttttctaccaaaaaaaagtaagtaaactaaaaca

SEQ ID NO: 87250 - DNA, 1155 bp, Homo sapiens
accttaatccaaacacctggctatcaaataatcagaatgtattgtctcagacaggatttcagttccgggaggcaggggcatgatgggggagggggccggaggctgagagacaaaagttccagagcctccctcgaaggttctctactactgtattctgtacataatgtaccatcccatgtggaatctgtgagtgtcctcttaagtagcgtgggctagccaatctgccgttcatggtgtattgtaaactccgaattccatatgtaataggatgcaagtctaagcgtttcatgtggacataaatgtatctaaataaaactttccctagcactgtggctgacctcacccttacttttatactttagtatgaaactgatgagaactttggtagtgagtattttttttatatatatacatatatatgtactatctatatatatatctcaagcatctttcaggtctttgtgtgtggctttcttaaagccctgttgtaaaaaattactatgtggatggcagtctctcacatcacagatgtggaaagtataattttatatttgtattttcaaataaataagtttgtgaaaggtttccatcctctactgtggtccagaaatcaatgtgtttgtctgacaaaaaaaaaaataaaataaaataaactgttttgaacagagttgtttggtgttctttcacttgcagaggaggtctggggtctgggagagctgttgttttgcttgggcgggagaggatatcatcaaatcgcacctgccaccctcacccctcagcatgaatgctggccgtgggcctccagcagcgaagaagtccctgccttgtccccagggagcttgtggcaccatttttatgaagtggcaagagagcactaagatggaagagcagacgggagaggggtgtagattaacagcagaaggtacacagaacccatgagtggacagggaataaaccccaaaggtcctgcggatcagaggacccagatggtggaaggagctaaggggccctcccgggtgctgccctcagttatcaacagtgctgggagaaggcgccaaaccgcattccacgacccctgagtaggggtctgaataggtatcagacctctgccctcaaggagttttaagttttgcctactggaaatcattacaatca

SEQ ID NO: 87251 - DNA, 1029 bp, Homo sapiens
aaagcaatagtccaaatagacacttctgtgagagcatccctgtgtctgccgatgtcctttgccaaccctccaaaggtggatgggggccaaggagcaccccccacggaagaggggatggggcacatggccgcatcagccagcctggctgtcctgctgccctcgccacccctcccacaggtctctggttaattgccaggacacatcagtgggcactctctgaggaaggagcaggcgagccagcccatagcatcccagctcagcaatcatcgctgattaaaaactagttacaaagcaatgaagatgaaatcctgcattaaccaaatgaccccatccatggccaagcccagatagatgggagtgattatgaaagcatcactcactatgtcggcaaacgttaacggctgtttgaatttctgggagatttacggggtagtgacagcatttggctggatgggactctggctttttgcttcattcccagatgtgcctgtgtgtttatgggctcctgtggactcacagcctattcaaagtggtctagctcggctgtgcttttatgtgggtttaatctgaatatgccggcttgtgtaaagtagaaatgtattgtattgccaattttcagagaacctgaattagctcagctattctgaacataatttaatctttctttaatgattcaataggtgctttgaagtctcgcactaatcagagtcatggtcatgaatatcagaacttgatattgaagaagcataaaagtgctcatcaaagaattaggtgacggaaatggcaggaaacagcataagtggatgcttctgtgagagtgcaggtatgaccatgtgtgtcagtgggcatgtggaagcctggtgtgataggtctaactgggataacattgacctcaccacaagcaatgaatgaccctatcaaaaagtcagcctgggccgggcgcggttgctcatgcctgtaatcccagcactttgggaggccaaggcaggcagatcacctgaggtcaggagttcgagaccagcctggcca

SEQ ID NO: 87252 - DNA, 1035 bp, Homo sapiens
gaattaggttatgtttggaagggctgaaccatcagatctggattgcccagtggccagccccgggtgatgtctgcctattgattgtagagacactgggaaaaagatgtgaagactgatctaaagttaccagctctggagaggttgccagtgcctgataattggcacacatggaacgcaagtccatctgagaagagcaggctgggttcgcgctgactggggctccctggatggaaacaccccacctcaccccgacctgtgaaagagacacccaccttgctgctcattgcaaagggtggtctgtgctttgtggaacttcatgcccctcctgagcccaatgctcaattcaggaggcctcattcgcccgcttgatgctgatggttgaatgtggtctccttccatcctggattgcactctcaatttgcaaggataaagaagggagactttctgcaaagatgatgctcccattcatgataaggggcaacatgcatttcagcttcctgcagcccaggttggtgccagggtggaggtgggagctgatcatttgcaaggagacgcggagagatgtcgccacaccttcactgagaagcacatctgctgccagagtccgcttgtactgatagtggaacatggtcagctctctggctgtgatgtccccgccagcaggaggacatccaggcccctgatggatggggtggctctcttatttatcaagccatcagagtctgctacctaccagcacctcagcctcttctgttcctccttccactagttcttcgtggtcttgaacactgcttgtcccccaagatggctctcccttcttcctgagcacatggtgaaactacatttcccaacttcccttgcagttaggtgggggccatataactaagatgtcttcaaacaaatgtgagcggaaatgaggggtgccactgccaagcctgagccttctctacgttctctccctttcccagtggctggaaccacagcagctgagcctcaacctatagacaaaaccaaggcctgatggaaggaatttga

SEQ ID NO: 87253 - DNA, 1055 bp, Homo sapiens
ccctgaaggacctgtatactgtgtatgctggcattcacactctactcactggctgaatgttgagctatttttaaacagttgaactgtgtaaatgtttcttgatctctaaggtattatgtttgccttctcttagttatttctgggttgtcacaaagctcagtatcatggtttgacagaagcagttatgtgaacttttatgttaggacattactaaataaagaattccctagctgcttataaagtaaatttactttgaattgtaaataacatgaagaaacctttataaagattgttcaaatgggactcaatctgactaggcttgctttgatgtttgttagtatgtgggctggctacatctgattcccgggtacatatttcttctgatccatcagacttatacgtgtacacatgttgtggaaccttggctagctggttttgtctgcagagaatctttgtacttcttgctatagaacgattatctctccacttgagaggccaagctgacttgcgctttgtggtaagagtgaggacctgtcattgctgatacacaaagaccaaaactgtaactttaatgtcatggattgagtgtgctggagacagttaacataggcctgcacagactaggctgttcagtaaatacttgttgaatgaatgagtgaacgaatggttatatccagctaaagactggattcatatggtgtagataacaggattgccaagaaaggaggcagctaatttaggtgatgctctccaccagcatccacctgcctccctggggccaaagtgtgcctacaagtccttatcaacttccctgccttcctcgtttccccaggttttactaaatacatgaaatatccctctgagattgcagcctttgtatatgtggtcaagccagtggtttttagctgttagtagtaagctgcttcagaaattccctattttaaaactcatgtagattttctacccagtgattctttgtgtatgctctcatctctcctggtacactgtgaggcaggtccacatctcacagtctgtatatagtacacatccatgca

SEQ ID NO: 87254 - DNA, 2195 bp, Homo sapiens
gatgatctgacccggtgggggcagctggaaagcaacactggcccccagctgaagggcccagctgcagccagacagatggtgcttgagaaccgaggcccggtgatcctccagccacagtccagcccaaccactgccactttccatgggacttagaacttcggagttgctgccttgcaattggaggaaggacctggggcccctataggcagcagccaattacagccccttttgtagccaggcgttcctatggtcaaagagtggaaatgcaggaaccaacctccctttaaaaaaaaaaaaatccagaaagcagataaaagttggaatatggaaaagggcaagatgacccccaccagaggctctttggcctgaaggtggagtctctgcctccgtccgttctctatctctcctgtcacagactctgcctgaccccctttcctcagctcccttctggtcccccttcctcagctccctccgggcacttgtgcccttcccttccatgtcctcctgtatctcagccttcccccggggctgctggcccagcacacgagccctgcacccagcctgggtgggaggtccctggccagtcccccaggaactctgaggagctatgggctactgcaaagcatctgccgactgccctgccccgtctggcctcatcaggctgctgctgttagggatgggctcactcccagcagctcccggtcacccagcagggatggggagggtggccaccctggagctggaggactctggggaggcagggtctttaatttggcagcagacaaaagccagttctggagtcacaccacagtaggggctcacaggggctctgactccccagctggactggaagccctgctgtccgagggtgggcagcggtgggtcctggagtgacccctttgagcaggtgcagggctaaagagcaaggcggaaaggccgccagcctgggtgagcgcctagggcataagggcttgctgggtgcccctgagaagggcgggtgatctgaggaggagaactctgattctaggaacgcttacacggcactgaccactgccacggggagggaggctgcccagcccgtggccccgccctggacatgggagcgcgcagaccttccggagagccgggaagcctgggcaggcacgaggcttcggcgcggctctgggaggttgggagtggcatccgatccttggccgggccctggtggcctccgtggccccaagatcacaagggcgtagcgaaggcgagccggcgatcgcacctcgtcccgcccaccctgcccggactcgcaacgccgagcttggggagggccgggacgcgcagccgccgccgagcgtgaccaagtttggaaacgcgcgcggggccgggacgctggctcggggggccctgccgaggagcggtcgccccctccgctgctccccgcgccaggcctggggccctggagggaggggggggggtctccgaggagtgcctcggtaccccagctcgagttctcgacgggtctctgagccttccccgcgccaggacccggcgcactgtgggggaagccccagccccatgtctgttgagtgttgctttgttattttttttcctcctatgtgtgggttttttcttggagctgtttcataggaattcctgtaataaacagttggtgttctcttggtgctctgatgtggccagcggcgtgggctggaccctcctgctccctcctccctcccggcctggggcagggtttgtccccaggagccccgcgtcgcatccctagggtacccctgccttgcctggcccattcacccgcggcgctctccgactgcactctcgaggtgacacctgcggcaccgctgcacctcaaccttgcggacctgccggctgcgtctagcgctgtcgccttcctgtttggcccaggactgtaaaccgcttgctgtatcaggcaagggaaacaccatggggaaagccagtctgttgagaaagctccagacggccacctccctaaataaacagcttctggattaaaggcagactggaggttgcagggaagtgcaatttcagacttcaaagggaactcagagatcgccccagttgatacatctctccttcctcctcctcctccagctcagcaggactaccccgccctccaccacagggacagggccctcgctgccagaagaggaagctggtgccgtttccagacaggg

SEQ ID NO: 87255 - DNA, 1030 bp, Homo sapiens
tgggtgaccgggagctgctgggagtgagcccatccctaacagcagcagcctgatgaggccagacggggcagggcagtcggcagatgctttgcagtagcccatagctcctcagagttcctgggggactggccagggacctcccacccaggctgggtgcagggctcgtgtgctgggccagcagccccgggggaaggctgagatacaggaggacatggaagggaagggcacaagtgcccggagggagctgaggaagggggaccagaagggagctgaggaaagggggtcaggcagagtctgtgacaggagagatagagaacggacggaggcagagactccaccttcaggccaaagagcctctggtgggggtcatcttgcccttttccatattccaacttttatctgctttctggatttttttttttttaaagggaggttggttcctgcatttccactctttgaccataggaacgcctggctacaaaaggggctgtaattggctgctgcctataggggccccaggtccttcctccaattgcaaggcagcaactccgaagttctaagtcccatggaaagtggcagtggttgggctggactgtggctggaggatcaccgggcctcggttctcaagcaccatctgtctggctgcagctgggcccttcagctgggggccagtgttgctttccagctgcccccaccgggtcagatcatctctggcaaggaagagctgctggcatctggtaggggaaaaaagggatgggaggaatctttttcaaaggagcccaatggtctttcctggtcactggttcctggagagacagttttgggagaagttactaaagacgtaagccctctcctttttccagggactcgaggtcaaccgtagaactctgcctgggtcatccccccattcaaattcctagaaccattccagcttgcccagctgcagggactctggcagcaggagatggagtgaaggaatggaatcccggggtgaagcagctgtaggggagggcttcaacgtgggagggta

SEQ ID NO: 87256 - DNA, 1047 bp, Homo sapiens
accatgctgtctgggtcatgtttcctgtgctgaaatgtcctctgggctgtgcccagtctcctgagcctggggcacacatggctgaatttcttatgctccttggctcatagccctgtgagccttacttggcattttttgcctcttaggaagtgggttcctattctggcctctccacatactggctgtgtgactttgggcaatttacccaacctctctgaaatggttcccacagctatgaaatggagacagcaacacctgtctcatggagttgtaataaagattaaatgtgaaagcatgtggcacaggctcgtaaacctgtcgcctacttgctttaatcctttcgtgtattttaaactgcttttcatttgagcagtgctagttgcaaaaggcagcctggcatggacggctctgaccctgctcccaggcacaccacagccatggcctcagactctgccctgagcttagccagggggagagagggacagtgctctgagaattgggggcctctatagtccacctggttctaactataggcagcctgggagtctctgagaccttatagagtcctgtggaaatggtacttctggtaatcaaaatgcttcccattactgcttccttgtgtttcccattactgtttctgagccactctcctcatccacagaaccaccctttgatagaaaagtctagactttgcctttactcgctgtgtgtccttgggcaactccctcctagacttgggtctcaggctcttcacctgtaatgtgaggcagggtgtggggctgggctggagttgtcagtcctttacattttgtggtccccacaaggatgctttcaaagctttgcacttgggccaaatggaagcggctgcttgagctgctgtgtctccagttgcccaggccagcccagcctcccctggggccatgaggatcaatatttccttacagagggctgaaagaattccagggattgacatccaggtgctggggaagacccccctagaatctccctaccccatcccccctgtgagggcagcttggccaatttacc

SEQ ID NO: 87257 - DNA, 1032 bp, Homo sapiens
acacacgactcagtgtatctatctataaaatggtgatgatgatggtggaaggtaataacctgcactactacattgtcacgaggattaaatgatgtgatgcacgagaagtactttgcctagcacttggtaaatggcagcttctctgatgatgcataattgctgggggtggatgagggcaggtttctgtttaatgcctttacataatggacttctgctgagggtttcatttgaagaaaggggttctggttctgtagctaaagaaagtgtacagacccttccatccctgggggactaggatgcagcaggctgtttctgcagagggctcatcctggtttgtgcctagaacagtggtgcctttctctggtcctgaccggctcccccagcccccacctatatccctggaagatttcaatgatcagaccaaacagggactgtttctctccattttctagaagtagagattgaggccctcgggaggcgaaaggaagctggttatgggacccctaaaagctcttgcccccttcccctgattgttagatttggggctgaggctaccagccccagctggcctgaggtccttccctgcactgccttctaggagctgggcctgcagggaaccaggaagctggtgtcttggccagggtgtgccacttcctggttctggccagttttgctgcaagtcaggtcagcctgaccttaccaatgctgtaaaacccattctgggtgcagatgggggaagagagggatcccagggcctcatctggccctgctatcagcctaatgaagggggtggcttggagggtgggctgtgggagggctgagggtgctgtcagtgcgcactagcgagtgtgtatagaagagtgactgtaattttaaaaacatagcttcagagttgggcgaagaggggagtagtacattgagtgcctgggctgtgtgggacggttcaaaaaaaatcctaaagtgttgtctgtgtcctatggctgcgagggcctgggaggagcatgtggcactgtgcaagtgaatggggttgag

SEQ ID NO: 87258 - DNA, 1045 bp, Homo sapiens
ctgagagaatgcaggtgacgtgcactgaggcaggggcagaggctgaactctgaagactactcctcctgacccaccccaaggcttttttgccttgtgatgcctccactaggaatgccagctggcttttttggtggggtacatggactgctctgtgtagtcactctcctgttctggacctcagtttaccccctcaacaaggtggcatcgttagagtgtgagcccctgctgtctcactgagaggagctgagaagaaacatggggcgtgcattcaaggtgttaccagggagctggtgggagaagcagtctcagtctcaaagatccacaagctctgtaatgtccacagagcaaaatcctaggtaggatatccaggctgctactcaacagtcttcccaccagagtacatgtgcaaaaccctcagggaacctggggacttcccagaagtattcagacatggatggcttccagggaatcaacttctgaaagctccacttcctgtgcttcttcctaaaactgatcagccgggaaccctctgggtctgccagttctcccctcaccaaggccctcctaaacacttcccaaaagaaaggcctacccccagtcatcccaacctcaccctggtatcccgccctgggttataaaagccaccaaagagacaacggaagaatgcagccctcatgggaggagttccagcaggacaaagaacttccttaagatgttgagaagggggccttatctatcttacctacccatctgtttattttaggattagaattaggaagctgacacagggacacctgtttaacctgtttaataaatatttgaattaaaaagaggagtcagagtttttccgacacaaagtatgatttggctggctggtctaaccacaagatccagcctggccaattaggaattatggtggatgttttccacaactgcctgggctgggtttgctgttctaaggctttgacaaaaataaatttgaagcaagtagatggcatacaataggcctggaaatacattccacttaaagttatgataaaacatt

SEQ ID NO: 87259 - DNA, 1050 bp, Homo sapiens
aaaaaaaaaaaaaaaggctgggcacggtggctcgtgcctgtaatcccagcattttggaggctgaggcaggcagatcacctgaggtcagaagttcgagaccagcctgaccaacatggaaaaaccccatctctaccaaaaatataaaattagccgggcgtggtggcacatgcctgtaatcccagctactcaggaggctgaggcaggagaatcgctcgaacccgggaggcagaggttgcgctgagctgagatagcgccactgcactccagcctgtgcaacaagagcaaaactctgtcttaaaaataaataaataaataaataataaataaataaaatttaaaaataaaataaaaagctgttgtccatgtttagctggttcagggttgctgagctggctgggtaatgtctgtaagaacactgagaactatcaggtattgcatatgtgtgctctggtatggtgctgccagctctctcattaggaatcatggagattgtactgccctaaaggggcatgggaaggattataacgctgtgagggagaatttaaaagtcttggtggaggcaggcgagctgtttgttggaaggccatggagcagggatgggagggagtagtcagggccggggccagcacagggcattgctggggttaagctaggtttatagggcgttaggccatgacatcataaaccagagagtaaacgtgtatttatcacctgcgtaaatacagatgcttctacacttgaaactgtgtaatggagaaaggatgttaggccggatatggcactttggtccctagaccaaagtccttgtccctagactgtctcaactggctgtgtgcctgtgactctgggcttgaggatcctgtgtgtgcagcctgtgtccatatagcatgggagttaaggcctgaagactgggattaggcagctggctttgagtcttgttcttcactctctgtgtgacttaggcagattataacaaattttttattacaattattttattttattttttggcttctcatgcttatttcctacctaggcagaattttagat

SEQ ID NO: 87260 - DNA, 1039 bp, Homo sapiens
acagtagtatcatcactttatgcaggaggagaccgaggcacagagaggttaagttaacttgcgtaaggtcacactgctagttagctgaggaggcaggatctgagctccaaagccaggaggctgagtccatagatgtatttacaatattgtagcgttaggattcttattctttgactgttactgttcttgtttgacagtcccagggagggataaactgagcctagaggtagattaagtgtacagatcacagtcttggaaacaatgagggatggaatatatgagagttttttttggagttctggggaaacagctgtttctaagtgtggggcagagctgaggagatctggcagagatagagaaggattttttttggggtggatttttactatctgctttgagggttgcatgtatgtggatttaagagccacgtgactctttcccctcctatcccattttatttgggaacttatctttaaattccaactcacctctccccctggcagccttagaaacttagaaaactgccatggatggtgaattcttgagacatgaaaggaaaggtgaagggtggggttcttagtggaatttcttccttgtggtagcatttctattaaatgcatatggggaatgagccacagcgtggcttatgtttggtggagagagggatgggaactcgggtgacttccctttttctcatgagctgatttaataagagaatgaatcatcctatgagctttaattctggaaaagaaagaaaggagaggcaaatgagtgagatggcatttgactgaagccagaagccttccatgtcagtctcctagggcgggcactaggctggcacccagggccttggcggttcgtgctagtggtgagttccctccaggggctttgggaagggctcccagcttccggtcactgccactgtcaccatcagccctctcatcctggtaaggctctggaacctaaggccttgaagggaaaagaatagggaggcatgtcgttaaaaatagactactggtaaaattcacatatagcagtg

SEQ ID NO: 87261 - DNA, 1099 bp, Homo sapiens
ttttttttattttttatttttgaggtggagtcttgctctgtcacccacagcctccacccgcccgggttcaagtaattctcctgtctcagcctcctgagtagctgggattacaggcgccctccattaccccatgcccagctaatttttgtatttttagtagagacagtgtttcaccatgttggccaggctggtcttgaactcctgacctcaactgatccgcccacctcagcctcccaaagtgctgggattataggtatgagccaccacgcccggccaaaatattacataatgattgttaattactaccaaatacttattaagcccctagcacaatgttttgcatattgtaagtcctcattaaatgttagctgctgctgttattgttattattttcattttgtgaaatcacacagctacttagtggtaaagccagggctacaatgttaaattctttttattccaattcttttcagcatggccataaggagatttcaccacattctggaaatatgggaaaacctttacaaaaatgtttatgcggatgtctttgcatgaatgttcataatacagctagaagaaatgggcttaacctatttattagatatagttagactttgggcatgggggcatatgtctaccaaagaatttgtttccacaaatattatttactagtgtttaaaggtttcctgaatgctagattggttgcctctgctggaagattggggtgtttttagatgttttcattgaagagttcttctcaagttggaaacatccatttcaatgagttgtggtggcaaagcaggcttttgtgcgtaatggaaatatttctgtagcctggctgctatttatcaagggtgaagacagtgcagatgttttgaaaaaaatatataggcttggcagaagtccatgtgtcttaggccatgcctacacaaatccattcccaaatgatccgtactgacctttagcaaatcgatgacagcctcggagcctcccaagggagccgtttttgtctgaaacattgttgaggccagtgtgacccctggccttgcatggtccttgacacctctgatggggcgacaccctctccctaaggcagctt

SEQ ID NO: 87262 - DNA, 1020 bp, Homo sapiens
ctgagttattttgtgcacattttcatcatagcttagttgtttagagtgtaagatctgaagttaggcatctccaggtagaatcccagctctccatcttactctaagactttgtaagtgccagagtttcctatatttagaaagagttaaaagagatctcatgtgtatgccagacaaagaggaagtgttcattacatcgaagctattattattattgccatttctgcacagcggtacacaaattctgaggctcattattaaggaaaatctttggtaaaaactgtagaggctgagggtggattttggaagagtgggagggggtggggtgaggctcttgaatgatgagcagagaggaccgcacagtggaggcgggggtggggagactgaaatgtcatgggtgacagctaagcatatttgggggcagaatgactcagcatctgtagccctgctgtggaaccaactctttttccttttctttggagaatttgccctgtaagctgggggaggggtgaggaggcataaccagtgagaagggttgaatggcataaagttaatactaacattggtccagaggaacagggcagagttccctggaggaagggaacctagtcaggagatcggggcaggcccaataggcagtcaagagtgcaagctcacagggtgcagtggctcacgcctgtaatcccagcactttgggaggccgaggcgggcggatcacctgaggtcaggagttcgagaccagcctggccaacgtggtgaaaccctgtctctactaaaaatacaaaaattagccgggcatggtggtgggcgcctgtaatctcagctacccaggaggctgaggcaggagaatagcttgaacccaggaggcggaggtttcagtgagcagagatcacagcgttacactccagcctgggcgacagagcgagactctgtctcaaaaaaaaaaaaataaataaataaaaaaataaaaaagaggctggacacggtggctcatatctgtaatcctagcactttagcaggctg

SEQ ID NO: 87263 - DNA, 1324 bp, Homo sapiens
agtcagcgtcttgtagcgagaggaatgagccttccctgggtgatcccgcagcacctgagccacctggcccaggagaaaggactcagggagatgtactgggcctttcaccccttttctttatagccagctgtgcctgaaggaggtgagggaccccaggaattctctcacggaggaagtcatctcaccatgtggttgggcccctgctggatcaagtgtgaagctgggtcctctctgttgttgggggtcagtgccactggtacctcagtttgaatatggtgccatctctgggatggagaggtgctgctgggagaaacctggctcgggtctccaggaagctggagcgtgtgcagcagggctgggtgtgaaacccgctgtccactttctgcagctggaagggccaggacaagggaaacaggatactgctaccgacctgggcacatccttgaatagaagagagaccctggacagcgaggatggcccagggatgttgatatgactagggctgtatccccagctcctgggccaggccaactagggccagaggttggagtcatgggcccctttgagaatctggtgaaagctctaactcctctccttccaaaatgcatgtgtgtagggagacacctgtattcaacaccagacggttaatatacccccttggaaccaggacctccattgagacctctgccctagagttactggtctgacctgggccatcagaacagttgtcacctttttggctggtcagtgaataatcccagggttcaaagagcagactgcttctaaggtcttttctcatgacctccctatgcaactttgggcttgtggccatggagacctggagtgtctggacagatcccagctccctacagctagctagaggatgggggcagatgaggtggcccttttccaggggctcattttgctgtctgtgtggtgggaaggccctgggcactggactaggcccactggtctattgaattagaggtaaataaagggatttgggtggaggtggatattctggtgtttcagctgggtgtgagatccaggcctttaagagctccagcttgttcttggggaaatggggttgaggtgctttagtagagagtgttaagtgtgaaagacgactcttaaggaggtcttggggcagaattgtccaaggctatgatctgggtgttgtcggttccttagatccctttggactcttgaaggcaagtgggggccagagggctgctgtcactatccccagtgcagccccaggccagaggaggcctggcctgcctttcctttcttggctcactgggtcctgggctgctgcataggt

SEQ ID NO: 87264 - DNA, 3167 bp, Homo sapiens
tgcagtaagctttgatcatgctactgcactccagcctgagcaacagaaggagaccctgtctcagaaaaaaaagtgtccaggttttgttggataagaaggaccagggtcctctaactcactgcagggtctccttgcctagctagttctctttggtatgcttggtggtatgtgtaatatgtagagttaaagatactaggcataaaataggtgattgtgtcaacatcagaaacaagaagaaatgggagtgaggagaacatgaacttattgaggagtatttttttctttcctaatgtagttaagaaacataaccagaaagaataagattatttaactgaaacatatttctaaaactgaaacaaacatgatactaaaatagcttgtttatcattccccaattatgcatttttaaaaccttcacagaatgtggcttcatgtctcaggctttaacatacttattgagtatgcacacctctctctgctagttacagtgtgccttacgagaagatttttctgattatctgttattgtgtaaccattggcccagctctgtgtaaacaagctctttagcctggcctgctggaggttggctcttcccaagaaagtttttagaactcagaggaactgcatgaagtagtagtgagaacacttagccctgcattgcagaagttaactgatcctctcagcatcactgtgaggtaggtaagtaaatctgaacttgaaacctaaagtgcaaggctaaacaagttgcttaagtccttgcaggaggtatagcatcagaaggtgattcatacactgggatccctggcccccaggcttgtgctcagaaagatcctctgttctgttgaccgcttgatagaaaactggaatttgatttattaaatgtttgacatttttaatgaaaagaaattgattcagaaactttgtgaattttgctcactgttttgagaatctaaagaccctttttcttcttattttagaagctgctaacctgtgccaaacctccacggctgctacgacacctgtgactctcactactccattcagtataacatcctctgtgtcgtctgggactatgtcaaacccagtcacagtggcagctgcaatgagcatgagaagtccagtaaatgtttcaagtgcagttaacataaccagcccaatgaacatagggcatcctgtaactataaccagtccattatccatgacctctcctttaacactcactaccccagtcaacctccccacccccgtcactgccccagtgaatatagcacaccctgtcaccatcacatctccaatgaatctacccacacctatgacattagccgcccctctcaatatagcaatgagacctgtagagagcatgcctttcttgccccaagctttgcctacatcaccgccttggtaaacagtattataaaatcaaaatatgggtaaaagtaaatatttaccagcaacttaacttttagttgattaaagcaaaaagtaaaccatgaaattgggagattttattacattagttaataagagtgtggtagcatttttctccaatttggctgggattattcaaagtagggtgtgtatgtaacttatcactggaccactttagtttaatcagaaattccttttagctgacaacattgcttaaacaggatagtagttggcaagatgaaatgccagaattaaaaccaatcataagtagaacccacttcaaaataaaaaaacagcattactatttctaatcccaaggaatcactttattgtaaacactagcagaactcttctccctatacaaggtggatggctgattttaacctgaaattttaaatccacagattgagagctagtgtagaattgtctgtgtttattgtttttatgagtaaatacatgcattgtcataataaaatgcatttcagagaatatgcattttacctttgggaatatgttaatttcaggcagcattccctatgggaaaggtgataccagctctgatatgcaaagcatatgataatttatcattctaacttcaacgtataatagggattgtgacctgatatttggagatgtaaatattgctcagcatattaatcccgatggaatatagcattgtagttgactttttaaaaaaaaaaaaaatttaaaaaaaatctacaaattgtgttttgctaagaaaagcctcaactgacagaggagaagtcaagtgtgtggacaggcaagctcctaataaacagagtccagtgggattcctatttaggagccaaggagtactttggaacagtacaaatatattgctttaaattggaagacgctggaggcactgggatgtgatatgcccctctctctcccaatcagagcctgttgatattacaacagggacagatgtgttagttgctcactagagtttatgtcttatattaaattgtatacagtttttattctaaccactaactaggtagtgtatgccccttcagaacatgcagagtgtatctttttttaaatttctccttccgtttcttaagtattgcgcagatttgttcaactttgtaaatatggacatcactttttttttctttgagaaaacacttgtatcagctttgtggtgttttcagggagacagctgtctgcattccctgtagaaacccagcaatgattatgcacgttgagacatgtgctttttatttcttagcaagatattttatctctgtacataaagtagaaaccaaaagctagggaaacagatactctttacaccatcatgccacgcattgtttttaaagcattgcgttaaaaaaaaaattaactaaaccaagatgctgtgattttttaagttgcaatatgtttttggtttttttcattttttaatcattgcagttaagagaaatggaaattagttgtgttaatcttgcagaatgtttgcaggactgactatcaaactggatgatttccatttataccctactgtgtcagttcaagcatcaaaataccttgcatctgagacagacttcctacatcagggacaggtatctgtgtgtcattatacaaaacagttctagggggttgaactacatagtaaaaaaataaaataaatagtacttagtgtaaaataattttataaatgatcttttgtactttaggacattaaattgtacaacttttgtatatataaaagc

SEQ ID NO: 87265 - DNA, 1059 bp, Homo sapiens
agtgttgaaaatatggctagagaagtgttttcatttagtatgccaagtgatcaaagtagagaagccacagttttaggaaatctagcttaatggaaacatggaaatagtgcatgctgggaaatatctggtaaagtatagttattggcaataaagtgtccagataagttattactaggaattaaaagttctcagtacttcctatcatgttctttcttttgatgtactttttgctacaaacctggatccaaatttggtcctttgctatgctcagagttgcatttttatattcaatttgatgtcaacctccatgcattatgggctttttttttcctttctaaaatattcccacttttagaggtggatatccttgtgtgtacataagttcattttcttacaactgtgctatttttgctctgtagtgttctttttcattgtattatttattacatgtttcagattctgtagtgttgatgtcttttctcttggtcacacccttaatctccttcagtctatcactggctggccttaacatatctagtcttctgctgctgaggactttactgtaattgtttaaaaaattttaaatggtttgcttttctctcgtgtatattttctaacgaatcagttggagtatcagttttcaacgtacttttcaacttactagtacagctttggcttctggactattgtgcagccatttcaaatgaatcattttgtcaatgtatcatgagccaaaggacagatttgtaaattccttcttcctcctccacctctacaatgtcttactatgttaaatgttaaggaatcctctatctgtgggctcctctgtatgtaattccttttctgtgtagtttcttccatcttttgctttcatgtagtgtggctcttcccttcctcagagtgatcccttctgttttttttttttcttttttagacagagtctctcgctctgttgctcaggcttgagtgcagtggcgtgatctcggctcactgcagcctccgcctcctgggttcaagtgattcttgtgcctcagcctcccgggtagccaggacgacagg

SEQ ID NO: 87266 - DNA, 1668 bp, Homo sapiens
aactcagaaacctcagggtgcaccagaaacattaaaggatgccattgggattaaaaaagaaaaacccaaaacttcatttgtgtgcacttactgcagtaaagctttcagggacagctatcacctgaggcgccacgaatcctgccacacagggatcaagttggtgtcccggccaaagaaaacccccaccacggtggttccccttatctctaccatcgctggggacagcagccgaacttcgttggtctcgaccattgcaggcatcttgtcaacagtcactacatcttcctcgggcaccaaccccagtagcagtgccagcaccacagctatgccagtgacccagtctgtcaagaaacccagtaagcctgtcaagaagaaccatgcttgtgagatgtgtgggaaggccttccgagatgtgtaccatctcaatcgacacaagctctcccattcagatgagaaaccctttgagtgtcctatttgtaatcagcgcttcaagaggaaggaccggatgacttaccatgtgaggtctcatgaaggaggcatcaccaaaccctatacttgcagtgtttgtgggaaaggcttctcaaggtactgcattttgctttgctttgctttgcttcattatggtatcagtgtacttcagttttgtctccatgtgatctagaatgtttatgtgagaacagatgtgggcagacctgtgttattagaggagattggtgatagataagtattaacacctccaggtctaacctcagtttggtgtgattgacaagtggtgacatagtgattaacctgtttttttcacttaacaagtgcctcggtggactcaggctttcatttggcacatggatacttatcactgcaaaaccaccagttttcagttcagttgggggactagacatgaggctcactgggcaaattaaagtaacatttcttggaagttgggatgaccttggatactcttaattaaacttttagaatgttttttcatttttctgagagcaccaacatttcactaattttcatttataaaagcttttagagttaatatagtggtagctgtttctggcaagtgttaagactaaaacttcgggtattttgtaattgtaaagaatcaagacctaatatgatttgatgttgactaggagagaaaattaacaggtagaggcctaagactttgttcatggtaagagagggaaggagacttgcaccgggggagggaggttggtaattctgctagctttccctaaaatgcaccccttcccaatctgccaagcatgtgagcatcacataagtagcatttctctatgtgttcgattatatcttctgttgaaactctctttttcacaggcctgaccacttaagctgtcatgtaaaacatgtccattcaacagaaagacccttcaaatgccaagtaagagttaaaatgacttatccttagtgtagcacttaatgcacattatccagaaggtctgagccagttgaatctcaccattcttgaatagtcttaaaatcactgacctgagtaaatgtggcccatttgacttctagttttataaaatataactgacagcttctgtttctgtaaagcaagatcatttaaaaatttaagcgtgttgttttttttaagctatatttccctttctttgggcaatagtattttttgttagg

SEQ ID NO: 87267 - DNA, 1118 bp, Homo sapiens
atactttccccagaaaaaagctcaaatggttattttaaaatatgggattgatgtgccactgaagtgattttcgtgtgattaaaaaccatattaagcatggtgtctatagagattgaaaaaaaaaagtgttcttcatgtaaaggaaaaacccataacacatctttggaaagctggttgaaaaatcttttgaaatacttttttaaagattatttttctcctgggtaaaacaaatgccaagcgtttattgatcaactttttaattagattttatattatttaatttttttcagctattaaaatctttttttccacctgatggagaagtgtgaaaacaaatatttaatcctgggcttggcaatgtgtgcagtgaaatttgttggaaaacttaaaatttagagccgagagcagttgaatgggtaaagagaatatttcagtcttttctatggaaaggtatgaatagacttaatcagttctggttttaagtaattttcactggggatatggagttaaattatcttgtttgtttcctggagcatcctgttgaatttatattttgaaacaatttaatacctgcttgctttccagataacttggtggaaagtgaaagctatagctattaaaatgtttgatggatgattcttctaacaggacattcaagatgtgactcaccgatgttaatttgttcagtacaaaatcttttaccctctggcactggagatttcatggtgccatatcctactaccctgggtgatgaaataacatttctgttttgtttcttgccagccccaggaaaaggaaagcttgggcagggttaaaaagccttgcagttgaaagagatgggatataaaattaaaactttggtttgatgatgctagtcaaataaaagcctacccagaagttatatttttaaaataaatcacttaactgaaggctggccgtggttgttattttactctgtctctcccccagagaagaagttgggaaaacccagttcccccttagaaggcttcttgtagaagtgtggggatcctaggaatcctcagagagtgattcctgtagtggttctgcagcatttcacccaagaagcagggacctggtgtgaccctcctgtgagagtg

SEQ ID NO: 87268 - DNA, 1557 bp, Homo sapiens
attgtcattagaataatggtcttcattaagtactagttttcataatcctgaagcttcattttcaccaatttgaaaggcagctagggaggagaagactatgcagggaaggaggaaaactctggagtgcatcacagagaccttgagtgagttaaggcagggaagaagcagatttgctatccactgaatgaaaataagaagaattccattgtccaaggtcagagcaagaacacaaaggttttagtttacttagttaattccttaggtttggacattacaggagacatgggggtgaccatagcaatttagctgataaatgtatcagaaactctttcatcattttctgtcccctcctatcttaggctgaccggttccctgatgtgttacctgcttctgctactgatccaaactgcagaacttctcattcatccccaaggcctccaggcagtatccaatggggaatcagctctaaaaggaaccagaccaacgttttccagccccttcattctggtgactgaggggaggaaagaatgggagggggtattcttgtctagtggatggaaaggaaacacactgtcaaattactatatctccttggttttctattacagtagaattctccagccatatttttattgtctatgggggaagttggagatggtgaccttgattagaagtgtctggagggggataaatggaggggataagattcagttggttttggaaaatgttaaagtcttaaaataatgcgtccatctgaagaattttttctaaaaccagagtttataaaaatatcactgatacagcctgccccctcatttccctgccacaggagatgtcttggactagagacacttgtttaataatagcttgtctctgatattcccagtagcttccctctgtgtgaggaaaggatagaaatgttcaggacatcatcatacaggctcctcatctacaaagttccagtagcagtgacgcctacacggaagacttggaactgcaaacaggctggggtcacctcagtgacatctgacgctgtccaaccagaagttcgatttttgttctgggggtgaaggaggaaacagactgtactaaaggactaaaataatttgtctatactatctcacttgtttttatttttggcgggagaggaggggtgttgggatagaatttcacatcctatcttggagtgaaggggaggatggggaggctcagcccttcacccaagaataacccagtaatgacatctctacgcgtgggaagtgtttccctccacactgagaggatctgaggctgcaccccagtgggattccctgcttgagttggaaggccatctcgccatgagatgcatatcatagcgagagcgcagagggcttagccggccggggaggaaatgccaaaaggaagagaggctcgaagtcgaaagggcttcccccagtttggaggtggggaccatgctgtgcatgagcgactgaagagccgagtgtccgccgtggcctgtgccctccgctgagggtctaacagggacgcgacggtgctggacaccgtgtctgagtcacg

SEQ ID NO: 87269 - DNA, 1056 bp, Homo sapiens
cggcagagatactttcttttcctaggattctaagtctgtaatccacatcctcaatgtattcacaggactttaaaattctctccaaatgaggaaggaaatatcctgttgctttctaatgtttactaaaagttgtgtttagaacaacagattttaataggcatcttcctttgttatgtgtcattagccctttgcccgtttaccttagggctctttgaaggagaaatggatgggagaaaacctgtcacttggcgaaagtaaaagggataattaactggctcagagcttatgtgcagagttccaagccccaaagttaatctagaaccactcgataacaccaataaaaatatttatttcacatctgttatatatctggaaaatgttctaagcatcttacacatatttctcattaaatccacaggtgaccattgtgaggtagatattttgttctaattttccagatgaggaagctgagaccctaaaaggttaggtgacaggttatacaacttggagtgtgggaggaggagagaggaacctgaacagggcaagttggggatctgacttttgtttgggtagatgtaggcacattgtatttttggcttagatgctttattcatcatggctgaaggtaataccatttactcactcaccgaaaattgtttacaataatctagatgaatttgctgtctttggacatctgtcttttgactggaccccagtatatagtctgtggaagctcacttaaggagagagctcctttttgtttggttagagaaattttctgtcctaaaagtagaaatagccccttctaggtaaggatggagcatttgatcatactggtttcattatattcctctaacagttggaaccgattgtttttgagtacttgtttcaaacttctgagtattttccttctggaaaatagctcagtgtttaaaatttacatgaacttaaaaggttaatttttttttaaagaatgtttgaggagcaatcaattctgattttgtcttatggatagaaatagaattagccattttcctcaagaaaagtgattcttct

SEQ ID NO: 87270 - DNA, 1063 bp, Homo sapiens
tcagttgaagatcaaattgactctgaagaaaaactggagatgtttctcttggagtttggatagagtattcacttgataacatgtttttcccctgccttgctcttcacaagaacatctggccaggcattaacaattagtaaatttttttgcatatgaacagtatttttctggtcatgtagatgggtgcacatgacactaaacagcattgtttagtgttatccctcttaactggtgggttgtatttggggtggaggctgtagccgaggagaagacattcacctctgtactcgagaaactttgtgtaggaatttagtttatttttttattttttttaattttttattttttactacttttactgttagcacaatgctataattgagctaatctttgtagtttggtgcaggaccaccaagtttgtgtgacccattacctactttttccatgctcagccattaccctgtcctggggcatctgagggcagtaaggaacaggtgtccaaaggaggaatgttggtgcctatgagtatgttttccagttgtattgaatttcttacttggtgtatttttgacttgtcttagtttctttccttgtggtctatgctattttacttgcgatttgttggatattctccctgtcattaaagagttgtaaaatggaagttagtttctctatgcaaatgctttaatggatgaagctgataggtttagcattgatttttgctggtgtccttcaacaagcatgaaggtgataaatgtgtttccatggctttagactcatttttgaagtcttggattgtgtgaacattcttagaaacaataaaatgttttaattaaaagccctcgactaccagctgaattcagtgtctactaggaaaatgggtagatttgttacattgtccctttgctctctatgactttgttccagttgtcaaggaacttaaatgggtattcaggaaaaagaattcttgtttccctttcctcaccttgccagttaaataactcctggtgacacttcaggtggtagaattgaaacacaaacctgacttctgaccacatgggtc

SEQ ID NO: 87271 - DNA, 1021 bp, Homo sapiens
agtgctatatgtgcaggtggacatgttgcccttaagctgttctctagtttaatgtgtatgctttgttttcttcagctacatagtaaactgagagcaaaggctgttttttttttttttttttttaagacagtgtcttgcactgtcacctgggctggagtgcagtggcgcagtctcggctcactgcaacctccacctcctgggttcaagcgattctcctgcctcagcctcccaagtagcagggattacaggcacctgccaccacacctagctaattttttgtatttttagtagagacagggtttcactatgttggccaggctggtctcaaactcctgacctcgtgatctgcccgcttcggcctcccaaagtgctgggattacaggcataagccaccgcgcccggctccccaaagtcttatgttttaaactttttgacatttcttctaagatgtccagaatgctagtacctgcaccttaataaatgtttgtgaataaatacattattgaaatcttaggcaggtgtgccacatagcttaaatctgagacactgtgttctttagtcagatcatgcatattcttagaatagtaacctcaaaggtttatacccttgctaccttttttatattttttgtagagacagggtcttgctctgtttctcagactttttgaactcctgggcttaagcaggcctcccaccttggcttcctaaagtgctgggattacagatatgagccactgcgcccagtcctgatactgtggctcattttaattctcacgtagtatttagtttcattttgcagtttgaagaaataggcccagagatgttaaaggggcaggcccagaacttgaatccagatcttgtggtgagaaattcttgttttactatcacgttgctttttaaagccagcctgctttttccagttgggaggcctcggggagaaaagtctgacccaagtgagaaacacctgtaatatctaccagatgccagcagggtgtcccatggtgctgtctttgatccatgt

SEQ ID NO: 87272 - DNA, 7290 bp, Homo sapiens
agctcctttaacgaaagttcgttatttaacttttaccaaacggctggtcactctgttcgcaaaccaccccaagctgggaacgcgggggacttttttacccccttcgtggggagggtgacgtcgcgcgtgcgtgcgcgtgcgctgaacgtagccctcgcagcacccgttgcgctcccgcgcgtgcgtgttgggatcgaatcgctgtttccttccgcttctcttcctctgtctcccccccatatccgtgcgccgagctgataaaggcgccattttggaggggccgcgggagacgtggtgccgctgcgggctcgctctgccgtgcgctaggcttggtgggaaggcctgttctcgagtccgcgcttttcgtcaccgccatgtcgggaggtggtgtgattcgtggccccgcagggaacaacgattgccgcatctacgtgggtaacttacctccagacatccgaaccaaggacattgaggacgtgttctacaaatacggcgctatccgcgacatcgacctcaagaatcgccgcgggggaccgcccttcgccttcgttgagttcgaggacccgcggtgaggcggcatggggcttgcagccttgaggaaataggtccgagtagttggggaaggctccaaggccttaacatagagaacggggaagcgggggctcttagagaggttggggcgagactgtatcgcccatgcaggagtcgagtaaggagctgagttgatgtggcttctctggcgcctcgccttggacgtccccggagcccattcgcaggctggagcgggaaactgaggcgctgagggctggtgtagtggttgggagcctggcgtgtttctgggtgggggaggggccattcctattatgcggcgcatgtgggctcttccacgttgggtgcgcatgtgcggggggtttgctggttcccaactgagcgagcttctcctcctggtgtttctcatcccttttactttctgcgatcccgcagagacgcggaagacgcggtgtatggtcgcgacggctatgattacgatgggtaccgtctgcgggtggagtttcctcgaagcggccgtggaacaggccgaggcggcggcgggggtggaggtggcggagctccccgaggtcgctatggccccccatccaggcggtctgaaaacagagtggttgtctctggtgagtgtactggttgtgtggattgatgtgaagggacgaaaactacctaaaatttttctcttgcgtgacaggtttaataattgcaaatttttcatgctaggtcttaaattgctttagtttttgggtgaatttaataaacgaggattgctgctgtggtgatttaccaaattaggttgcggtactagatacgaagatcgttacaaataattttggactctggattccagaatcttaccagctctctttacctggtatcacttaagtacacctattaagtactttaaagtactctttgtcctaatgtaccttaccagcttaacgtgaaatttaagataattggtactaagaaaaaaaaaatcactttttcaggactgcctccaagtggaagttggcaggatttaaaggatcacatgcgtgaagcaggtgatgtatgttatgctgatgtttaccgagatggcactggtgtcgtggagtttgtacggaaagaagatatgacctatgcagttcgaaaactggataacactaagtttagatctcatgaggtaggttatacacgtattcttttctttgaccagaattggatacagtggtcttaacagtggaatttcaaggtaaggattcaggcaaggttgtccaagtaaattgccagatttctggttttagttacattgtattcattcagcatgtctgaagatagatgaaagcttagatctttcaatggaaagttctgtctatccaatagggagaaactgcctacatccgggttaaagttgatgggcccagaagtccaagttatggaagatctcgatctcgaagccgtagtcgtagcagaagccgtagcagaagcaacagcaggagtcgcagttactccccaaggagaagcagaggatcaccacgctattctccccgtcatagcagatctcgctctcgtacataagatgattggtgacactttttgtagaacccatgttgtatacagttttcctttattcagtacaatcttttcattttttaattcaaactgttttgttcagaatgggctaaagtgttgaattgcattcttgtaatatccccttgctcctaacatctacattcccttcgtgtctttgataaattgtattttaagtgatgtcatagacaggattgtttaaatttagttaactccatactcttcagactgtgatattgtgtaaatgtctatctgccctggtttgtgtgaactgggatgttgggggtgtttgtggttatcttacctggggaagttcttatgtttatcttgcttttcatgtgtctttctgtagacatatctgaagagatggattaagaatgctttggattaaggattgtggagcacatttcaatcattttaggattgtcaaaaggaggattgaggaggatcagatcaataatggaggcaatggtatgactccaagtgctattgtcacagatgaaattggcagtattgaccttatactaaaaggcaggggttaaaaatgattatatacattttccttaaaacacttgcaaacattttattcagttgtctttagctacaattgctttgctttttaaaccttggcaattgtggcaaaattatattgcccattttgtagcaacttattttgctcccttccccccatttttgttttaatagggactaatgtgggaagaactggctaatttgtcacagtgcttagttacaactgttaatgtgtgacctgctgttggtgtacatgtgggtacagggtgtttttaaatccaacaagatagagtataatatcaatactgctaaatctgcatgtcctctgtgtgactgatagagcgttgctatttcatttttttaagacaaaatgaaagcaaaatatagagttccaatgtattggtgtagataatctagttgggaatacttttaagtctcaccttcccctttaaactaatattcataattggttcatatgtttaaaagactttaatttacaaattaaattgcaaatgggagcattagatttagttttagacttaggtgggtagcaatgccagtaaacttaaattacgtaacttcttgcaaccacgaaacctgtaatacgctgtacagtaacaagtgttggcattatcagttgaactgtaaatacaaaatgcttcttccaattagtctctatgatgattaagtttctaaaatttatctgaacaccattcagaaacttgttttggggaatttgatagttattgatgtgcatctgttaaactgatgacagacataactcatcattccccagaaaccttttttgattacagtatctaacattttgcctcctcttttttggttttgctggttataaaggtttggattggagagggctcactggatcccaatccttggagctggatcattggattcaaatcataatgtggataggatagggaggatgaattaccaggattcatggagcgggatcagattaccaggaacataggagtggattcctgccccaaccaaaccgcattcgtgtggatttttttattcaacttaattggctattccaaagattttttttttcctatttttgacgattggagcccttaagatgcacgatggaattgtgttttgcgttttttggtaaaaggagcaaagcgaggacctggagataaacgctggagcaatctccttggaaggattcagcacgagtagatggtaaacatttaaaggggaaagggggggtttgtttaaaatagtaaatcagtaagtcacttctaaatttaaagaaaacaaaattggagttgaagaataagtaggtttccaattggctattgccgttttctttgaaaaaataaacattttttaaaaaactatgcatggttgtcctttttcctcttcatgtaagattctaactgggtctatcagttaatctttaaattgttaagtaagataagattttgactcttgtgttaatgtgttagcaaattaaaagttcttaaaaggcaatctaatggtattagccatcttttattgttaattgtaaaagtcttcaggggaaagcaaaaggggagaataaggcatttgtgtatgtaacttggtaaatgacggtgggggatggatctagcatctgaaagataagcttctctactttgttataaagtggttaaaaaactatagatgctgcttattttctggtggtcatagacaacataggcttttgtgcaaaattggttgatggctactaatgttcacttggagatagcttttgatattctcaatgaaactcatctcaaaaaaaggtaagtattaaatgttaacatcagcacagatgtattagaactgttttttgtttttgagacagagtctcgctctgttctccagactggagggcagtggtgtgatctaggctcactgcaacctccacccctggatttgagtgattctcgtgcctcagtctcccaagtagctgagactacaagtgtgtgccacccttgcccggctaattttgtatttttagtagagatgtggtttctctgtgttacccaggctggtcccaaaactcctggcctcaagtgatctgcctgccttggcctcccaaagtgttaggattacaggtgtgagccaccatgctcagcctgtagaacttttaacccaagtctcatttcttttttgaaagggaagagtgcacaagattaactgcttctttggatgaatcattgttaataaaaagctgggcatttagaattttgccttataagcccttctccaaccataagattattttgtaccaaaaactttggtgttctctaccaaagcagttaaaaacttttagcctgctacttcttgtatttgtctactgacagccccttggtactatttaggttgggggaggggacctaaaataaatagactttaacatttcccttgggtgctaatcatagttggaagttgaatttaaggtgattatttgggtgacaattaaaaacctaaggaaaaccagaaatcttggtagtggaagaaatgtgtaaggtcaccccaatcggtagattttaatgaacgttgtggaatgttgggaagaggggatgttaagttgaatgcagaatttcactaagtacttagtgtaagtttaaggatgtagctctttttatctaagaattcaatgtaatggccaaaaggcagatttactgtttaaaaatttgaataattttacatgacattcttgaaattctaagaagttttatgtgtagaacattttaaaaattcatcagattattaaagggaaaataaatgattaatgataattttggaaggttaatgtgagctagacttaagtaaactttggttcatttgtgttcattgaatgttttggaaatgaccaaaaaatgtaaatggccttcactcaagtttgagtgtttaaagttgaaagatgtgctctactaaaagttatagtaattctaacctcacattgaaatgagacagtattccttgttatacaggctgaatttgaagattagagaggatctaatgtttacttaggtaaaggggcataggttttgtagttaagatgaccagacagctaaaagctgtgatgggaagtatggactgctcctatttatagtctcagaaaatggacctttaggtctctatccgtattggcaattattagaagaaagttacacccttttgaaactacaaaagctgtcttggaatttccccctcttctccctatttatgtccccttagaatattttagggagcctataattattttctaaccaaggaaaaacttaagtctctttaagaagcaattacttttcataacatcagattgaataacccaccttgctgttcagcccacatcctactggaaacaaaaggtaagaaacccattttctggttcttgattgtttgggtctgaattttgtttttaaaactaagctaagtttaatgttttttaaaatgctgtttggaatatgaatagattccccgtaaaatgatttttcctaagttttatgctttagtaaatattcagtgctcacgtctgtgcatcatagtgcttgcgtttaatatgatttattgtagaatctcaacttttcttggtgtttgttgtctttgaaacattgtcttggtcattagggctggtgttttcacatttctgtggtcaaggtggatttcttatgtgtgcctttttgcttactttgtatatgaattttgtaatttaaattgcaagtaagttatatatatgtatttaccataaatagtattaaaagatgagaaactgttagactgaagttctgttgtaacataaccattatttccatcacagtatgaagactgcaaacgcagaaaacagattacagtctcttatccattttttgaaatccaaaaactacgaaaacaaaagattttctgttgttgagctaattaaatgtgaaccctgaccagaattgctgccttcattttgcacttagtgtgactaaactgtttcctgttgaacttcattattcattgcacagttgccacagactttgctgagggttttatgtaatacagggtatatatgtacctcataaagtgcatacagctctgaatcccagatatgtctgtctccaaagagttcatataagggattgtaggaactgtactagcatacacaggcctaatgcttttgtctgtaactggggtgtcttgactgaaaaacctgttattgtgaatcctttgttgattgaattttaagttcccccatctttttaggctgaagcagccacaagaaaaaaaggtatggcccacatttctttacattctgttgtaatagtggactcaacaattatatcccattgaagcaaatactcaggcatcctagagtgtacaatacaacattcttttgagttattgtttctgtatcagtacttaaaggaacattgaccaattagatcctataggaaaagctgggattggcatgaagtaaagagattatcaggaaacatctgttcattatgtctatcgtgattgtctattgaatgaatagtaatgctgccaaaagtaacttgctttaaacaaaccccaagagattatagtatacttaaaccagtacttattcctgttattgagaccttcacggtgcttcttggtagctttgaaagc

SEQ ID NO: 87273 - DNA, 1061 bp, Homo sapiens
gtgaaaagtatatgaaaatcaaatttcagtgtccatatttaagttttattggaacacagccatgaccacttgtttacatattgtctatggctggtttcattcaacaaaggcagagttgagtagttgcaacaaagacttcatggctctgccaggcgcggtggctcacgcctgtaatcccagcactttgggaatctgaggcgggtggatcatgaggtcaggagattgagaccatcctggctaacatggtgaaactctgtctctactaaaaatacaaaaaattagctgggtgtggtggcacgtgcctatagtttcagctactcgggagtttgaggcaggagaaccgcttgcaccttggaggcagaggttgcagtgagccgagatctcgccactgcactccagcctgggtgaaagagcaagactccatctcaggaaaaaaaaaaaaaaaaaaagacttcatggctcacaagcccaaaatatttactatctggccctttacagaaaaagtttgtcaaccccttaccaaaaggaaaataataacctgcttctgtcatttgtgcttaacctaattcaaatattcagctttgtcatgcgtgtccttttcctcttgcagatgtttctgtcatgggtaatatattattagttgtcaacataaataatgaaccttttcaagcgataggttgctaacacgtgtttcatcagccactactacagttcagtgataaggtactgagagctggtggaaagaaattctcctgcccatctgcccagcctagaagaggaggtattgctctactgcagttgatttctttttctttctttctttctctttctttctttcttttttaagtctagttgatcaaaattgctcaatgatggcaggtttctgtaaccattcttgcgttgaagtaatgtggcacacaatgagtccatgacaggttttgttctaagtaaatattagtgtccactcactatggaatttgcaagtgaaatttccaaaatgttcatattgtttttctacaatactgggatcattcactctcaggctggtgctggtaccacca

SEQ ID NO: 87274 - DNA, 1040 bp, Homo sapiens
taatagccaacccagtagtaactcccaccccctcaattaaaacctggactgtccctttgtgtctcactggctgtcaggctctgtcctgctactgctccctgtggcaatcatctactctctccccatcactcccccatttgtgaaagacatgagcacctggctcactatcagtctgttcatcaccatactcagcatcattcctggtccgtgtctattagatgacccctccaacattctgcctccagttaattaatcttctcaccaccagtgacctgtccctccctgcctgcctcagctgcccactcccatcatctaatgctagatcttatcaccagcagtaactgtgccatgtccaagatctccatttcaagcagctttctctgaccactacctcatatctgttcaacttgcttcccttgtacacccactcctacactcttcccctcagagaacttccttccacacactggttccccagtcctttcactcacgcattcctccatgctgtcacctccctcacttctcagcttataatccatggtccagcatgataaatatacttacataaaccctggggccttgtagtgacattaaaatatgtctgcaagttctttgatgcttgtactcatcagcttggctgccataacgaaatgctatagagtgggtggcttgagcatggattttttttttctcacagctctggagactagtagtctaagaccaagattctgtccaatttggtttctggtgaagactcttcctgaattgtagatggctactttcttgctgtgtcctcacgtggccgttccttggtgtgtgagcacagagagagagacagcaagctatttggtgtctcttcttaaaaggagatgaattctattggatcagagctttatgatcttatttaacattatgatcttatttaacattaatttgtttcttagaggccccatctccaaatagagccatactatgggttagggctccaacacgggaatttgtggcgggggcagacataaacattcagtccataacaacac

SEQ ID NO: 87275 - DNA, 1011 bp, Homo sapiens
gcagggagaaacctagagaggccattcctcctgggagagctgcatgctgactcccctgggtcctgtcagggtggatgactgaccacgaccctgtgctgcgggcaggctatggtccaggagggacactgggtccttgaagatacaggttctctgttcttcccagctgggctccaggagtcacatcaggagccagagaagggcatcagttgctttatggagccaataggtggggcctaagaggctgggggagggagttgggaataggaaaaggttgtctgcctgcgggacgtttccatttggcagagaaagtgtggtcccttaggggctctcaatccaatccgacaggagagacaagagctctgcacacatggagtccaagaaagatggaggaaagaagacacaggccagagattctaggagctcacagactggacagggaaagacctgtttttcccgatcctggccacagacccagaggtcccaaccatcttgggaactgccctggactctggcaagagttagggtgagacccagaccccccaagttctctcctacacatctacaaggcccccagagtgttcttctacaatgctttctatcagagccacctgctcctgggggcttgcagctttggccaggaccagtgagtggctctgctgggaggctgctctaattaggcccagggtcactccccagccccatctgtcctcagcaacatgagtcccaccttttcctcctcaccaggagccttgggagcttgggagacattccaaggctggctctgacatgaatttgctgcacagtgcgccaggcgatcagagctgactcctctcccttttcccttggaggtgttgatagtaacagcagcgatgagctgccaagttggcaggagaacagagcgactgtgcactgcggatggaggggggcgggaagcagcaagccggcagagggctgggccagaacgacagtttgtttatcctgaaattgaaagggtccctccagtctcagcca

SEQ ID NO: 87276 - DNA, 1502 bp, Homo sapiens
tctcctgcctcagcctcccaagtagctgggactataggcgtccgccaccgcacccagctaatttttgtatttttagtagagatggggttttaccacgttggccaggaaggtcttgatctcctaatctcgtgatctgcccgcctcagcctcccaaagtgctgggattacaggcgtgagccactgtgcccggccgcatagactctttttagggtaggaaatccattgtataaacatgttctcagttttggaaggttcattaatacagccatgcaaattggtaaccagctttacaagctcactaaactgtgctactggccaccctaaggtgccagacaaagaatcctgtgccactttctgcgtggccagagctacctcctgtcagctgcgagatagccaaaccacagccaggagcccagattactgactgctccctaggcccgaattcttccctgggacgatgaaacatcaggcatttgtgtgggggaaaggaactgcagtgtggacatctcagaacaacactgttttgtttatgtaagctgtgaggcattgtgggtgtgctggctacagagtcacccccctgtttccatcacatacgagaactgatgacaggagatcaggtagcgttgggaagctggggctaaaactctgctatggactcagaagaaaatggaatattctaaatattatagaatagacacagcaaggatacagtatcttctagttagaaacttttaattaaaagaatgttcactccatagggatcagctagaacatgatggtcaataattataaacagctgagcatggtggtgtgcacctgtaatctcaactactagggaggctgaggcaggaggatcacatgaggccaggaggtcaaagctgcagtatgccacgattgtgcctgtgaatagccactgtatgccggcctgggcaacataacaagaccccatctctaaattttttttttaattatgaacaaaaaggacagtcacaacccaacaattcctttacgatgctcactacacaagcagcacttaagactccttaggcatgggagtactctctgcctgggccagggaggtggaaaggaaactgaggcaccaaagtagaagagaggtcctgagatgtttcaaggcacacatagaaggtagttgcccgtcaccacacagggctgatcaccatcttggtctctgggatctaaaatattcaacttgggtagtagttcattcttgtaaacccagcactctgggaggccaaggtgggagaatcgcttgagcccatgagttcaaaactggcctgggcaacatagcaagatctcatctctactaaaaataaaaaataaataaagttagccaggcatcatggcggcacatacgtgtaatcccagccactcagctgaagcaggaagatcccttgagcccaggagtttgaggctacagtgagctgtgatcgtgctatggaccccaatttgggcaacagagtgagaccctgtctcaaaaaaaa

SEQ ID NO: 87277 - DNA, 1060 bp, Homo sapiens
ggagactctctcgaggagtggagaacaactgtctgcttcccgctgctggttcaatttggtgccaagcagcagtcagaagaaaggcatgaaaccaggcaaggtgaggagcaaaaagccggagctgaaagcagagggcagagttgaccatgaatgagaaaattaaggtcaaggcaagagctacagggtgtggacacctgcctacctgcctgcctgtgagagaaccccatgggactgggtgtcaggaagagggcatgctccctagcacttgacctcctgggatagggcacagcgcagaggcagggggatgcccggatgacctgtgagagagttctttccctctggaggccttgggaggaagccagaatgggcatgcagaagtgggtcaaggttcaattttcctgaagaagccctgagctggagacaggatgcattgactttttatttatttatgaggctatcgattataatgcagcttttccacaggatcctgaggcagctcgagttgggagaagaaacctcctaccagttcactttctctgtcctggagatgtcaggtgttcagataggctgcctccctccctccctggtggttctctctcctctccctacccctctgcagccctcacctctgcacaccctgaaggatggaggctccagagagttcctctagtctctcgggtctggctgttccgggttctttccaatatttagggcatattccaataccccaaatcctgagagcacaggctatgtgctccacatgagtggatgaaagatttctcagttataaaaggcctctgagatcttcctagcaaaacacctttttactgagaaggaacagaggccaaggagaagtgatttcttccaagtcacacaaggtgagaggcacaacctggacaagaatgaggcctctcgattcccccaggcgacaatcctttccactctagcacgctgcctcccaacaggatcccttttacttgaagtgaacccccagacagatccttaatgcccactcttccccctcagtccagggttggggtgcccctgagctgggaatcac

SEQ ID NO: 87278 - DNA, 1011 bp, Homo sapiens
ttattcctattgttctataatgtcctaccttcttgctccacacaagtcgaaaactcatgttataagctaccttccctgagtatagcagctgatgtttgttgagcatctactatatgccaggcactgcaccttttcctcacagtgacctcaaaattctcccaatgtatcctagggttatacaatgagtagcaaagtcaagatttgaaccctggcctgtgttcttcagagtccatactcacagccgctacaccatattgcctctcaggaaacaggtgtccttccctacattacctttctctgacttaggatttgattagcacgtcccttaccacacatcactttttgatttttactgtaactacttaaatcatatcccttagtttccttattagaccacgagctcttcaaaagtaagggctgggtgacatttggtgtccccaccaccaggcccagcgctagcacagacaggtttaattaactgcatttcaaatgaaggaatgaacacatgactgagtgaatctgaattgtagtgagggttaaagtctgtccatggtggaatagggagctggaacttgcttttctgaaggcctcagcctcacgccgccttttaaaaggcaccatgggaaaggaggagaatggaagagtttcatagatgagtgagagcaggagcacaaacccctgcatgtctgtaattacagagcctcttgatgctggctgctgttggcagcatgctggggaacgtgttttcagtcctccaggttgggaactgctggtactactgattgctttgtgtgatctgacatggctgtgaaaggaaaagaaagaaggggataataaaacctccgagcagtggccttgccagctgtagggcctgctccaagagcaagggcctccagtgtgcaccccaccactgagactcgcttttggtagggcagaggggaatctagccaccttgtctgtgctggacccttttgggagcaggatctccacatggagcagcccagggcaggg

SEQ ID NO: 87279 - DNA, 1405 bp, Homo sapiens
ggcacaattagtttatagaatgtttacagagaacttcccatgtttcaggaactatgctaggtcctgcagccacacataagtaagacgtgattctcacctgaaaggaactacagacaaacataagactgacatatttaatggtaagtggtcagtgaaaactcctggatgttacagagcacagaagaggggtatgcattccctctggggttcaggggcttggtagatgacatccaaaggagtcagccaggaaaaaagctccaagcctcacaggcaagagagccacatgagctcaggtgtggaatctgcatgtagggaaacgacaggcggtggatggtgttactagagcaggaagaacgagatggaaagtgtggggacataaggcagagaagcaggtgtgcacgtgtggaggttaagttatgggaaaggagttagtgtttattctgagcaggaaagaggggcgtgcctgaggagatctgcattttagatagatcacagcagtgtagatctaaggcagaggagccaagaatggagacagagaaccaactggaagagatgatgagtgtctgacgcaggggattcataatgagaaggaaggcatggattggaaaaatatccaagagatgagcagtgatggagacatggtgggtgagggagagacacaaatctagggtttctggcttgtgcctgggtggataatggggccataaactgagataggaaatacagggaaggggaacaagtctgggacagagatgttggcgatggctaacatttattaatcacatatatgaaccaggcactgtgccaggacttcttcatgcattttctcttaactccatgaagtggatatgattctcaatttatagatgaggaaaatgaaatttggaaatgttgaatagcttagccaaatctgcacagctggtagagtggtggaaaaaggtcagaatccatgcattctggcccactgctttatatgtgtgtatgcgaagagtctgaagagcctgtggggcatccacagtggagaggtccaggcattagggggtcatcggggcccagatcatggtaaaaaccatgaatgtgggtgaaatttctaagttgagcagtgaaggaagcaaagagccctggggaaccccgaagttaaagaagtagccagatggaaaggggtccaccaaagagccaaaaacaatagtctgattttgatttttaagtcagaagacatgaccatgttatctgggcaacaggaaactgggcaatcacaaacagtgtagctgtatcaaataaaaacattcaccaagttaagctaacatattaattataacagtgactatgttgcatagtaattatcctgaacagtaagcattttacacaaatagcagtaattagtatatcacaagtttcccaaact

SEQ ID NO: 87280 - DNA, 1091 bp, Homo sapiens
ggatacggcccacttggagagcccgaagagggaagtagaagtgtgtgtgtattggcgggtggggatggtggtccgtgtcattcggagatttagcctttttttttggttgcaaaaccaggaatagaggatgggagctgtcctggggtgccctttgtgcttttcacaggagccttggctcgtgactgaggctgctggcctggggccctctggccatcttcctcctatctggaggcccaggtcccttgctttttcccaaggagggaggggctaggctggacaccttcctgtgctttgcttaccggcaccttggacaggggtggtaggggttgggcttcacctctctcagatgcctggggggccattgtagtcgtaagaccaatattatgtaaccgcaggctctttcctggagagtaaggtggcttttaattactgtaacaaagttgctcctttggactttgggaatgaggcagtggagcaggtgagcttgcaggcaaaatggtgccaatttcatactttcactttgctgtctaaccaggccccacccccacccctgggtttgtaaacagtgcccccttctgagtggtaacctggaataggccaccaggtgacactagtttttcttcacttatacagagccttataatgtaagaacctttctccctgtgctgctgttgtacctttgctcagacccatttgagtttaccccatttatctcatttcaaccattagtatttaaaatgaagatgttgatttgcccaaggtcacgtaactagtcattccttgaacagggttctccgaatctttcctcagcaccacatggtgctcacagactccagttgaggctctgacttttcctctccagaatgtgggggcagagggtgctggtctactacctctttgctctgccagtttctgccgaagtggaaccagccctgcttagtttggcagtgctatctagatgaaggggccttggatgcggtcaagggctgcctggctggcagctggcatgtgtgcattctctgcatgtggtgcaggctgaaatggtggtggtgagttctgttttccctttcagccatctagcccacaggcta

SEQ ID NO: 87281 - DNA, 2190 bp, Homo sapiens
tttatctccaggtttttcccaagcctctgtttttttaggggaaggaaggcttcagcattcctttgaggaaaataagatattgtctcctaacataatacctttcacatcacctaataggtcagtactttttgaatgaatgaataagtttgacatgaggaagcaacgcaccaaagagatgagaaatcagtgttgaagctgggtccaaaatctagggctttcaaaaattatattgggctttaaagaatgaacattgtactgaggagagtggggaagcagaggggaggatgggacagagagagacatgtcctgtgtgaccgaccagccaagtctgaggttgccttcccaccctctctacctcttacgggcatctcagcctggagtacttgagagaaggcataattatcattatctctgccccactggacattggtggcctggaatagggcctgtatagggcaggggttggcagcatttttctgtgaagggccagataggaaatatttttggctttgcaggccaaatagtttcttggaagtactcaactctgctatcgtagcatgttcctgcaacactttattttacaaaaacaggtggtaggctggatctggctgatggacagtcccttgtagactgtccttgtgtgcagatgctctcatataacttcagttaatctttacaacaactcgcgatagagagctatcctcacctgctaaaatgaaaataatcaaatgtaggaaggccaagtgacttgtctaagaccacgagagataaactcaggaccaggagtcaggcctactgagtcctagtccagcttctttctgctatgatgccaatgatgtaatgaatggtcattaaatcagggacttaattctgttcaaatgttaggacacctggtttattctcaggacaacccttagtccccattttacagataatgacataaaaacacaaggattaagtaacttgcccaacgacacagctagtagatgtacactgtaatataatcttgactattggtgctcttcagaatatcggaagtaaattttagagttggaaaatctcattttacttatgataaaaactgatgagttattatgtcctattggccctgtatttcccagggtgggaacaatgtctctgccaaagcttaggggctccctctcctaatgcttcacatccgtgttttctgttgccctcaccttctatactcccctcttgcactgagaccccacacccagcagctaatgttcactgcccagagcaaggagttgtcagccttacctctctgctccttctgtagtgtcacaccatgtctgaccggaaggcagtgatcaagaacgcagacatgtctgaggacatgcaacaggatgccgttgactgcgccacgcaggccatggagaagtacaatatagagaaggacattgctgcctatatcaagaaggtgtgctgggagagctgggactgatggccaggggtggggatcgacagctgagctaacctccagggagatctggagctggggacataagaaagcccgtatatcctgtgcaagcaaaaccctaggaacttgcaaagcagacaaactagcgagtgattccgaattgcccaagcattcaccttaggagttgttaatagctctgccaggtgtgtgtgtgtgtgtgtgtgtatgtttacttttacaggtaattatgctactgcaaggcattggggaaggataagattatgcagagaaacttcagaattaaatatttctggcccagttcagaactattcaaaattaaaatctaggatatttgaaagaataagatgtacaaattttcagggaactacatcatttaaagtggatatgcctgtaataatcctcatcatgtaggaggtttccttttcttttccttaaaaaggactcaggtactacatcacccctttctgtctacattcttaagaaaagggtgggctcaaatatataatttttaagaaatggatgagcaataatggggccataggtttggtccctgaaaaattcctgagtgaatttgtcactggatatggttaacatggtgaggaagcagctgtgccaaaagtaagaaaaggggtactgggaccccctgattcccagtcaggatccatatccattggaggcatagtcccagcatttgatattctcagctctggcatcccaagaacatgtgt

SEQ ID NO: 87282 - DNA, 2841 bp, Homo sapiens
agggaggagagatgatcagggtgtagagtgctggaggctcaggggagacgaataatggaggctttgtggtgttccattattaatgaggggaagagtgtcctggccagctttaaaacctgagcttttgaggttcggggagctgaggctgagggatggggtgggggtgataacaaccaaacgtgtcggtgctggagttgcagggagagactcccattctgatttctccttctccagctaccctaattacctttcttctctacctttgttcttttttaggaatttgacaagaaatataaccctacctggcattgtatcgtgggccgaaattttggcagctacgtcacacacgagacaaagcacttcatctatttttacttgggtcaagttgcaatcctcctcttcaagtcaggctaggtggccatggtgaaggtgtcagtggcggcggcagcgatggcaagcaggcggcgttgctgggactgttttgcactggagccagcatcaggatgtcctctccaatggctgtgctactgcatggactgtatactcgatttcatgtgtatgtcgcagtaaacaaaaccaaacctctttctgtttagttgcctgggggaagaaggctgctttatgtttatttttcaagactttaaaaatattttttggttgtattgcactaggaaatctctcccacctctcccttttctctttctttccctatacaaaataaaaggcccaccatagagactaggcggccgaaagactaggagggctgaggaaaagaaataggtctctggaggtggaactaaaactgtgcagctgcctcttcctggcggtggatgctgctttgggagggccagggaggctgcagggggacagtgttgggattgtcaaggaaaaaggggtaggaaggaaggtggagggattgatctagtaccagggagaatattccactgaactgtgattctatggcttggggcggagggtggggtggggatgccttctttaggggccctgagatgtgtttgtctgtggtgtgtgggagtggggagcagatttgtcttgctgtctttgtcagaatttctaagtaagggctgtgtctttgtggattaccttcttttgttcttcctgccagagatcatgacaggaggatgctggggtaggattagcttgaatcttttttttctttacatttttctcctgtctgctccctgcttagccctcagtttcctcattcctctggagttctcttagagcagcccctgttgttagttggctggcaagggaatttctggtgactgtagttccttagttaggtcttagcaatcaaaccaaattgatgtctcccttgactcttctgtgtatatgtgtgaatatgtgtgtatatgtgtgtgtatgtgtgtgtggggtttggggtagaagggagggagggggcaggacagtgtggaatctctagggtgtatgggtaggtagggggcacagttagttctaagtgggcttttatgctaaaagcctctggggatatctgttttgaaaataaagataggtgtcccctccttgctgtcatctagcccagacactctgcttgctctctggctgtctgctccctgggaaggctttaggaggaccacccaggacaggatgaccatgctgccatctgctctggagctgggtctcagtgcagagggacagtgactgtggatggttgcagtctctggtgggaggtgaggatagaagtgataaagagctaagaggagcttctgggagccttggaggaggtcagtcttgcagtggtgaagccaggacataggagatggagcagggctgtgagaggaggagattctgaggaggatgcaggggaaatcttgtctgttaatgaaataggagtggggtggggtttggggtggggtggtcattgccgtttgagctgctgattttcatgagtcgccttcaaaactctcgtgtagggttgacaatgtgggggggtgggggatccagcttattcttttattttcaagtccattcttggggctggtggggaggcaggagaatacccctccctaagcccttagtgtgtgccgagcttgctttgtgatgttggcaggggaggggagacctgggtggtgactgagttccctttatcaaacccttcagtgggcacaaaattgagtgcttgattttaggttttatttttttatgaatgtccaaatctgtgtttccccctgccctcccagactgtgtggccagttgaaagtgtctggtttgtgttcatctctccctcatttctggagcagggcctgagaccctgccacatctcctatgctctgcatccacgcctcttttggacattaaaggttgattgatgcacctctgcactgtttgggtctctttggggatgaggggttggcatggtggcagtggtgccacacagtgggtgagggtggagagtctccagggtggaatagaatggggactgaagggaagaccagccactagatactgattggcctgtagcagcacttatttgtgcctaggcttatgccccttaagtagaggaaaactaaccagcagcactcacccttaagggctcctgggttctgccttccttggtggtgatggccaggtgaatcatattttgtgtctttgggatagtaactgctaccttcccagctgccgtcatggacctgcctgagctttgctgcttcaacttttgcccaaagctcttatctttcatactcctcccttctcggctttcctgaacctggagactatttagcaaagggtctggccactcagaaatggaaagctggggatatttagaaagatggcacctcttttggtggaacctaa

SEQ ID NO: 87283 - DNA, 1051 bp, Homo sapiens
tgtgccaatatagaggttcataagaaagataaaagagaaccagcagaaccccaggttctgcctctccttcctccctttgcccagataaaggtgtacagtgtttgtggtgaggctgctggacactgctgttttgggctttctagagagaatgcaaacatgcaaaaacagtgtggtagtgtaggcagaacaagatctagaatcagaagacctggagtcgaatctcagctccaacacccactggatgaacgtggacaagctgcttgatctctcagatcctcgatttcttcatctgtaagatggaaacaatatgtgtcttttctaaggggaaagatcaaatgacatcatgtatgtgaaaatgcttagaaatgggtgatgatgatgatgatgatactgattattagggtatctaataaagttggggaaagaacaaaatccccccctcacaccctattgcaccaccagccttctccctccctgctcaattatacccatgttatagggaaggaaatagggaagaaacttgtctaaggtcacatggatgttcgcaacaattgggatgcagaacttgatctgactcccaggccaggtttgattttgatttgcagtggcagagaggactaattttttactaggttctgagccctgtactgaactctggattgccctgtacttggtggtggtatacagttcagcagtttttagcatatacacgaatttgtgcagccataaccactatctaattctagaacatttttatcacccccaaaagaaatcatgtacccatttgcagtcacttgccattccctcttctccccagccctgggaaaccactgacctaccttatatctctatgaatttgcctaatctggacatttcatataaatgcaattgtacatgtggccttttgtttctggcttctttcacttagcatgttttcaaggttcatttgtgctgtagcatttatcagtactttgttcctttttctagctgagtaacgtgtgggtatatcacattttgtttattcatctgttgagggatgtttgggttgttt

SEQ ID NO: 87284 - DNA, 1004 bp, Homo sapiens
actggtcaagcccagcattccagcagctctcaggagtaacacagacctgcaccaccaagtccctggcaatggtatggagaatgagagcgggtatctggaagggaatgagatctgctcctgggatggcatttgaggttttatcaggccaagtgctgtgcgccctggggaggattccagagttgggtgacttgtgtgtgggttctacagggccacctggtccggagatcctgtctgtctttttgagcatggcagcagcttgtatttgggtgtccttttgcatctcagactcctatttcccacctgggtgataatttttctttttcccttgtgaagataaccttgtcattggccacaaggagaacagattccaagggaggccttgcccaccctatgacactcctttttataggacaaggtggctcacttctcctacccattcacgtttgaagccttcttcctccatgaggatgaatcttctggtgagtagctcagcagttgatcctgggccttggttcccctcaagcagtgctgtctcttggtgaaggccgcctgtgacctggccgcttctctccttgctcccagatgcactcccggagtggcctgtgctctactgtgaggtcctctcgctggacttctggcagaggtaccgtgtggaaggctatggggctgtggtgctgcctgccactccaggtaaccgctcgtctctgcccttctgtggcccacatgccctaggccctaagaacaagactaacactcgaatgcttctggtgaggggtggagataattgggaattggaaatgtttggcttgaaagagttcctgttcctctgaggactttctgcccccctccattagcgacaatgacgtggccttggcactgacttcctgacagtctctccatgtgcttcatgctcctctgattggactcagggtgagaagctgtatggcaaaattggctcatagcatatgtgtattgaatgaatcagcattcagtttggaataaaa

SEQ ID NO: 87285 - DNA, 1066 bp, Homo sapiens
ggccctgaccagatggcgtacacagggctgcttgcttttcccagcactgtcagagaatgaccactgcagccagcgaggtgccttcattcttggtcgagcgaatggcaaatgtcaggcgtcgccggcaggacaggcgagggatgtgagtgcgggcatgggatgggggacaagcttttactttttatttcctaaagttgggtagttttgcatttttatcagtggttatatatagtattcaagtattactttgtaattaatttaaaaaataaatataaaaatataaaatatcttcctcactcttcatgtggacatttttccaaagtgcctcagagagagggaagggatgtcatttctgtttgtcaaatattttggctcttaaaaaacaaaacaaaacagtatgtccactagctcaaacttcccattctgaagtggctctccactggggtgctccattggggtgtgccagggaagtgacctttctgtggtgtctcccagggagggcggcatcctcaagtcacgcatcgtcacctgggagccctcagaagagtttgtcaggaacaaccacgtcattaacacccctcttcagacaatgcacatcatggcagacctggggccctataaaaagtgagtggcgcttctcactgccagcttagagcctcatccttttctcctctcaccagctctccccttcctgttattatcatcctaggttataggggagggagggactttttcttccttctcttcttagttatgagtgaagcttctcactgccaactcagatcctcatcttcttctcctctcaccagctatccccttcctgttatcatcctgggttataggagaggaagggactttttcttccttttttttcttagttgtacttggaagaaagttttaccatgacagctctccctatagcctctgttctctcccctgcagtgggctcagtatctcttcttgtttccctgaaggaccattgacctcaaccttggtgttttcctgatttctaggcttggctataagaagtatgaacatgtcctgtgtactctgaaggtggatagca

SEQ ID NO: 87286 - DNA, 2332 bp, Homo sapiens
cgccagcctcttcctccgcccaacatggccaccatttttgttgggatagccttgggctcctgccaggggaacagcagggcagtgagggagtcaggactttgggctggtggggaggccgagaatcaaggctctggggagtcaggactttggggctggtggagtggctggggactgaggccctggggggtcaggaccttgggctgctatggaggctgggactgaggctctgggggagtcaggaccttgagctggtggggaggctgggaattgaggccctggtgtgttcaagaccttgggctggtggggaggccagggcctgaggccctggggggtcaggaccctgggctgttggggaggctggggacttaggccctggggggtcaggatcttgggctggtggggaggctgaagggtggggactgaggctctgggcagtcaggacctcacggttggggtggactggagaccaagaccttggcaggggagctgtggctgcctcatttggacgctggagggtggctagcgtggctggaagcggccagccaggggttcacagaactgaaggtgaggcctccagaggccctagtctctacctgagtgtctctgaaactggggggatggggtggagcctttagggggaagggaagagggaactgaagaggaagtgggggagggaggtagaggaggcaagtctggcgccatgctgagtcaccgcccacaaggcccagggcgggccctcggggggccctggcagggttggggggatcttaggaagccacaaggagggctggggggctcttggagcaggagtcaggaggcctgggcagcctgaagagtacacgccgacggacagacagacagtgcagtcacccataaagtagaaagcactactaacagcactggagggtgtagtgtttcctactttatggatgagtgtactgtgggcttcggagatcacgccactgctgccgcccgctgcccgccaccatcttcctcggcgctcggggacctcgtgtgacaggtgagcaccttacggcccctccctaccctgcccagatgcctgaaaggcctccatggctttcctgcccttcctggttccggacagctggggaaaggccacagcagctcctctgctgccctgcagtctttgggggcggggagggctggacatgtggaaccctgatgcagccgcagcgtcaaggacgaggaaggggtgggaagggatggtacgtggaggggaatgggtggtgggaccagggacccaatgctaataaagactggactgtgcttctcttttgtctgagactctgttgctggggtggggagctgaatgcgggcggcaggcacatggacagtatgggcgcacagaagggctgggagggagaacctctgtcgctcctccagaagatacgggtttggccctgcctatgagatcagaagagggctctgggcctggccaggccacagccggaggagagaagggcctgggccatctgcagaaaggggcagggatgtaaggcatcctctcaccttctaccctagctctggccctatcctgcccccctacatacccaaactgaaagctgcctacatccagttttaatctaagaaagtctagggggtcctaggtcatataaaaattgggcaaaatccactgtggcacatacacagcatcttagacaagggcacagacactcatatacaaagcacacactgagatgcaaatgcatttacacacagaggccccattcagtgtgccagtaacacacacacagacacatgtgacatgactggcatgacacacacagggattacacacacccagggcacatacatattcagtagtacacacatgcaatgatagaaacatagggcgtgtcttacacatagaagagcacacacatacagtgacatttgcataataaacacggtggctccatacacatacatagatagagacatgttcatatatcatgataaatatagaatacatagatacatggtgatatatatatataaatcaaaccatgtcattatgcatatttacatgacgatatgagcatgtcatatattgtgtaatcaattactacattgtgccatatagtagcatccatatctatatatatcatgatgtgttgtaatttataaactcatgcaatgatagcctcccatgcacataacagcacacacatagacacagtggcaaacaaacatagatgcaatgacacagaaacatacatacagatacacccaatgtgtttttgttacgttttattatgtgactcatagacacataatagcacacacatatatacacacaatggccccttca

SEQ ID NO: 87287 - DNA, 1030 bp, Homo sapiens
tgtttgtgctctaggaagtccccaagagcacaggagcccagagacctcgcaggaggaagcagcagtatctgtgttccaaatcctgcccagcccccaggcagccatggtatcttctcagctggctcgagggcacacctcccaaaatgcagagaaggcagggtggctaggaatggctctagtagaattctccccttatcttgtctggaaacaaggggcaaagagctatctatttcctcctgccagcctcctgcccccaacaggattcctcacatcccaggaccagctggaaaaggtggtgagagttggaaagagactgctcagtgaggactgccctgcgaaccagcttggattcatcccgttcacctccacgttctgcactcggggccgagggaagggaggcagcccaggcagctagagaacttgatgaaacacactcaatctgaatctcgcttgatcgtcatgctgacccagtgaggtaagtgatggtatccccatctcagagatgaggaaccggaaactcagcgaggttaagtttcaccttcctgaaaatcgggcaccccgtttctgttccccagagggagctcaattcaaagtccccaaagaacaggtcttctgtgaagacctgttctcccctcacaaccccgttggaaaaagcagtgggagcgacccagggcggaccctctggcccaggcttgtgggttggggggcagaggggcctaactgggtggccaggtggcccgcagagtctctccagcagcagatggcctccccagccctttccttcagagcctattaagcagtcaaatgggggagggttggcccccaaggccagggacccagcagcagcagcagctcacagcactggagccgttaaaaagtgactcaaccagaaagtgcgtttgaagtgacgcccgccagggccccagagccccagagccccagagccaaacctcaaaaagacgaagtgagagagacaggcctgcgggggctgggccgggggtggagacccagcctggagctggcctggcca

SEQ ID NO: 87288 - DNA, 1073 bp, Homo sapiens
ttttcctacccgtggcccaggtctgtgccttccccatgccaaggactctaggtcaaatgtcaataaatatgaacctcgagaaagttctgaaggccatgacacctgccttgcctccctcttccattctcttaggcacagtaatagcttatttgccctataagaaccttcccagagcagcagaggcccttctactccctcttgactgtctcagcctctgggattgcagcctttgtagtgtgcttccttgcttcctatcggagggtgctgatccagaggctcagtaaccccatcaacttggtggccctggtgtctcacacttgtatccttctgccctcgagacctggcacagcagtatcccttgaagaaatcctgaggctttgtagagtgctccttgaccatgtttaataattcttccctcccctgcttgtctattttcttctcttcacggctcttcctataccttaggccagtctcaagcactcactggagacccttgggccttgggcgaccattgagtcctagtctcccttgtttgtgcccctgtaggaggtaggtccttttctcctccggcctagtaggggaccttgggtaacatcccatttttcggccaaggtgagttgttttaggataaaaaaatttaccacaaattctcatttaaatttccacagaaatcctgttcgtatccccattttgatttccctaagttccttgttctccctctaaaaagagaatgattgcaccctgcctgtttacctcaggattgttgtgattgtagaaacgaagctatgtgaaaattatataagtattataaaggtgaaatacttttgctctcctttttgggccatttttcaatacatagaatatgtgcacaatcagccaaaatagtaggggaaatgctgagaaccacaactgcagggtgagctgtgctgtgctagggcagagctgcctgtgctagggctttgtgtctcagccacctggtgttgctcttgagttgattttgcttgttacctgtggcctggagagtgtgggaaggaggagagatgcgacctgactctgattagtttgtctactcc

SEQ ID NO: 87289 - DNA, 1045 bp, Homo sapiens
attacaggcatgagccactgcacccagccgaacatctgtttttcttaaaatgtgactcatgagaggtctaagggaaagatggggtcttaggggagggagagtttggaaaccactgacccctgcagctctgctctctgctttggcttttcctgttggtgtcaatggtgttgtcaccaatgacagagctggggctctcaagccagatagccctgggcttgcagcctgactcctccactgcccctcagtgtgacctggacttttttagctcacctctctaagccagcctctatttcctcatctgtaaaaggggaataataatgggacttgtaagtagttaggaggatttaatgagacagtacagatggaagtttttagccccatgccacgtacatggtaaccactcaataaatgattgcaattatcattactatcatcatcactggcatcatcattccgtgcttttgtagttaacaaggttgcggtatttttccttccatttgttatctcgcttattcttttctgaaaccctcaccataattcttctggaggcttccattcttgtcaccaccccactatcccctccaccctctgtccagtcacccagattggtttctgtttctttattagcagctccacagccatcctggtgataagccagagccttatcacctcatgcctgaactagtgcagtggccttttgcctgctagaaggagctagatctggagaaaagcagatgggtgcaagccctgcctctcttaccatggaggccactacctggtagtaaagaacaggcaatctgaaggctgaggtcctgggtgcaaattctgcctccactgcttctcagttggtgaccctgggcaaattattcagttcctctgagcctcagtttcccacctcaaaagtggggctgatgactatcttatagagttttgaggagtaaatgaaatcacatgtcggaaacacatagtattaataatagttgatataaggaccaggtgtggtggctcataccaggtgtggtaatcccagcactttcagaggctg

SEQ ID NO: 87290 - DNA, 1041 bp, Homo sapiens
ctaaaaatataaaaattagccgtgcgtggtggtgcatgcctgtaatcctagctacttgggaggctgaggcaggataatcagttgaacccaggaggcagaggttgcagcgagccgagattgtgccgccgtactccagcctggacgataagagcaaaactccgtctcaaaaaaaaaaaaaaaaaaggcaactgaggtgaaaagagtcttggctatactactgaaaaggagggacactaaaatttgttggtctctttgggttacaactgggctgcatcagtgtgctttagagttacaggaatatcccgaaattgagaatctgatgggactatacaattttagagccagttctacaggtgagacatagacaacttgttctgcttgtctgaaaacttgtctatagaactctacagagaggctaagagggagtaaactatcctttctttctagatcttcatctgctggtggacgtggcctgcaagcaggagcgctttccaaaggaggaagaattaaaagagtgaggaatggatgacaaatgtgacattgtgcactagctgtagctggaggcagactagccttgcacatgacaaactgttgggattttttcagttctgttaaggaaaaaaaagtattttttgtttcgttaattgagaattttgttaattgagaattgggaatttgtatgtactacagtggttcagttcagattatctgccttgacaaactactgaacatctagcagccacgttttttggctgcccagatcccttttaaatgaaaagttctgaccttctgttatagtcaaggagcatctaaaaactgctccatctatggtactaagaataatctgtgtgtgtgctgatttgttgtcttgccactcaaactgtagtcagcacaactttagtggggaattcagtctctctgattcaagtcacagtgtgatccttttagaggagattgtgtgagaaacaaaggcatgtgaggtcaccagcatcacaggtctaaatgcatcaggaattccagggaagaaactctggagaagag

SEQ ID NO: 87291 - DNA, 1046 bp, Homo sapiens
ctgggctgtaaagccaggctggtggagctgggctccaaaaccaggcagtctggctctgtgatctgcattcctgaccacttgcctaaattattaaaacatttttgtgtacatttctactggatgcattgtttaatggtggaacatttggagaatacttcatagttattttactcttttaaaacactccaccctccaaatagttgttactgttgaaatgattgaaatacttattttggaatttcaatatattcctctattttcaataaaatgaaattactttcaataagaatatatgtttggttagaaaggtaacaaaatgcttaggtgttaaagaaatgatttataaaaatagacattagacatgacccttttaaagacctttaaaattattttgttactgtgtgtgttgttttcaataaataacaccacctaattggactaaatattttgttagacatacaaaagaagttcttcaaatttggatttctttccatgttgaaagaggggagctccttgaatgctatagaaatgtattgtggttgatggcttttctgtgtttgaatttgttccagctgtgctacagtgctgttctcctacccacatggatgctctaagtagttgtgtcactcccaatgcctcttcctatgcacactgcaactacttccaggtaagattcttgcaactgtggccatgctccgcgctttatgtgcaattttatcgatattgcaaaatttcaaagtgtaattttatattaatgagtaaccagaagtaagctgtggattaatgggctttgttttctcaattcttaaaaaaaaaaagagagaattgatataaataatatctcagaattcttctaggccagaactgttcaatatagtagccactagccacatgtggctatttaagctaattaaaattaaatgaaatttaaaaattcctcagttatactagtcacatttcaagtactcaatagtctcatatggttattaaaattaaaattaaattgatttaaaaattattccatacttaacgtagacacattttga

SEQ ID NO: 87292 - DNA, 1072 bp, Homo sapiens
ttgtttctacaaaaagtaaaataaacagtgcttggtgatgtgcacctatagttccagctagtcaggaggctgaggtgggaggattgcttgagcctggaagtttgaggctagagtgagccaagatcacatcactgcactgcaacctgggcaacagagtgagacccggttgctagatagatagatagatagatagatagatagatagatagatagcaaagagcgttacttttttttttatcttgttatatgttccacacccatttcttttattttttggtggagagcttatttttatgcctattattaatgttacaaaattgtttgaaagactgaatggaaaacttttaggaagtagcttacacgttggaaaaatctgggtcaggcaaataaagcgaaaggtaagatggccaaatcatgtataaaaggcttttaatgttgaatttttgatttaacatttgatttaatgttagaatttgggcactttatcttttatgactatcgcactgagaaaacaaaggtttatttgattcttctttcagcattatatgtctcatattcttgattctgaacttgtttttaccaaacctaaacttctgttgtgttaaaaatggctgataggtgaagagtagcatattttatgacctttggtttactatgtctggtgatgtaatgcaaaattagtaaatgtgctcttcctcttttatgtaggaccagtggctgtaggacaatttcaccggtcatttcgtcgagatagtttgtctccttactcctgtgtatcaactccatcccacgaccacagtacttaccctctgaaaggtttagatcggaccccagttcctcatagaatatggcagaactcccttggaatgcatcctggacaagtggagacatctcccacattttcagataaaggggttccgtttcctgtactccagaggtttccaactgaggttacctatacactgcagcccagcaccacatctgtacatgttcaacaaggtcctcaaacaatggtcagctcctcccaaaaatacagtaactacacaccctcagcacagtactcgcaagccta

SEQ ID NO: 87293 - DNA, 1028 bp, Homo sapiens
ccttgtgaaatatctgctgattgtgccctactctttgcacctgacttttcctagttgtcctggtgctaacacaggagctacaccttgatcctctcctggcatgaaaataaaacaaaggttttcgttgttgttgttccattgcccatttcccccatgttgtctttcccttggctgatgcctcctctgggtcacattgcttcttatcctgaacacttgacaccttgagggtagaatttagcgtttggtttttacctcctagcatatgctgtttggtatgtgagggtttcagtacaaatgctgctgtctatttctgtgcacttaacaatggaacccaaacagaagagaataaagccttgataccaaaattgggaaagaacatgtgtccatttggaccaaacgttgttggtttttaaaaaattttattttgtttttttgtttttgtttttgttttttttcatcttaatatgtaccagtggcacttaaccaaaagatacagtgatatagccatgtactgtgggtgggacagatacagtctccttggcctataatgaaaccactaggactttatacagttttccttaatttgttgacatataaatggtaaattatatttaggcttatcctgttttgaaatgatggtagtcatctttcttactgctactttcatgttgctttctagaaaacagcatttcattccaaaataactaggatctgcatttagaacaagaatcattatttgtcctgaccttttcagtcctacagagacgcatctgtggttcttttgtacttgccatagatgtaacctaaaaagttttggcatatttaggtcagcctagcggaactttttttttcatttaaatggagctgaataatggagattttgtgtctgcaaaattcctgagatcattgaaaaagtaacaagctgttccttgtttctgatacataaaattattttaagcattttatcaatcattaaaatttactgccagttgtgagtggctttttaattaacttgtctttcattgcac

SEQ ID NO: 87294 - DNA, 1030 bp, Homo sapiens
caaaaacaaaacaaaaagcagccatagacagtaagtaaatgaatgaatgcagctgtgttccagcaaaacctgatttacaaaaacaggcagtgggctagtttggcctgtgggccatagcttgccaacccctggtttagaacataacaagagtctttctatgctgtggtgtagcatatcggtaagagtgtaaatctgaagctacaatactaggttcaaatcccagctttactacgtatcagctctttctctgtggcttcattttcttatttgtaaaatggggatattagtagtatacattgtaagactgtcataagaaataagttcatgtgtgtaatgcacttagcacagtgcctgacacatggtaaacagtaagcgttaatgatgatgaagataatttgttgtctttgccttttcatcagacatgtttgaaggagtcagatggcagtgatactgaggattttggctctgatcacagtgaagactgcctttcagaagcaagctgggaacctgttgataagaaagagactgaggtatgtttaggcacatatgtggtgggtacttacgtgagccagtgagtcatcatattttccagagatgaatgacatgctgtagactgagctgtcccccagaggagtgtcagcctggtaggcaaatggtagccagttatgaagataagccttgtctctttctgctggggtgctttcctcattgcaatgttgctcttccagtctgtcaacaaggaccaggaatttttctttgtgccttctattaggtgactcgctgggttccagaccatatggcatcacactgctataactgtgactgtgaattctggttggccaaacgaagacaccattgcaggtaagatgttttgtatgatttagtatgacaaaaaacagggcaggccaggcgcagtggctcacacctgtaatgccaacaccttgggaggccgaggcaggcggatcatgaggtgaggagattgagaccatcctggccaacatggtaaaacctgtctccactaaaaatacaa

SEQ ID NO: 87295 - DNA, 1023 bp, Homo sapiens
tatatatatacacatatatgtatatatatccgtatacatatatacatgtatacgtatatacatagacatatacatatatgtgtgtatatatgtatactatatatatacacacatatatacatatatacgtgtatatatgtgtatatatatctcaaattttgatatttgtttattggctgagagcttttttgttttttagagacagggtcttgttctgtcactcaggctgggtgcagtggcacaattatagtaacctcaaactcctgacctcaggtaatccttctgtttcagcctcccaggtagctaattagctcattaggcatgtgccaatttttattttttgtagagacgggtctgttgcccaggttagtcttaaattcctggcgtcgagtgatcttcctgccttggcctcccaaaacactggaattacaggtgtgagccaccatgcccagcctggctgaaagtttttaaagttaaaatataacatatgttattggttgaatattataaaggaaaacaaaaagcccagcatcccaaattattggttttagggtcttttgaactaagtcattgtgaggggaccgtgataggtttcaggatttcagtgattttttttttccttccccaaactatgcagaatttggctacaggttcataggtttacttttcctgggagaggggccataacttttaatcaaatttttaataagctctgtgacccatttaataatcatttcattaacttagtatctgatttatcaattcaacaaatgtttctttaatacctacaagttgcgtattactgtactaggttttgtgggctacagcaaagaaatagaagatattggttctactttcaagataattttaagctgtaagataagacacagaacaactagagagagcaattcttttttttttttttttttttttttgagacagaatctcgctctgtcaccggttggagtgcagtggcgcaatcttggctcactgcaacctccgcctcccgggttcaagtgattc

SEQ ID NO: 87296 - DNA, 1035 bp, Homo sapiens
aacttctgttgggtgttggccagtgtccctcgtccccccaccctgggtccccactgctttacctcttgctttgcagccttctctcctcacagccttcctgtggctgtgtttttggccctgatagccccatggcacaactgcactttgcctcacctaggcctgtggcttcttgcctggcaggtgccacttctccacttttaagcagtgccaagagtggctctcacggctaagccgagccacagcaagacctgccaagcctgaagacctctttgcctttgcctaccatgcctggtgcctggggctgaccgaggaggaccagcacactcacctatgtcagccaggtgaggccagtctattttctttgggaggctgcttcttaccccttagttctcatccctcctccactcctgcacattggtgctctgggaagctaaccatcgtgggggctctgttgcaggtgagcacatacgttgtcgacaggaggcggagcttgcaaggatgggctttgacctgcagaacgtctggagagtctcacacatcaacagcaactacaagtgagagggttggggaccaaaacaccttccacaccaaactacttccgtgtttggataaagtgtggtgggcacagcttctgagtctgagagggaggaaggctcatggtttctcttcccacaaagccatccccagggatcctgtcatcacatgttttagacccagtgcagtgacccccacctggtctcttctcagattgtgccccagttacccccagaagctgctggttcctgtgtggatcactgacaaagagctggagaacgtggcttccttccgctcctggaagcggattcccgtggttgtgtataggtgaggcagtggggctgggaagtagggaggccatttcttatgcaacaaggaaagagtcaaaattggagattttgggtaacctggttgactgagaattgacactctatggggaagtatgaaataactttaaaacaaaaactatcttagttttttctcctaagaataaggctatta

SEQ ID NO: 87297 - DNA, 1071 bp, Homo sapiens
agcagaatgagcctgatgggctaagtggagcttggtgacttaggactgtggccttcctacagggtgaggaggggccccccagcctggagtacatccaagccaaggatctgttcccccccaaggaactagtgaaggaggaagagaatcttcaggtaaggaggagttgggggccaggatagatggggctccctgcccagttaaaaaacaccctcccttctcccaaaaatcctcaagggcatctggtaccagagctctggcttcatgttccctggtctctggaggaggagggtttgtctgcgcatcctggagcctttggccgcagggaaggaaaggcagctttcctgtacagctgttgcctggtgctgttaccgtggagagaactctcctctcttgccttggcccaccttttccagaggggatcccacagatcaggggctgtagaagaggataaggtggtcactcacttctggactgaaggtttctctgccccttgacaggtccccttcacagtgctgcagggtgagggagtagagttcctgggccgggcagccgatgccctcattgccatctctaactaccggctgcatatcaaattcaaggactctgtcatcaacgtgagtttctgtattgttctcctacccctaagctagaatccctatgaagttcaaggtgggattgttccaaggctgtccttgatcatgtcattaaaaaagttggaggccgggcgcagtggctcacgcctgtaatcccagcactttgggaggccgaggcgggtggatcacttgaggtcaggagttcgagaccagcctggccaacatggtgaaactgtgtctctactaacaatacaaaaattagtcgggcttggtggtgcgcacctgtaatcccacctactcgggggctgaggtacgggaatcacttgaacctgggaggtggaggttgcagtgagccgagattgtgccactgctgtccagcttgggtgacagggtgagactacctctcaaaaaaataaaaaaaaaaaagttggggatcccttctgtttctctctgacctcatgttttcctgcctcatttt

SEQ ID NO: 87298 - DNA, 1042 bp, Homo sapiens
ggggcttctctagttccagggtgctgctgttaagccactacaggtgacagctgattgaatatctatcaggatagcatcttcagggtgcccagaatatcaccagaggtggtttacaatgatcctattaattttccattaactgtaacagcccttctctcaccccaagtccagggaagcccttaactcctaagagctaggaggaggcagtgagatgggaaaggcctagagagctgtaggccctggcccagaccaggcccttaacctggtagtatctcttcggtgtcttttaggtgtcccttgtgcttaggggcaggttaaagaattcagtagatgagaggatttcctccttccctcccttccttccatagacatgtggatttggtgtgtgcactattggttcagtctcttctcagaaagcctgctggttttggcccccaccaacagatagctcctctttttctcttctgggctaccctgaaaagagcatgggcttcacagtcagcttcatctaatttcaaatcctagcaccaccacttagttaaattacatactttctctctaagcttgagtctcacgagtaagacaggataaggtttacttcttggggcttgaaaagttttactgagataatgttagaaactgcctggctcattgtagatgcttaataaaatgtcaggttttcttttattactcccttctcccccaaacaagacaaaagccctggtgtctgaaagttacaaggtgcaggaagtttggggttccagccacctccctctgtgactcttggtgacattttgagccccttattcctggtccttattccttggccctctacccaactctctctactccgctgctcctgggtttcaagtttcgtttttttgtatagcttctgtggtcgatacttctagctcttcactttcccagactaagaaatcctttctcctccaagaagggctttcttacccagagatcagaatgtgaaacaagggagagatggagctgaaggagtagggttgggtaggggcgttggaataaaaag

SEQ ID NO: 87299 - DNA, 1089 bp, Homo sapiens
ttttattaataaaacactaaactctcctggagcaagaatgtgagaattttattatttgagcaacctggatttttaccccaggagcaatgaaacaatccatgagacctggaaaaagctgaagctctctttttttttttttttttaacttgtatacagtacagtttcaaacaaaattggggcaactttgtacttcgtaccttattaaaactggggcgaacacagcgtgtttggtttgatcttgtcttcataggatcttctggctgattccttctctggatgagtcctgagaatttctagaatctcgggagagtaaaggagggtctggagccttctctatgtacaaggaaatcccagttttgttaaaaacttgccaaaggcttggtgatataactccaaagacaaatccacagattcctttcaggtacttctttgggattctgtgaagaattgtggctgtacactaggatgtttaataggaaggaagctccttcctttatgacatcaccagacagagaggtagctaaggggattatttgagacactcttagaacaacagccacttttgtgggagcccaagaaacagcagctttaaaacagggtaaatattcaggcatcattaggatcctgaatacaagccagccagtaaaatacgggatctactcagaagggcacaatctatcagatggtcaagacaaataaacctggggccaaggtagcggtttcagcacagagagggtctgaggttactactaacacatcccctcagcagggacatgggtacgttcttgcctcaagccatcgaagtgctgcagtctccctgaacccttcccaccgaagatcagaagctgcacatcccaccactccccattcagcatcagactaccctcgatctgtctccctccagtcaggacctggacactatgcagtacccactcctcggggacccgagactggaccaagaacagaatcatcccgccattcctctccccatctaaagagccagaagactcagacactggcttcccatgcttcaagcagacaatggaaagttagtccacccagagaggaagcagcacgaagaggcagtga

SEQ ID NO: 87300 - DNA, 1055 bp, Homo sapiens
accagtgtctaaatacacattaatgacaaagactccaatttagacaaagttgcttaatttttaaaatgttagtgtttatagttaattaaactataaagtgaaattaatgccaactttgattcaataagtgatagagtcagcataagaacagttttaggccaggcacggtggctcatacttgtaatcccagcactttgggaggccgaggcgggcagatcacctgaggtcaggagttcgagaccagcctggccaacatggtgaaaccccgtctctactaaaaatacaaaaattagccgggcatggtggcaggcacctgtaatcccagctactcaggaggctgaggcaggacaatcgcttaaacccggaaggcagaggttgcagtgagccgaggtcgcgccattgcactccacctgggggataagagcaagactccgtctcaaaaaaaaaaaaagaacaggtttaatatggagagaatacagaagatgctgctgtcaattgctctgtagtcattttgcatttccatgacacactgttggttataatcgcccttgattataaagaccaaaattcctttcccttgaatttaattgaatagaaagaggatgtggtttgtgtctttaaaaaacacacataccaactcgaaacttccttttttgttctttaaaaaacatgtgcataggataatcgtgctggatcagagtgacttgtcagactgattggaattggatcatagacggactcctggcctgagtttgagtgtcctggttgtaagctcctttcttctctttctgcttcagttgctgtcagggcagcagttccagttctgtaagtctcactttgttcagctgccacaatagacatcatcgtttggccctctctgttagcagcacattcaaccatttgttttcagtcagatttctgaaaagtgagaggtagttttgatagtaaaaatttttggttgtgcctagaatggctttggttttgttgatgttaattttcaaaaactttaactcttgttatataataaaatgtttaattttaataacagattttgc

SEQ ID NO: 87301 - DNA, 1043 bp, Homo sapiens
aggaaaaaagtatgaaatataggtgaatagagatggggaaacatttagattgttttgatgttactaactttttgagagactataaaatagagattaagagcataaaccttagagctagactgcctggatttttaccaattttaccacttactgtctgtgtgatttttaggcaagtttcttaacctaaatttcctcatctgctaaataggagtaacaataacacagtctatttcagagggttgttgtgaagattaattgtgaacattcatcctgaattaatgtatgcgagtgcttagaaacagaacctgacacctggggttctgcaagtgttatgtatgatcatcatcatttctattttgagtgttgtgtgggattttgtcatacctaaagaattcctttcaaacctggaatgccctaaagcagtggttctcaaattttatcagacatcagaatcacatgaagggctaagtaaaacacacattgctagacccccagagtttctgattcagcaggtctgagatgaggcctgagaatttgcattcctaacgagttcccgggttatgttaatgctgcaagtctaaggatcacccttggagaaccactgctctagagaacggcaggacacgcaagggaggaaataagtttcctttggcttttgtgttgtgacagagctcttgaaacagcagcagggctcatccacggtgttgcatgagaacacagcaagtgatggaggaggcactgcaaatggtaagtgaactacctagattgttttcatcaggttcttttaacgctgtccttggcaacacagtggtacatatagggaagtgtgaccttgaggtcaggcacaactccacctcaagtctgactttatagttatttgtatggcaagctgttttactgtttctgagcctcagtcgtcttaatctgtaaaatggggacaataatttctgtctcatgaagtacatattagctccatgtacagagccatgtacaagtactaacattttcaaatacttagcaaatgttagtcctcttccctttat

SEQ ID NO: 87302 - DNA, 1115 bp, Homo sapiens
cccttagagagtatttattcaactctggagagaaaaatgaggcccagacatgtcagagaactcgcagctagtagtacagccagaaccagaactcacacttttttttttttttttttttttttttggagatggagtctcattcttgctgcccaggctggagtgcaatggcgcgatctcagctcactgcaacctccgcctcctgggttcaagcaattcctgtctcagcctcccgagtagctggaactacaggcacgtgctaccaagcccagctaatttttgtatttttagtagagacggggtttcaccatgttggccaggatggtctcgatctgttgacctcgtgacccacccgctttggcctcccaaagtgctgggattacagacgtgagccaacgtgcctggcacagaactcacactttctactcctgagcttagtgccctttcctctgcgtctcacactgggctgatcaactggttccttgtagcaagtagttagtgtactttgttcacagaggggatttatgtaattttcttactttctttctcacagtactgaagatgaacaagaagagacatcaaaggagtcaccaaaggaactgaaagagaaagacatgtatgatcaccaaagagaatgcctagggatgcttgtgtaaagtcttggttttaagggaatagtatattcttgtttgtaaggatctttccatttttacgtgtagacttaatgtgagtatgctgcttctttcaccaaaaagttgttatcaaattggtgatatgatttataactaatagcagcttacactcaaggaaatgtagtgatgataataataatcataataataataagtttacgcttaaggtagattaaatctgttttccacgtaaatatcctggaaatatggaatatttcatctatggaaatagtttatttttagctgctgatatgtttaaagttacagtatctagcaaagaaagtctctatggtgccaggtgtggtggctcatgcctgtaatcccagcactttgggaggctgaggtgggcggatcacctgagatcaggagttcgtgaccagcctggccaacatggtaaaatcccatctctactaaaaatactaaaat

SEQ ID NO: 87303 - DNA, 1025 bp, Homo sapiens
gggaggaaaccggactacctggaaaaaacccatgcagatgcggggagaacatgcaagtgccacacagacagtggccccagctgggaattgattgttttttttttttctcatcagagttacaatgaaacaatgttgaataaaatgacattatttgaggaactgctacatagatatttactatataacattataaaagtggagagtatgcagtgtcactctcatatcctgtgggcattattctttgtatcagttttctcttacaggcttaaaggatataatgtctatttttaatactagtcgtaagtgacattagcagaagtgtttgacaacatttgaaatgaaaacatgcatatatgtatgcattccaaaaatatgagctcagtgtagtctggaaagactagacaaactcaaatagaatactttctattattacacactaagaactatagatgtcatttttcctgttaaaacttcacaggaagagggtctatctgtaagttgtttgctgcctttcaccctggaagtaagcaacaagggctgttgtttgggataactgactgaaattcccttctctctctctgtcatcaattctcccctgacctcccattcaagccaaacagggcaagctaaggatgatgcaactgtaaaaaggcaattgttacactatgagttataatagtattatgtatttcttttagatgaaagcctgtgtttccagtgtttacagtgatgttttaaatgctgctttctcttatgcacagtggaggtgaaagaaatggcaaagaaagcagctactggacagctcacagtacctccttggcatcctcagagtagtctgactttagagagcgaggctgaaaatgagcccgacgccctgctgcagccccccattaggagcccagaaaacacggattggcagcgagttattgagtatcatagggaaaatgatgagcccagaggaaatggcaagtttgacaagacgggcaacaatgactgtgacagtgaccagcatggcagacagccca

SEQ ID NO: 87304 - DNA, 1096 bp, Homo sapiens
gaaccatcacctgtgatttgtggcatttgcaggggaggctctgcaacagcccagggattgtgtcttgtgaaactgcgcttcaactgcgggtttcttctacctctgaaaatctcccaagagcacttttataatcatgaaatctaaacttagaaactaaaaatactcttagagatcttatagctcagtcctttcatttcttagccagggaagacctagagagtccactgcccaagccaaagccacacagtttaatagtgcactcttcactctgtcaagccaccggcagggaccttctgcatcacccagctgtcactgggactctaccaggtaaggatccttgtgggctggaaactggtggtggagcgggggtgggggtgggttctggcaccctctgctggtgcaaaggggtcagtgcaactctaggaatggcttagggagtagggaacaggtcctctggatgggctggtgggcttttggttctgtcaagaacttgagcaaactgatgtgtttgtgtccaccccgctccccctacctccaaaaaacccgtgcaattcaggatgagtgtggaacctgtttcttctgaaatctataatgcagagtccagaaataaagatgatggaaaggtacacttaaaatggaaaagtgagtataaagtcatgggttttattagacaaaatgaaatttaaagtatatttctaatgtggttgatatttctaagtacacaacctgtgttgcacatttagaaccatagcaatgtccttctgaatttttttcttttattatatttcattttaaaagcagggcccttctgactacagacttcagaagggaaatgctttttttttaatttctagactttataggaaatatttctaatatataaatgtatattgtataagaaatgtaacaaaacagtgcacaatacaataagtcctcaccttattctgttaataggaaatgacaatgactttaagcaaactacgactttaagcaaaacgatgtataacaaaaccaattttaccatgggctaattgatgtaagcaagagttaagttcctatagcatatttctggtcacaaatacatcaccatacttct

SEQ ID NO: 87305 - DNA, 1088 bp, Homo sapiens
tctcctgtctcagactcctgagtagctgggattacaggcgtgcaccaccacacccggctaatttttgtatttttagtagagacaagatttcaccatgttgtccaggatggtctccatctcttgactttgtgatctgcccgccatggcctcccaaagtgctgggattacaggcgtgagccaccacgcctggccaatctcagttcactttatggggccaatgtgtgagggtcgcttgaagtctgggagtttgagaccacgctgggcaacaaacattgtgtgacttcatccctaccaaaaatacaaaaactagctggctgtggtggcaggtgcctgtggtcccagctacttgggaggctgaggtgggaggatcgctggagcctgggaagttgagcctgcagtaatctgtgattgtgccactgtactccagcctagtgacagagtcagaccctatctccaaaagaattttatttttttaaaaaggaagctgatcagatctaccctctctgattcagcagtctctctgctttctggtccagctggagagtagggcattctagataacagggaattcatatctgtgccacagagcacacacttttttttttttttttttttgagacggagtctcgcactgttgcccaagctggagcgcagtggatcttggctcactgcaacctctgcctcccgggttcaagagattctcctgcctcagcctcccaagtagctgggattacaggcgcccgccaccatgcccagctaattttttgtatttttaggagatacggggtttcaccatgttggccaggctggtcttgaactcctgacctcatgattcacctgccccggtctcccaaagtgctgggattacaggcatgaaccactgcacccagcctacacttttttttctttggaaatagagtctcgctctgtcacccaggctggagtgcagtggtgtgatctcagctcactgcaacctccgcctcccgggttcaagcaattctcatgcctcagccacctgagtagttggtattacaggcatgcaccaccatgcccagctaattttttgtttttttagtatagagttttca

SEQ ID NO: 87306 - DNA, 1032 bp, Homo sapiens
gcaggtgtgcgccaccacgcctggctaatttttgtatttttagtagagaggggatttcaccatgttggccaggacggtctcgatctcttgaccttgtgatccacccgcctcggcctcccaaagtgctgggattacaggtgtaagccaccacgcccggcccctctgggtagtttttctacagagagaaattaatatataaggaaatgaattgtttctaaagtacagtggattagaaaaaaaaataaagaagttaagtgacttgcctaaggttacccagcttcatctgatttcttttccccccactccactctttggtttcctaatttactcttttgtatgactttttccttacagatgacataccctggaagggcttagatggctcagttgttaaaaaagccgtagtctcggggaattatttagaagctgatgtcaggcttccgaaaccttactatgatattgttaagtcaggcatccacgtcaagcagaaagaccgaactatgaaccttcaagatatccggtatattctgaagaatgacttaaaggcaagccctgaagttgttgggagtttatttctgcttacctaactcaggagaatagggagttagagacaagatgaagctagagaccaagttgtaagaaattttggaaatcctcattttattacaccatttctgtgttcttgataatagcctaactgcttaacttggtgaaagcagcatggaattgaggaggggagctagggaggttcaacacatatgcatagtaggggcaccctgtaggcacttagtggagattcagtgaatggtagctattattattgcttttaaggtattggcaataacaataaactagttaattaggactaaagtcagtctacccaacaggaataagagggagtttatcagatacttagatggtttctaaagcaccagtgacattcaggatgactgagactatgtccttgacaatatttcctgtgttacaggattttactggagcccagagaactcaaccaaccgagagccccag

SEQ ID NO: 87307 - DNA, 1023 bp, Homo sapiens
gtgacttttcagcaatataactaaagtcaatactagctttttcaccttcatgacttcatgaactcactgccctctatccaaagatttgctggaagaaactttatttagggaagtttgctcaaagtctgagaagcccatctcatcgtctaaaatctatcctttttccagaccaacaaaaaacttgctgtcacttgctttttaaaaacttaattcttaattatcaactgccagtcattaagtcttgactgaatgcctcccataatattcatactaattctttacatgaaagagcgctttatggctcaccgagtgtttctacatccatgatctcatttgactgtcatgacagctgtgggcacaagtcagtgctgagtttaccctgaggactcttgctgggccagaagacatttaggatgctctgacttagctcttaaggagtctggttgggaagagttatttaagcatatgagtgaacccttgagtgctaaactgagaggacacattcccaaaagggcaggagttcagaaaagaaataatcatgaggagttggggaagtcccagatggctttgataaagcagatgggggttgagagggctcttgaaagagtttacgttcatttattcaacagcaagcatcaaggccctggtgtaagcccagaagtacagtgatataaaagcagatgagttgcctactctcatggagctgactctctagaatggaggggagacagataaactaaatgaacacaaattcagataataagtgctctgaaaccaataaaacaggactactttagattaggcagtcagggagggcctccttgaggaagtgactttcagacaaatatctcagtcacaaaaagtagctagtcattctaggatctgtgggcagagcatgcctggcagaagctgccagtgcaaagacttgaagaacatgaggtatgttggaggaactgaaagaaggtccctgtgacttgagtggagtgggtgagcagtagagttgccagatgaagtggtggagag

SEQ ID NO: 87308 - DNA, 1044 bp, Homo sapiens
cttgtatagagtccctggaaagggtgctttggcctgagatgtaggtttagagagctcttggagtatttaggtttttttcctccatgactttgttctaaatactttggatagaagtaaggagaccccaagaagggctcttcccccaaatggcttgccattccttctgcctgaggacctcctattctgtttttttctgtttttcccccttgagtgagggtattaccttaaagaccatttctctgggggagagacccattaagactttagtcagccaggtgcattgatgtgagtgaatttctgtccccttaggaggcactttctgtctcatctgactggggtaggactgaattggttatctgcattctgcagggtcctttgagcttccaggttctccccagcagcttgggcttggacagggaggcgacagggcaggtttactggtggtatggggggacctcccctgtcagttttccccaagccaatcctggatgcacataccagactttgagaactttcttttcattttttgtggtatgaagcagctcagctgagggaaaggaatccaggtttggatccagggggcctgagtcattgggacgtcaggccattcacttagcctcactgagctttaggttctccatctgtaaaatggggatccttggtaaccatgaggatcatatggaaagactggaaatcacaaaatgctctacagtgtcagggccccagtccttttttttttcgtggcatttcatctcttgcttgcagcggtcccagttcccagtgctgcacatggaggtgattgtgcacctgctgctccagatatctgatgccctgagatacctgcatttccaggggtttatccaccgctccctcagctcctatgctgtccatatcatctccccaggtgaagcgaggctgaccaacctggagtacatgttggaaaggtgggcataacatggagtgggactttctcctgaagttgatctcccttggggacccttcctatagagacagaatctgatctgggtgggactcctcattggt

SEQ ID NO: 87309 - DNA, 1048 bp, Homo sapiens
cctatacctaagttctccagggtgctttagtacctgggggtgggtagtgggagagaggacccagtagtgcccagtgggcattgcaggttctgtgtggagaccatttctctggtccttgcttaggaaagcttattcattgaaggagtaagtggctgctcactcctttctgctgaaactctttcctgtccttgtagcctagtgtggaatgggagcagggtcacagtgaaagagctgaatctccccacccacccacactgcagcaggctgcggctggccgacttgttaattgccgagcaggaacacagcaggtgagaaggaagcccaaggccccttataggtccaggtctctctacagactcaggttctgggctattcagctctgtgcctgggatagggagctccagctgctctcagtctcagcatttcctgactgttgaaattgattgacttgacttcgaagggctgccaggaaagaggaagagaagttaacgagtagcctgagcagtggggacagtggtggtgaggggctctgtcagctgtcagccgccctgtaacccatgtctctgaatgctgcagcctccatgcaggcccttctgattctcatgctacaatccctgagtccacccactttgggccctgtgcccatcaggacggcatgtggctatcctgttttcatagagcatggcttgcttaagatccagatgtctgaggacatgtctgtgccattgaggacaggctcatggatctccagaccttagggttcctatggctccagagttaagtccttctgctcttgctaggacaggttcttgattcattcattcagtggacccaggcttatcgagctctctcctaagaaggctcctcaacttctgcaggaggcatgtagagaggccacattcttctttttgtggaagtcggcttgaagggaccaaaggaagctgaaagaaggagcctgggcaacatagactttgacatgagactgagttgggcatgcaaccttaggtgaattcctgacatatttcttcctattttttttgcggggagg

SEQ ID NO: 87310 - DNA, 1033 bp, Homo sapiens
aatataaatgacgagttaatgggtacagcacaccaaaatggcacatgtatacatatgtaacctgcacgttgtgcacatgtaccctagaactttaattaaaagatcaggaattatgaactgtttatagtaattttgctataatttgtcatctttcagttaaagaattttgttatccaaaggagaacattttgttattaaaaagcattgtttttctacaattgccaatacatccaaacaggtaaaactaattaagagtgttttgttgtttcagaacaccgaaaagctttggaggatttcactcttgataatattctttctcatatttattattttcgctgtcgtgactacacagagttactggcacaagtttatcttcttccagatttcctttcagaacactcaaaggtatgagtcagactactgaaatgtaactaaccaagtattttttgaggtgtttgataagcatgaaaaaataaccagtacagtagcataaaatcaaagtcaaagccaattgagaaaatctcttccttccttgacctacaatttatttatatttatatttgttttgtgtatgtatatgtatatatagtttatgctcagagtaagaaattgaaataatatagaagtttcatttccagtaatagtggaatagctcctatcaaaccacattgtatagaaaggtatgaaatgaaaaataaaaacttccttgtgctactgttttctagtgcctctccccaaaggtgatcactattggccaggtgcagtggctcatacttgtaatcccagcacttagggaggccatggtgggaggatcatttgagcccagtagttcaaaaccagcctgggcaacatagtaagacattgtccccaccaaaaaaaaaattagccgtgtgtggtgtagctgtagtctcagctaccaagggctgggtggagcaggcctgaggtgggaggattgcttgagcccagcagttcaaggctacattgagctaccgtgccatcatgtatcacctttttttttttttttttttttttt

SEQ ID NO: 87311 - DNA, 1051 bp, Homo sapiens
tattctcttcattcacagtggttgataaatttctatctcaagaactttctttttttttgagacgaagtctcactatttcgcccaggctagagtgcagtggcacaatcttgtctcactgcaacctccgcctcccaggttcaagcgattctcctgcctcagcctccagagtagctgggactagaggtgtgtgccaccatgcccagctaatttttatatttttggtagagataggggtcaccatgttggccaggctggtcttgaactcctgacctcatgatctgcccacctcagcctcccaaagtgctgggattacaggtgtgagccactgcgcctggccctagaataaagtagctttcttattagttacttaaaaatatttctaagatcagtcttcaaatgttcttaaagcatatttgtatatatattttttatctttcagcctcagggatttagagatactgttgttacttctgcatgttcattgcaaacagaaggttccttgagcacccggaaacggtcacgagacccagaggaagaattataacccagaaacaaatctcaaagtgtacaaatttattgatgttgtgaaatcaatgtgtacaagtggacttgttaccttaaagtataaataaacacactatggcatgaatgaatccagatcatatgaagtgaatgggaaaaatacctaaatatgattctgtgaaagtttttctaaagcagtattctgcaattatattttaccctgttttcattttcagtaacattcagtagagatgattattatatttcacaaatgtggaaagctgatctcatgtggccagtctgaatttaccattcatactgttttcacccctttctttcccagttgcctataaaatcttaggaagaaacatatcatattcttattgtgtttttttttttttttttttttttggagatggattctcgctctgtagtccaggctggagtgcaatggcgcaatctctgctcactgcaacctccgcctcccaggttcaagcgattcatctgcctcagcctcccgagtagctgg

SEQ ID NO: 87312 - DNA, 1044 bp, Homo sapiens
aaatgttttacctatatgaatttttagtatatagttatggaatttactgggttgttttttaaatttacattaaaaatgatctgggccgggtgtggtggcacacgcctgtaatcccaacactttgggaggctgaggtgggtggatcacctgaggtcaggagtttgagaccagcctggccaatgtggcaaaaccctgtctctactaaaaatacaaaaattagccacgcatggtggcatacacctgtaaccccagctacgtgggaggctgaagcatgagaattgcttgaacctgggaggtgcaggttgcagtgagtcccgatcacaccactgcactccagcctgggtggggtaatggagtgaggctgtctcaaaaaaaaacccaaaaaacaaaaatgatctgaaaacctttattgtaatcttgttccattagagttccaaaagaaaaggatatcttctgtgtaattattaaactatctggatgtaggttcaacaaatgtaagaaatgaaaactttagagaataaggcaagaaccattagtctcattaatgtgtcatctgcaatacatttttagtcacagttaatataatttttttaccttttgtcagacagaatgaaaatattttcagtgaagtagggaggaggattagctgactaatagctagatataaaacattaagctagatgcttcacccacatcagttattcctacatgtcagaaagctgtaacacttagcatgaataacttcttatggttttgactttgagttggaagtgattatttctgaaaaatcagaattgcaaatatattttagagcagtcacatcagagaatatttgatacacctcaaataaaagcttatcactaatgcttgtcatttgaagagaatcactaggagtgactaacatgataataacatagcaagctgctttctttcatcatttctcttaaaatacttgaaagatcctgatacagaaagttttaaagttcggcaaatgtaataagcatagcaaatatcaaaagagagccaatactcatagcagtttgg

SEQ ID NO: 87313 - DNA, 1074 bp, Homo sapiens
aaataagagggtctctctctgttgcccaggctagagtggggtgatgtaatcacaactcactgcagcctcaaattcctggggtcaagcaatccttctgcttcagcctctcaagtagctgggatcacaggtgcatgccaccacacctgggtaatttaaaaaaaaattttttttgttgttaagatggggtctcactatattgctcaggctcatctcaaactcctggcctcaagtgatcctcccacctcagcctcccaaagtactgggattacaggcatgagctgccatgcctgtccctactgttagcatttttatgtaactgaaaaccaagggtgaatttaaaagagaaaagacaaagagcaaagacagcctgtggaggtatatagaagaaggaaactgaggccaatagacaatccaacattttgattgttttgagcaactccaatttttatttaagcactagctgccagagactatttcttccagccagcaattacctgcttgtatcactgcaacctatctggtctctgcagcagtataggcccccaaatgcagaccctgagatggatgtgtcctcatctgacatagccataacaggattacaaaacaatcaagtgaatttagaaactttgagggagaatggagtagggtgaaacgaataacatattaactatcaggatagttcccagataataatataaactattatatcattctttggcttgtatattactcttatgtagatctgcattgtcaagtacagtagctactaactacatgtggttacatttttctttttttttttttttgagatggagtttcactcttgttgtccaggctggagtgcaatggcacaatctcggctcaccacaacctccgcctcccaggttcaaggaattctcctgcctcagcctcccgagtagctgggattacaggtatgcaccaccatgcccagctaattttgtatttttagtagagacggggtttctccatgttagtcaggctggtctcgaaatcctgacctcaggtgatccactcgccttggcctcccaaagtgctgggattacagatgtgagc

SEQ ID NO: 87314 - DNA, 1053 bp, Homo sapiens
gatagtggtatttttattgggggagagctagctaacctacttgaaagaaaaattattctattttatagctccaaggaagatctgggcatggaatatcatgagtctttctgagcttcctcatgttttcactgtaccctttccaactattttgcctccatggcagagaacttcttatcctatttctcttcccacttccagtaagtgaggacaggctagtgcctattttgtgggaaggctcttgagcagagagaaatgaataaaactttggattaaacctgaatctgtgccacttctttgagtagtggtggcgtaaatgagacaatctagaaactctgtttcccggggatttgaactgttcattttccaaccctgaacagacaggagacaagctctgcattctgtatatctgctcccctgttgaacccaaattgaaagcagtgggaaactctccagcaccactccattcaggcaatgatgactgaactgattttttctccatcattaactcattaataagatttgctttctttggtgcaccaggaccaaacatctcaactggtagcaaaaactgggcactgtgaggtttgcttgcttctatttgtgtgagatctaggtagcctgggtcttccagcacgttgatttgggaccctgggctcaggctagttctatcagtgaatgaatccacacgcccatcatagcctaggtcggctggtgctgagcactggtgctgaggccaagggcgtttgcactctccatgattctccttatcatccccaccatcttcttgccctccttgaaaagagttctctgtccaatctgattcctcactaacatttacagctttgttcatgtccctcaggaataccacaataaccgtgatgttatcacttgacccagcatcacgagctgatgccactaatttgtgggcaaccatgctgctgtctccattattctctttcaggtggtcggacacaactttcactgcctcatcagggttcacggtgtcatagaagccatcacaggccagaatgaggtagtcttcggtcccatcca

SEQ ID NO: 87315 - DNA, 2111 bp, Homo sapiens
gctctcgctaagaagtgtcccccgcctaatcatgtgtttataggatagtacacgttccccaggcccataacagaggactaaaatctctgaattttaaagacacagatgactggcatattttggataccagtatagctatatcaaatagacaaaaacagcttcactttagcaatgatcagattgttaatctacagattttattttttaaaatttggatgtaagtagagactttcagtatttgttttctcttgattttgaagtcatttcttcttctcacgtctgtgacaaatggttgaaaaggagtcaacatggccccaactatagtgccggaaccttttcatcattctgaggctttgccccacacatggtcctcactcatatctgtcaccttctgaagcctagatcttgttaacccatcaggtgcagtgtcagtttcaaatcaaattatctaagaaaacaagaaaacaaaggcagcagactattggtacacattatagtccaaagtgcttagcgaagtaaaaaaaaaagctttttaaaatttctattgttgtctattggtaatgtttttgatcagaataaagagggtaaagggaaaaagttactacacatgctaggctttctcagtggggaaaaaaatggctggatagaactgggacaaacacagacccatctttaggggtctggattttgtaggtccgactacacagcagtgttaactcatttctcatgccattagctctctacaaaataaagcaaagtagttctagtgtggtcgttataaaccaatattgtgaaaaatagcaactattcatttgttcacaacatgcgtatttatagagtagttaggtaccatttgtaaggtaaatcctttaaaattctataatacatactaaaatagtggttattggtctgatatatgctgctcttggttctataaactagataaaagcagtgctttgtgaaatgcagtgttctctcttaacgccactggtgataggaagtagttcccttcagttcaaatcctgtgcccttatttgctgcttgctgacgtaagcaataagtaaccctctaactaatggtatctacatatttctgtaacttgtatttaatgatggtgtacctggtgattgtaaaaatattagacagatataaaagtatctatataatatctataaactgttaatgctgaggtatagtctgtgaattatgtgttttgtatttttattcattgtgtaatttagtggtggtgaaagttctacactcaatccttaaagagtggcagtatccctttttcaatttaacatggtctgcatcaatctgtttgcctgctaaacaagttagaataggaaatagtaaaataaatccaaacaagagtgtaatattggttagggaaacaaacttcaggtcaccaactgaagtcattacaaactccttgtacattcactgtgagtttcaaagggagtcagtccctaatttacaggtttcctttgttcactttctagatgtgtacttttgagggacatgaggttaggcaacattacagcaacacacactggggctattaatcccatttaggtctgtactaaagaggatgggtagaaacacatatgtatataccttttctttacctagaagtgccatccattgtccttgaattattatgattaaagttactgttgcatttaggaggctccttgaaagtaacaccttttccaaggacaatggcaacaatgtcaatgtcaacactgagtctaattttgaccacatttatagtggtatagtgtcaatactgcattttcatgacaaccacactccactgttgaaacactgtgccagtgagaagtgcaacatccagtgggcagatgaaaatgatgcatggccaagttcagtgtttacagataaaactgctgtggttcaagtgcttccttccccatcaaatccttgataaggctttgtgggaaaatgatctaaattattgttttaatttttaaacctaatttattcactcagtgaacattcttacctaagcaaggctataaaagggaatactacagttttgtccacactttaatttgagaccatttttctttgaatcgtaagttagcaaaaga

SEQ ID NO: 87316 - DNA, 1734 bp, Homo sapiens
ttagtccttggcaggtcgggttcctcttttcttttaggattataacaccactccctctcctcgcagttcagctaatgaagagaacatgtataaggctaaatacctctcttctggggtaaaataatgttacagcagcatttagcaaatcttctttttaaatgttccaagcttccaaacttaacgtccatctcaggattttattttccagttctgaagaaatctgcacaaatttaaacagtaaataacttacctttcctttaaataaaaagacaaatgactagtggtttttaaattgccaggttttattaagataattggcaaaatttcaacatacaccttacctgaatgaacacttttaataaaatatgaaggatcactcatgactacaactgaactcaaaagtgagatgtagagcagatttgtaaattgataaatttatttggtaagaaattattcacttcattcgcttcactccatagagaattctttgcagagaaatgttatgaacaagagaacaaagcctgtctctcaccaaagagcacctagagtaagagtttacaatgatgtatctggattatctaattcatcaaagtttatttccttttcaaaaacaactgctgtgtcagtctggagttccctatttcatgttttctaattattacaataaatagtcttcaaaatagaagataaaatgctgctttaagaagtaacagttatttttcaacaccataccatttgtctggaaaatcattgtgttgtaatactggtggtatcttactttgttttgcaagagacatttaagctatttgcagatcagaatagaagagtgggcatttgtcctttaacatcacgtgattttcaaaggtgaaaaaaatttcttttgctaacttacgattcaaagaaaaatggtctcaaattaaagtgtggacaaaactgtagtattcccttttatagccttgcttaggtaagaatgttcactgagtgaataaattaggtttaaaaattaaaacaataatttagatcattttcccacaaagccttatcaaggatttgatggggaaggaagcacttgaaccacagcagttttatctgtaaacactgaacttggccatgcatcattttcatctgcccactggatgttgcacttctcactggcacagtgtttcaacagtggagtgtggttgtcatgaaaatgcagtattgacactataccactataaatgtggtcaaaattagactcagtgttgacattgacattgttgccattgtccttggaaaaggtgttactttcaaggagcctcctaaatgcaacagtaactttaatcataataattcaaggacaatggatggcacttctaggtaaagaaaaggtatatacatatgtgtttctacccatcctctttagtacagacctaaatgggattaatagccccagtgtgtgttgctgtaatgttgcctaacctcatgtccctcaaaagtacacatctagaaagtgaacaaaggaaacctgtaaattagggactgactccctttgaaactcacagtgaatgtacaaggagtttgtaatgacttcagttggtgacctgaagtttgtttccctaaccaatattacactcttgtttggatttattttactatttcctattctaacttgtttagcaggcaaacagattgatgcagaccatgttaaattgaaaaagggatactgccactctttaaggattgagtgtagaa

SEQ ID NO: 87317 - DNA, 1971 bp, Homo sapiens
tttcgcattttttaatggcaagaaccaaaattacttttatgccaatctaatagtagttaggagttgtgcttggttcaagattggatttgctatgattatccttagtggtctcgagttcctgtgatgataccttgtatttctgattggtgttggataccagagcactgtgtttctgaccctgagtttccaggctcagaagctttgtgctgggtctccaagagggtctctctctctgcttccgttgctctgctgtcctcctcctggaaatactctgctgtttcttgaagtgtaacgggggctggggaggggctggcgttcttggattaggttgcagttttaggcactgtgtccctaggtttgggagggtctctgtttacttgccccttcccagctaattgtgggcccagtgatatttctgccccctcctctgggatggggcttttcttccatagtcccttctctctgctgcagtgacttttcaccagtgtccagacggcaacagtatttgtgctccttttccctcatagggtgcttttgttctgtgagatgagagaaagggtatggtaagttcctttacccatgcccaaggccgctgtatactcccctgggtgtgtgtcacagccgacacttcttagggctctttacagtattttctgagcccctggtagagattgtaaagaaaaagcctgcaagatagggcgactcccctagtttctgcaggcccccgggtcttaacactcctgcagcccatattctgccttcaccaatcatcacttttagctagcctattctttccagtgtctgtttacaacgaccctacgaaactagtgctaatgtcttctctccccttgcaggcaactgcccctctccatttggtgccacttggttactctgcaacctcagctttccaatggattcgaaaaaatgtcctaatttatagttcatctggctcgtttgcattgtaagagtagaagaaatgctccttctacccctacatcccggagtggaagctggaagtgctgtgatttaaaaatgtatatatgtaaaacacacattttattgaatgtaaaacatgagtgtaattaatcctaaaaccagaattcagaaaatgagccatttttaatttttttatctagttttttaaatgtttgaattataaaggtgataagattagaaaaatttgggaaatagaaaaccccaagagctattttcttttttgcatattcatttgaatttttatgtggtaatatttttagatttctcctcattctacctctcattctcacatctaccaatacatgccttcatagtctagatttatagaagttttagaactctgcttagggatgcttaagagcaaatggtaagattagccacagtgtagtttgggacatcagtagtacgggctgctctctttctaaaatccttttctctggctggcatgttgaccgggagtctcccttccattcctgctctgcagaccctgcgggccagagtccttgcccgagaccttcaggtcagtcagtgtctcctggtgtgcatttgggaaaggctgctgcataggctcacctcccactgggtttcatttgacctagtgaacccgtagcaactcgatttggcttaattggccacccctaatcctgtagctgtcatactactcaatgtaatgactagcagggacaactttttcatcatctttagttaaactccagttactcatttggaaaatggtttccccaaatgtgtatcattcttgacagtttttcacatttgtttccctggtcctaaagcaagattataaaaatcaaatagaacctgtgtgtgagggcccttgtttgcacaatgaggagaggacacacttcatctggaggttgcgtgactggggcagcatcctacagctcagcataagaggcaggctcaaccaactgcccagggaagagcgcttcttactaaacatattcaacagttggg

SEQ ID NO: 87318 - DNA, 1065 bp, Homo sapiens
tgctctttctgtaccctgatagagccctcagcatgtttttttatttttatttttgtaacctttccttttttgctgaagaacagtctgctgttaccttgcttctgtatttagtattttatctcaagttcattcctggaaaatctctcctgaatagagttttcttagggctagagatacattaatgcttgtgttgtctgtgaacgtgtcctttctggacaactttaactacttgtgtcattgatctttaagtaacctttgaggtagatgagttgtgtatcaaacctgtttggccatggagccttaggttcagggaggttgtatgattctcttcaggttcaaaaccactggcagggatggggtgaactgctggtctagtgccttttccactttatctcacttgcagcagacccaacattctgatacctaataatttaaaacctaaagattattctttttttttagcttttaattttgagataatttcaggtttgcaaaagagttgaaaaaattgtgcaagagtttccgtataccctctgcccagcttctccttttgttaatgccttacataatcacagaacagtgatcaaaactaagaagttaatcctggttgcaatattgtttaccaaactacagaatttgttcagatcgcaccagttatttcacaaatgttctttttctgttctaggatccggtctaggatcccacattgtattttgttaccatgtttcctcaggatccttcagtatatgacagctcttccgcctttccttgctttcatgaccttgatatttttgaagaggatgtgttattttattaaatgttcttcttatttgggtttgacagatgctttcctatattaaattgaggttatgcattattgggaaggcccttagtgcatcacatcaggggggatatgatgttgatatataaatatacatatatatacatacatacacacacacacacacacacacacacacatatatatatactttttttttttttttgatggagtctcactctgttgctcaggctagaatgcagtggcaccagcttggctcactg

SEQ ID NO: 87319 - DNA, 1078 bp, Homo sapiens
caactaatgaaaataaagaagaaaagggggctttaaaatatttgttgcactacagtcgtatagtaagaggcagaaaaaaatgaaagaattttaaataatcttacacgtgtctacagggccaggaacgtaatgaatccatgttaacttaatttcatttaaaattacatttgtagaagtcacacaacagaaagataccatgcggttgaacagtgtgcctgtacttgaacaagtgagagaagatacatactccaaaaaggagattcagtctagtgttacttcagttattcacatagtgtctacagggcagaatctcttccaaagcaattttctgttcactaatctacaggcactaatggaactgtaattaaaaccccaaatataaagatgattatttaaacacaactaagctctagccaaagacagtagagcaccaatgccgggcgggttactgacggcatgcagggcctggaggtacattttctggcagttaaccagccttctgctgtagtagacaaactgccttttgtgaatgtacaaatttgctaaattaatagagaactacattgttatttccttacattacaaagaactcttcccatactgtttttcccatgtactactgctgtcttagactaaactgtgccaccttccaacagtttccaaattactatttcaggtcgagataatgaagaaataagaccaaatctgattatctgactgatgacaaatttgagcaccaactacagcaaaattcagggtcaaggtagcttgcaagtcagttctcttgatttggcaattaccttccactattttcatctgtattgaagctgagatcttcagggcctatttgttcaccatcaggaaaactggaatgtgtatctatgattaaaaaataaataaaaaatttaaaatttaaaagcatataacaagggcagtattttccttcccaagtctttaaataatcttaccaaatgtgttatttaagtgataaagatgtgctgggttgtgaacaaatctctgtcttcagagaatttgtgatctgagtcaggtataagcaaacacaaaggaaaaataaagg

SEQ ID NO: 87320 - DNA, 1731 bp, Homo sapiens
tcttgctatttgtaaggatttgtagcagaaagattttcaggttttcttgattgctatcttgctgaaacaaatactttttatagaattattcttttaaaaatcaactgatgtggccaggcacagtgacctgtaatcccagcactgtaagaggctaaagtgggaggatctcttctcaagcccaggatttcaagaccagcctgggcaacatattatagcaagaccctgtccctccaaaaaatttttaaattagcagggcatggtgtcatgtacctgtggacctatctacttgggaggctaaggcggaagtatcccttgagcttaggagtttgaggctgcagtgagctatgatcaggccactgcagcccagcctagggtgacagagcgagaccctgtctctcaaaaaataaaaataaatacaaatcaaccgacatacacaaaaaaattagatgcccaattagaatacaaactattattagaattgccagaatttctaatattcatacaccatgtggatttgtataacacatttatatttatgttttaggctagggaatataattatgtctataatgaatcaggattaaaagagttcctgttatctcttgtgactgaaaaaaaaacagtgtttgatttggaaaaaagtattatcagtataataaaattaatgctggtttcaaataataactttcaggtactatggaaagggcaattttaaactttgagaacagaaataaaaccactctaaatagctaaagagaatcgaggtttgtgcggttacttttgtctttgttttgttagtgtttagtttgttgaattcttggcattccatgtaaaattcaataggaatctcagtttagcagatacggagatttctgtttccttttacttacagtggtttcttttcagaaacatgttctccttccttcctgccaggaatgagtagcgacagtgacattgaatgtgacactgagaatgaggagcaggaagagcataccagtgtgggcgggtttcacgactccttcatggtcatgacacagcccccggatgaaggtgcagcacatgatgtcattttacacagattactaaaaccaccgctgccgcttctctttcttcttcttctgctgctgctacttctactttttccgctctactgcttttgcttcttctgcttctacttctttttttttttttttaattattgtcatttgtgagacaacattctttggttaactattatggtgagtactaaaaaaacacagccagtaatatttggcttggttgcacctaatgagtgctacttactgggcagagacggggtccacaacctgcttttgtatagtctgtgacctgagaatggtttttactttgtaaagagtctttaaaaaccaagcaaaagaaacaaagaagaattttctttgtgggttttttttttctttttttttttttttgccccgagatggagtcttgttctgtcacccaggatggagtgctgtggcgtgatcttggctcactgcaacctccgcctcctgggttcaagcgattctcctgcctcagcctcctgagtagctgggattacaggtatacaccaccacgcctggctaatgtttttgtatttttagtagagatggagtttcaccatgttggccaggctggtctcgaactcttgacctcgtgatccacctgccttggcctcccaaagtcctggtattacaggcgtgagccaccgtgccc

SEQ ID NO: 87321 - DNA, 1022 bp, Homo sapiens
ccaagtctttgaaagaatggagttattcatgtaggatttagagttaaatggtcagtgttattcagtaacacattttatctttatatgtggggtgttgtgctataaatagcacctagaactcaataagaaaaattgctgtgaatgtgcaaatcaacagggacacagaagtacacccttgtaatttgttggtatctgaacagcttgtttacctccagagtcccaggatagactgtgagaaggagactaactgatgaggctgagagaaggtagtacaggagacaaaggaagccctgtgcctcctgtaatcagctttgtttctcgaggagagtgcggccttgctcactgttgccagtattattctatcatcagcaagagcaagttctcaggaaacccttatatacctataagccttagtagacagttgaatggatttgtcttgtatccatgcttaggaaaaacaagactctttattttagctgaatacaaaaagaagacattcggtgtcatatcactgtggggttctctctctttctcaaagagaaggttgtctggaggactttaaggcgttgtttgtggtactggctgggaatttgggactactaaagtgtctcttaattgctcttaagcatcagtttaaaaataacttttttcttagatatgaacataaataggccttttcctttttactggaaccatatgggacaacctttggttgtattagtcgctggtttaatgatctgatgctgaaaaggttgacttattttttctttcaattgatgacctgcacaactgtaggtaggccagtttatttcttgttctttgtaaaactaaaggctttgctctctgacttcttgctgaagtagcacatacccccttcagttaaatcaggggtactcaaaacaccatctggggaaaagccttggcatgcctgttaaaaaccttgctggtggcctctttaagaggaatacaaagcctgatggcctgccattgctgatcatttagggtaattattaagatgcctt

SEQ ID NO: 87322 - DNA, 1032 bp, Homo sapiens
aggcaggagaattgcttgaacccaggaggtggaggttgtagtgagccaagatcgctccattgcactccagcctgggcaacaagagcaagactccatctgggggaaaaaaaaaaaagattctgctctacaagcaacaagatgggaatgttttatgacaaaagtctaaaccaattggggctacagaatgttgtttatttttagacagtagagagaacagcttccatgcaaggtaagattaaaactttttctgacagactaaatagtgagttttgtgctgtagtagcctattcagaggtgttcttaaatgtctttgcagccacaaataagaagagtaattcgcccaagccagctcgatccagtgtagcaggtagtctatcacttcgaagagcagtggaccctggagaaaatagtcgttcaaagggagactgtcagactctgtctgaaggtaaatttgagggattcagaatgtacttttagtggggtaaatatttattacctgaaattgatgttatcgtggagctttagatcttgaagggcaccaaaaatgctaaagttggatttgaaagtttctttttttgaaacagggtctcactttgtcacccaggctggagtgcagtggtgcgatcttggctcaccgtggcctcgaccggtggtttaagagatcctcctgcctcagccccaccaagtagctgggactacaggtgtgcaccactacgcctagctaatttttgtattttttgtagagacaggttgcccaggctggtcttaaactcctgagctcaagcaatccgcctgcctcaacctcccaaagtgctcggattacaggaatgagccccaccacacctggctggaaagtttcttgatctcaacagaacagacccttaacaaaatacagccattagactatgtattctaaacaccttaattttatttattctttatttttgttgttttcctgagacagagtcttgctctgttttccaggctagggatgcagtggtgcaatcatagctcactgtagccttgacctcc

SEQ ID NO: 87323 - DNA, 1215 bp, Homo sapiens
ctctcacctcagcctcctgaagtgctgggattacaggcataagccactgcacctggccagaaatatgtatttttaatataatgttatatatggcagatttgacaaagtatttggtttctagatttttctttgtcttttttttcaattataaacataataaaagctctgtagaaagtttcagaaaagtggagaagtttaaagaagaaagcacaaggcagtagggcagcttttaaacttttagaattaaatgtgtaattcgaacttgagtatgatgtgactcagattctaactctgaaggtgtgaataaggtaggattctttatctttattttcattaatggaatttagtgcatgttttattgttgataccacgtaaagcacgctagcttattttacacatcaaatttgcatatattcatggtacaaatgatttcattaatattaacgtttatgttaacatgacttgtcaatttctctgaagcatcatattctcgaaaagataaagaccaaaggaagcaacaggcaatgtggcgagtgccctctgatttaaagatgctaaaaagactcaaaactcaaatggccgaagttcgatgtatgaaaactgatgtaaagaatacactttcagaaataaaaagcagcagtgctgcttctggagacatgcagacaagccttttttctgctgaccaggcagctctggctgcatgtggaactgaaaactctggcagattgcaggatttgggaatggaactcctggcaaagtcatcagttgccaattgttacatacgaaactgtaagtaatatgttcccagtgtcatttctccacacgttatttgggaaactagatgactggttttttcaaaagaataatatttaaataccactcttccagtgagttaagactacaaattacatgtgacttttttcttcatccaaaattgattccgtatatttttactatataatagaactaacatttcttgattgcttactctgtatttggcaataaacaagacaaaattcttaacatcatagatcttgtattctagtagtgggaatcagacattaaaaagtgtagacaagtaagtaaagatcatttcagtgggtaaaaggtgctgtgaaggaaacaaccgaggagtgggatgggaggagcagatgagacatgttctattggggtagtcagagaaagtctctgtgaggaggcagcacttgacctgag

SEQ ID NO: 87324 - DNA, 1868 bp, Homo sapiens
ttttttttttttgagacggagtctcgctctgtcgcccaggccggactgcggactgcagtggcgcaatctcggctcactgcaagctccgcttcccgggttcacgccattctcctgcctcagcctcccgagtagctgggactacaggcgcccgccaccgcgcccggctaattttttgtatttttagtagagacggggtttcaccttgttagccaggatggtctcgatctcctgacctcatgatccacccgcctcggcctcccaaagtgctgggattacaggcgtgagccaccgcgcccggccctggttccttctttctgcttcttatcatgaacctgaactcctaagagataggtccatagacaagtattcatataatgttaaccagttcattttttcatttaagtatagctaagtttgtgcatatatatatcattttctacgcctcttttgcaggtagtagccatggttatgtgggttccagtagtagaatatcaagaagaacacatttatgctccgctgctaccagtagtttactagacattgatccattaattttaatacatttgttggaccttaaggaccggagcagtatagaaaatttgtggggcttacagcctcgcccacctgcttcacttctgcagcccacaggtaaaataataacaatgataatttcctttttttctgtggttctctaaaagaactcttggattttcatttaagtatttcagctatgtgtggaacatggtgtatttctgtgtttttcattgtataccataaaaatgacatttatgtcaaccaaattagtttttaaattaccgttcaaaggtgatttgtgcaaaaacaaagtaaaaatgcctgcaagaaggttttttgtgacttgctactcagattttgcctgacagtttgatccatatgaaatacggttatcttctttatgaatggactttttttggtcaggcttcatgaattcccttacttccaagtggaactatatctaaattgaacgtagaaaaaggtgacttactcattctttgatgttcagtagcttaaaaatgtatgccagttggcagcactgttttctgtgcaaaggttatttgttaaatagaaattacatttgtgttactataataaaatggagatttgtatagtcaaatatgggcttttttaaactctcggggatagagtcattttggacaactaagtatttgcctttaaaagctacattttaaaaaccatttttgttggaatgctttctaaagtatagtcagtatattcaaaaatatatgccaaatatttttctaccttcttaaacaatagtattatatacatcaaatcaatgatttagaactctgattttgatgtagttttaaggcaagataactcatttttcaatcaaagtccaaggcagaacctctgtgtaaataacagagaaatagagctcttctactggtgtagggacatggagcccagattatttaggcttcttctttcctaagagccagatatacttcctgaaagtctggatcctcagcttaaaagactatcttcaggttatgaaacagttgccttttatgtgtgcgccaagtatgctttatataaagttttacttaaatgttaagtgttgtttgcaaaggcccagtgaaacagacaggttctgattctgtaggtagatatgtaagttggtttaacctttttgaaggacaattttgtagtagtttaaaaatatctatatcctttaaacttgtaatttcactttgaggagtatattccaaagagaaaacaagcagatgtttaaaaatattcaacaatacagttatagctgaataaattacagtgtaaccatgcaatggtatattttatagacaagt

SEQ ID NO: 87325 - DNA, 1071 bp, Homo sapiens
ggctcactgcaagctccgcttcccgggttcacgccattctcctgcctcagcctcccgagtagctgggactacaggcgcccgccaccgcgcccggctaattttttgtatttttagtagagacggggtttcaccttgttagccaggatggtcttgatctcctgacctcatgatccacccgcctcggcctcccaaagtgctgggattacaggcgtgagccaccgcgcccggcctggcatattcttaatatgctgggataactaaagatttcttaaatactagtcctcaccatttcaactccaacctaagctctatattctttctactcctgactttaatcctgggtaatcttatccacacctgtatttcagttactgtctatatgctgattacttttcaagttctttctttagcctttgtctttccatagtttccaaacccatgtcttggtgtgtgattcagcacttcccaaacacaaattactgtcttttcatctgccagcctgcctgtcagcagtagccaccgtgactgataatgctatacattctttacttcttcctctccctaaaactttacctttagtgtattaccaagatctgttggttctgtgtcctaaatcgtgcataaattcatttggtactcccactcctttgccatttctagtctaggcctctgtctttcacctgggttccttgtatttattattgttcccctccattgtatttttacagcatggattcagaatgagggtgtttttttctttctgattaatatctaatcatgttacttctctaccagtcttggtgactcacgcctgtaatctcagcactttgggaggctgatgtgggtgcatcgcttgagtccaggagtttgagaccagcctgggcaacgtggtgaaaccttgtctctacaaaaaaatacaaaaaaattagccagatgtggtggctaaattgctgcctgtggtcccagctatttgggaagctgaggtgggaggatcacctgagcccaggaagcggagcctgcagtaagctgagatagcaccactgtactccagcctgggcaacagagtgagac

SEQ ID NO: 87326 - DNA, 1075 bp, Homo sapiens
agaactggctgattttttttttttttttgagatggagtctcgctctgtcgcccaggctggagtgcagttgtgcaatcttggctcactgcaagcttgcctcctgggttcacgccattctcctgattcagcctcctgagtagctgggactacaggtgcctgccaccacacccagctaattttttgtatttttagtagagacagggtttcaccgtgttagccaggatggtctcgatctcctgacctcgtgatccgcctgcctcagcctcccaaagtgctgggattacaggcatgagccaccgcgcccggccgatattttttaaaggttgtttaaacaataacattaacgctacttaaatttggaaaatgacaaaaatctttctcctttttgtatttagaaatatcttatttcacagaaaaatctgcatatcataaaatttattgaggtgtgaaaaacaacgtttattgtatcactctatataaatgatggattttgtatattcttaggtctggagaaaatgatgtggaatataacaacatggaattagaagagggagaactcatggaagatgcagctgctgcaggacccgcaggtaatgaggtcactccactgcctccaagccattctgttttctctctgctcttctctgactgtattatattttaaataggtggtagccactgcttgtacatggttcatggtgttggaagtggtatatcttataatatggattttttagagtttattactaaagatatttaaaacaatagctaacatttgaaaaatgttttatgtaccaggcactgtgagaagcactttaagtaccttatattaataaaattctgtgtgatacattcactgatgcatagagaaattaaagcaacttgccaacttttaacaatttagtaaatgagagtaattgaatccccagatttgtttgtatcccatgctcatattttatactattctttctgatataaagtcttatttgtatatcttgctagactatagaatgatctcagtggaatcattgactcttagacttacgaaggatcttaaagagctcattttatagtt

SEQ ID NO: 87327 - DNA, 1020 bp, Homo sapiens
tttttgcttaatagtgggtattttttttctgtgcagataggtgacagtgttaattaatgaccttgataatggtaaaattaggtagaattgaggagtgatggtttgaaacgttactctgtgaggaagctgatgtggaatatgtgaaggattccagtcacactgagggcccagctgaaggcggcacgcataagttagtaaaatgatatcagtcagtgtggttgtgtgatttttctctacagggctcagcagctgaggcacaggagcagaaaatagatttttgaaaactgtattattctttggtgcttggtttatgggctggatggggtgatcaactgagtagaaacatttggaatagacgtcttgttttcttggcattgatctagcacgagctttcagatggagatctggatctggatcttgtttatgaggatgaagtaaatcagctcgatggcagcagttcctctgctagttccacagcaacaagtaatacagaagaaaatgatattgatgaagaaactatgtgagtttcccactttactactgtaaagcatttaagtggtaattattagaagcatattaactaactcacacttaaatgtagggatattcagcacttttttgaaagattgaatcaatagtcagttttctctctctaatctctgggctcttagccaataatttttgtttgtgttttaacttttaaatttgaattttgaaattattttatacttaagaaaagttcagaatttcatgtttccttcacacagattcattccctatgaatattttgctttatatttctctgtatataattttttctgaaacacttgagatcgaatatacttctcattgtgtacttttctaaaaacaaggatattcttacataactatagaatagttatcaaaatctggaaattaacattgatgtaatactgtaaccttctaaaaatttgccagtaatgtcctttgtcaggatcatgttgcatttaattgttaaatcgatttagttatcttcaatct

SEQ ID NO: 87328 - DNA, 1059 bp, Homo sapiens
gcataaatggggcagtttatctttgtcatcaatttttttttataaataaaaggcagtagggattcagagaaatggtttaagaaatggtgccaagtgaggtggctcattcctgtaatcccagcatgttgggaggccgaggccagaggaacatttgagcccaggggttcaaaaccagcttgagcaacatagcaagataccgtctctaaaaataaataaaaatgaaattagccaagcatggtggcacacacctccagtcccagccacttgagaggctgaggcagtaggatcgtttgagcccagtagttcaaggcttgcagtgagctatgatggcaccactgcacttcagcctgggcaacagagtgagaccattctcaaaaaataaataaagcaatggttttagaaacatctggatgcatttttttttcacttgagacatcttttactgtgccagtgagctgtggctaatatttgtgcttttcttgttttaaaagagacttactattgagctgtctcgaactcagaagtcaagagatttgtcaccaccagataaccatcttagcccccaaaatgatgatgctctggagacacgagctaagaagtctgcatgctctgacatgcttctcgaaggtggtcctactacagcttctgtaagagaggccaaagaggatgaagaagatgaggagaagattcagaatgaagattatcatgtaataatgaggccagttttagatttttgtgtttgattaaaaaaaaacagtagcatcatggcttttaacatattatgtgctaaaacagtaggctaaaaatattgtccattgatttccattagtaatgtatgtatgcccttatgtaaatgttaataagtcagaagttgttgaatcaaagcatttcaaggttgtgaaaaaaacaatacattgtataaaacaaaccgtgatacacattttaaaacctaaactaccatacattgtggattttaaaaatgtgttctggccgggtgcggtggctcacacctgtaatcccagcactttgggaggccaaggtgggtggatcacatgaggt

SEQ ID NO: 87329 - DNA, 1051 bp, Homo sapiens
gtgtggtggctcacgcctgcaatcccagcacactgggaggccaaggtgggtggatcacctgaggtcaggagttcaagaccagcctggccaacatgaacccccgtctccactaaaaatacaaaattagctaagcatggtacacgcctgtaatctcagctactctgtaggccgaggcaggagaatcacttgaacctggagtcagaggatgcagtgagctgaaattgcaccattgcactccagcctgggcaacaagagtgaaactccatcttaaataaataaaaaaaccccaaaatactgctgtttttataaatgataaaagaaatgtaactgcgtatatcaataaggtttcttctcaggtaattacttagtgaccttaatgtttagatgagtttgttttttattcttactttactaactgtatagtaatggtctgtttttcaattttagatatgaatatcgtgtagagatggttcaccagtcctgtaatgatcctacaaaaaatatcattcgagaatttgcatctgactttgaagttggagaatgctggggctataatagatttttccgtttggacttactcgcaaatgaaggatacttgaatccacaaaatgatacagtgattttaaggtaacaggaaaaatttgatgttgtggtttttattgtggggaaataatatcatcagaactatatttcaaagatcatttggttaacaaagatgaatattgaaattcatactaactataaccttatcacctttttttttttttttttttttttttttttttggagacatagtctcgctctgtcgccctggcgcgatctcggctcactacaagctccgcctcccgggttcacgccattctcctgcctcagcctcccgagtagctgggactacaggcgcccgccaccacgcctggctaattttttactatttttagtagagacggggtttcactgttttagccaggatggtctcgatctcctgacctcgtgatccgcccgcctcggcctcccaaagtgctgggattacaggcgtgagccaccgtgcccg

SEQ ID NO: 87330 - DNA, 1060 bp, Homo sapiens
aatttatccctcttcccatttaatttgtcttttcttagggttacttttgtggctaaaacatagtctctttgaggtttttcccacacgtattaaggtttagtgtactcttgttcttcaatattaaaagatgattatactgcagagaagcgaggaagaaacattctgggttttgttttatttttaatggtgaagactgcttgttgaagcattaattaattttgggagacttggtgatacattccttttcccttaaatgtcacaattttgagggttttttttcccctgaaacttaaaagatattgctgaatatttcagtatctttaaattttctttatttcaggatgtaagcatatctaaacttttacagtggaattttgacctgttcagtcaccttgttatttgtctaggatttcaagtatgtaacaaagaaactggttggtctttctttttgcctgttgccatttcacaacagttttgatcttgggatttggttggttttctttttcgttagcactttgcgtcagagagcagatcctgtttacagtccacctcttcaagtttcaggactttgctggaggttaaaagtttacccagtaagtttttcatatttctaataaattttgaaaccaaggtctttctttcagagttctgtagtatactaatttgattactgagaactgttaactcttcttttttttgttacatatgctgtccgcattccctgttccccttcttcccccatattagacaactgtttgtttgtccacaccttgttctctaatacattctgctggaaggcctattggaaacaatgttccctgagttctcatatgttgaaaacagtttttgccttttatattctaaggctagtattgctggatataaaatccttggctcatattttctttcattgggtatcttcaatatgcaattccattttctttaggaaaagtctgataataaactaattttctttacctttaaagatgtttggtgatattgcctagatgctaaataatctttttgagtccagtaatttactattacacattttagccct

SEQ ID NO: 87331 - DNA, 1032 bp, Homo sapiens
atttcaaaaacatgtcaaatttgaaggctatactgggaagactcccttagagctcttactaggtttatggttccagaaaggcttcctaggcactaattgcattggtcctgctaattggagtttgtgtatgttgagtgctaggagatcatataatgggaagaccttagagcaaacctccaagagtatgtgacttctaatctgttatctgaagaaatagtaagggttaaccaggcaaaaggatatggggatgaggaatgtgagtcttctaagaaggataacaactgactagggatatcataggaattcttgacatagtcaatttggatagtagctatacagttaatcacagggcaaagtacatctgcttactgtgtaaaagacgtgacctatttagctatacgtacttacattgaaataaagaattatttgtctatattgtattgcaagccactaatttctttagacactatcatagtgtggcagtgctatagatgtatattttatcttgttttgataataaccaaaattatgatgaattgaactttagaaaatatatctgaagatgtggtgaaatggtttgcagtttattgttttgggaaatttgtaattttatatatcaaatttataacactattaaaacatcgtatgatagtctttttcatagtatagtgttttaatgagttttgaggtgttctaatgaaagtgtacaaaccatccacatgattaaaggtagttagcagcaaagtgacttttagtccattctgtgattataatacagttctctctgaagaagattggatgggactaaagttgcttgaagtagttttgacttgccaagaaagtgtgagtgtgctagtccatcacagttgccccttaggtgatgaggtattcatcctataaaaatgtgtagatttatttgctagtaaatagtttcaaagtatttgaggtctgttaatatttcccataatccattccagagtaggaagtttggggattaattgtgttatcactgactgttgtttcattttttaa

SEQ ID NO: 87332 - DNA, 1007 bp, Homo sapiens
tgaaagtgcaatatttaacattactgtttagatattgtttaggtcaaacagctttagtgagctatttataatgttatttctgtgaaaaaatgtgataagcccccaagaatgaaatactaagcatgtttttagaatacattttgtttcaagttgttagaatgacagtcataaatgaggtttatggaccatttcctaacttaaaatgaagtttgtggaccatatcctaaattaaaagcagatgtcttctttgttttacctctttaggaatcaagaaccaagtgatcatttataacattctttatgcagaaaatttgtgtttttgattgcatgtctgccattttgaaatataagcaagttgggtcatttccatttgaccttcctctaactacctttttcatattatctattcttggcaatattataatgtggtgcttctgtttttaaaatttacccaattaaaattattcttacctctttatcttctaggaaaggaatgtagaagctgtaagaaatgcaaaagatgagcgtgttcgggaaattaggaatgcagtggagatgatgattgcacggttagacacacagctgaagaataagcttataacactgatgggtaagtgtttatgtatgctgctggggtacctggtgctttcagcttctttgagattcagtctttgaagaataagggtgatcatcctaggaaggaatcttgagattttaggcaactccatgttgttacaatttagacagataaatgttagacttgtatttagaaatgataggagagaaaaattttcatagccatttggatgaaaatccaagttttcatagccatttggatgaaaatcctaatggccagtgggcatcattgttaggtagctttttctccaaatctaacagaattccttctactaatgttccatatcctttccatccattttcattggggatgaagaaactgacatttgtaaacatcggcgtcatcccctgccagcattttcttagagatt

SEQ ID NO: 87333 - DNA, 1091 bp, Homo sapiens
agttcaagtgatctgccctcctcagcgtcccaaagtactgggattagaggcatgagccaccacccctggctaataattattttttaataagagggagtaatttttgtaaagtcctggtggaaagaagtttgaggacatggaagaagactagtttgccttagagaagagtgactgactgataaggttgtggcagatgatttgggctgtggttaaagatcttggttctttttaataagttaatttctagttaaatgaatattttgctaaagccctttatttataatcttgaaagagttcctacttggaccaagtgattttaagcgggcactggcctgcttcaacaaaattaaattagctaataaggtaaagttcatttgagagatttaccagtttattagtgtccatagagtgttacaaaggaatgtaaatgcagatgagatatgtgaaagtgttctaaagctactctaatttaaatagcatggcggacatacctttaaacctttggcagaaatttatgagcaacacgtcactaaagtgaatgaagaggtagccaaacttcgtcggcgtctcatggaactgatcagcttagttcaagaagtggtaagactactactaaaatataattattttgtttttaatctgtaatatataataatatatttatataatataagttaatcagatgttgaaatcaaggttttcaagatttgcaaatttgataggctgtacctatagtcaaattccataaatttcagagtatctgagaaatttgcatacaaagcccctggcttgtaaggaagcagttggagtcagagaattaccacttatgcagaattagaaaatcagtgaatttaaaaagtctgtttgttacagagtcaataattaacttattttttcttttttttgagatggagtttcactcttgtcgcccaggctggagtgtaatggcgcgatctcagctcactacaacctccacctcccgggctcaagtgattcttttgcctcaccctcccaagtagctgggattacaggtgcccaccaccacgcccagctaatttttgtatttttagtagagacagggtttcaccata

SEQ ID NO: 87334 - DNA, 1002 bp, Homo sapiens
attttccatgagggtctagtattaaatcgtgcagttaatcatgtgtcttgattattgttatcgttgaccacatgtaggaaaagtacttgtgcatgctcatgtaggtatagatgcataatcaatatgattattaagcacatgcccaaaatgtagtagtacaatagaatatatcatctgtagtgctgtgtggaaatgatgcaatatgtgttatgtttttaagaagcaaatctgtatttcgcatgtgattataaagtccagatcaatgaaaacagtactttacaaaaaattgtccgcataaacttctttagcttccttttcagaagccatggagtacattttatactgtgtttcttgagatataatcatttaaaactgacctgtttgcccaagcttaagaatttgtggaggtgattatgttccaatttaatttataacttcattttcttttcataatgtatagatgtgaaaatcaccatgaaaaacttagtgtattttgctggacttgtaagaagtgtatctgccatcagtgtgcactttggggaggaatggtgagcagaacaaattcagtattttttttaagttagaggctagaaggcactgaaatacttattcagatagaaaatagtgtcattatgctctcgtagaatgaaagttaaaatgcatctgctttctatacgctttattaaaggtattgtacttttattccagaagaatcttgtttgtgtggtttgatggaccccttatgtaaatattttaatctgtaacacctataaaacatatcctctattcatttgcagatcttttcgttgtaggatctaggtcacttttttcattaaaggtcagttgatcagatgtactggccaacatttccaattttagttcctttaaaatggagcacgaacttagacacttgtgaaacaacatgagtacgcctatctagatcttataattattttttattttttagattattttttccaattgaattcaagagcagttttt

SEQ ID NO: 87335 - DNA, 1096 bp, Homo sapiens
cccaggctagagtgcagtggcaggatctcggctcactgcaacctctgcctccttggttcaagcaattctcctgcctcagcctcccgagtagctgggattatgggcgcctgccaccatcaccatgcctggctaatttttgtgtttttagtagagacggggtttcaccatgttggccaggctggtctccatcagctgacctcaggtgatctgcccaccttggcctcccaaattgctgggattacaggcgtgagacaccgtgcccagccctgtgaaactgttttaagacttaaaagttgtgctgtattgcttattcatttttttcggtttaatttacatgtctataatgtatgtaactcagaattagcttccttttttttttcgaattagcttttcaaaaaataaatttagtagtaaactagatagaaataaatcatcactgtggtttatttttgagtgcaaaggagacagtgccattattataagacaataataagattatatagacgttccctgtgagaatcagttagtcctgaaatcattgcttttcctgtgtgagagtagccttttaacagctattttgtgttgagttttgtcccttcaaaagtttatccctatgaggatgacagtgagggaaacagtagattgcctgttacttttataagtatctctaaaactaagcactagagagttaaacccattagatttgtagtattttatatatataaatattatataatatattatacattattatacattatatatatattatatatataatgtataatatattatacattatatatattatatatataatgtataatatattatacattattatacattatacattatatatatatgatatgttatataataatatattatatattatatattatgaatattatatatttatatattatatatattaagaatattatatatattatatataaatataaaatattaagtaatatatatatatagtaatgatgttttctaatcgatatctaatcttttgcccccttagcgctggctgacagagcagagagctcaatgtcctcattgccggtaagtgtttccttacgat

SEQ ID NO: 87336 - DNA, 1048 bp, Homo sapiens
ttagattgtggaatacaagataaaaataccacaaatattcagagaatgtaaaactcactatagcctgggaaaggcaggaaattttatggacatgatccagtgacatttctatgagacgggatatggagggagggaccatataagcaaatgcacagatatatcgacagtgttatatagtgcagcagtaagcctgttttgactgggagggagggagacatttaaaatacgatctggttactccctatcatagtcccagtctttataagttttatagtctagcagggcaaaggagaccaacaaataagtcgtcgtaataaagtatctgaagggggaagtgtaggttgctgtggtagagcatggcaattgtatctaaaatagtctgcagagtgtcagggaaagctttttggagaaagcaacttatgaactgaaatctaaacaatgagtaggagtaacccagatgaagaaaggttttgaagaatatcttaggcagagagaggaaacatgtaaagacattaccttgctgggttatagggccagttctggagaggagttcatgagaccagttctggagaggagctgtgactttaacagaagagtggcatggtcatgccattgtttcaggggaagaaacctgacccaaatttcgtttttgcctagggaccaaggtaataataatgttcaaggttattaagaatggaggaatccttttccataggctttttattttatttttattttattttttgagacagaatcatgctctgttacacaggctgtagtgccgtggcgctgtctcggctccctgcagcctccacctcctgggttcaagcagttctcctgcctcagcctcctgagtagctgggactacatgctcatgccaccacacctggctcaatttgtatttttagtagagacgggatttcactatgttggccaggctggtctcgaactcctgacctcgtgatccacccgcctcagcctcccaaagtgctgggattacaggcgtgctctgtatgctttttctttcagctttattttctttgctctg

SEQ ID NO: 87337 - DNA, 1081 bp, Homo sapiens
cactgcactccagcctggcgacagagcgagacttcgtctcaaaaaaaaaaaaaatttctgtttccttattcttgcctaaggaagatacatatgcctttgtcaagagtattatccgtaacacttaaataatttttttctagtcacacagctcacaattgatggtactggatttgaacccattaagttcaagaactctatagcctgttctttgtcactgtaccatgcgcagaagacccagttaaatatgatgttagttctcatacttctaaaactaagagattcactctttcttggccttctttcttcagctgtagaattcagatatgatttgctttacagggtggttatggcattaaatgagataacctaaggagtaattcagaaattatgaaatactatatctacttgtttgtaaggtgttattttattgttaaaatagcaactaatacacattaacacttacccatgttttaataaacagtgaaactgatgctagataaattaagtaattggactccgttatagttaattaagtggtagaatctggatctgggcgcatttcttttgatgaaggtcccatgtgcttatggtctctggttgttaccttatgcctcattgattctgtattttttcattgttacatcttcttcctcctgccccttaaatgcatttatttcttaatttcctaagatcttgttgctgtcgttctctactctgaggtttctgggagtattcacctactttgggaaatttgatttactttagcagctttagctatcatctctgtgtgtatggctcctaaatctattccttcagcactgacttttggatgtcttgtccttctagcatcttgaactttgttcaagatcagattattcatattattttctcaaaccgattctaagttcattctttttgttctgttctgctagtcactcaaactggaaactttataccaatgatttttttattttttattttttatttttttttgagatggattcttgctctgttgcccaggctaaagtgcagtggcgtgatcttgggtcactacgacctccgcctcccaggttcaagagat

SEQ ID NO: 87338 - DNA, 1038 bp, Homo sapiens
tataagggacttgagcatctgtggattttgttatcctggaatcaatctcccacagatactgagggttgactgtacttttagaatatggcatccaaacatgacttctttggttctgctataatccttaaattgtttgatttcttggtcttgtttcttcaacttaattgcaagttctttagaagctcaaacatcataggaccttgtatataaatagccaagtatctgttttttcccttgcctttctaaatctgtgattacatacatagtataagcttagggaaacatttattggtgtgacaatgcagaagttaactaaactgatttaagtctttgaaagtttttgaaataaagattttatcatttattttctagctgtcaccactgactaaagaagagaaaactgcggcagagcaattcaaatttcacatgccagatttatgaagaaatggacttggaaaggaaattctaacagagaagagcttaattccggagaaatttaggaagatgtcttgttaacccttgatgtctagagattgggggctggtgaagggggtttggcttcaatgactggataatgatatctttcatgagagagattataagaagaagggcagataatatatgaataaagttcagccaaaaggatcaaatgagaataaaacgatttaaatatatgtacacacgcatgcacacacacacttagtcttgtaatttcaggccagaaattctcaacactattttgcatctgttttctttttctaagtcatgataatatagatgttctggtctatcataaaagaatgtttatgtacatttcagtcattcggtatgtggctttgtaaattaaagtataggcaaaacatttgtgttatacatgatatataatttcattttgtaaatgttgattgcacatgtggtcacattattgttgagactgcttttatgtgacctgtagtctcccacagaacctaaagtaataagctggcttttctgtgatagccacgtttgcgtatttctttccctatttcccttgcctgc

SEQ ID NO: 87339 - DNA, 1008 bp, Homo sapiens
tagaactcctggcttcaagcaatcctcccacttcagcctcctgagtagcttggactacaggggtgtggcatgcccagtgaactgacgagttttgacaaatgtatacagtcatgtaaccaccaccacagccaggatatagaacatttctgttactttacaaaaagctcctttgtggccaggcatggtggtgcacctgtagacctagctactcgggtggctgaggtgggaagatcactcgagcccagtagttccagaccaggctgagcaacagagtgagacccctacattcctttgtgcctctttgtggtcaacctcttcttccccaagtccctggcaaccactgatctctagtttaacttttcctagaatttcatataaatggaatcatacattatacagtcttttgtgtctggcttcttgcacttagcataatgctttgagattcatccatgttgtatattagcagttggacagtttttattgctgagtagtattcattgtatagaatatcacaaactctttatccaccaacttatagacatcgggtcatttccacgttttgcatattatgaataaaatggctgtggttggtctcgaattcttgagctcaagtgatcctcctgtgttgccctcccaaatgtctttgtttaattttttttttagcaatatttttttctttttctttagagacagggtctcatactgtcacccaggctggagtgcggtggtgtgatcatagcttactgtaccatcaaactcctaggctcaagcaatcccacctcagcttgctgagtagctggaactacaggtgtgcatcaccatacctggctagttgaaaaatttttttgtagagatgaagtctcactatgttgccaggctggttctctaactcctgggctcaaatgatcttcccacttcagtctcccaaagtgctggggttctgggagtgagtcgccatgagtatgtctttgtgtggacgtaatgttttcatttcttttgagtaaatac

SEQ ID NO: 87340 - DNA, 1412 bp, Homo sapiens
tgttgttatgacagcccttagtaaactcaagataaaaagctgtaagatggtaagtgcttttgtgttttctttgtttagtggtttagattccagagtgatagattgagtatgtagagattgagaaacttattattttacttttcatttgttttctttgatacttttattcaaagggcttgttttacatggcgtttaatcagtaaattgccttgaagaaggagctaaccaacatctctgcagagaacaaaaatatttttcacaactttgccttagtagtaattataactggttttgttaataccaatcctaaagtattaacaatacccattctaattactattaaggcttagggcatatttacaaaattcctttctacatctatgcatgtttctgttcgaatgttaatttgtatattagtcatcaataagcaacatcactttgatatttaagtcttatccttttttaaaaaaacattgatataaatgttttttggttttggatgtttttctgtccaaaatggcaaccctactttaaattcgtttctcactgaagcttcaaccgatgcaagatgcttttgtgttcctttcctacttattactgctaacgaatgctctgactttattgcactactgtactttacagctagcagtgcaatagtattgtcaaagcatctgaaagcaggatgcacgccagaattttgattcttaccttacatctttcttcggtatcagtaaataatttaccacaacctttgttgctgagaactataatgttgttactaacagtatatcttttagaaagtcataatttgaaaaaaaaaaaccttttaactaattaaaaacaatattttactgcattatgaaacacgtctggagaatattttttatatctaagttgttatggtttgtctaaatgagtaatactttataatttgttgctttctgttacatatttggataggttctgtcaaactttaggttttatttgagttttatgatgaattggtagtgatggaaacaatttctgctgtatatttttcctgcagttacttgccccaagtcatttttttttctccagagacagagtctttctctgttgcccaggctggagtgcagtggcccagttacacctcactgcagccttgtactcccgggcttagataatcctccctcctcagcctcctaagtagctgggaccacaggcgtgtcctaccatgcctggctaatattttcttgaaattttttgtggagacagggtctcactgtgttgccgaggttggtcttgaactcctgggctcaaacagtcctcttgccttggcctcccagagtgctgggattataggtgtgagccactgtgcctagtcctccaaatcttaattggtgttaattttgtgtattgtctaggaaatggtt

SEQ ID NO: 87341 - DNA, 1366 bp, Homo sapiens
gattggctgagatagcacagagctccagccaatcagagctgaggcgcttctggtatgaataaggagaaggcgggagagaaggggaaggaaagccggaggggaaagaaggtgtgttacgtcccctctgctgtcggtggaagctctggtgtgattggttggctcttcttccaattgcaccaatctcaagctcttctctgcagagccctaactacaaaattgaaagtagagaggagggggcagccaatggaaaaaaaaatttgcacagcagccaatcctcctgcggcgttttgtgcctttgcccaacaggaaaatgtgtctcatgcagaggggcgttacccagtctccaatgggcgggagccggtggaacggaggagccaatgagtgcgagatgttgagtgacagctgtccaatggaggccctccgtgctagtacggcttgcggcttaagcgccgccgcggtctgcggaatgtcaactattcaacatggaggcggaggtcgataagctggaactgatggtgagtgcaaagtgaaggagatctactgggtagtttatttttcccccatggcctcggaggtggggcacaatttggagtcgccggaaactccgggcggcggaggctggaccagagtcgagttccctcctcctgcaccaaagggagccgccaccgtctggtgtctaaaccgcctcgggtaaggggttacatccgggaaactcgtcagggaaatggcgggagatgctgagggtgcggggcctttggaattccttgttccttgccctcacctttacaccccttacgaaactgcgccgggtgcagaccgcattctgtgtttgtaccaaaaaagatgtgaatggaacggtccctaagcgtcccaagaagggagaggtggttcacactccaagaaaggggaacggagggtggggtggggaataaactgacgggggcgaggagaaatccctgtagggccaacccgctcacgttctaaaaggcgggccgagaaagtctgagaaaggatgctagacttgtatgcacaacttcctaacggccaaggaacccgtttctgtttgatccggaggtggcaaaccgtgggtgagggaagaggtgtgagcgaaggggatcgtaaccacgagctccgctcccggagcgcgggcgggattgagacaggaaaggcatcctgctctggagttgtgcactttcattcatctgtgaaagtagaaaacgggggcgaagaattggaaagcactcccgttgttgctggcgtgtttggcctgctcggggggcgcccagctggggggctgtcctagttttctttaaggatccgtccctcacttgttctctttattccctccctcccatccttagattac

SEQ ID NO: 87342 - DNA, 1038 bp, Homo sapiens
cattgaccacatacatgctctttttgcttttaacaatataggctcatgcctataatcccagcactttgggagaccaaggtgggaggatcacctgagcccaggagttcaggaccagcatggggaatatggcaagacctcatctcaatttgtatacaattggggtcgggggtgctggagggagaagtcatttcatttcaagttaagtttttgatgtttttattttagtagttttggatttcccaacaaaatgtatatattaggaaatgatttaattaggcaattttatctcccaacccttagtctgaagaggtagagacatcctttgaagctctggaataaaaattgggtagcatactggatatatcttacacaaactcagcactcagatatttgccgtttttgcatgtttacattttgagtgatattttaaaatttgttttaataatgtctcattttataattaaagcttataccatcgccgaaagcacggaatccactagttaccgtctctgacttgcagcatgttaccctgaaacctaactccaaagtgttatcgactcgagttacaaacgtcttaatgtaaggaactgcacagtactatgctctactactacttaaaagaatgatattgttgtacaaaggcctaaagaaaaggaaaaaaagattttttgtgtgtatttctaatgttaaaagttatatatgctcattatagaaaaactgaaatctacagaaaagtttaaaaaagaaaacaaaaattatctaaataatcctatcactggagatagccactgttaacatactgctgtttatcattctagtctttttctgggcatatggtttattgccccatttaaagatgctgtttattataagatatggcattgatttaataacagattttgggagaaaaagatatactatcaagaattttaggctgggagtggtgggttatgtctgtaatcccaccactttgggaagctgaagtaggaggattgcttgaggccgggagtttaagaccagcctgggcaacatagtgag

SEQ ID NO: 87343 - DNA, 1064 bp, Homo sapiens
ctggtcatgaactcctgacctcgtgatccatctgcctcggcctcctaaagtgctgggatcacaggcgtgagccaccgcaccctgcttctactgctattttttaatgtaacacatagaactactttctaggatgttgcctatagaaatgattgctttcctttgggaaaaaaataataaaatctggcaagttctaattttttttttttttggagacagagtcttgctctattgcccaggctggagtgcagtggtgcaatctttgctcactgcaagctctgccttccgggttcacgccattcttctgcctcagcctcccgagtagctgggactacaggcgcccaccaccacacctggctaattttttgtatttttaatagagacaaggtttcaccgtgttagcaaggatggtcttgatctcctgaccttgtgatccacctgcctcagcctcccaaagttctaatttttatatctttgttttatcagcactcctggaaaaagtcagatggatctgcggaaactgcttagaaaagtcgatgtagagaggtaatacactctcatatctttatgccttctacgtccattttaaaagttgccataaaatacagctactgttattttcaatacctttgcaggagcccaggtggaacccctcttaccaataaggaaaatatggaaacaggaacaggactgactccagtgatgacgcaggccttaaggagaaagtttcaggtaaccctttaggaaaagaatattggttcctttgcttgaaaataatttggcctggtgtggtggctcatgactgtaatcctaacactttgggaggctgaggtggggagattgcttgagcctagcagttcaagatgggcaacatggtgaaactctgtctctacaaaaaatacaaaaaattagccaggcgtggtggtgcatgcctgtagttccagctacttgggaagctgtgttggaggatcacttgagcccaggaggtcaaggctgcagtgagctgtgattgcaccactgcactccagtctgggtgacaaagcaagaccctgtctcaaataaataat

SEQ ID NO: 87344 - DNA, 1041 bp, Homo sapiens
atttgtataatatcacatggcagtatgtgctatgaaggaaaggaatgaggttctgtgggaacccagagaggaacttgatctagcctggatgatctaggagggactcccttaggaagtgatgatgcttgaggtgagagtcgaagaaggaagaggcatttactggatagggtaactgtggggtgggtccaccatgagtgtcaggaaggagagagttccaggcaaaaagaacaaaattcgtaagagttccatggggtgagggatcatggcctattcaaggaactaagaagtgaccagtgtggctgtaacacagagagggagcccaatggtggtgaaagacagggatggagatgtagttaggagtcagaccctgcagagttgaaaggaaaaggtcttgagagctttctttgtcacattcatatacaaccacatacccaacccagtagatcagctggccctggtgtgacttcttccaaaccctgttgatcttagtcatctccctaattgcctctatcattagatctgtgaagaacagccatccgtcggctgcccctgctggagtgctggaacacagggctgctggcatctttggctttgaagtttatagttcgttctctctctggatgcagggacatagcagactccactgctgacactttccaccccaatattgtcttccttttgttccgtgtttgagaatcagtgctttttgtgggacaatataatttctctcttaccaatcaacttggtcctactgggcactatacagctttctgcgtagtggagatgtgaccaggttcttctttcctcctcttagagcatgctacccctaatcaagttccttggtgatacccaaaattgtgaagggcaggagcaaagggacgaggcctcacgggtcttagccccttgctttttctgtttagctctaagatctttgttgtcactgcccctacttcatagcaggtacagtgagttgagaactctggaaatggataaacgataataaattgtaaagccacatattgaacaacaacaaaaatcaca

SEQ ID NO: 87345 - DNA, 1033 bp, Homo sapiens
caaagtccactgtatcattcttatgcctttgcatcctcatagcttagctcccggacttatttttttaatttaaatatttctttgggcagtaggaagtccacaactataatacagtggcttcaccatataatcactgttcttccatccttaatgtgtggcttttatcctcttaatacaaaatgcctacatttcctgaagcctcatgtccacattctaggcaagagaaggagaaaggcaaatgttaattaagctatgcctcatttcttcaaagaagccctatccaggaacttctgattgcatcagggaaactgggaaaagtggtttttacaatctgaatgcagtgttgccatgcaaaaattctgggttctgttgagaaaggagagttgtacttatcacaggaatataattgatattataattgggactttttttttttatagctggctcaccctagaagcccaactccaactctgccactttctacaagcagctttgatgaacaaaactgatgccaactctgcctcactccatgagatgatccataacaaatacagataaaaacacccagctgggtgcagtggctcacacctgtaatcccagcactttgggaggctgaggcaggtggatcacctgaggtcaggagtttgagaccagcctggccaacatggtgaaactccttccccactaaaaatacagaaattagctgggcatagtggcgggtgcctgtaatcccagctatgcgggaggctaaggcaggagaattgcttgaacccaagaggcagaggttgcagtgagccaagatcgcgtcattgcactccagcctgagcaacaagagcaaaacaaaaacaaacaaacaaacaaaaaaaacccacccaaatccttttttttaatgtagtagggtttatatagatatactaatataattgcatttggagaattagagtatgtatggagcccacacatactgtgatataaagtgtatatacagatatttggatattttctagtttgcatgatgattaagagaaccaga

SEQ ID NO: 87346 - DNA, 1030 bp, Homo sapiens
aacaggtgtccgggtgcggttactcatgcctgtaatccgagcacttgtggaggccgaggcaggcggattacttgaggtcaggacttcgaaaccagcctggccaacatggtgaaatcccatctctactaaaaatacaaaattagccaggtgtggtgtcacgcacctgtagtcccagttacttgaacctgggaggcagaggttgcagtgagccgagattgcaacactgccactccagcctgggtgacagagcaagagaccctgtctcaaaaaaaaaaaaaaaaaattaaatgggtagtgacgttaagagatatatatcagcttctagtaaaagtttttttttttaaacctgctagctacatttacattatgtaaaaataaagggaataatcactgagaataaagcagttgagtatttataacaataatattttatggggcgcttataatgtttataatattgtaaaccactgtgtactctattcatttaatgctaaatgacttgaccattcttgtgggataagagatcattaaaaaaatgctagggccgggcaccatggctcacgcctgtaatcccaggactttaggaggccaaggcaggtggatgacttgagctcaggagtttgagaccagcctgggcaacatgatgaaaactccgtctctaccaaaaatcaaaaaaattagccaggtgtgatgttgtgtgcctgtagtcccagctacttgtgaggctgaggtgggaggatggtttgggccccggaggtagaggttgcagtgagctgagattgtgccactgtattccatcctgggcaacagagccagaccctgcctcaaaaaaaaaaaaaaaaaaaaaaaaggcctggcacagtggctcacgcctgtaatcccagcactttgggaggctgaggcgggcaaaacacttgaggtcagacgtttgagaccagcctggccaacatggtgaaaccccgtctctaccaaaaataaaaataaaaattatccaggcgtggtggcatgtgcctatagccccagctactca

SEQ ID NO: 87347 - DNA, 1050 bp, Homo sapiens
tcacaaactaaataaggttagagtcagtgactgcatagattgataatgctcaaggaaatgtgataccctagggatcagcattgttttaaataatgccttagtagaagagatcattttactgtaggagagagcctattttcagagagagttggcatgtcatggataaaataaggttgtatgaaccaatcattctggcatttatgtaattatcttctagtttaacttgtttcattcatggttagtttatgtcaaattactaaataactctattctgttaaataaattatataatgatataatgtgaataaattttgcattttataaaatattctaaatttacatattgattcttccaaaagttatgctattcattcacagatagtcaattctaattcattttttaagtgaaatgttgttagtggatttgcaaataggcacatgcataaaattttgaattttcacacgtaggtttcagagttggtgaagcggtataatcgagaacacttaacagtgtggggtaatgccaattatgaaattgtagaaaagtgctacaaagaggtaagcttcaaaaatgatacagaattatctatctttgttgttgttttgtatctacaaatgataagttattatagtaataattttttttctttttcttatttttagagatagggtctcaccctgtcacccaggctggagtgcagtggtgcaatcatagctcactgcagcctcaaactcctgggctcaagtgatcctcctgcctcagcctctcaagtagctgggactacaggcacacaccactgcacccagctaatttttaaatctttagtagagatgaggtctcactatattgcccactctggtatcaaactcttggactcaagcaatcctcctgccttggcctcccaaagtggtgggattacaggtgtgagccattgtgcctggcccttattacagtaataatttttaaagcatcttatttcaggccgggcgcagtggctcacgcctgtaatcccagcactttgggaggccaaggcaggtggatcataaggt

SEQ ID NO: 87348 - DNA, 1199 bp, Homo sapiens
tcctgtaaggaacaaagtggaattttaaaaaaggatctaatgatttatttaaatgatagctttaaaaggttatttctaaatgtaccaagactgtagtggataaatactgttataaaaataattttctattttaacatttcttctcatacttctcacacttctaattttcaggtgtatatttgggtattaaatgaagaacaagaatacaaaagagcttttgatttgggagcaactggggtgatgacagactatccaacaaagcttagggattttttacataacttttcagcatagaaaaagaggtacttagaagtattgaaggaaaaaatgaagacctaagaaaaaaatatttcatgatcatttccctaagccatttccagaatggtaaaaggtttaatcagtttttattacctcatttttaagcctgtatgagaatgtagaaactatatattatatgtatatttattttaaataatattgtatattttatgtttgtaaattgtttagaaagataattggttatgagatgtaagttttaatttcttaatgtgcatttttgtttctagatcttatacagaaatcttgattaataacatacacagaaatgtacatactacatcatctacagaaatcttgatcaataacctagaaactaggttatctaggttattgatcaagatttctgtagatgatgcagtgttctatcataagtaattctggaatcaaagactattggatacatttggcattgggctgagtgtggtggctcatgcctgtaatcccagcactttgggaggctgagacaggcggatcatctgaagtcaggagttaaagaccagcctggccaacatggcaaaaccccatctctaccaaaaatacaaaaattaaccatgcgtggtggtacacgtctgtcatcccagcagctcttaaggctgaggcacaagaattgcttgaacccgggaggcagaggctgtagtgagccaagatagcaccactgcactccagcctgggagacagagtgagactccgtctcaaaaaaaaaaaaaaaaaaaaaaaatgggaggccgaggcgggcggatcacgaggtcaggagatcgagaccatcctggctaacatggtgaaaccccgtctctactaaaaatacaaaaaattagctgggcgtggtggtgggcaccttagtcccagctactcgggaggct

SEQ ID NO: 87349 - DNA, 1029 bp, Homo sapiens
ggcgagtctgcggggccaggtttggggcgggggtgcggagctggaatcgccgcttcctcctccgcgtcgtccccatgggttcggactccatggggtccgggtggggctggggacgccctccgtcctctcgtgacgccgcgtttccctcggagagtcctggggacacttaggtccaggggcgccgccctgggggccttccactgtgggactgggcgccctcgaaatttctcggagcgcgtcgtctgccccgacccgggtcgaggtaaccgcagccgagttcctccctggccgcgtctcggcgcctccccggtgtccttgccaagggggtgggcgcgaggtcctgcccgacggaacgcgggagcctctgccgcgagcgcctccccggagctggcgcttaggggcggccccgacctttcgccacttccagttcaccctgcttggccgccgacctcctctggtgtctttcccggagtggtgggcttttctccggtcttgggggcgtgcgggggtgggggacacctgttcttctggacttcttgtccggaagattgctacctctgccttcagtcttagctgcgagagtttaaaaagccaggtgagcgagtgtcttgttttcctccgcttggagcggagctgcaccctcgcccgccccccagtcccgccgctgtgaaaggccccagagaactgctccgaagctttgctggggtttttgctttctggcctccttgctgatttgctgtccttgcaacttgggaggctcttgagtgagtccttgcctttggtgaatctgaaggctaacgagacagctgtcttttcctccctgcccttccttccttgttcttccttgttccaaagcattgggcaagaagggtagcggtcagcttccctgtgcctcacagagcattaaagatgcaagaagttcagtaaaccgcctcactggctctggggtgggacttgatttcacatggttattgctcccccgtgctttcctgcctctgggggccacagggcctatgaatggctgagtct

SEQ ID NO: 87350 - DNA, 1087 bp, Homo sapiens
gaatggttgtttttgtttatgaaggagcgtggtttcttgagtatccaagctggtttttattaccagctggatggatgtgaagtcccacctggttccagtgctgtaaaagaggtgtctagaaaatgatgattttcctgtgggccttgcacatcagctccttggcagctttaatagacgattttcagagaagttttagcagtggccccgtcctgagattagtagagtcagtgtagaccacagagataactttttcaatacagtaagtgatggagtggtctgtgttaggaatgacagcaataatatcaggtccccagctaagccacagaagcctacttaaaccacaatgtacctttaagtcgattagtttaggccctaacctcctaaccaccgtgagtcaacctgggggacgggaacgccattccttttggtcttgtgaataggaacaattcctgtgctttttctccctcactggtaagggtgactgtagctaatcgggattattgagtattagccatgtgctgggtgctgtgctgaatactccaattgcgttatctcatttcatccttctgtctcctgcaggaggtaggctctattgttatctcctttcaggcaatttgcccagtggtaatgtagctggtgagaagaaccaagacggaatccaggtccacccacctctagatcctgcactcttaaccgctgggcaacactgctgcccacctctctcattgggcgggcacaggtctctctgtgctctctgctctaggctcaggattctggggagagtaggatggggaaggaggacaactttcccagtataaaggccttctcacaattccacctctctcttttttctgtctcccactcccagaagtagcttgcctcctcctttctgccgccaccaccatttagtgcctccagccagggctgctttcattcttcacagatgttgggacaggctatggctacttagtcacgttcctaccctcccgtccttaaagttagcacaaggtccctttcagtctttctaagagtttttaatttgtttgttttttaaacctagaccagcagtgtaaagaataggcatgga

SEQ ID NO: 87351 - DNA, 1034 bp, Homo sapiens
tctagaggctgaactttcccttctcctttaaccactcaccttggttggctcaggagagggggtccctgaggagtcctctccctggggctgtaggtggtagcacatcttcaagcctgatgttatctagggctgcctgggaatgatgataatgtgtgtgctgggtgtctaatgaaactgctgggatgatactgaacttcccactccagaaaagcagcgagactggagtctccagtggtttctttctcattcattgggtatcttgggcatgataccaggaacagagaagtgggtcatttgatcctgtcagtgttgccttcttcatgggtggcagttggattctgcttgctttgtagggagccctgctccatcagccaatgttagtcctcttcccttgatgttacaggctgctgagaactagccctagacctctgcgtgagggttcttctgccgaagacatcaccagtgtgtggagcctgccacacccacccgctgccaaaccacggcctttacctgtgtcttccggtgtttcccgtgcgacccatcctgtgggagtgcctcgtgggctgccccagagttcaccccacactcagcagcaccaatggtgaagatgacaagatcgaagactttccaggcatatctgccctcctgccaccggacctacagctgcattcactgcagagctcacttggccaatcatgatgaactaatttccaaggtacacatttccagcaggccttccttgcctaccccggggagggcgcttagtgctcctgaagttgcagaggtttacaagctctcaagaatatttgtactccatctttgtacagggagggctgacccacgtgaccgtctcactcaactgagaaaaactctgagttggagggacagagtagtcatttaatttgttattttggaaatgaggtgtcatccttgttggaggctttgggagctggcagcttgcaagccagagaagggaggggctggggattgatgggagccttgttctcagcttgcttggtttaggttggcggacg

SEQ ID NO: 87352 - DNA, 1491 bp, Homo sapiens
atggaaatgtatagttagaaagtttttaaaaacaaatggagtctgtattgccatggtggtggaaagaatccagtaccaggctttctaccttcacagcttgctttagatccctagaggcctagttgcttgcaatcaattgtccaacttccaagcctcagtttctcactcatacaatgggtaaaataatgtttactatgtttaatgctgtcttagtccattagggctgctaaaacaaaatgccatagactagttagcttataaaccacagaagtttatttctcacagttctggaggctgggaagtccaagttcaaggcaccaccagattcagtctggtgagggcctgctttctggttcacagacagctttttcttacttaatctgacatggtagaagggaagggtctctctctgtcctctttataaggacactaatcccattcacaagagctttgccctgatgacctaatcacctcccaaaggcctgatctcctactgccattatctttggggtgaacgtttcaatctatgaatttggggaggcattcagaccatagcagatgtctctagcagccagcacctagtgtatgctcgtgatgtgctatcccagcaacagtcctgtggagtgggcatgcctcactggggagagcaggtttatttcattggattgttatgaggctcagctgagatcatggatgtgtgggtggtttgcaaattacaaacctttatgtaaatataaagtagtctgtttgcttctcttggccttactgtccaaaagaaaagaacaaaaagacaagggggtgggttggaggggattattcctgcctgacaccaactagttttagtttggctaagatggcttcactttggaacctgaggcacaagattggatatgagaaggggtaatagaaagccaagtgtgtctgtagaaaggtaacatggcattttctctgtaaaatggtaaagagggtagggggaaaaactcttgaattgatgacagaactatctagggaatgtgctgaggcatcctacaatttttttcttagggggtgttgtggtctaaatgctggagtgtttgcacacagaggtattttgagttggcatgaggaattgctcacattgttgtttcttccctaatggtacaagccctagtataaaaatatactttgcttataaaataataatagcttcaattggaacagttagtagccagccctagtgagaataatctaaacactcattttagtggacataatctattatggaaacctgggtcttcacaaagcttttgtatgaaaattttctgtctgtcatcctccctttgcctccctcctgccaaccccttgatggcattgtggagtaggccatttaggaaggataaattggattaatctatcacagacccacttcggggccctgtgacttcatgccaacacacggttgctttagtgctctgggtcctggaggaaaggagtggtagggtgctgtagagg

SEQ ID NO: 87353 - DNA, 1043 bp, Homo sapiens
gaggcagacctgtcgcacagtcacgcctgctccctgtgaaaattaatgatctgggcacacatagagttgctcaccaatttagtatcaagggagctgctgggaccaaatctggtgaatcatctttatgttttgtttttcttttgctgcagactgcaggcagctggagcacaaaatctgctcaaatgtgattctttctgtgtggttactttaaataccaaaaggaaatgttgacttgagcgatgaggcgtaccctgaaaattaactctgtggtttgcagatgcctttaaggttccaatcataagactggtttgtatattagcgtctaggctctcagcagggacactggtaatcaagcttgtgttcccagtcagaaatccaaagaaactctttttcatcagggtgttcaacctgggaagcaaggagtgggtgcaggatccctctgtttctgtttgagcagtggcactccctctggcctctggaatggtaaatctgcaccattgctagcttggctgtttgcgtttgggggctgactagaatccactgtcatacactacttgttcagttcaatatttcttgtgctttaaacaacatttaaacctagatggtagggataagatgattcctgcacttaaagagcctgtgatgtttaggaaacaagggaatgcaaggctcaccatggagggtagaagaatgttacagataaggttgtttggtgttgtaacaaacacacaagatggaaaatctatgttgctgctattagctactattgattgaacaccttcttagtttctatgtatatatagatatatatatagagagagagagagacagggtctcgctatgttgcctagactggtctcaaactcctgacctcaagcagacttcccacctcagcatcccaaagtgttgggattacaggtgagccaccacactggtcctaaagacttaccctttttttttttcttttttttttttttgagatggagtcccactccgttgcccaagctgcagtgcagtggcgtgatctctgctcactgcagcct

SEQ ID NO: 87354 - DNA, 1666 bp, Homo sapiens
ggggtaggaatcatctcgctgagtcaaggtgaagctgggaccagaccgtggtgacgctgatacctgtcatctgcccctgcttctctgctacaaaaggcatttccttggccgggtatggtggctcacacctgtaatcccagcaggcatgagggaggccaaggtgagtggatcacctgagctccggagttagagaccagcctgtccaacatggtgaaaccccatctttactaaaaatacaaaaattagccaggtgtggtggtgggtgcctgtaatcccagctacttgggaggctgaggcaggagaatcgctcgaacctgggaggcggagattgcagtgagtggagattgcgtcattgcactccagcctgggtgacagagtgagactgcctcaaaaaagaaaaaaaaaatcattttcttgtctttggtcgttcagtatctcttctctgcttctgtatttcctaggaacatgcttttgaaagcagccagaaatataaagaaggcaaatacatcattgaactagcacacatgatcaaggacaatggctgggactgattggacagcatctacccaacccagtgtccacgtgaacgccattcaaccgaacattcttcccaagcgtgagagagtgactgacacttggttccatccatttaggggccttgccatccggggcatcctcccaccctgacgccatctttctggtgaccggcctctaaatcgctgtctctctgtctctttgctttgtatctgtttgtgagttgatcctggcttctctctctgttctagttttggctgaaaacaaaacaacaaaaggaacagatccttgaccgcatggcggcagcccaccttggtaagggccccagggcccatgcgagagctgcctgatggcctcttgtcaggagagcagtggcacgggggcgtgaggaagagggaaaggggaaactctaagggtcctggcgcggggaaggggtggaagggtggaggtaggaacaaaattgcgccgctcctggagacctgataacttaggcttgaaataattgacttgtctaaaaggacaaagagaaaaaaaaaatacctcatgactgcattctctctgactagaagcttctgttcctgacaccaaatgtgccaggttagcaaatgagcacaagatgtggccctgattctagttggtggggcaagggcctggttctcctgggctgagtgggggagtgtcctggcagcagcgagtgacctgggcagtggccaggtgggtgcgatgactctgatgcctcactcagtctctgggcaatcatcatctttgcctctagccaccgtagataaggtgtgaagggactgctgtttgcaatgggcttaccatccaaatatcccaaaggctttgaccagcaaccaagtaaaatcagtaattgaggagagcagggcacaaaggggctgcagtttgggagctcctgaagaaatggctcagatattgagtcagagaaataaaaagtaggatcagttagcaattctaactgcccttccttctgacccctcataagaggagtgtggtgagggaggggactgggtaggggtcatcccaggaggaggggtttacattggaaccagttcaggttcggtgcatctttcctcttcggttttacagtggcttccgtgggatcgtcaatttc

SEQ ID NO: 87355 - DNA, 2023 bp, Homo sapiens
aggcatgaagttctatacctcagccagcagctgccttcgtttggaactgaagtccagccagcagactctctagctccatctcccctgtgccaccctaggtcatatgaccttggccaccttggagtagacccagacccctcgggacccgggacattagtctcaggctgctgatggattgatttgacatgaaccaaacacagccaaactcgatacccacaagctgtcagctgaacctgactgagtgttcttcctgagttcacgaggataggctagagtgcatttttactggtggatcagtgtgtgcgaaagagatgaccctttataaagagattttcaagtggatatatataaaagaaacagttgcttgtaaaatatacttttgtaaataatatttaattttttaaataatatatttggtgctgttttctcagatcccctgagagcactttttattttccttttaaattctatggtttcctttgcatttcttgaagtatattttaagggaaacagtgatcaccaatacatgttttcagttttttttttttttaaggtctctatcactttaatctggatcaaggctttgaagcaatgcctctctgcattttttccccagtggaacagactctgcagtacattaatcaggttgagaattgaaatattttcttgcatcagtattggctagaaaagaaaataaataaaaccaagttaatttagtagtaacaacttacagtgattcttcctgttggaagaatttccaacaaatcagaatcacgtttttagttgtgcgtgtgcgcgcacacgtgtgtaaaaagcactttcgattgtgcctcctgttttctcgagtggggacactttaactacagtttacacctcgggcgcataaagtttttcttctctttctctctggttgtttctgtttctgagtggaccaacagcagaacccacgaggatttgttttgagtatggagctgttgcgggtttgctcctttttcttgctttgcgtgctcagtttttacagactgtaaaggagatgtgttgtttgtgaagatggagcagagtcaaatctgtgcttctaactgagatgagagtgtattaatcacgtatcgcagggctccagctgttttagaagccacatcatgttaaacattaactggtttggattaaaagaacattaatattataatacacatatcttagtggtaaacagctttttttttttaaggtcagattgcctcaggtttagaaagaggctgagaaatcaaatcttgaacacaatcaacttacatattttaaaggaatctgcctcaaatgagaaaatatgctagttatctagatagaggaaagagatatttacttttttaaaaattaaaatagttatgaaatctggcagaaaaggtaaagcctagaagaaactatgaaagctattctcatgttaccaaattctatctgcgcatatgtttttgtataacatttcggtgacagtgggagtcggttccctttcccaacctgcagagactatcttccaatacagaatctgtctatttatgcttgtgtttacaaactgtatttgttgggtttgggtttttgttttctttggtggcatttttcaggtcactttgcttctataacaaaggtaattgttttcaaataatttgtcttcaccttttcctgtatttgtacatagtgattcagtattagagaaaagtgcattgtttctgtcatatttccaatctgtgttggtgctcatttgagaaaataaaagttttcaaatattaactctttgaagagctcatctgtcttcgttgacccagtgtgtttgatcttgacatttcatattaaagtatttaaaggcctatctaaatccagtcacagatctgttgactgagaccctaagggcttgtttttcccaaggacagtcagctaactaatgaataacagcaggtctcctgcttatctgcaaatgcttctcctggctttagatatcagaaatgcatgagtgacctttatccagttctgtgta

SEQ ID NO: 87356 - DNA, 1007 bp, Homo sapiens
aaaagttgtgagttactttttcagatggcagagtctgttgattatgattatgatgttcaagataccaccctcgatggcttgttaatattgccgtgttatggatcaatgacaacaggtaatttctcattagaatagaaaatttgattttttaaaaaaactttttattgaataatcgtgtttacagaaaagcagtcagatcttaagtgcttaggtaagtttcacaaaccagtctcacctttgtaacccacatccagatcatgaaacaaatcagtgagaaccagcattccttgacagtagtgatttttgcctgaagtctttttacattcacttttttgagagtcgtggatatcccccttattatcgtttagagtattgtttctcccagcaaaacaaaactattggtgagaattctttgaaatgaggacagtagtttcttgctggtattactgtaagtcaaaacctaatttgccattgccacagaatttttagaaattgtgtatatccagctatatctaagtctaaacacagtggattgttttgttttttttttgtgatggagtctcgttcttgtcatccaggctggagtgcagtggcgcaatctcagcccactgcaaccgccacctcctgggttcaagcgattctccttcctcagcctcccaagtagctgggattgcaggcgctcgccaccacacctggctaagttttgtatttttttttttttttttttagcagagatgggattttgccatgttggccaggctggtttcaaactcctgacctcaggtcatctgcctgccttggcctccagaattgctgggattacagatgtgagccaccatgcctggctgtggatcattttccttttaaagtagccatgccttagtctgcttttcaagaatgatcctgttctttggtgaattccaagagcaaatgcaaactcttgatttgacattttggttatagtaaatattgttgaatgaggtttagaatttgttttataaaacttt

SEQ ID NO: 87357 - DNA, 1089 bp, Homo sapiens
gattcaggtcccttatcttttctggatgtagtaaatagtgctatcaaatttttgggtaaatttagtaaggaaacactaagaaattttaagtctggactgacaactaatgcaaagttctttaagactgggttatttatcatttaccgaatatattttatttctttagctaagtctgattgtctgtctccggaaggctgaacctgaatctcaaagatcctgtgtgtttcttctgggtaaaatgatcacccaggtctgagaggaagtctaatttcctctgcttttcttcgttactttaaaaataatggtttcactaagggattaagggagtgctctcctgggtaaattaacctctgtaattttctgtttcctgcacaggcaaaagccattaaatagcatgtttcagaatgttgtcttgttactgctatcctactttggttccttacctgacttgttcaccatttaattggcttagaatggcatgttaagggctagttgaaattagattctgaatctgtttaaatggtctgaagctgactttcaagtttgtgtatttttgtattgaggcaaaattcacataaaattaatcatttaaaatgaaaaattaagtagtacttagtacatttacagtattgcgcaaccactgcttctgcttagttctaaaatatttcaacacctcaaaataaaaccccatacccattaagcaggtactccacattcccctcttgaccccagcccttggcaactaccagtcttactttttgtttgtacgtattttcttttttaaaaaattctttagatgtgtcagcaggaagcagtaggtattttctattctggatatttcatacaaatagaatcatataatatgtggccttctgtgtttgctttctttcacttagcataatatttttgaggttcgtccacattgtagcatgtatcagtacttcattcttttttgtggctgaataatattgcatagtgtgtgtgtgtatatatatatatatatattccattgtgtgtgtatatatgcgtgtgtatatatactacatacatatatgcaaagcaatttgttcatcccttcttccattaatg

SEQ ID NO: 87358 - DNA, 1922 bp, Homo sapiens
attccatttatagaaaaatgaaacactatgtacatatgcttatatatacatagaaattacctggaaggacacacactaaataatgaacagtactttgtcttgaggattggtttatgggtagtgtgactggggaacattgaacttttacatgatattcttttataccattacatttttttttctgtaagcatggattactcttataacaaaactaatttaaaaagtaaattacaaatactatttttaaaaggcaaatagattgggagaagtaatgttgctattcaggtaaaatctccaaagtgatatgaaaagaaaaaaaggaattgtgggagaaatagagcttcctaagagaagttaagaagagttaatatagttctaccttacttcaccccagaggatgaggcagattttaatgagtttctgaaagcaaagtgattgtaggcacttaatgcaaagtataactgaattgcctctccaattcttttagttgatccagagtaccagaaggaagcagaacagagacatcgagaattggcagctaaagctggaggatttaatgactttgcaactttagctgtcatctttgaacaatgcaaatcaaggtatgtaaggtagtcctttgtcctgaaaaatgtcaatttgatgtatagttccaatacgtacttatgatgtggcttgtgacactaacgttcagtgaagatgatattgacttcaaggtattttgaatttcagtgaaattatctatgtcagatgactattgcttagtaggcatttattatataacattgattctcttcttttctcctcaaacctttactgaaaatgaccttatagaattttgcttctatataggtagcctagattaaaaaatgattggatatttgttattgcatatataagtaaagaaatccatttacaaattattttttaatttagtcaggggcacattcattaatttaaatgtttttttcaagtttcctaaaattcttttttagtacttggacaggtctcctgaaggaactgacagttgtttatgggtttccacttttgtaatagaaatgagaattttagattgtcttttacttagagaagatattttaaagataccagttttttgttttgcagtggagctccagcttcatggtgccaaaaacactggattcattggaggtgcttattttctgcatttcgtgtggaagctcaacttcgagaactaatcaggaagcttaaacaggtgattgccgtaatgttttttttcttgagtagcattttggacctatatatttcatattgaagtttcattgatgtacattagcaccctttctattctaccacccttccattctatttgtttctatgacctccttgaccccatgaaacattcctagtagtgataaaagaattgtcttcacagaaatgaagatatttaaaaattgctttcctgatatataattgacgtgtgataacctacacatatttaatgtatacactttgatgagttttgacatttgcgtaaaacaactatcaagataatggtacatatccatcatctcccagttttctcatcctcccccccacctttttttttttttgagatggagtctcactctgtcacccaggctgaagtgcagtggcgtgatctcggctcactgcaatctccacctcccaggtttaagcaattcttctgcctcagcctcccaagtagctgggattacaggcttgcgtcaccacacccggctaatttttgtagttttagtagagatggggttttgccgtgttggccaggctggtctcaaactcctgacctcaagtgatccacctgcctcggccttccaaagtgctggaattacaggcatgagccactgcacctgtcctcattccctttcataatccattgtctcacctactaggccctcctgccc

SEQ ID NO: 87359 - DNA, 1079 bp, Homo sapiens
attttgatagatgtcctcattatggattgtgtttttttgcttctttacatcatacctgataatttttcagcggatgccaaacattgtgaatttcaccttgttgggtgctggatatttttgtgttctagttacttggaaatggtctttggtctttcttgttgggtcttgcttgcatgatttgttaggtgggatcagagcagtgctcagtgcagggctagttattcccctctactgaggcaaggcccatctgagtactcttcctaacatcacatgaattactgtagtgtagtattctcatgtggcttataggaacaggcgccattactagccctgtgaaaacaccatgcccttacttatccttttaagaggttcttttcttgggctggtagtttcctcacattcatgtgctaatcactactcagctcaacacttgaggaggaccttctgcatctctctggagttgtgtctttgtgcacttctcttctctcctgaactcttgtcctgtgaattctagccaccttggtcttcctggactcccagctttctctccctaacccagggagttctctgagttccatttgggctttacttccctgtaccttggtctgcagtctttatcaaggctgaagttggggcagttgttgggcgtactgcgtttatttcctgtctctgtcctttattgcctgatattacagtgttttggaaatcattatttcatgtattttttccatttttttggtttcaggtggaagggtaaatctggtctctcttaatctatgttggccagaaacagaggtctttagaaatgtggatttttcaaaataaaagattatttcaaattgtactatgagatttaccactctctacatattctttttatagcaaagtgatttcccaaaagagacctttgaaggccctaaacatgaagtactacgaagatgtctttgtgcgggctatttcaaaaatgtagctcgaaggtaagcaataaagacttgagagatggatcaagatataatactgtatttgactataatattggactatttaatattaaacattgaagatttgatttaagctct

SEQ ID NO: 87360 - DNA, 1099 bp, Homo sapiens
ggctaacacggtgaaaccccgtctctactaaatatacaaaaaactagctgggtgtggtggcgggcgcctgtagtcccagctactcgggaggctgaggcaggagaatggcgtgaacccaggaggcagagcttgcagtgagccgagattgcgccactgcactccagcctgggcgacagagtgagactccgtctcaaaaaaaaaaaaaaaaagaaaagaaatcttagccactaggtgttctattacagtgtaataacactgccacatgcttgaattagggtcagtttttctgactcattggccttggtgctcttaattttgtaaccatagactacattgcttttgaaagggcaaaatttaatttttctctttattgtttttactttgttaacactgaaaaatcagggcttctctttctcttaacatttctagtactgaatctcaaagctaagttttattggattaatttgtaatgttttcagatggaatatcgaaagacgtcttaaagaaaatgcaaagaagaaatgatgacaaatccatatctgatgcacgggctcgtttccttgagagaaagcagcagaggacccaggaccacagtgacacacgaaaggaaacaggctaaggtggtgaaccctccaattcaggaagtgggaaaaggagccaggaaatgtgcttctactttgccagttatttcagacagcactaccaagaggaggtggtcagcacttgttattggcctatgaactaaaagcaaatcaaagctcataaatcaaagctcatcagttcccataaatgcagttgtcaaagaaaagatttggttgccatagtcataagcaatgatacatgaaaccaatgaaagacagtacatgtaataatattttcctcagtacaattttgctggccttaactggtatcaaacgctgtcattgagatgttttcaaagaacattgagttgtatttaatcagcgtgtactccatttgcattgaagcattaaaaattatttttcttaaaatctctttaaggccttcttgttgctgttagaatagtgctatatatcaggtatgtgaccatttatttcagaaggctgaacataagaggttt

SEQ ID NO: 87361 - DNA, 2131 bp, Homo sapiens
ggtggcttttctcttgccttccctgaggcagtagggacagaaggtcactgaaagaacggaacgagggtagaatgggagaacgcatttcttagagctatgtcaatctcagagtgtgtgcggtcaaactccctaaggaaactcgcctccccttccccctttttttatttctctggggatgttgtggctcttaacccctctttggttctggaaggtaggaaagagtgatacagaggttatcttttagtcttctcgagtagtagcaggtagttttgaatatcttcttcaggatcgcatggaattgaacagagccctggggacagcacagctgctctgagacctgcagggctatttggtctgtgactggcttccctttagtaagttctagagttcttccccatggttccttatcctggaggcaacatattgttatctggcaacatgccagtggcgggcctaggcaggtgaccattggaaggcttcactgaattaaacctcttcagagcttttgattttcctgtgtcaccaatcctgttttttactgtagcttaaataatttattcctattaatttgctttcttcccaaatatccccttaaagaaacctgcctcagctcagtcgtctgaagggctaattccataatgacagggaatgcagtggtttgacatgacactgatatcagtgacctattagacactttaccattgaagaccatttttatttacatttccccattggcatagcatacataaaggattcttgttaataaaaggttttaacattcaggctataagtaacataatttcatatttctttgcaagtattaccatgtttgcactagcaaggacttattttcctttaaggcttgaaatgtaaagaataataaatttttacccataaaatgagttaaataatgcactttcctcagtcatctataattttcaaataactcatctgaagtaatggaatataccttggcaataaaaacacttttacagagggttaaaaatgttaaataacaaaatggacatttttttttgatcaatccaagtttagttgctgtggttgcttttgttaaagtggggtggcaaatgaatgtggagagttgaggggtgctgttcttaagtgtgaggggaaaacgcgggcttattttcatattaaactgcatctgaaatatctttctgcagacaaatgtttataaaccacacagagaatcaagtacagctgctctttattttccacggcagatgtgtagctcactactaaatcttgtggtggttggagtaatagcttttcatttcttttaaagaggagacaagaattgttaaatgatcccaaagattcgaacccaaccttgtcacttattaaagacaaatttaatacatgtctgttttgtaactggatcaaagtttctgcagatgcttgaatgaagccattttcttctcaaataatttgaagattttgaatataaagcgatttgcaaattgaaaaattcagtcctctgtgttttggattgctatgtcatgcctaaacttaagcttgcttagctaatatgactgtgctccagttgattaattgtggagcccaaataactacagcctctttcatgataatatatctcctaacttcatatcattatctcctccctttttaaaaattaataagcattttgtttttttgaggagacagggtttttgctggaggtcagtggcaccatcacagctcactgcagccttgacctactgggctcaagccatcctcccacctcagcatcctgagtagctgggactacagccatgagccaccacacctggctaatttttgtattttttgtagagatggagtttcatgttgcccaggctagtctcgaatgcctgggctcaagcaatcctttgccttgacctcccaaagtgctgggataataggtgtgaaccaccgagcccaactaataaggattattttaattggcatctttggtctttgacctctgagcttctaccagtttgctaagtagcagaaaactttctgaaacacgtaggataaaaactggaaacaagaaatggggaacttaagtgtgagtgtagagttaccttgtgaaactgtaaatgaacttatttttataccctttaactac

SEQ ID NO: 87362 - DNA, 1054 bp, Homo sapiens
aagattctataaaaatcctaggctacatatataaaatattgcctgtgattcttaattttttggtgattttcaattttctggcacattaagtatctttaggccacttgacacattccattgtattcctagattctttgggtcttcaattaaaaatctccctaccctgttctttcccctttgatccatagatgcaggcatggaatgtgttgttgagtcaaatgttaggggttcttgctatagttagttcggattgtgaatagaaagcaatgctaagtactgggatttactacatgcttagttgtactctctggaagaggtagacttcctggaattatgcggcagtctcctgggaatagcttctaagtttaaaatgtatcatattcttcagaattttcttgatggtcagtttacccagcttaaagtgtgtggttaattttagtgaaagtgctttcactctgattaggaaataagacacagaatggtgtgtatgtagaacacaatcattttcatttgagtatttaggaaaattcacatttcaggaaccatggtagttgctcttgaacaattgtttctgaccataattggaatttgtaccttgcttttaaaagattccatttatatcgaatcctcagcttctttgcaaaattgttttttccatacatatgtttatatgttattcaaattatatttaacaaggtgttttccctgtcattgttaccgttgtggctttttctctttgagttattgtccagtagaactttcttcaatgatggaactgtctaccagctacatagggatattgagcacttgaaatgtggctgatgtgactgaaaaactaaatttttgctttaatttctttttaatttaaatgtaaatagccacatgtgacaattgactcctacattggactgcacaattataggccatgctgatgtgttttgtaagtttgaagatttatctcaccactcatgtttatgtatttagaatatttcgttagctaaaattaaaacactcattgttcaaaagttttaactgaatactgtctgtcttggaa

SEQ ID NO: 87363 - DNA, 1140 bp, Homo sapiens
gccaagaaatagaagcttgaactcaacgaaggcagttgtgcatgaaagggataggaaatgaaggtgacaatggaatatatttgctcattttgagtagcatcatggtagaaaggaaaatggttacagacttgtagggttgtgctttggaggcagactgccagtactgttaatacttcttgttcctaatccttaggtaaataaggattttcttcaagttctgaagtaagacggttttaaagattattgctgaaagaataggaaccagatccattaaagccatattttgtcacattaaaaaactctgcagtgtgctattctggaaaatgtctcagatgtttaatctgggcttatctattgattatgtcaggttttcaacttgtctcaacttcctcatttattaaaacaatatttcctggcaattttaaagttagactacagtatgtttttgtatttgtagtataatatttagccccttaaccccttacaggcactcgaatattagttcttcccctccaccctggaagagtttccctttgtccacttgagttgaatatatgtgccgtactaaaggagaaaaactaccatctacccagttattgaagccaagatcttgaagttacaccagactctctaatttctcattttctgcatccgtcgatttctggagttcctcagtgatgcacactgggggtctcagggatgacagtttttcatgaccctaggttgaaactgggagtcatagaagacgaaaaaacgagaattggattgggagttgactctgttgcccaggctggagtacggtggtgcaatcttggttcactgcaacttccgcctcccaggttcaagcaattctcctgcctcagcctcctgagtagctgggactacaggggcccgccaccaggcctggcgaattttttttgtatttttagtagagatggggtttcaccatgttggccaggctggtctcaaactcctgacctcaaataatctaccctcctcagcttcccaaagtgctgggattacaggcgtgagccatcgtgcctggccaacttgcatttatttctgattagctgctcatctgagaaaggtggcttaaaaaaaaccaccaaagtggacagactgaagctaaagactgtcagt

SEQ ID NO: 87364 - DNA, 1049 bp, Homo sapiens
taaaatgtagccttgtagtcttatgttatatcttattcagagcctggcctggttatgtttaagcactattagcagaagagtttcagaagagaatttaaataaaatacagttaacttggctggtttagtccataagataatagtgacagtggtggtgtttgtggaggaaaactgtattgctagaggacaagggtgacagaaagacttgatttttttttttccatgctttttcttttctggggtgtgtgtgtgtgtgtgtgtgtgtgtgtgtgtgtgtattttgtaccatgcgaatttattatattacctttggaggaaagggggataaaactagtctggccaaggctaataaaataaagcctccatgtagcttcttttagtaggacttaatctgttacaacatagttagtcacccagagtattaataacccactatggtagagatttcttcctagtaacaagtgacttttgttcttacatacttaattggtttgcaaagacctaccatctttagatccactatatttgtttagcagatactttagtattttctgagtacacaaagcaaatctaattccattattttccttgttaaaatccttaagtagctcccttcgcctgtagaataaactcaggattcttactgaggtatgtttagcttgttggtctggcccttgctcatttctctaaccttaattgtgtactccctcaatcctatagtgttacaaaagtacttgtagttcccttagccaaccacacttttacgtctctgtgctttaccacatgctctttctgttgagaattctctcgcctgcctcctttgaacacattgctttagctgtgtagcctttgacaagatccctcttacatatctttgttttggcactttttgcacagaattagaacttgtttgctcttgctattcaagttcctttatttagatcaagaattctgtgacattttagatctttttatgcttgtaacttaatttttcagcttcttgaagcgtgaacaaataactgctacatgttaaggggggtgagagaggac

SEQ ID NO: 87365 - DNA, 2082 bp, Homo sapiens
ttgaaaagattttcggagcattgtacaataacatcatagatttgtccctatatgtctgcactatggagtcaagctgtcatcccttgtccccctccccaagaccaccccacttatgtatatattccaacccctaataatctgggagttgaggaaggcagcaaaggaaagtaagtcattccaaaatactgcttccctctgaagccagttttgaaccccttggcttctttttataaacaggactgtaactctcacaatttttcaagtctggttgtggtttacatactgtgtgggatgggaataacattcttcattttatgaaagaaatttttgcacatgtgttacggagggttgtagtacaaagctgtatgttttgccccccttctttgtccccccagcacccgaatcttaaaattttggtccttcaggagccagattctctgtgtctcaggaatggtgtttttcttagtctttaaagactaatcttgatagcctagtgatagttgtaggctttggcctctattaatttataccaaatcacattttgaactgatggatttcaaactacaagtacaagcctttgcatctgactcagtggactcttaacactcaaggcaaatttcatccttttttaactaaatgcttgctttcttaattggatgaagcttgcactttgttcttatctccagtatattaacagcatctgaaactatcctcttcctttgtctccctctcctttcctccagcacctctaccttccctttgttatcttaagccggttaaatgtagcaggcacttctcttacgtgctagtggcaacaagacagaattgaagcagatcctctttttaaaaagcagtttccacaagatttatttagatgagagatgactgcctttaaaaaaatacattttctttcccccatgtgtttgttatcagagttgctttgtcttgtgtacatgcaactaagtttatgtgtaaagtaaacatacttaattacaagtatgaaggtgacagctttgttttcaattattgttaagaaaactattcattaggcttattttcagttgggatttagaattccatggaagtcatactatctgtttaaagtgtgtttattagaggtaatgtagtttttgcttaaaacgtagatgtagattgtttgcttagtcttagctgttacctctttaatggttgctgctgtatcgatgcaactcgtctcgtaatagaactatttttgtttggaagtgacagagctagtctaggtaggtattcattctaaactttactcttttaatgatttataattcttgattttgtttttagctgggaaaactcttcagatttttaacattgaaatgaaaagtaaaatgaaggctcataccatgactgatgatgtcaccttttggaaatggatctctttgaatacggttgctcttgttacggataatgcagtttatcactggagtatggaaggagagtctcagccagtgaaaatgtttgatcgccattctagccttgcagggtgccagattatcaattaccgtacagatgcaaaacaaaagtggttacttctgactggtatatctgcacaggtaacattttaactatttttttatgaagaagaggtttagaacacggttgtgcccagaatgcagtttgattttgaaattaggtctttctatactcaatcctgttgaatttcacttattttggaagactttttttttccttcctcccatcccttctcttctccttcctccctcccttctcttcttcctcgctcccttgctatactgacatataatttcagaatgctcttaccaagcgtttttagctcttctgtggagattgagtagaaattgagtttctgtaagaatgatttgggatttattatggagtatttactgcagaatgaatgcttctatacctttttgtttaagacgtatatgaggcatattttaaacatttatgttaggctttaacaagataatgtttggggctgattttaagttaagaagtatcaaatctacagtgagagatgaagtgacaaataattataaatcctgctaaagatgacaaagcatt

SEQ ID NO: 87366 - DNA, 1040 bp, Homo sapiens
gtacatctagagagtttgatttagtaggtgttgcctataattttttttgtttatttgttgctttttgagacagggtgtcactctgttgcccaggctggagtgcagtggcgcagtcatgggctcactgcagcctcgaccttctgggctcaagtgatccctctgtctcagcctcccgagtagctgggactacaggcatgtgccaccatgcctggctaaattttgtatttttgtagagacagggtctcactatactgcccaggctggtctcaaacctctgggtccaagtgatcctcccgccttggtctcccaatataatctgcattttaaataccttatatggcttgatatagaggcaatgtagactacaggtgaataacactgacttaagttagaggttttcaaccatgactacacattggaatcgcctggacagattgtagtactttgtatattagacttagttgcaggtaatagaaacaaggtctggttgattagagcaatggtctgtttagtgaaggatattggatagtttacaacagctggggaggctgtaaaaccaagactgggaaatgaggagaaataatggaaaatgagcagtggtcagggtcccagccaacaactattccacagaactctgaggacacttctggatccatgattgcatttctggatgcttggaaattcgatttgactactatttccactaccagagtagcatctctgaaatcctaatacttttgtgttcctagctccctgttcaaagtctagttttaggcaagatcagatgcccacatcttatgtctgagaggtttggaaataattatttggtgtttggtgctcctaaaacagaaggctggttctaccaccaacaaaacttgtaaagagtatcttccctcttgttgtcccatcaggaagagggtttagattctaggcagaccaaaaaatttgaacttcacttttgttaggacatgtgtctctctctttgtaagtaagcagtttttaaaaattgagatagagattgcttaagatatcatctgtag

SEQ ID NO: 87367 - DNA, 1103 bp, Homo sapiens
tcaacatgacagatacaataatgaaaaggtttgaaatattgtgagaattaatgaaaacgtgacacagagacactgaagagagcacatgctgttggaaaatagtgccaataggcttgctcgatgcagggttgccataaaccttccattcgtaaagattcatctgcactgcaaagtgcagtaaaatgaggtatccctgtaatacgtaaactgtgctatctaagttttgaattgtctttcctcttatcagtttcatgttatataagagcttgggatatccatatttaaatgtgctgtagaaatgaaggaaactttaaatattagcttataatttttcaaataaccctcttgttctggaattttaccatctctaaaatggaattagactgaatgtttttattttctgtttgtagattcattattttactaaagtgttgattttctttctgtagatcagtgaaaagcatgatgtggtgttcttgataaccaagtatggttatatccacctctatgatcttgagactggtacctgcatctacatgaatagaatcagtggagaaacaatttttgttactgcacctcatgaagccacagctggaataattggagtaaacagaaagggacaagtaaggaaaccttgaaacttaagcaataaaataagataacctgatgagttgggaacaatcctgtccttttgagaaattactccccaagattaaaaaatagaaaataaacatattactgttagtttttttccaaaaagtaaatagtaactttggatattagaaaataatatatatcaaagcacgatgtaagctgataaaaaagaaaataatatatacctaaaaatagagatgtgtatgaatacaaagtctctctttaatcctgtctcagagaaactggtttatagccatctaggactgtatagatgcattactgtcaaaagaagtgattccccatgcaaagaaacaatttagggtcatatttgacagactatttttttaaggaattttctgttatctccaaggcagagcaattatcaactacagggaaaagaattctacctacatcccttttcctagctccttaattaagcattactatta

SEQ ID NO: 87368 - DNA, 1134 bp, Homo sapiens
aaatcctaaaattaaaaggagtataccttaaacaacttgcaagtgaaccctaaatgtcatttagatatcatagcttcttcagtgtcattttctgtaggttatcaagattgaagtcctcaagaagttttaaattatgtggagttgtctttcagagctcaattaagtgggaatgttaatttttgatactgactgtgttaagaatgaatagatggtatcaaagcagttagtttggacaatgaagtaagttatttagattatagaatagccatattttaggaaccacataatggcctaacaccctatgacatttgttttcaaatctccttaattttttttctccttgtcttccttcctttcattattttttaatggcagcaagaaaacagctgtcacaatttcattacctttgtgactcagtattaacctgttctaaacagatttggtatcatttgtatccaaatgaacacattgcagctacattttattctttaaattgcaggttctgtcagtgtgtgtggaagaagaaaacataattccttacatcaccaatgttctacaaaatcctgatttggctctgagaatggctgtacgtaataacttagccggtgctgaagaactctttgcccggaaatttaatgctctttttgcccagggaaattactcggaggcagcaaaggtggctgctaatgcaccaaaggtaaagagttatgaaaatgaagttgtcatgacattaatccattgttaatattctgtttcttatattactagaaaaggaaccagcttcctacagataaactgtttttagattacatttgggttacattttcctttagtagaattccttgtcaatgcctctagatttggttaattttctctggatttgattagttttttaaaacccagattgttagaaggatatgtgggtctagcaagcttttgatttacatagatgtagtaatgtttagtcatttaggtgttatactgtttgacctcataaatgatagttactgattttatttccataacttggacatgaaatacatactgtccaattttatagtgggtagagctgtcaaaattaggctgaatttattcttatcacttttgatgttagtttatggtggactgaattaa

SEQ ID NO: 87369 - DNA, 1105 bp, Homo sapiens
ctgaccaatattcattatgaaatttgtacttaatttaatatgaacttgggataatacttagctataactgttttatgattataactattctcttacacactgacattgtaatttaagttgatgtatttttgattctggataatttttttttttttccaaattctggataatcttataacattgaaccaggggtatgaaagacagtgactaaatatttactccagatggtaaagatttgaaacttcctaacttgatgttaatagatggattcattcctttaagattgacctaagagattgatctctacagggtgtttagtgtgatgtttggatcactttcgaagagcgtttaacatttctccttcttacactttcgaagagcgtttaacatttctccttcttaaagggaattcttcgtactccagacactatccgtcggttccagagtgtcccagcccagccaggtcaaacttctcctctacttcagtactttggtatccttttggaccagggacagctcaacaaatacgaatccttagagctttgtaggcctgtacttcagcaagggcgaaaacagcttttggagaaatggttaaaagaagataaggtacgttaaattatgttgacataatcttgctttggttgcattaaatatgatattggcaagttaaaatcatttaggctgcaccacaatgtctccattactgctggtagaaacagaacaaaaacacacattgcataagatggattcacttatttccttttgaaaaaatatatattttttcgccgggcatggtggctcaggcctgtaatcccagcactttgggaggccatggtgggtggatcacctgaggtcaggagtttgagaccagcctgaccaacatggagaaaccccgtctctactaaaaatacaaaaatcagctgggcgtggtggcaggtgcctgtaatcccagctacttgggaggctgaggcaggagaatcacttgaacccgggaggtagaggttgcagtgagttgagattgcatcactgcactccagcctgggtgatagaacgagactcggtcttaaaaaaaaaaaaaaagttggatcttagtaagacaggatgg

SEQ ID NO: 87370 - DNA, 2032 bp, Homo sapiens
caagtcaagaagatagtggtgcttagatccctcagacatatataggttacactgtgagtttaataactgtccttatggtaaacctcatctggctccttcattatcaaattttcagttgataacattacattaaaagttgctttttgtttttgaaaaattggggccatgtgatgtgagtctgatatctgaatattcttagtagctagaagtacaagaggtacaagattgtactttgaagtacttaaatccttaacaaggtagttgatagtatctataagattgcagtcttggtgagctttttatcgttaaacaggatttgtggagaattctactgagacattgctgtgaacacaagattaagagtctaccaaccacaacccctgcatatttataatatattctgtgaaactaagtacctttcatactagttattacttatagtggacatagtgtcaactgctcatttctaaaacagttcatggatcactaaacaatctctttttcctttggacagctggaatgttctgaagaactgggtgatcttgtgaaatctgtggaccctacattggcacttagtgtgtacctaagggctaacgtcccaaataaagtcattcagtgctttgcagaaacaggtcaagtccaaaagattgttttatatgctaaaaaagtgagttcaatgaaacacattctcagcatgaattcattgaagcattgacagagaaattagcctgtattaactcttgattactttaatagtgaatttcctttcattttgatttactttgaaatgtataaaaattctcttacccctcatatcaaattcatacttgttaaattgagaaaattacttttgcatggcttatcagaatttcagatagcaggcacgtttaacatgttagaacaaacttttgaaatattcatttattgaaaatggataagccaggccaggtgtggtggcttgcgcctgtaatcccagcactttgggaggccaaggcaggcagatcacttgaactcaggaatttgagaccagcctgggtaacatggtgaaaccttgtctttactaaaaatacaaaaaagtagccaggcgtggtggtgtgtctgtggtcttagctactcaggaggccaaggtaggaggatcacttgagcccagggggcagaggtttcagtgaatcgagattgcacctctgcactccagcttggatgacaaagcaagaccctgtctcaaaaaaaaaaaaaaaaagaaaagaaaagaaaagaaaatggataagccagttataaaaattgacagatgtttgttcaaatatgtcatcaccaaggtctaactgggcaccttaaattgaaaatgaatttgtgctttcaccagtagttctatattagtgagattttatagtagaaaaagtctttaaatgctataaaattgaaacttaggagcagcgtttaagtctttgtttgtttataggttggatacactccagattggatatttctgctgagaaatgtaatgcgaatcagtccagatcagggacagcagtttgcccaaatgttagttcaagatgaagagcctcttgctgacatcacacaggtaatgtgattaaaatatattttgtagaagctgattgaaatggagagtgggggccagccatggtggttgacttgggagtccaaggtgggagtattgcttgaggccaagaattcaagaccagtctgggcaacattgtgagaccctgtaactacaaaaaatttaaaaatcagctgcatgtggtggcacatgcctgtcgccccagctactcgggtggctgaagtggagggatagcttgagcctgggaggtcgaggctgcagtgagctatgatcgtgccattggactccaacctgggcaacagagtgagactctcaaaaagaaaaaaaaaaaaggaaaacttacagtttgtagaaattaaagctttgtcactctatatggataaacctcaaatgccttgcaaaaaaagcaagttgcaaaagaatggacagtatgaaaccatctgcatgtagttt

SEQ ID NO: 87371 - DNA, 2364 bp, Homo sapiens
gtcaggagtttgagaccagcctagccaatatagcgaaaccctgtctctactaaaaataacaaaaaattagctaggtgtggtggcagacgcctgtaatcccagctactcaggagctgaggcaggagaatcgcttgaacccgggaggtggaggttgcagtgagctgagatcgtgccattgcactccagcctgggcaataagagcgaaactctgcctcaaaaaaataaaataaataaataaaataaaataaaggtctgtcggttcagttgtattctgctgttatgtaatatcttgaaatattttgtagttgtttttatcagaactcaaaataactatgatccctagaggacaaaaatttgttcttaagtgtttatattgtccaaataaaattctcaggtaaagaaagagttcatgcataattttgtctacatactctccatagtatcttaaaacaatttcttttaaatctttttttgtagattgtagatgtctttatggaatacaatctaattcagcagtgtactgcattcttgcttgatgctctgaagaataatcgcccatctgaaggtcctttacagacgcggttacttgagatgaaccttatgcatgcgcctcaagtatgtgttttaatgctttttaggcatgtttccaacattgttttagtaattgtgcagcgcctctcagattgttatgcaaagctactgaggggcctactccttattaaagaaaatgtagctattataatattcttttgtactttaacagttcactattaaaccttaatctgtaatacggatattgaattactcatgtaagtggagtggacaataaacttgccttgtttgtggttttacaggttgcagatgctattctaggcaatcagatgttcacacattatgaccgggctcatattgctcaactgtgtgaaaaggctggcctactgcagcgtgcattagaacatttcactgatttatatgatataaaacgtgcagtggttcacacccatcttcttaaccctgaggtatttcagtttcttacctaatagatggtgttagttgtgattaataggtacactgaaaatgtgtttgtggtactaaatattaataatttcataccaccatgaggttcaacattatttcatttattcattcattcatttattttgtcttgtagtggttagtcaactactttggttccttatcagtagaagactccctagaatgtctcagagccatgctgtctgccaacatccgtcagaatctgcagatttgtgttcaggtggcttctaaatatcatgaacaactgtcaactcagtctctgattgaactttttgaatctttcaagagttttgaaggtaattaggagtttttgagtttttaaaaaaagtacttaaggtagccaagaagaggtatgcttatgatcaggctgttggaaattttgtttttctaaaaatttggttctatgggacattttaattttttaagttttattcaatatatgtcaaggcccttttatgttggattctaaggatatgcagtgaaccagaccatctgtttggatattttatagatgaattaaaggtagaattttaagagaaaaatatgtagtggtgttgaaattgtataaaatgaaaatacaggttgagtgtccctaatctgaaaatccaaaatgcaccaaagtccaaaacttcttgagcaccaacataacgctcaaaggaaatgcttgttggagcatttcagaaatcggattttcagattagggatgctgatcaggtaattataatgcgaatattccaaagttcaaaatctgaaacacgtctggtctcaagtattttggataagggatactcagtctgtactaatgatcaggtataataaaattttatgcttatatgtctgactcttataatagcaggtgattctcactaagggcattttgtgatttgttgctatttagcaggatttcttaaccttagtactatagacatttagggctggataatcattgtagaggggtgttcctgtacatgtagaatatttagtagaatattcagcagcattcctggtttctacccactagattccagtagcgtcagctccaccagttgtgacaaccaaaaatgtcttcagacattgccagtgtcacctgtgaggaaaatcacctcagttgagaaccactgctatacagggtactaacgtaatcactgttgggtgtctaacttctggtccccaactgcctttctctcctctctgtactagtagtactctattgagaaggggtaagagagtctagtagttttcttaattttttcttaattttcccagtttcaaaatgttaactgtgcactaaatttacactgtttagta

SEQ ID NO: 87372 - DNA, 1026 bp, Homo sapiens
ttagtggctattatattggaaggcaaagataagattttcatcattgcagaaagttcttctggacaatactgcactaaattcttcccaaattattttgtatgtttcctataaattgcatattgaaaaacaccaggtattggggtcttcatttaaaatttcccatataggggcacaatggtgtatgcctttaataatcccagtgctttgggaggccaagtgcttggggccacaaattcaagaccagcctggctagcatagcaagacaccatctctacaaaaattttcttaaaaattagcctggcatggtggcatgcatctgtagttctagctacttaggaggttgaggtgggaggattgcttgagcccaggagtttgaggctgcagtgagctatgatcgtgccactgcactccagcctgggtgacagagacctgcctcaataaaaaagaaaaaaaggaaacattgggttgaattgtctattcttcaggattaaagtgcaatccattttactgatctgattaatggaatagttagtatttttatcgcgctttttaagcaaccaacttatatttgggagtattcaatataacagttttttaattacataaatgtttttcagtcattctcaaaagtgtgcctatgcttaattgtaattacttgtttctttaaggtctcttttattttctgggatccattgttaactttagccaggacccagatgtgcactttaaatatattcaggcagcttgcaagactgggcaaatcaaagaagtagaaagaatctgtagagaaagcaactgctacgatcctgagcgagtcaagaattttcttaaggtaagtggttttgagtaatgtgttttctggttggattccaggttagcagttctacaagggtttggtcatagttcaaaaatattttttccctaaatgtgaagttgttagcattcttaagttgtgtgctggattatttcttccaaacataatattctgtggtttcctttgaaatacggaaggaaattggtgagtaa

SEQ ID NO: 87373 - DNA, 1109 bp, Homo sapiens
aaattttaacacctatgcatgaaaacagaataagtaatcctagattatctgtaagtgataaagataacaaaaatattttatatgtgtataggtaagatgactagtgtgttgatccatacttttttgatgttcatttagtaggaaaaacatgacatactaaaatttttacatagatagatgcagacagattctagaaatgatcgtaacagctattagtgcagagtttccatggtgttaaacaatacttattttagaaaaccttccttaatgtggaaaatctgcagctttacagacatttttattttttaatttaggatggctatattaaaattaagatttaccttggtgttcttgggacacttcatagactagtcttcgtattatttataatcgagtaactaatatcccctagtctcaggagccatttaattctaaccttgaaaataatgttcttagtggccatcactggggaaagttctaccctacttagttctgcttccctagtagactgtgttagaggaatcatttattgaggaatgtttcactgtgtataaatgaattcctgatggaaactgttgttttttgtgctctaccttatgtctgtggaatgtaacaggacatgtatcaggtaaatgcccagtacaggttttacttacctgtctataacatcttctatgtcagtctataagtaggattgtagtttggtatctgtaatggaatgataaaagcagttggcaatttaaagatatcttttctttaaatgctgggtttttttttttgtagggggtgggttttcttatggccacatgtggtcaccatcatgctgctccttgtaggctttgttataatagagtattagaggctggttgtatagattggatgtggggagggatagaaaatcattagtttgaaacaaatgtaagccatttatgccatatgtttgacaatgtgactatagttattaagttgattttaaatacggtagaagtgttattaccagtgaaagtcccagtatggtgaatttatcatctgagagccactggctcaggtatcttaatttgttactcttgttttttggtaaagggtgtgtatgggaaagacttggtatc

SEQ ID NO: 87374 - DNA, 1017 bp, Homo sapiens
tcaaaccatcttaaatacagatattagataattcaccttctaactgtagaaacaggcagtattgctataatgggagcctttttattagacagtcttgcatagtcatctttgactgtatcttctttggacttatttatcatatggaacaatgtttcggtaactaaccaaaccggtagagacagaatatagtatatgtgctttcaatacttattaaaccatgaagtcttgtttttagctggacttcctgctaaattcctctatctagttgcaaatttagaccctcagtttattactgaatttaaaaactgaacttaaagaaaaaaaaactgagcttaaaagcgatagagataaatgcttttttaaaattcctctttgcttttaataacataataacattcttctacttctttttaaccacaggtgaatccaagtcgacttcctgtagttattggaggattacttgatgttgactgttctgaagatgtcataaaaaacttgattcttgttgtaagaggtcaattctctactgatgagcttgttgctgaggttgaaaaaagaaacaggtgtagtaccattttaacagggataagttactctttcttaacatggcaatagataaaaatataggtagtcatttgttccaaagctactaaataacacatggagaataatttcctgaagacacctaacatagaggtgataagctagctaatagcactgggaaaaaatctgttttctgaaacattatagctgtcataggagatctgttaacttggttgatcatttttttggcatgtttataattacagctatgtggtttgactttatatgtttttatataaactatgtactaagtctcctgtttaggtgtgatacctgtgtatttaacaactaattctgtactgatcaatcatgtggtgtttccaacctgagaaagctgattaaaaaaaacagtgtggtgtttaagtgtgaggcaaaagagttccctgtgcaactcttgagttcaattgatattta

SEQ ID NO: 87375 - DNA, 1094 bp, Homo sapiens
ggagagtgaaaaatagccttatataccttctttttattcttggacaactcaatcatattttgagtcttaatttcccaatttataataggatcactgataattaaaattaatgtaaagccaggtacagtggcttgcacctatagtaccagctactcgggaggctgaggtactaggatcacttgagcccaaggctgtagtgcacaatgattgtggctgtgaatagccactgcacttcagcctggacaatgtagcaatactcggggggcggggaaaaagtatgtgaaagcacattatagaccataaggtatttacatagttagcatgtcaagagtgtgttatttataatacagtatgtgtgtgtgaggtttttttccttttttcctagattgaaactgcttctgccttggctagaggccagaattcatgagggctgtgaggagcctgctactcacaatgccttagccaaaatctacatagacagtaataacaacccggagagatttcttcgtgaaaatccctactatgacagtcgcgttgttggaaagtattgtgagaagagagatccacatctggcctgtgttgcttatgaacgtggccaatgtgatctggaacttattaatgtgagtactgctagctgaatatgtagagaagctgcatttttaaaaacctgttacatgagagtttcagggtaattttaggtaatatgggacatttggggacggtgggtgcttttttaaaactttatttggaaataattgtgaatctgaaagtggccaaatagtggataaagtctatataccctttattctgattgacttgctaatgttttaaccccactagccttaccatttgtgttctcacactcttacactcaggcacaccattcatacatatgtgtatacacacacatactattttttaaccacgtgggaataacttgaatgcatcatggccttataccccttccgagtgtatggcctaagaataaggatgttctctttcattaaccacatgaaagataccagcttcagtcagtttgacattgataggatacctttaaaaatctgttctattctagttttgtcagttaccca

SEQ ID NO: 87376 - DNA, 3945 bp, Homo sapiens
gtggaggttgcagtaagccgagatcacgccattgcactccagcctgggtgataagagcaagactgtctcaaaaaaacaaaaagaaaaaagaaaaagaaaatacatcccaaaagacctgacttaattatataaaactctcttggttcatcatagtttaaaaggaaaataacaaactaaacattaaagattgctattattaacacttaagtggctaaattgattggaaacttcaagataataagtcagaaaaatataaggataagagaaaatacaaaagaccaagtgcatcagtgttatatcttactaataagaagtatagaactgcaaatgagatggggttttatacctaaataaaatagacaacatattttaaaagttctaaaaatagaagagttgttataatgagtcttaaattctcctgagataagtataaataaaatattttggaaacgaataggttgaaggctattaatatttcattcctttcctaggaagcacttctaagcaacattcccaagtagttacaaagcttcctaggggaaggttgtgggggtgggggcgatggttggaaatcattgcagcatctagaaaaccaagcaaatagccaaaaccagacgaattaccgatattttaattccacatctgtgtagctgaattttgaattatgtgtagccattaaagtgataatgatgattgctagcctggataatgttttaatcagggaaaagatagaaattatataattagagtaatttttcaacacaattatacatattgtatagatttgtgtagaaagacctctctatgtaaatttaaaggtctttttcctacttcattcttttctgcctatttcaagttttctaatgagaggccaacttacgcttttttaaaaccaacttgattctcagtacttatgtcccatatatcctctgtaggttgtacaaacagctttgtctgagactcaggaccctgaagaagtgtcagtaactgtaaaggctttcatgactgcagaccttcctaatgaactcattgaactgctggagaaaattgtccttgataactctgtattcagtgaacacaggtatgctttcagagggatccattggctatttatagtcagtctttaataaattatggcccatcagttttgggaaggaacaaaaagatcagagaaagttgcctgaattctcactcttctaatatcctcccccctaccctacctcttgagacaaaaacctctccgttagtcacagtggttattttttatgtcggataaacttaaaatattgcatttaaaatattcttttttttcttaaaggaatctgcaaaacctccttatcctcactgcaattaaggctgaccgtacacgtgttatggagtatattaaccgcctggataattatgatgccccagatattgccaatatcgccatcagcaatgagctgtttgaagaagcatttgccattttccggaaatttgatgtcaatacttcagcagttcaggtaaatcttcagattacctaagttgaattactaaacactgtgctatgagggtgggcctaattggttgctacggcaatagagcagcaataaaatactaacagcttaaatgtaattgctttgggtaggattgattttactctaaccctaatttcaaacttggatacttaggtcttaattgagcatattggaaacttggatcgggcatatgagtttgctgaacgttgcaatgaacctgcggtctggagtcaacttgcaaaagcccagttgcagaaaggaatggtgaaagaagccattgattcttatatcaaagcagatgatccttcctcctacatggaagttgttcaggctgccaatactagtggtatgacttcttaccttatgtattgaaacctcataaaatgattaagctaagcattaagatatctgtctattctgaattttagaagagttggatactgcatggtttcttttagtgctccatcttagtccagataaaaagaggctgtattttgtgaatttgtaagttcacaaaacttacaagtggggaagatgaatcttctgtttttgaagtctcataaaatcctgatagtgctctaatcttaaaactttaaggaaaaagaattcatctattcatttggtccgtgataatacagaagtgaaatattgcacggtttacatttgtcattatccatgtttccttgaaaaggaaatgaatgcaattttcatttacttgggtgaaagataaactaggatgttagtgtttggatatattttttctttttctatacttaggaaactgggaagaactggtgaagtacttgcagatggcccgtaagaaggctcgagagtcctatgtggagacagaactgatattcgcactggctaaaacaaaccgccttgcagagttagaagaatttatcaatggaccaaataatgctcatatccaacaagtgggtttccttttcagatttaagaaaaactagttgggctacttgattagcttggtaggatcaaaacatcataactgaagaattccaaggaaaaatctataggaaaacaaattctttctcattgtgaagatatcaatttgaaaagaggattaagctcacactaatatcttgctgaatgtgggttacctttttttttccaggttggtgaccgttgttatgatgaaaaaatgtatgatgctgctaagttgttgtacaataatgtttccaattttggacgtttggcatctaccctggttcacctgggtgaatatcaggcagctgttgatggggctaggaaagctaacagtactcgaacatggaaagaggtaatctaaacccaagtttgagtgaagaattaaagaaacgctatttaaacattagtttaaataactagccatgttttacatttgagttcacagaaaggaaatgtttattctaggtctgcttcgcctgtgtagatgggaaagaattccgtcttgctcagatgtgtggacttcatattgttgtacatgcagatgaattagaagaacttatcaactactatcaggtattaacgagacttttatatgacctgagatcttttaccatagatattcttatctttaactgcacatttctcttgttcaggatcgtggctattttgaagagctgatcaccatgttggaagcagcactgggacttgagcgagctcacatgggaatgtttactgaattagctattctatactctaaatttaagcctcagaaaatgagggagcacctggagctgttctggtctagagtgaatattcccaaggtaaccagtcattgtaacacagtgaagcaactgtgtagttaaaactaatgcttcaaaatatcttattctttttaaggctgttagctagactcatatctaaagcaattaagtctttcttatgcaggtgctaagagctgcagaacaagctcatctttgggcagaactggtgtttttgtatgacaagtatgaagaatatgataatgccataattaccatgatgaatcatccaactgatgcctggaaagaagggcaattcaaagatatcattaccaaggtgtgtactttcttcagaagataaaggattcagaaggagaaagctcattaggaagtaactgacttatgtatggattttcccattgtaggttgccaatgtggaactatactacagagcaatacagttctacttagaattcaagcctctgttgttaaatgatttgctgatggtgctgtctccacggttggatcacactcgtgcagtcaattatttcagcaaggtaaagtaataattttaaaccaaagcttcatagcaaggaattaggacatacttcgataacttttgtccctgggacttcaataatgtgctatatttgtaacaaactctttattttaaaggttaaacagctaccactggtgaaaccgtatttgcgttcagttcagaa

SEQ ID NO: 87377 - DNA, 2760 bp, Homo sapiens
aaaacatgaactcattgagttcaggagaattgctgcttatctcttcaaaggcaacaatcgctggaaacagagtgtagagctgtgcaagaaagacagcctttacaaggttgataaagttgcggggcaggggctgttttaaaccaggcctaaaatggtgttacaagtgattataatctataaataaaagtattggttttgtgaatatgagagctgactttaaggcaatttaagttaatggatttcttgattctaggggctctcttatgttaaggtcaaacttgtctggggaaaaaaaagcttttagcttatctcttctttgaaaattttaatttaaatgatacaactaggaggcttttttccccttgcaaaaccagatttatattggaaagtttccattgtttttcttggtttactagttcagtatgtggggtctaatgtttttgactttcactatttctttgaataggatgcaatgcagtatgcttctgaatctaaagatactgaattggctgaagaactcctgcagtggtttttgcaggaagaaaaaagagagtgctttggagcttgtctgtttacctgttacgatcttttaaggccagatgtcgtcctagaaactgcatggaggcacaatatcatggattttgccatgccctatttcatccaggtcatgaaggagtacttgacaaaggtaatgactcttctaagtgtattcagaactagtttccttgcatgtaaaattctacatgcacattaatttttttaaatgcttttttctttagtagaagtaagtcatttagtcgatcataaaatattcctgttcttttgaaatttttttttaatagctgacaaatgacactgattggaaggggaactcaaatgtagctgtttaccctcagtgtatttatgagggtgaaaataatctatgtatttttttatttaaaaaactttgataaattttatttcaaaatagtatttttctcaaaatcagttcttgtgactcaaatattcatgactagtattgtagattcccttttatttggttggttcctgactttaatgatgtctatgcctgtttcccctggggaagctgcatgtatattcttaacatccttttaatcttcacaatttttttgatagtttaacccctgatttaaaaataccataggaggtgaacatgggaaaaaaaaaacaagctgggggtctaattgccttataacattcactattcgtcttagtgtccttttttgatgtatgaatttactcaccctatcttcagcagttactagctgtctctctgtagaacatttttaaatggttttagaggatccttttcgtcaaagcaaaaaacatgattaaaatcagagtctcacatctgattccttcagcctgcctgagttggggggatgggagggtgaagaagcgctaccaacaacccctcccatactgaatttttcctcaggataccatttaattagataccattgtgtctgtttaaagtttttaaagaattaacattttctgtattcaatgtaagagaaaaaacatgttgccttatcttagccatagatgagaatagcttcttaaacataatgccaacttgtgagacctgtctttaagctgctgttaacctaagtgctgtaaatttttctagtgattaagctgctttctttcatactgtagcataaattcttctgcattaagctttgaagttacacaaaattctaaattttgcttccagtatgccctttattttcacttctctcatacctttttagtggttagatgtttcttccctaaacctttgttgctgattctacctttttatgctcaatatggaattgattttttttctaagctgcaccttctgaattcctttgcaggttgatgcaataaaggaaaaggtgaaagttgattctttaacatctttaagtctggaggactaagtctaaggaatttgcatgatgtttttccttcctcttctacactgctgctgctgctttttccccccaataaattttcactaaagcctctgcaagtcccttgaaacataactttaatagagctgtaggacattagtagacgtttgctactaatcggctaataggctttaggaagggcaggaggctaatcagtagttggttcacagtctctcttaaatatattatgaaaaactgagtatggtgagtttccatattaatttcaaagtaacaggaaatttctcttccctgtcagggtatctggaccataataggactgtcataatccttgaagtaaattaaaacagcctctggttttactttgtgagcttgcctgacagttgtcgaatttatatatgtatatatacatgccctaaaaggctttttggggtttttttttttttgtattgaaggactgtgatccagtttctgatctcttgattcttactaattttttgctgaaagtagatacgagagatactagctgcttccgaagagactttcctcatgtttctccaggtgtccagttcttatggtgctagtccatttttaagaggaatcaaaacctttttaatcatgagagccaagcttgctataattgttgctaagcaacatgaattatttttaacaaagtattaacttctactttctgtaataaggcatacctctgaagctacctaaaatttgctctcctatttatcagttggcttgtccaaggatgtcaaattcaggcaccttttggttgctgcttccttcattggcttgtctccatcccaatataaat

SEQ ID NO: 87378 - DNA, 1046 bp, Homo sapiens
tgaattcattgacatgcttacctgtaatttttctttttaaatccaaggatcagaaactttagttacagctcttaacaaaagcttgtgttcttaaaagacttctctgctttttttttgagcaatctaaattggatcagtggaaacaaaaattgaaagtccctgtgccagaggctgtcccattatatagaagaatcaaactttttgcttagcttgatgctattccttcagaattcttccccctacgcccaaacttcctatgtgtatgccagggcattgtgatattgccagctcttctaagtcttccatgtgtttctctaataggacttctgtgttcaacatctgattcagaccttaacttttaaacacatgttcacttcagattcttttccctggaagtccggaaatgtattatgcagtggtggctttttggttgtttcatttttcttcttttttcttagaagttactaatatacaggcatccatgtatttttctttataacttctgtagctctttcttgaatactggttagttagcaaaaccccatctgatccttgatggcacagagctgtgctttaagttctataactaataatttttgttctaagtgtggatgccaaaaaatggacatttcatatggtacttatactacataatagtctttaatttgatattagggtaatttgtaacacatcatttagactataaagtaggataatagtgtataaaagtaaactaatccatcttcctaggctagaaattaaaccacatttcatctgaaggagcctacttaggcttacttttctcaaactttcagttccctaacaaattaagatggattagactcatatttatggtatttaatatgaaacaattaaatataaaacagtgccctaaccttaatggcctatgtgaagactgaaagatacttttttaatagtttcaaacagaaatgaggtgctgccttaatctttttaggacctggtttttagaaacttttccactgaagtctacaatttttttttttgagtgatttttcataatttgc

SEQ ID NO: 87379 - DNA, 1053 bp, Homo sapiens
ctgcagctataaccaatatcatcagaagttatacacaattggcaaaagaatagcttattctgcccaaatacttgtccagtcactaggatcatttcacttttttgaataccatttgctttggggagggaagtattgccagaccatgaattcattattacctctgatcagttttaaacttcatttgaaaagtggttccttctcgttttctccctccctcaggctgcatcctagcatgcccagttttagtctggcatgagcttttatggcattttgaatccctccttcctgagggtttataatgacagtgctgaaaaccacctggactgaagtatgaacattgccattgaatttgagggggactgagaatgttctttctagtctgttttattttgacagaatttaacatactaaggcttttccactttctgccataaacctaggtttataatacttttggggtgctaattaacatgatgtgtttttctccaggtggataaattagatgcttcagaatcactgagaaaagaagaagaacaagctacagagacacaacccattgtttatggtaatctctctctgtaacctcaaaaaattcattagacaaatatttaattacttagagactgtgcctcaaaatagaatacaacaagcttctaaagtgcaaaaggctttctaagaaatactgctctctactgtctgattttttttctgagaagtcataaagcaggtgttgatattattcactaaaataatcttaaatacaagaaaactcaaaaatagtcatttaaaatcataacatgaatctttcctatcatctggtccctcacgcattacctgctcataaattactgaaaaagaaatattgatgaattccattttcaaaagagcaaaaggtgagagaacatgccaaggctgtctttagtatgctttacataaagaatacatcctcattttaaattctaactggggcagagaactgggtagagtttccatttgagaactttccagagagataggatcttcaaactctcaagtgaatatttaagacaattt

SEQ ID NO: 87380 - DNA, 1628 bp, Homo sapiens
ggaggagattggagtgttctaaatgctaacagtttgtcctgcctccttgcccctgccccctgctcctttttgttttcttctactgtaggtcagccccagttgatgctgacagcaggacccagtgttgccgtccctccccaggcaccttttggttatggttataccgcaccaccgtatggacagccacagcctggctttgggtacagcatgtgagatgaagcgctgatcctgtagtcacctattttcgtactgaaacatcgtctttacccacttctcagtttataatgggggaaaacaggcaacgtgttcttgtaacctttatttcatgaaggacttctttttgtttctaactataaacttggatcacctatgttaaaaccttatttcacattccacatcattttagaatttattttcgaaggggaatagtttcaatgttttattcacttgggctttttttcttccccctctttctttaaagaactgctcaatattcaatctgttgtgaagaacctgatttgcactctgtagtgtttaaagaaacaaagaaactctaatattgaatctcttaaatttagtgtatgtaaacagcttacaaatacgtattgtctaaatgcatttaaatctgttttattcaaagaaaagctaaagcaaaaacactggcatatgaccatgcaagactgtcagtgccaacaaagacaacactaatcagcacatcgtacactggattgcagtgcttcccagattattgaaaaatgttacagacaacttgcctgatttttaaatgagcgtaaaaggccctctaacctatgcaggtttccccattatgcatatagaaaatgctagtatgttttgctcacttcatatgtaacaggtgcccttatgttgtgctgtatcctgtgctttttctgtgggaccattccattcaggagcaaagagcaccatgattccaatcttgtgtgtgtttactaacccttccctgaggtttgtgtatgttggatattgtggtgttttagatcactgagtgtacagaagagagaaattcaaacaaaatattgctgttcttcagttttgtttgtggaatttgaaattactcaaatttaaaataaattactggactgtggaaataacatagaattgaagttttaattaaataccactcaaacgaaaagaacagtagtttttgtagttttatattggatactgaggcattagggaggcatgaaaggaagaggaatgaggattgagacatgtgaagacattgtgcattatatcaatgtgcattcctgtagttcattaacaaggtacatgcaatagtctaaagaaccagagtcactactatagtggcttaacatttaatctgtctccaatattttaaccaagtgacaccgaggtttttatcgaagcatttcacttaaatgaacaaatcatggctgttatattaacttgaaataaaatatatttaaacatgtagttaacatgctctttctcatcatgaattataaaggtgcccaaattatgggtatcttgatttttttcaaaaattggttgtgtgaatccagctcttgcttatggctgagaatgttcctaaagttcatttcactatcccttaatcctcaatagctaca

SEQ ID NO: 87381 - DNA, 1198 bp, Homo sapiens
ggacagcagcatagtcttggggaagggctaccaacacaaagggacctaaccatgtatagggaaatgctgtttcctccattttaatccaattgtatcatgacctgtttctctcatcttaaatatctgtttcagcctctcacttgaaccaccaagaccatttaaccaacagtactgtttttaagcccaagatgacaactgccaaccatagaacatgggaataggttttattttcatctcaagaacatttaagttgggtgaagaaattcagcttttgttgttagaatctgacaggcttcaaacacttgtgatggaggggttgttgtcatatcaaagtccacctagtaaagttttaggtgaccagtgactttgtcaattaggtctgctggtcctggcccaatccctaggacagtttgagagcctggtgcaatctgagtacgtccagcatcttgaattaaacttacagtcagtcccagcatttttgcatgggccaataatgcaatcagggtttcttcatcaggagctttgaccaccaccttgggctggccacagtattcccattgtttgagcatttcaggatttcttctttgaatctgcttgtaggctgaaacagcagcatgagagcactgggcagccactttcccttttcccatctttaagtcatttcgaaccacaagaatcatcttgtactccccgctgtctcccaagatgcttgcttcactttcagtatctgtgtgtgtcttgctcgtcttgcttttggggagcatcccaaagcatactcgaaggctccagcccaggcacatgccacaagcaactccaacagccaagccgagtgtactgggatgagccaaatattccataaccaaggatttggagggcatcttaaaggaaaggaaaacagttatcactatccggcagtaacaacttacagaggtataggcttatcagagaaacattttgactatacacttaatggtcatccagaaaaaaggcaaaacacacctttgatcttatgcctgcaccctgtttccaacaccctcttgcccaccaccagtgtactagaaaagattcaagcatccacatgaaacagtttaggtcattttgaatcttgatgtaaacgaagttgcataaagttcaaaaactctattcctcagtcttcccttagtcttgtggagatgttccgttttaccaagatgcctaa

SEQ ID NO: 87382 - DNA, 1031 bp, Homo sapiens
taacctggctaccgccagcgtgagacatccagggtgagacatccagtcagcagcgtcctaaaacactgctggaagtcggaatcacagtgccccagatccgcaatgcctaagtgggagagctccggaagacgccaagctctgaggacagcctcaggcttcggtccccaattccctgagttagtttacctacccgctccgaccccggctgctccggatctcaggatcctggaagctgctccttacggactctcacacccgccgctgggctccagacaaccggaacccgctcacgtcacttccggtccggtccctctgccccctgagacagcctccagaagggatacgttcctccctcctttcggcgagctcggttgatcctcgcgggatttcagttaggctcttagtgcgggccctgtgggtgtggcaagaggaagaatgactgctcgctttgtgattcttgatccggaacttgtcacccaggaaccccggaagaggtagctcacgcgatagaaacgtgttcgctgcccagaagaagggaaggcgcgagtgaggaaaggaggtactgtaggtaggttggttggctccttacagggcgaaggagaccaatatcattattcattttctcgccagtaggaacgtttcttttcacctcgttgcattacccaccttcttcattttctcctttataaactgtcttccgcccaggggccgctgagccctctgttcctgttctgcgaaccgtcctttggaggaaaggaacaggctgctggggaggggaagactcagaatttctagttcccagcaaagcctccaggcaggcagtatcgatgcgctctctccgaaattgataaaatagcgagcaggcctcataccctcagctgggcacttatgaatatccccagcgtttcgagctgtcgagctctgcgtggaaagaattggtttctaagaatatagtcgaaaatttggggccgggcgcggtggctgacgcctgtaatcccagcactttgggaggctgatgtgggcggatcacc

SEQ ID NO: 87383 - DNA, 1017 bp, Homo sapiens
agcggcccctgggcggaagacagtttataaaggagaaaatgaagaaggtgggtaatgcaacgaggtgaaaagaaacgttcctactggcgagaaaatgaataatgatattggtctccttcgccctgtaaggagccaaccaacctacctacagtacctcctttcctcactcgcgccttcccttcttctgggcagcgaacacgtttctatcgcgtgagctacctcttccggggttcctgggtgacaagttccggatcaagaatcacaaagcgagcagtcattcttcctcttgccacacccacagggcccgcactaagagcctaactgaaatcccgcgaggatcaaccgagctcgccgaaaggagggaggaacgtatcccttctggaggctgtctcagggggcagagggaccggaccggaagtgacgtgagcgggttccggttgtctggagcccagcggcgggtgtgagagtccgtaaggagcagcttccaggatcctgagatccggagcagccggggtcggagcgggtaggtaaactaactcagggaattggggaccgaagcctgaggctgtcctcagagcttggcgtcttccggagctctcccacttaggcattgcggatctggggcactgtgattccgacttccagcagtgttttaggacgctgctgactggatgtctcaccctggatgtctcacgctggcggtagccaggttatttgggacaccttctcatggttggtcacccggacattgaacccagacaccgggctgttcgttctcctctccgcgtacttggaagccttgctaggcttctttagagaacctcttagtcccgggatgtccaggaccttggagtaagtggagaaggtcttccctgctgatgactgagctatttctcaggatctgtcagtttggtttttgctctcccgaacctctggcgcatgatgctagatgtattcgctcctaaacgaaatccaggcgtgcaagtgccatctaaagctctggtggtacagggtagc

SEQ ID NO: 87384 - DNA, 1057 bp, Homo sapiens
ctctttagtctttctcggagatgatagttctaggtgctactgtcattcctgtttttgcccaagtgcccttgctgtgtctcccattttggtgtggaaatgaactctagattagagaatcctaataaacaggacaaattgaagtgataactttgtcgtggttttgtaaattgttactctgctttcacaaagccttgcaaatattttgaggaatagtaaattgctaagagcatattgcctcaagaaattccttattttatatgggaaagcagctttggatggagtttgctgaactgaagttaggtattatgtaggcccttatataaagcttattttaaaatatgctccttgatttgcagcatcaaggaaatttgaacaggagataattttctgtgtcagataaaaggtgatacttaaagtttaaggcatatttaaattaagcaagggcaatctattgagtaattatatcacagctaatatacctataattgctcaagagtttgtttgtattcttgaactacttaatcttttcagtagttcatgggagtattttctcttgtccttgagttttttaatgataactttgttctttatagattacctggaaggactaggcaggtagtgttaaaagccagggctataaagctagactgctttttttcaaattctagctctattactatgcaactcttggattagttactttttacttcttgctatctcagtttcctcctggacaatgaagtcaatacccttcttgttaggattgaatgaataggtttaaataaagcatttagaacagtgtctgtagcatatagttaaccatgattgtgatcattatcatcatgtggccccctaagctattgccaagaactctttcccagccctcttttaaaagcatagctttatgttgctgcttacttaattattgtttgctcattattaatgaagttccagtaaataaatatctgagtatacacttcactttgtctatattttacaacatatgtgagattcttaaccaaatgaggcattcttttgggccattctgttaactttt

SEQ ID NO: 87385 - DNA, 1066 bp, Homo sapiens
tgttaactctgttttaaatgcttcagctgcagttaaggtctgttacactcttttaatgcatttcttgtatctatataagtgttcaaaatgaaaattatttgatgtttgagttatgcttctgcccggtttgtgttctcaaccccatccacagacctataagatttgtttcagcaacctcattcttacaaacaaaactaacttacatacgtgcactcggtgcaaagtagatgccattgaaggtcaagaatatgtgttagatttctgtttgaggacatttcaacattttaaacagactaggaatacttggatttactcctacatctaggaatctcactgacattgtatcatcacagatttcaaaaattattgctactttattgaattttgaaaagtggctctcattaaaaatgattatttcatcttactttagctatgtggatagactagaacccttttacctcataataatttttgacggattgtccttgtcttacatttcaagatgtttagattgatgaataataattcatttttgttattcaacataaactaagattgttctaaatctgtggctacttctgttatgtaggctatggaaaccagttacataggcttttgtatagcatactaatatggaaaggaagtacctgtaagtgaatactcagggcagcatttaccatgatttttttggaaaattgtgacatttgagaagcatggagattgatgggtatgatactgcatttaaaaatattaaacagcatggagaaactaacattaagcgactgctatgtgccagtcactgtgtagtgcacttatatattatttatcttggctgggcgtggtggctcacacctgtaatcccagcactttgggatgccgaggcaggtggatcacctgaggtcaggagttccagaccaccctgaccaacgtggtgaaactccgtctctactaaatacaaaacattagccaggtgtgatggcagacgcttgtaatcccagctacttgggaggctgagacaggagaatcgcttgaacccgggaagcagaggttgcggtgagccgagatt

SEQ ID NO: 87386 - DNA, 1964 bp, Homo sapiens
aaataataatgataataataataataactggcacataatggaccgttggtatatatttgttgaattaagaatttgaagtggctttgtaattgtgtgattttcttcagttatgttcagcttcttagacagatcataagaatgcagatgattctggaggcactgcagttttacaaagttttacagtacgtatgattgggggaagaagaggcaaagtgaggatgttttcaagggaattttgaaaggcaaggaaaaatgttaaatcctttagaaaatggttaaaatgcagaaaagctttgaagtttttataagcttaactattaaaacactagtgggtcttttattttggctgtttcatacttgggatggttttaaatcatgctaaatggtcaaaatgccaaaaaaaaaaaaaaaagggttttgatgcttttataagcttaactgtttagaacctcagtggctctcttgtttggccttatgctatatttccttcttttgggaatggcaagaaggttttgaaaagttgttttttaaactgcaaatttattttgtttatgaagaaatagactgatgaaaataacttagttccctgggttatttcttacaaaacaaaatttcagactattatgttttccagagagaattttggagaaggaaatgtcagtatgctgttcttttttagcacgttgtgtaagagcacattatttgctcaaatgaaaacccctgttgcaatagcttaaaaacaaaaccttcaaataattgtgcaataccattgttataagtacgcactcatagacccaaaatgttttgggtaaaacaatgacactatgggaaagagtaaataggggcaaatgagttcaattatcagtgttttgtaggagaaaggttttagaatgttatttataaggcaaacctttttgtgccctgtttatcttttcatcacaaattaaataaattttacttactgtgatagagatgaatggctggctttaaaatatcttaaatatccttaaatatcttatttgtaaatatttatcatatatttagatatttacaaatgtttaaatatcttcaaaatattttttaaaagatattgcctataggatttggctgaatatgaacacacatagttttttttgtttttttttttgttttttttgagatggagtcctgctctgttgtccaggctggagtgcagtggtgcaatctcggctccctgcgacctccacctcctgggttcaagcgattctcctgcctcagcctcccgagtagctgggattacaggcgcaagccaccacacccagctaatttatgtatttttagtagagacggggtttcgccatgttggccaggctggtctcgaactcctgacctcgggtgatctgcccgcctcagcctcccaaagtgctgggattacaggcatgagccaccacacctggccaaacccacatagttttaagtatttgcagaacttaagtatagcttcaagttaaatgactggcagatggaaaatcattaacttttttatatggttccatttcaaacatcctcagttgatttttttattaataaaattcagatttgtgaaatagatttccattttgtaaacctattgtgatgctctagcatctttggtttttgttgttattgttttgtaattgcttgggctacattatcttttggctgaatcttcacacaagtatgacttaagtttgcagagtcaaactttaagcttctatgaactggtctgaatattttgtcctgtgagctccgatagtgctttctacttcacgatcttcataatagctagtatatattgaggtcacgtgaaaggtgaggcaatatgttagtattttatgtacattatcttgtttaatcctcaaccctctgatgtgtgtcatgttatctctgttttacaaattaagaaaaactgatgtttagagagatttacaaatttctccagtctg

SEQ ID NO: 87387 - DNA, 1047 bp, Homo sapiens
tttttttttttttttttttttttgagacagagtctctttcattctgttatccaggctggtcttcagtggcacaatctcagttcactgcaacctctgcctcccaggttcaagggattcttgtgcttcagcctcccgagtagctgggattacaggcgtgtaccaccatgcccagctaatttttgtattattagtagagacggagttccaccatgttggccaggctggtcttgaactactgacctcaagtgatctgccctcctcagcctcccaaagtgctgagattataggtactactagttgccatttttcacaagactctaggacttgctattagttgttatttgggagataaaactcttttcatctaaagtgattgaagagaataagcataaatgttagaaattctgttttaatctctgcactattgtttttcagacccctcttcagtgaatgaaaagaagaggagggagcgggaagaaaggcagaatattgtcctgtggagacagccgctcattaccttgcagtatttttctctggaaatccttgtaatcttgaaggaatggacctcaaagtaaagagtcttctcccactaccttttacatacacctcatttactcatttaaaaaatcctcagtaatctcttactttctgccctctactccatcaaaatggattaattacctttagaatattaccataggaacatatttattctcctttctttaggttgaagaaaaatagattagggaaagacattgctatttgctgtttgcttactggattatcacagttgtccactgttttttcatgttgaatctgcagtggagaacactgaaaaatacgatttttattttctctcctgattttaccattgggagaaatcaggtctgtgtaatttagatacactgattctttagcagggcaaggttcagcatatgtggcagttttactgatagtttgagccaatgaaaaagaactctgccatggaaatgtgttgtctttaaatttagtacttgtaagccctgtttcaagtaccataaagaacaa

SEQ ID NO: 87388 - DNA, 1054 bp, Homo sapiens
ctctagaatggtattttaaaacagtttactgccaatcactgaaatgactctagaatggtattttaaaacagtttactgctaatcacagagaagtttttacagttctaaatgcatttattttaaatatatctaaaattatcctcaaaattatcttattcataatttgctttttcctgtgtcctgtaaatagtaggactttaaaagtttagaaacaaggcttttattaaaggtttagaaataagacctttattccagttagattaatttttttgtcatctttgccattgtgtattaaagaaattaggcctcttcaatgggtttttaatcttattagttttttcctatttgaaacttactttagttgatttaattttgatgatggtttataaataccgcatttctgtatagagaattcacggttttcacctcatccctttttttcagtatgtgcaacgtatagagaaacagtttcttttgtatgcctactggataggcttaggaattttgtcttctgttgggcttggaacagggctgcacacctttctgctttatctggtaagaataattttattttaataagcaaaaatgatatttcctatctttttattggtgcttttatgtcagaagtaaaaattctaagatttgttttaattacctttgtgttttgtaagcattctgatcctccaatcagtgctttaagtttgacttagagttctgttttgtttttcctttagggttagtatttaaaaagcaaagagaaaaccccagttaagcaaataaggttgtttatttaaattagtttagcgtggaaggtttttcttttctttctagatttaattgcttaagcaattgttattttaataaatgaagtccatttaaatatgcaaaattccatgtgagaaatgtcttcccttacatcctctaacatcatttacatacttggatatttattttggtattcttgttgaatgtaattgatggagtattaacatgtagaactaaatgctttcttgagtcctttgaaccaaagtataaaaagtgccccttctgggct

SEQ ID NO: 87389 - DNA, 1049 bp, Homo sapiens
attacagatgttgtccaaacaactccagtctttaggaatgttttatcagttctgagggagccgtctagagtggaagaatgtctgtctgtctgttttgtctgcttgccttccttaaaaatactcatacacacacaacacacattctgcactcttaatgtgatgttgtagtcttcatctcggttgataagtatacttgcctgaattaggctaataattaatatgaacattttaggtctttcgtttttaaaagatatctctgtaagacaggaccctaaagtaaacccaacagtattctgtctctggtcttttggatggtatactgtttttcttgatgaaacatagacatgagtataaccttttcagtcctttaaatgctacaaagtgtgtgaagaaggtacaattatagtaaatcatgagccgctgtagtataaatccagaaaacttgaaaagttcaaaatccagaaaatgttttacttaatattaagcagcagtgtacatactgatttatcattttactaatatgattttttcacaaattcaagtatgaatatattcacccctttcttactatgaccctaattagtgtttgtggcacaaggatttctttctctgggcttaacatagatactatattattatcagaaaactacttaaaactcttcactaccagattaggatggagatagatagatagatagatagatagatagatagatagatagatagatagatagatgtggttttgtataattttacccttctaggacaattttttttgaattctaagtttctcttaattagaagaactagtagtgtattgttattcttaaagctagagtaaaaattgattacatagaattagtttggtttttttctaatcactaaaacttttctaatcactaaaactcatgaaagaatgtaaatcatggaaatgtaactttttaaacttatgtaaaaagagtttttaaaagataaaatatctttttccacagacaagtacctacatctgctcttactagaaatcttaccctttcatctaagtatagttt

SEQ ID NO: 87390 - DNA, 1724 bp, Homo sapiens
aaatacaaaaattagtggggcatggtggcaggtgcctgtaatcctgctactcaggaggctgaggcaagagaattgcttgaaccagggaggcagaggatgcagtgagccgagatcgtgccactacactccagcctgggtgacagagtgaactttgtctcaaaaataattaattaattagttaattaattaatttagtgaaaacttttaaactcgacctcctaaaaatttcttttattcggcttacacttttgtaacaaaataagaaaaacattctaaaaaatgtggaagctagttattcctcacaggaaaaaatatacaataatgaagtttgaaattgtttatgttttagccatgctgtcagtcatcaaactaaatttaaaaaaattatttgttttgatgacaaagcaattatcattgaaacaagatgattttcaaatgaaaatacgaggttaatgcagtccagtcattagcagggaaaaaaagaataaatatttaaggtttttcttgttaggttgctttgcacattggagtagaaaatagttttgggcttggcgcgttggctcaggcctgtaatcccagcactttgggaggctgagggggacggatcacaaagtcaggagctctagaccagcctggccaagatggtgaaacaccgtctctactaaaaatacaaaaattactcaggcatgttggagagctccggtagtcccagctactcaggaggctgaggcaggagaatcgcttgaacccgggaggcgtacattttagtgagccgagatcccaccactgcactccagcctgggtgatggagagagactcagtctccaaaaaaaaaagaagaaaaaagaaaatagttttgtggctgggcatggtggctcacgcctgtaatcccagcactttgggaggccgaggtgagcggatcacctgaggtcggaagttccagaccagcctggccaataatggcgaaaccccgtctctactaaaactacaaaaaaattagctgggtgtgctggcgggtgcttctagtcccagctgcttgggaggctgaggtaggagaactgcttgaacccagaggcagaagttgcagtgagctgagatcacaccactgcactccagcctgggcaacagagctagactccatctaaaaaaaaaaaaaaagaaagaaagaaaataattttgtgttatgtctgcttgttcttttcacttccacacctgtttgcagatatggcggtggaaaaagcactgggtaagcattaggttacctttgttaaactaaagtctttttttttttttcaggtttgtgtttcaaacaccttttataaaatgcctttagaaaggccccttttgggccgggcgccatggctcatgcctgtaatcctagcgctctgggaggccgaggagggtggatcacgaggtcaggagatcaagaccatcctggctaacacggtgaaatcccgtctctactaaaaatacaaaaaattagcctggcgtggtggcacgcacctgtagtcccagctactctggaggctgaggcaggagaatcccttgaacctgggaagcagagattgcagtgagagaaaaaaaaaaaagataaaagaaaaaaaggccccttttggctgggcgcagtggtttacgcctataatcccagcactttgggaggccgaggcgggcggaaccagtctggccaatatggtgaaaccccatctctactaaaaatacaaaaa

SEQ ID NO: 87391 - DNA, 1127 bp, Homo sapiens
aactagcacaagctgtgcaaatgtaggatgttcttttgcttctgggataatgaatgcttacttattgccacataactgttttttccatcttctggctagtgatcggcagagatgtattcatgaagtctggcaaattatagaagaaaggaaaaggtagatgttgtaggccagtgtttccaaaataataaattggttcatggttagtttacagtattttgttaatccctagaatatccagagagaatactaaatttaaatttacagtgttttggtttattcttaaaatgtggtaagagcttaactttaaggatgtaatagtctatcattattttacttgtgtttcagtgaacaacctactgtaatttttttcatcattcatcttattaatcagtgtcatcagattgggagatctttaataaactctagaaagaaccatctttccttcttttcctacttctcattaatgtttctaaatttgcctttttacaggactttgcctcccgggccaaactggcagttcaaaaactagtacagaaagttggattttttggaattttggcctgtgcttcagtaagtgaattgtattaaaacagaacttttactaagtggtagtgttatattttgatccatatatactcctgaattaacaaaagtgctatcacttttattgggtatgtaattttgtgaatcattcacctttttttttttttaagacggagtctccctcttgtcacccaggctggagtgcagtggcatgatctcggctcactgcaacctccatctcctgggctcaagcaattctcctgtctcagcctccctagtagctgggactacaggcatgcacccccacgcctggctaatttttatatttttagtagaggcaggatctcatgttgcccaggctagtctcaaactcctgggcccaagtgatccacctgcctcggcctcccaaagtgctgggattacaggcatgagccactacacctggcccattcaacttttttttttttttttttttttttttttgagacaagagtttcacttttgtggcccaggctggagtgcaatggcacaatctcggctcactgcaacctccacctcccgggttcaaacgattctcctgcctc

SEQ ID NO: 87392 - DNA, 1090 bp, Homo sapiens
gctaatgatatgagtgctttccagataatattcacatttcaagctaaagattttagaaccctaactgctgaaacaatcttaaggctctttcttcactcatacctcaccttagaaaacagccaccaaatatccaggaatcaactgaacgggattaaattcctgcaggtccacttactttatccagttctcatgtgatgggcacacacacaaacacacacacagtgccttagccatgagtaatataagcaaaaggacaccttggtttgctgtgagcagattgaacacctaaggtgaatatgagacccagcttctagacacattaggatgtttgcctaacctccttttgaacaatccagtagtgatcaaggaacccatatattgctttgcagtgtaagcaggctgaaagcagaataccacatatcaatgggtgataaaattaaattgttctttggattataatatggaagtccttctttttctctctatagattccaaatcctttatttgatctggctggaataacgtgtggacactttctggtacctttttggaccttctttggtgcaaccctaattggaaaagcaataataaaaatgcatatccaggtaattataccccctgattcactgcctaatgatgatgaacccattacaagacaatgaaacatgctcattcctaagtgaattatttagttattctttctgcttttttggttggtagcttacttaggtaataccacatagaatgtcatttggaattagtgatctccttgttttctttcttttcttctttcttcctccctccttccctttcttccttctttccttcctttctctctttctttctttattttttgtcctgtttaactatttatccaggactttcaccaaacaaaaatagtgtttgtgtgcagaaagatgcacatcatttttatatacacagcccaaaaaatgtagttttttgtttgttttgttttgttttaccaaccacaagctgagagaatattgccattcactaattcttactttctttcacatactctatatatatagagtgtgtaaagcagttcctcccatgttaccaatatcct

SEQ ID NO: 87393 - DNA, 1004 bp, Homo sapiens
cactgcattccagcctgggcaacagagcgagactccgtctcaaaaaaaaaaaaaaaaaaaaagattcttctttccaatgaaggacttcttttacagatggttccatctttgttcattctagcacaattagtttctccctcccatgtcttttttcctcctcctctaccctttcctttgtttcttctatgcatgtggttaagagggctcttccgtggtctgtgccttttatttattttgtagaattcccactcagacctcctgcctgaaagactaagacatatgttcttaaatgtgtgacacattttttgtctaacccagaacagtgacttttcaagctgctacatacaaaaagaaaatcttgttttgctgttttgcattgaaattgtgcaattatttaggcattggcttattttgattgttaagaaatgatagtagggaaagttcatggtgatgaaatcactggaaggcaagaactactagctctgttgattaataaaagatttatagctctaaataactggtttttggtatagaccccctgcttttcttcacaaattatctgtaataatagccttgctagcttcataatattcacataccaattgtatacctttgccttattagtcttcttgccagaaataatgtacgttagtctaacctgtccaggttcctgagattcatagtgagtggataaaaagaagactactgttggctgggcacagtggctgacgcctgtaatcccgcactttgggaggctgaggtgggcagatcacgaggtcaggagatcgagaccatcctggctaacacagtgaaaccccatctctactaaaaatacaaaaaattagccgggcatggtggcgggcgcctgtagtcccagcactttgggaggctgaggcaggtggatcaccaggtcaggagttcgagaccatcctggcctcctggccagcatggtgaaaccccatctatacaaaaaacacaaaaatttgctaggcgtggtgtcgtgc

SEQ ID NO: 87394 - DNA, 1008 bp, Homo sapiens
atttaatactaatttttatttaattttagactttctccagtgggagagacctgtgcatatttcttaaagagcataaccaaatctaacttttaaagttatgattaaaatgacatgttcccatattctcaccaaataggggatgtgaattcccagaaaataacattaagcatatgactcgcagcaaaccatatgcagaacattggctcattgtcatgttgccagggtcttattggaagacaaagtccccagttttaccacacaagaaaagtttccataactcaatcattgaacttgagggctgggggatggtgttggctggaacagggactttttaccagatacagaatgttccatgctcttctttgctgtctcctatttctgagctaacttgatgcttgacctcagagtcaggcttgcctgtggcaagagagatcattttaaccagtgagtaataaagtgcttgaatccgaatgttgtttcttatccctcactctatggaaagtggtcagaatgagctacgtgggcctggactttttcttctacagaaagaaaatctgtcctttcattttagaggataaaatggtccatgtatttgattctctttgactttgatcattgaaaataatcagaaaaagttatggaagtgtggaaccccagcatttgtattatctgatgaaaggatagaatttaaggcttaacacagggtttaaaccccagctgccgagactcagttatacagtctaacataacctctttctgcagcttgggaaaacccctttctcttcttgtccgtggtagtttatatatccttctcttttgacagttaacctttctatatgtttgttatggatattgggagaccacataaaggttaaaacaggagttctggagttagactgttagatgagaaatgggtacattgtatttggaagttaccgttgaccatttaatggagcattttagtagcatgatgaaaattaaaacccaaatatattggattacatggaa

SEQ ID NO: 87395 - DNA, 1079 bp, Homo sapiens
tgatttttaacagagttttgttttggcaaccaatcagttttacctagtccttatagaccactcctttagctctggccacattcatcagcacaaatgcctgcttttctcctgctgctcaagtctgccttctgaaatgaggttttgttctctagagcttctctttaatgttagcttatttcaaagagtagctgctaatgataaggaagtctaacctccaatctgattcttacagaaaataatgctaaatctccaaaagctagggcaattgcagattattttgtgataaaatatgctgtaaggcagtagaaacaatgtacctgataaaatacacctggagaaagcatggtcttccttctacacagccagaaagaaacccatggtgtcatgtgttcataataccactctgcgtacaatggactaacttaagtacaaaagaagttttaatcatttgaaagggcacagatgtgaatgaaattcaagatgttttaatcccagatcctggggtcaaatcacaacgaattttagaaggtgccagggactgtcagtccaaacttgtatatatgagaaagccctagattttctagtatagtgtgtgattttcatcctgaatttattttatgttggggtgccattccaagatcctggatgtaaagaaacatgattagggggctaccacatttcagatccaaagcaagtagaatacatcagttaccagttttttcttatagtatcagcttcaaagattcatatactgagccaggcacagaggcttatgcctgtaatcccagcattttgggaggtcaaggcaggcggatcacttaaggtcaggagtttgagaccagcctgaccaacatggtgaaaccctgtctctactaaaaatacaaaaactagcagggtgtagtggtgcctacctgtaatcccagctactcagggggttgaggcaggagaatcgcttgaagccgggaggtgaaggttgcagtgagccgagattgcgccactgcactccatcgtgggtgatagagccagactccgtctccaaaaacaaaacaaaacaaaacaaaaagattcatgtgttctat

SEQ ID NO: 87396 - DNA, 1030 bp, Homo sapiens
gggattatgggcgcccaccaccgtgcctggcaatatttttttttttttttttttttgtatttttagtagagacagggtttcaccatgttggctaggctggtctcgaactcctgacctcaggtgatctgcccacctcggcctcccaaagtgctgtgattacaggcatgaaccaccatgcccggccgaaatggtaattctttgaatttaatcagagcttaagggcaaattggaggacttccccaacttaactatgggatgagattagcatctttagcaaggtgcacagggttgcaagaatgtaatggcttagggagaatggcatttagggtatttcctaaaccaactatagaaagcctttgaactgtgttgcaaattattactcccaccgtgtgtgcactttaaattaatcttaagtgtcagaatggactcttgcttctggtctgctgcttgagaataacttgacacatgagatttagagctggcattattgtttgccttaaatgcatgttaagagtgagagctgtaatttctatttttatctagtccgttactaaaatagctttagtgataattaagcaaactatagtataagagtactttgttgaagctgaggcatcagtagcctaagtcattgtagaggtagagaaatgaaaaacagaagtaactaaaattttgatgacagtttgggaaaccaaggtgggaggatcttttgaggccaggaatttgagacccacctgggcaacatagtgagactccatctctacaaaatataaaaagaaacataataataataataaataaaacttttaacctcttgtctgttttcaactgttttcctagtctttcatggaaacctccatagagacacataacaaattggtatattaatctcagcattatcctcaagataagttatacatcatgtgaatacacatcatatgatgtactctatcagctaaaatgtatctatcagctaaagtgtatctctttttaaaattattatgggtacataaagtgtatctcttaatgg

SEQ ID NO: 87397 - DNA, 1195 bp, Homo sapiens
caaagcgattctcctgcctcagcctctcaagtagctgggattacaggtgcatgccaccacactcggctaattttttgtatttttttcagtagatacggggtttcatcatgttggccaggctggtctcgaactcctaacctcaggtgatccacccgcctcggcctcccaaagtgctgggattacaagcatgaaccaccatgcccagccttttttttttttttttttttttttaatacagaacacaaatttgagtgtcattcttgtgcaggggccatgctaatcttctgtatattgttccaattttggtgtatgtgctgccaaagcaagcacccagcttcttttcattagttaagaagatgaaggccaagactaaggcagggaggcctttctctgcctttcactctttagtgcacctcacagtcagttgcacttgagtaaggactgctaaacctctctgagagctgccagatgttcctgcctagcctcaggttgttggttcttcagacacctcttcattctgcccattgcaccagccctttcccatctccatgttccctccatggtaatttctttgtacacaacaaccacacggagcaccagcaatcaagattagctcccgggaactctggcgtgccctgtaccaggaagcacagtggattactacaacttttgataatgattgtttgctttgtaccaggcattattttcagggctgtttcacatgtgttgtacttaacaaccccatgaggaaattaaggcagggtggttcagtaatttgtcaagggaaacaaggaagtagagcaggcagcagaggcgttctggctctgaactactctgttctgtagaaatcagtgcaaaagtccaagcttcagcatacttgtttcatcttgtgatcacaggtagttttttttgttttttttttgttgttgttgttgttgtttatttgtttgttttgagatggagtctcgctgtcgcccaggctggagtgcagtggggcgatctccgctcactgcaggctccgcctcccgggttcaagccattctcctgcctcagcctcccgagtagctgggactacaggcgcccgccacctcgcccagctaattttttgtatttttagtagagacggggtttcaccgtgttagccaggatggtctcaatcgcctgacctcgtgatccgcccgcctcggcctcccaa

SEQ ID NO: 87398 - DNA, 1158 bp, Homo sapiens
ggcgattgagaccatcctggctaacacggtgaaaccccgtctctactaaaaatacaaaaaattagctgggcgaggtggcgggcgcctgtagtcccagctactcgggaggctgaggcaggagaatggcttgaacccgggaggcggagcctgcagtgagcggagatcgccccactgcactccagcctgggcgacagcgagactccatctcaaaacaaacaaataaacaacaacaacaacaacaaaaaaaaaacaaaaaaaactacctgtgatcacaagatgaaacaagtatgctgaagcttggacttttgcactgatttctacagaacagagtagttcagagccagaacgcctctgctgcctgctctacttccttgtttcccttgacaaattactgaaccaccctgccttaatttcctcatggggttgttaagtacaacacatgtgaaacagccctgaaaataatgcctggtacaaagcaaacaatcattatcaaaagttgtagtaatccactgtgcttcctggtacagggcacgccagagttcccgggagctaatcttgattgctggtgctccgtgtggttgttgtgtacaaagaaattaccatggagggaacatggagatgggaaagggctggtgcaatgggcagaatgaagaggtgtctgaagaaccaacaacctgaggctaggcaggaacatctggcagctctcagagaggtttagcagtccttactcaagtgcaactgactgtgaggtgcactaaagagtgaaaggcagagaaaggcctccctgccttagtcttggccttcatcttcttaactaatgaaaagaagctgggtgcttgctttggcagcacatacaccaaaattggaacaatatacagaagattagcatggcccctgcacaagaatgacactcaaatttgtgttctgtattaaaaaaaaaaaaaaaaaaaaaaaaggctgggcatggtggttcatgcttgtaatcccagcactttgggaggccgaggcgggtggatcacctgaggttaggagttcgagaccagcctggccaacatgatgaaaccccgtatctactgaaaaaaatacaaaaaattagccgagtgtggtggcatgcacctgtaatcccagctacttgagaggctgaggcaggagaatcgc

SEQ ID NO: 87399 - DNA, 1004 bp, Homo sapiens
tggctcacgcttgtaatcccagcacattgggagaccaagacgtgcagatcacctgaagtcaggagttcgagaccagcctgaccaacatggagaaaccccatctccactaaaaatacaaaattagccaggcatggtggcacatgcctgtaatcccagctacttgggaggctgaggcaggagaattgcttgaacctgggaggcagaggttgtggtgagccgagatcgtgccattgcaccgtagcctgggcaacaagagcgaaactctgtctcaaaaaaaataaaaataaaaaaatagctgggcaggttgaaactctactgtaggtccagctacttggggggttgagatgggaggatcatttgaaccccgggaggcagaggttgcagtgagccgagattgcgccactgcactccagcctgggcaacagagagagacgccatctaaaaaaaaaaaaaaaagaaagaaaatggcgaggaaggacccaaagaacccctgaaaagacagcaatgcccatccccaagccaggaatataaaggaggcaagtctgaggaagacagactattctgttttgaatatgtggaggggcgataatgaccaataggatggtggggcctgtaatattctctatcttaggcttcctaactcctaaactcctagtgaatatgccgttctttacaccacactgtaacttctgtcagtgaataagctggacttcttcagagaattctccagggtaacaggtccttaagccgtgttatgtggtggtgctgttaaagagatggcactgtgactggaccttaaggccacagtaaacttttaaaattcctctccccagtatcccgctggcttaaccaacggcccctccctttgagaactgagaggatggtagttcctggagagatcatctgtctttataaggagaaaagtttggcaatgtgatttcctgtatgtttctaccggagtccaagattccagcagtgctagcctagacagcagcggctgcatc

SEQ ID NO: 87400 - DNA, 1039 bp, Homo sapiens
accatgcgcatgctcactttcaaaacgaaaaacttactgagaacaaatgcgcatgttccataaacggagagttttgttgtgtatatattttttcctattcagaaagattaattacgcatgttcaatttcaatttacgaacttcagatatggtacgcatgctcactgtccaccgaacgctccagctgacaatgcgcatgctctagtcctccaagcgcgacttcggctggtgttttgcgcatgtttctgccagcgcctggatcctgccgatagttctgcgcatgtccactgcccactgtttggcttcacggaaccctgtacgcatgctcctacgctgaactttaggagccagtctaaggcctaggcgcagacgcactgagcctaagcagccggtgatggcggcagcggctgtggtggctgcggcgggtccgggcccatgaggcgacgaaggaggcgggacggcttttacccagccccggacttccgagacagggaagctgaggacatggcaggagtgtttgacatagacctggaccagccagaggacgcgggctctgaggatgagctggaggagggggtgaggcccggggtccccgggggcccgaggtgacagggccggggcggcggcgcgggctcaggaagcgcggtgtgtcctagagcgtggagacccaggggggctcctgaggagctgagggtcgcgcggcctgagacaggggagcgggcggggcggtcatggccctaggtgtgaggcctctgcggggctcgcaggtgcaggtcgcacccttagccccaggtcagcgcagccccgagcgatctgaagagggaaagagaacgggcgcgtggtcgattcctcgagctgttggacttgagtgtggcggggagcgggtggcgtgagcgtgtgttggggagacgggggctgctcttgctgggtgtcccgtaagtgcaggcgaagtgtggagggtttcccttcgagtctagaatttcaagtattgaatcttcagacctcccacaaccacctctcttctcggcctgtcgcttctc

SEQ ID NO: 87401 - DNA, 1036 bp, Homo sapiens
ttgaagatgtctgtatttttttcagaataattaatgtaattttgaggtggaaaaaaaaaccaaaaaccagttgacagccttgatttagcttgccagaaataagttgcctgaacagagacttgtgaatggtggtatgagggctttccttgctgtaatttagggtgctaaatttagaattgtatttcctaatgcatagcttggtttcaccctgctggcttagtggtttgttaatctttatggaataactttttttttccctagataaatttatcaaaaaatgacaaattgcacctgaagttcaaaaatgttgtcatactaaatcactgatcctggaccaaatgatcatcagttgataacctcttggtagtttagcatctaaattccaatgtctagttgaatacatgggttaatgacgtcagatgtttgctctaattacacaggggcttcctttcccttgcctcaccctcagtttttctcctctggcacctgccctactgttgacaaaagattgagatgatgtatataaagaattttgaacactttaagaaactaagtggcctaaaataatactgttcttcttgtttgtttcttttgttttgttttgagttgggtctcactctatcacccagactggagtgcaatggtgcgatctcagctcactgcaatctcagcctcctgggtttaagcgattgtcatggctcagcctcccaagtagctaggattacaggcatgcgccaccacatctggctaatttttgtatttttagtagagacagggtttcaccatattggccaggctgttctcggactcctgacctcaaatgatccaccagcctcggcctcccaaaatgctgggattataggcataaaccaccatacctgaccaatactgttcttttcataatcaaataagactaaatcaaaatcacacggtttagaaagtgggtattgagttgtgtgctttttcttttcttttcttttcttttctttctttctggtttttttgttttgttttgtttttgagacagtcttgctct

SEQ ID NO: 87402 - DNA, 1007 bp, Homo sapiens
ccaccacacctggctaatttttgttgggttttttttttttttttttttttttgagacaaagtctcgctcttgttcccaggctggagtgtgatggcatgatctcggcccactgcaacctctgcctcccaggttcaagtgattctcctgcctcagcctcctgagtagctgggattataggttcctgccaccacgcccagctaatttttgtatttttaatagagacggggtttcaccatgttggctaggctggaatttttgtatttttagtggagacagggttttaccatgttggccaggctggtcttgaactctcgacctcaagtgatccgcccacctcagcctcccaaagtgctgggattacaggcatgagccaccacgcccattggattctttaaatcaagctaataacttgaaaaaacagatacagagaagaagttttgtactatgatgtgaactaattgggtagttttggaaagatccctgattttctgctgacattgccaaatgaggttggataatacctaatttcatagatattttcaatgaagtaaatttgaataactgcaagactttttttctttgtcaacttaatgaactttttctaacttaccttagctttggggtgcttgatgcttatgaaaataaataattgtcttcttttactttgttgcactcctaagagcaagatgggtcaccagcagctgtattggagtcacccatgaaaattcaatcagggttcttgctcttgttgtgtctgctcaaactggcaaggtctgatccagaaatacggcctcaatatgtgcgccagtgtttctatcagtaaacgaaggatatagatttcattaagttggactaagtgatcttacttgaatggattatccaaggcatctacccaatgaaaaaccatagtacccctttatgcataaaataaacaattataaaaataagtaaataattgattgcccattctatgaacaaggaggcaaacgattatcaggccaccctcc

SEQ ID NO: 87403 - DNA, 1536 bp, Homo sapiens
tcattcctttgcccttaggcttgagtggaacgctcttcacaccagttgttcctaacagaaccattctcattgcggctttctttccttgaattggtaagctgcctgccttggctgtgggtgagtgtggtttcccagtgaacctttatgtgtggaacaatggaaattatcagaaatcatccctttttttttaggctttctatttctcaaggtacagtcttagggaggtgataaacctgggcatatcatctgtagattgattatgtagtcagggtgggatttaccctcctatttctaaacatgtcatctgcttcaaattaaaaatatgcacatccttttgtgaagcaacaatattgggtcacaataaatcagtttatcctacacattaatttaatagaaaacaacacttaaatgtttttttctaccttgattaccaaaactgcattccattgtttaatttcaggccttttctaacaaagaagctgcatttaagagccttagggatgaagtgcccttttttggaggaggctcactgagccgtgttggaggctgtgtttgtggtcgtgctggctgtgaaactgcctcagtcctctaggacacaccctctccatcctggagtaatctgcaggattgcaacattgttatgcagccagtattgcagtgccttgtgcttttcgaatccagacagggttgattcagccctttattcttttgaggtagataaatttgggtgtcacacagtttatagttgtgggctggctggcaggtgggagggcagatactgtgggcctcagctgtctataaatatgtagctgtattaagtaagggatgagtgggcttctaagggtcaggttataagataccttttgaaatcaagatgtgatctctgagaataacaaagttcctatttcctatgggattttaaagttgggtgtggatgggagaaatttgcttgaaatgaatggctattagcttaattcctacacagacagaacaaaacatgaccaatggcagtttagcatattctggacatctttgcaattttagcaatatattctaatggcaaaataaagcactttatagtttcactaaaatgagtgaaacataaatgtccccatgccttttggcagcatcctatgccatctctttttccaatacatccccctaccccactaatttggtctttggtgcatgtctgtttctttcaaggaattttgctccatacgtaaactgctttggatagattacactctttttaattttattaaatcacttttgtttccagcttttacttggcagaaatctccatggctttggggcatttacatcaaaaggggatcatctacagagacctgaagccggagaatatcatgcttaatcaccaaggtggagacataccgtaaacaattctatagtaaataatcatcttaaaatcctcccacataggtcgtggccattttcaaagccccaaattcatctctctattttgtatatttcctccctcagaattcatggcatcatagtacttgctgatatttt

SEQ ID NO: 87404 - DNA, 1232 bp, Homo sapiens
ggcctcccaaagtgctaagtgctgggattacagacccttaaacaatattaagtagtaattagtaaactatattttcttttcttttcttttcttttttttctgagatggagtcttgctctgtcgtccaggctggagtgcaatggcatgatcttggctctcactgcaacctccacctcccaggttcaagtgattctcctgcctcagtctccctagtagctgggattacaggtgttcaccaccacgccaggctaatttttgtatttttagtagagaaggggtttcaccatgttggccaacctcgaactcccaacctcaggtgatccacctgcctcagcctcccaaagtgctgggattacaggcatgagccactgtgcctggccaataaactatattttctcaagccaaagtagacaagcacagtctaaaaaggaaaaaaaaaaatcagtttgactaaggttctttatccaagctttttttcctctttaaagctgctgaaaagaaatgctgcttctcgtctgggagctggtcctggggacgctggagaagttcaagtagggattggcatctttggtgttttgtggggaagataatgctagttttatgtatttctgagggttatatgtagttgcttataagtttagcttattttgtgacttgtaacttcaaaaaggtgattaatttatcaatccagcaaagtctagtcccctcaacttttcttcctgctttttttttcctaggctcatccattctttagacacattaactgggaagaacttctggctcgaaaggtggagcccccctttaaacctctgttggtaagtatacatgaaagtgtataattgggtgcagtggctcacgcctgtaatccccaaactttaaagggccaaggtgggaggattgtttgaggccaggagttcaagaccagcatgggcaacataacaagactccatatctacaaaacatttaaaagttagctgggtgtggcggcttgtgcctgtaagtcccagctacttgcaaggctgaggcaggaggatcgcttgatatttttttagaataagaaaaatctcagagcagacagaaacattatttttattagcagttcaaagatctctggtctatcctctccagcatctttattttattttattttgagatggggtctcactctgtcacccaggatggagtgcagcagcacgatcacagttcaatgcagccttgacctccccaggctc

SEQ ID NO: 87405 - DNA, 1046 bp, Homo sapiens
tgttatccccatagtttcattgaccatgttcatctgttctctgaatttccaaaaactggtagttaaatttaggtggttgatctaattcagattaaactctcagtattgcatgctttgatcaggaggcataatgtgtagtttgtgtgtgtgtgtgtgtgtgtgtgtgtgtgtgtgtgtgtgtgtgtttaagtgatgttagtggtcactgatcattgcctatgtcagcatttcactaccagggtaatttggcaatgtctggagatacactgattgtcacaggttgggggagggaatgctataggtaccttcaggagtaagagtcagcacagcacagccccctacagctaagcgttaataggcctaaaatgtcagtagcactgaggttgagaaactctggcctacttttataatttcatcaggtgtttgtgaaatggtcttattctaactgttatttcttctttctttgttagctggaattctttcataaagagaaactctttgatcagttagttacccaaggtatagttcatacagtaaaggcaggatgtatgtttgattctttcctagttttcaaaataatgaattagttccctagcatcttccagaattgaccaatgaactttgtgtgtgtgtgtttttttcttttttagtatattatgaacttatatgttttaacacatttgtgtttcatttcatcgcagttatttttattttatttttatttattcatttattgttttgaggcagggtcttactctgtcacccaagctgtagtgcagtggtataatctctgtctactgcagccttgacttcccggcctccagcaatcctcccacctcaccctcttgagtagctgggaccacaggtacaccaccatgcccagctaatttttgtgtttctggtagagacggggttttgccgtgttcaccaggctggtcttcaactcctgagctcaaaagcaatccacctgcctctgcctcccaaagtgttgggatgataggcatgagccactgcacctagcagttatttttattgatgctcaattt

SEQ ID NO: 87406 - DNA, 1113 bp, Homo sapiens
tttttttttttttattgagacagactctcgcactgtcatctgggctggtgtgcagtggcacgatctctgcttgctgcaacctgtgcctcccgggttcaagcaattctcctgcctcatcctcctgagtagctaggattacaggcacacgccaccatgcctggctaattttttgtatttttagtagagatggggtttcactattttggccaggctggtctcaaactcctgacctcatgatccgcctgcctcagcctcccaaggtgctgggattacagacgtgagccaccatgcccagtcgatatattcacatttttaataggaataactgtatactaaaatctattttagtgcatgtttaagatttgaagatgtaatttgactcagtactttccacctacatttttttcttcattctgtgcctgctaagactattctaatactttattatagttaacccccgtgaaaagagctcccagagcttacagtgcatttgattgatgtaacatggactatttattattttctaaattattttgtttgtataaagcaatctgaagaggatgtaagtcagtttgattccaagtttacacgtcagacacctgtcgacagcccagatgactcaactctcagtgaaagtgccaatcaggtctttctggtaagtgaaagaatttccatgtagtcatgggaaattttagtgtgaggatgggctcttcaaagaaaattcagtttgcttgctttgcagttcatgtaggtaacctggcccacttttttttttttttttaaataagccatgcctttataacttattgatgcctacaaaatttattttcataatccaacattttattttagcaattagagtgggaatgtacaaatctttggaaagtatgattcccttttttttttaggccacagacttaaaatgatgtttggcttagcatctcaaccaaaaattagtcatagcagtcggggagaaaaacctcactgactacatgtattttattcctgaaacagctatagatttttggtactttttttttttttttttttgagacagggtctcaccttgtagcctaggctgggtgtagtgtagtggtgtgatcacagttcact

SEQ ID NO: 87407 - DNA, 1001 bp, Homo sapiens
gtagagacagggtttcaccatgttggccaggatggtctcgatttctttttttttttttttttgagaaggagtctcgctctgtcgcccaggttggagtgcagtggcgcaatctcagctcactgcaagctccacctcccgggttcacaccatcctcctgcctcagcctcctgagtagctgggactacaggtgcccgccaccacgccaggctaattttttgtatttgtagtagagacggggtttcatcgtgttagccaggatagttttgatctcctgacctcatgatccgcccgccttggcctcccaaagtgctgggattacaggcgtaagccaccacgcccagtcgatggtctcgatttcttgacctcgtgatccacccgccttggcctcccaaagtgttgggaatacaggcatgagccaccgtgccaggccaagtaggggatttttttaacattaattgtgaatatttgacatcaaaacatattggttcatatgtaatagtgaattctcattgtagaaatgtctgtatagatttatagcttgtctcctcagaaaagtaaaggtttttgatgttggccaacagaaatgatggatttatatcagaagaccatgaatgcatactattttgctcaaatagcacatatgcttgttgattttattactgtacttaatatgtcacatgaacatctatctcattttgtatcctttttttttcttttgtcatttgtttttggactactctagggagaatagaatatggggaaaataattgtttgggagtgttttttccctgtttttgagttcactggatttgtcactaacttaattcttaagcttttcttccccacattgctcactatgtaatacaagtagtgttgtatcttatgggatgggaaataagctctaaagttagcatggagttggggcatggtggcttatggctataaccttgaggtcaggagttcaagaccagcctggctaacatggtgaaaccccatctcta

SEQ ID NO: 87408 - DNA, 2955 bp, Homo sapiens
tgcagtggtgcgatctctgctcactgcaacctccacctaccaggttcaagtgatcctcctgcctcagcctcccgagtagctgggattacaggcgtgcaccaccatgcatggtggtgtatttttgtatttttagtagagacggtgtttcaccacattggccaggctggtctttaactcctgacctcaggtggtctgcccgccttggcctcccaaagtgctgggatgacaggcgtgagcccccgtgcctgggcgtatttaacatcttcatatggagcctgaattttcctgtttttttttctattcctgtcagtagggtagaattttgtttgctagcatatcaggctcaatggaattctgctttcttgaagtgtgtgcctcacgaaatggctggaaagaagttaacgggtctaaaaatgaggttgaggacgtgggagagtgtacacattggtggttttaggtgtgcatcattgtgtaggtatgtcagactgaacaaccccattctcttgagatacatgacaaaatgccattctgtagtccactgttactgtctttcagggttttacatatgtggctccatctgtacttgaaagtgtgaaagaaaagttttcctttgaaccaaaaatccgatcacctcgaagatttattggcagcccacgaacacctgtcaggtatttcacactcttattttcacttttttttgtttttaaacaacctacaagagtgtttgcttaagaagtttatgccaagttatataaatgaaagactgtcatactctctttggttgacataagcacagcatctatatcttacattgcaaaggactagtctgactaatctatgatgttatatggtttaccttccctcccaaaagtaagcagccatactggcaaatgtcctctttatccattcactcagcatttattgtgcaccaagagcaccagcactacatactgcatgttatgtgtgtgtatctatatagtactataatacaggaattgtccctgtcctgatgaagcttacaatttagtgggaaagtcacaatagacaaaggatatacaaaaatataattacaagtagtgcaaagtgctataatttaaaaggggaaaaaaagaatgtactggtagagagcagaggaaaaacaagggggcttctactcacagtgatcagagaaaggcctccctggtgtagtaacatctagcagtgaacggaaagagccagccctacaaaaataggaggtataagaatgttgcaggcagaagaacagcaaatgcaaaaaccctgagggaggagaaaagttgcccttttcctggaagtgaaagggaaatcagtgttcctggagtgtgtggtgagtgaggagaagggcagaggtttggaaaagtattttattttaaatgcaatagaaagctgttttgagcaggggagagtaaaatgatatatataatacgcatttaaatgtatatatatctcattgagggttttgggggtcaggtgtagaggtaaagagaccagttaggaaattctagcagttaatctaggtgggggagagatggttcaatttttgcctttgtgctaatccacgtgaaaataaaattaaatgaaaataaatgtcatgttaccccactccctttaaacgtaaaggaaatatgtcttgttgagatgacccttaagcaaatgaatgatagctcttccttgtcttaaagcccagtcaaattttctcctggggatttctggggaagaggtgcttcggccagcacagcaaatcctcagacacctgtggaatacccaatggaaacaagtggcatagagcagatggatgtgacaatgagtggggaagcatcggcaccacttccaatacgacagccgaactctgggccatacaaaaaacaagcttttcccatgatctccaaacggccagagcacctgcgtatgaatctatgacagagcaatgcttttaatgaatttaaggcaaaaaaggtggagagggagatgtgtgagcatcctgcaaggtgaaacgactcaaaatgacagtttcagagagtcaatgtcattacatagaacacttcagacacaggaaaaataaacgtggattttaaaaaatcaatcaatggtgcaaaaaaaaacttaaagcaaaatagtattgctgaactcttaggcacatcaattaattgattcctcgcgacatcttctcaaccttatcaaggattttcatgttgatgactcgaaactgacagtattaagggtaggatgttgcttctgaatcactgttgagttctgattgtgttgaagaagggttatcctttcattaggcaaagtacaaaattgcctataatacttgcaactaaggacaaattagcatgcaagcttggtcaaactttttccagcaaaatggaagcaaagacaaaagaaacttaccaattgatgttttacgtgcaaacaacctgaatcttttttttatataaatatatatttttcaaatagatttttgattcagctcattatgaaaaacatcccaaactttaaaatgcgaaattattggttggtgtgaagaaagccagacaacttctgtttcttctcttggtgaaataataaaatgcaaatgaatcattgttaaccacagctgtggctcgtttgagggattggggtggacctggggtttattttcagtaacccagctgcaatacctgtctgtaatatgagaaaaaaaaaatgaatctatttaatcatttctacttgcagtactgctatgtgctaagcttaactggaagccttggaatgggcataagttgtatgtcctacatttcatcattgtcccgggcctgcattgcactggaaaaaaaaatcgccacctgttcttacaccagtatttggttcaagacaccaaatgtcttcagcccatggctgaagaacaacagaagagagtcaggataaaaaatacatactgtggtcggcaaggtg

SEQ ID NO: 87409 - DNA, 2911 bp, Homo sapiens
ggggaagagggtgttgctgtggcccactctctgtctaatctctttacagcaaattggtaagattttcagttttacttctttctactgtttctgctgtctaccttccttatatttttttcctcaacagttttaaaaagaaaaaaaggtctatttttttttctcctatacttgggctacattttttgattgtaaaaatatttgatggccttttgatgaatgtcttccacagtaaagaaaacttagtggcttaatttaggaaacatgttaacaggacactatgtttttgaaattgtaacaaaatctacataaatgatttacaggttaaaagaataaaaataaaggtaactttacctttcttaaatatttcctgccttaaagagagcatttccatgactttagctggtgaaagggtttaatatctgcagagctttataaaaatatatttcagtgcatactggtataatagatgatcatgcagttgcagttgagttgtatcaccttttttgtttgtcttttataatgtcttcagtctgagtgtgcaaagtcaatttgtaatattttgcaaccctaggatttttttaaatagatgctgcttgctatgttttcaaacctttttgagccataggatccaagccataaaattctttatgcatgttgaattcagtcagaaaagagcaaggctttgctttttgaaattgcaactcaaatgagatgggatgaaatcctatgacagtaagcaaaaacagaaccatgaaaaatgattggacatacaccttttcaattgtggcaataattgaaagaatcgataaaagttcatctttggacagaaagcctttaaaaaaaaaatcactccctcttccccctcctcccttattgcagcagcctactgagaactttgactgttgctggtaaattagaagctacaataataattaagggcagaaattatacttaaaaagtgcagatccttgttctttgacaatttgtgatgtctgaaaaaacagaacccgaaaagctatggtgatatgtacaggcattatttcagactgtaaatggcttgtgatactcttgatacttgttttcaaatatgtttactaactgtagtgttgactgcctgaccaaattccagtgaaacttatacaccaaaatattcttcctaggtcctatttgctagtaacatgagcactgtgattggctggctataaccaccccagttaaaccattttcataattagtagtgccagcaatagtggcaaacactgcaacttttctgcataaaaagcattaattgcacagctaccatccacacaaatacatagtttttctgacttcacatttattaagtgaaatttatttcccatgctgtggaaagtttattgagaacttgtttcataaatggatatccctactatgactgtgaaaacatgtcaagtgtcacattagtgtcacagacagaaagcacacacctatgcaatatggcttatctatatttatttgtaaaaatccaagcatagtttaaaatatgatgtcgatattactagtcttgagtttctaagagggttctttatgttataccaggtaagtgtataaaagagattaagtgcttttttttcatcacttgattattttctttaaaatcagctattacaggatatttttttattttatacatgctgttttttaattaaaatataatcactgaagtttactaatttgattttataaggtttgtagcattacagaataactaaactgggatttataaaccagctgtgattaacaatgtaaagtattaattattgaactttgaaccagatttttaggaaaattatgttctttttccccctttatggtcttaactaatttgaatccttcaagaaggatttttccatactattttttaagatagaagataatttgtgggcaggggtggaggatgcatgtatgatactccataaattcaacattctttactataggtaatgaatgattataaacaagatgcatcttagatagtattaatatactgagccttggattatatatttaatataggacctattttgaatattcagttaatcatatggttcctagcttacaagggctagatctaagattattcccatgagaaatgttgaatttatgaagaatagattttaaggctttgaaaatggttaatttctcaaaaacatcaatgtccaaacatctaccttttttcataggagtagacactagcaagctggacaaactatcacaaaagtatttgtcacacataacctgtggtctgttgctgattaatacagtactttttcttgtgtgattcttaacattatagcacaagtattatctcagtggattatccggaataacatctgaaagatgggttcatctatgtttgtgtttgctctttaaactattgtttctcctatcccaagttcgctttgcatctatcagtaaataaaattcttcagctgccttattaggagtgctatgagggtaacacctgttctgcttttcatcttgtatttagttgactgtattatttgatttcggattgaatgaatgtaaatagaaattaaatgcaaatttgaatgaacataaatagaagtgatttatttttttattatcttaaagataggaaggaattagtatacgtatcaggtgtataaatggtttaaatttattttaacatgtcagatgtgttcaagttgtcatataaataaactatgtatgtaaggaatgggttaaaagctgttctgctgagaaactgaagctatttaagtatataacaagttttagtattgatttttaagttagatgttacacatctttgattttcaagttatgtcagatagtagatatgaattgtttacttaaaaaaatacatgtaacaatctacgtgaaagctagc

SEQ ID NO: 87410 - DNA, 1035 bp, Homo sapiens
ttgtgcatacatatcaaattatcaaatgtagctgaccaagtgtagctgaacagattgttgattgttagcacaagaaggtcttcctagagttttttatgaagctagctttcacgtagattgttacatgtatttttttaagtaaacaattcatatctactatctgacataacttgaaaatcaaagatgtgtaacatctaacttaaaaatcaatactaaaacttgttatatacttaaatagcttcagtttctcagcagaacagcttttaacccattccttacatacatagtttatttatatgacaacttgaacacatctgacatgttaaaataaatttaaaccatttatacacctgatacgtatactaattccttcctatctttaagataataaaaaaataaatcacttctatttatgttcattcaaatttgcatttaatttctatttacattcattcaatccgaaatcaaataatacagtcaactaaatacaagatgaaaagcagaacaggtgttaccctcatagcactcctaataaggcagctgaagaattttatttactgatagatgcaaagcgaacttgggataggagaaacaatagtttaaagagcaaacacaaacatagatgaacccatctttcagatgttattccggataatccactgagataatacttgtgctataatgttaagaatcacacaagaaaaagtactgtattaatcagcaacagaccacaggttatgtgtgacaaatacttttgtgatagtttgtccagcttgctagtgtctactcctatgaaaaaaggtagatgtttggacattgatgtttttgagaaattaaccattttcaaagccttaaaatctattcttcataaattcaacatttctcatgggaataatcttagatctagcccttgtaagctaggaaccatatgattaactgaatattcaaaataggtcctatattaaatatataatccaaggctcagtatattaatactatctaagatgcatcttgtttataatcattcattaccta

SEQ ID NO: 87411 - DNA, 1086 bp, Homo sapiens
attaattcaaacagtcctatttgctaaacccaaaaaccaaagctgaaatcccataacatcaaatcctcatattaacttaatgttcattatatgtcacatctaatcattttgtgctgagtattttattcaatttatagatttgagccatctcagcaagctgaagtacatttaaacacctagagtaacaatttgatcaagacaaatacaactatgtcaaagtcaaagcaattttatctgattcacctgtttttaacatttagattttaaagtttcataaagtgattattaggttgaggggtgcaggcatggagagaacaggacaagatactctactagtttaagaattatgtgtatgacaatgttactgttgaggatgggtatgttctattccacttgttttccctacttagataatccacgctatgtgaaggtcgactccccttccctccagtgaaacctgaggaccgctggattaagatagtctatttccgtttctccatttctaaacaaatatagaacctgctattacttcaaactagtgatatgaagataaactataaaactgttaaaagaggaaaacagtagtatgtatcagtaatcattaatgtgaatcatgcagtgacaagatttgtaatgttacctacttttaatatgaggtagagtaaagccagcagtatcccaagactccatctagttacgttaccaaactccccatagcttataaggtagcgaaaccaaactggtatgggaacaaaagttcggtagtattgacacaattcttctaaaagcatataccagtaaccctaaaaaataagaagaaaacaaatagagctacccaaactacttaactacatagcacaaacaatattagactgagaacactgagtatattatacaataatataaataactataaaattaatcttcataatgattatgactgaacctcaagctggttctcacatattacagtcactgagtggcctgctttgaaagaatttctaggttggacgcagtggctcccagcactttgggatgggcagatcacctgaggtcaggagttcgagaccagctggccaacatggt

SEQ ID NO: 87412 - DNA, 1050 bp, Homo sapiens
tgatcttggctcactgcaacctccgcctcctgggttcaggcagttctcctgcctcagcctcctgagtagctgggattacaggtgcccaccaccacacccagttaatttttgtatttttagtagagacggggtttcaccatgttggccagctggtctcgaactcctgacctcaggtgatctgcccatcccaaagtgctgggagccactgcgtccaacctagaaattctttcaaagcaggccactcagtgactgtaatatgtgagaaccagcttgaggttcagtcataatcattatgaagattaattttatagttatttatattattgtataatatactcagtgttctcagtctaatattgtttgtgctatgtagttaagtagtttgggtagctctatttgttttcttcttattttttagggttactggtatatgcttttagaagaattgtgtcaatactaccgaacttttgttcccataccagtttggtttcgctaccttataagctatggggagtttggtaacgtaactagatggagtcttgggatactgctggctttactctacctcatattaaaagtaggtaacattacaaatcttgtcactgcatgattcacattaatgattactgatacatactactgttttcctcttttaacagttttatagtttatcttcatatcactagtttgaagtaatagcaggttctatatttgtttagaaatggagaaacggaaatagactatcttaatccagcggtcctcaggtttcactggagggaaggggagtcgaccttcacatagcgtggattatctaagtagggaaaacaagtggaatagaacatacccatcctcaacagtaacattgtcatacacataattcttaaactagtagagtatcttgtcctgttctctccatgcctgcacccctcaacctaataatcactttatgaaactttaaaatctaaatgttaaaaacaggtgaatcagataaaattgctttgactttgacatagttgtatttgtcttgatcaaattgttactctaggtgtt

SEQ ID NO: 87413 - DNA, 1477 bp, Homo sapiens
cccatacttcatgactgttttgcggatgccttctgccattagagaactggaagcatttgcagctcaacttttttttttttggtgcaaatgttccctaaaagatcatttgtgtagggcagcagagccttggcattaagggagaagggaggagtccagtgataaataacctgaaaattcatctgttgtgattatttgctactcctttagtgaataaaggatacccagtgaggaatatactgctggtatttaactgcctgtttacttagaatatcttttatttgattttttaggagacagaggcctgaagcaaagacatctgggtcagagaaaaagtatttaagggccatgcaagccaatcgtagccaactgcacagtcctccaggaactggaagcagtgaggatgcctcaacccctcagtgtgtccacacaagattgacaggagagggttcttgccctcattctggagatgttcatatccagataaactccatacctaaagaatgtgcagaaaatgcaagctccagaaatataaggtcaggtgtccatagctgtgcccatggatgtgtacacagtcgcttacggggtcactcccacagtgaagcaaggctgactgatgatactgccgcagaatctggagatcatggtagtagctccttctcagaattccgctatctcttcaagtggctgcaaaaaagtcttccatatattttgattctgagcgtcaaacttgttatgcagcatataacaggtaggacataataaaacattgacttgttttcattcctaaattcagttaattttctttcattattggtaatctacttaatgcatccagttacttattttctgtgagcttttattattgtatatgtttatttttaatttgtgtcattgttagcttatataatcctctttgatttttttttctttcaattaactggaacttattttctaacaggaatttctcttggaattgggctgctaacaacttttatgtatgcaaacaaaagcattgtaaatcaggtttttctaagagtaagtataacaagcaactaaaaaattattaactgtttctctccatagattttagagaaataattttgagagaaataggaaataacttgaaagaaataggaagtaataggatatattgtaacatccacgttatgttaaatttgttatctaaatcctggaataaattatctctcctaatgctgaattccttcaccttaccttctttgtaagaaaaaaaaattggttactgttaaagtagtaaaaaggattaaaagagttagaacacggtatctgatctgatttggcaagtcccttcatgttgtatcagttactttgaccatagtaagtaagaccatcatcatgaaaaacttttagtggctgggcatggtggctcacacctgtaatcccagcactttgggaggccgaggcgggcagatcatgaggtcaggagattgagaccatc

SEQ ID NO: 87414 - DNA, 1050 bp, Homo sapiens
tctctcctctcatctcgggttctgacaaggcctgatcctcacagcccaaattcacgattgtgaggaaaggtcagctcagaccaaacgtcaccgcccagacagacacaactaggtcaggcgtcaagctcgcggacatccgagcccggaaaccctaacactcctccaggggtaggttctccaagcctgaacatttttaacctcaaaacgcccaggatctcggaggcgtgtggtggatgccacataaatacataacacataacaacgacttattatttagcgccaggcctgaaggccgttctcaggcgcagctcgcttgttctcgctgccaaaacaccccggcagccgtgagctctccactcggcgcggtgcgggggcggggctaggaggtggagccggggcagggcgcgcgcgcgcgcgtgagaacgtccggggagcgcgcgcgccgccgccgttgccgccgggctgagagaagagcttgcggggtttgcggttgatggccccgactgaagggctggaggcggtgtatgccgctgttcttgctgtcgctcccgacacctccgtccgcttctggtcatgagaggttaggcctgggggaagcgggcagaggaggaggcggcgaggggccgcggcgcagggggctctggggagaataggcactcgaggctcggacgtgggtggagaactctgccctcggagattccggaagagttgtgttgaattttcttcccttttttctcctctttcttgtctgtgcatgaaggaaagtgggagggttctatgttatttatagaaaagacactgaaagcctgctgtccaacgtcgctcttcagttttgacgaaataacacccgtggcgtcggggcctcggtgaaagcctttagtgaaaagcactgaaacccaaaccgccagacacggtgactgcaccactgttcagtcctgggagtgaaatagaatgacacagaacattccctgacgttaactctagcctcctcctagacaaacgggaaaagcacggcagtgtgggatagcctctgcgttttgtcagctggga

SEQ ID NO: 87415 - DNA, 1031 bp, Homo sapiens
tgtacttttaaaatgcatttaaaaaaatttcttaaagtagtatattcacaggctaaaaaaaatccagatagtacaaagcagcattcagtgtgaagcctttcttctaccctgacaccttagttcccctccccagaggtagctggttattcatgtgcacgtgtcctgctttttgtcacttcagcgtataagcaacatgtaaaatgtgtaagcattctattattgacttgttagaaatccttatttatgattacataattatcactgtgtgatgattaaccatttttctattactgaacatttgttttagtctttaggcttgtaggcttttatattcagggaatatttttgtgcatgaaatctgcattttgagatttttttttttttgagacattcctatgtggggaactattgggtcaaaagatatataatgtaagtttcttgatataatctaagcagatttgttaaactgttttcctaaacttttaggcttatactaattgaatatatttctatatgtatatatttaagtgtatttaccttttaacatgtgttgtctgctttgggtggaacagggaaacaccagacccaagtttccaggaagagttctctggtctcctgctcttgaaaatgttacgatcagctatagaagcatccaaggataaagacaaggtagactcacaacaaaacccagtatctcccaaacagatagttaatgtattgtagctgcagtgtggtagttcagtgtggcttgatgttcctcagactgtcccaccaaatgtactcctgttcaaaagagactgagggtgtgctcagggtataaatggcccattccacacgtgtatggtttctttactgtctcctgcctcctgaaaaatatcagtgcccattgtaatactacatgacatattcagattccttttaaaattaacttttttttattttccaaaaaaaaaaaattgacaagtcagaaagatgagtagctcttggctttgaatattacctgttaaactaataagtttaaaaagcacatg

SEQ ID NO: 87416 - DNA, 1936 bp, Homo sapiens
ttgatctatagattcagtgcagtctcaatcaaaattccagcaagttattttgcagatatcaatgaactgattctgaaatatatatggatatgcaaaagacctggaatagccaacacaatattgatagagaagaacaaaactgaaggactgacattccctgacctcaaaatctactataaaactacagtaattaagacagtgtgatactggccaaggaagagacaaacagatcaatggaacagaatagagagcccagaaatagacccacataaatatagtcaactgatctacaacaaaggagcagatacttttcaacaattggtgctggaacagctggacatcacatgcaaaaaaaaaaatgagtctagacacagaccttttagctttttaaaaatatttcttgttaaaatccggggttcattcaaggtacatgcattgcatttagttattatgtcactgtagtctttttaaatgtagagtccccccacccatcttttttatatcaaactgacttaggaaagaatccaacccaattgtcttatagaatgtgaactctaagctctgtcaccaaagataacaaaataaatcacattctcaatttgtcagattgtttctttatggtgttaacttactctcctgtcccatgtatttccaaactggaaatgaggtctagaagtttgattagattcaggttacacaaggaactactaatttttaattgcctgctgggataactaccatctttacagtagttgttgccatgatgataagttcttactgcttcctttgacagatgttaatgttcgtgtgtcaagtctcacactcttgggagctatagtgtccacccacgcacctttacctgaagtccaactacttctgcaacagccatgttcttctggactcggtaatagcaattcagcaacccctcacctcagccctcctgattggtggaagaaagcccctgcaggaccctctctggaagaaacgtcagttagctcacctaaggggtcttcagagccctgctggctcattcgactctgcatttccattgtcgtactgcccaaggaggattcctgttcaggtagcgatgctggctctgcagcaggaagcacctacgaaccatcccccatgcgactggaggccttacaggtaggagatttcatttcctcatctctgaaatggaagtaaccattcctccttcagagtgactgtgaggagcgagcaggtaaaaccaagccatatgtcaattgtgttcgtgggaattgtattttaggtatgggtggtgtattgttttgttgttgttttgttttggggaggtgttctttggttgtaaaatagcagattcattcctttttgttctttgattgcaaattattttagtcccttcaggtattatatgacaagtggatgtaatagattgtagaataattctgagtgaaattgtacagttaatttttgatttttgcaacttaaatgtttaattctctataagcttttccttggtcttgtacctgcttagagtaacaaaataattgttccttcaaaggaagaaaacaatcctagataaaagagtttactttttctatacaaatatgatctgagactaggcctggtcctgaggtctgctgctgattaactgggcagcatgaagcatgtcctttcatcttgtcaggcttaggttctttagttgtaaaattcagttaatacctactttaaagaatagttccaagacttaaatgagattctgttaatgaaaagcaatcatatactaaagcaccataaaactatgatacagtttattgatgttagtcacaaaataaagattatggttcttaatttcattcaacagatttcagcccctgttaaatgtaagcgatttctgaaatattgtaacacttttctggatattgcagccttgcactcaggtcttagaggg

SEQ ID NO: 87417 - DNA, 2642 bp, Homo sapiens
aattttttgactgaaaatgttaattatcatttttggatgagctggcctaagagagtacaatattattccgtattaatagtcctatgcttattacctatatcccatttttgtaaagttgggctttcttttcctttctaatactacaaaatcatctgagtaccaattgaaagtaatctttcaaccttataaagaaaatcttggtgccagtgacacctttcctaacaaatacagcagtccatgacaaagatgttctttttgtcctttccattcataagattgtacttaatggtattccttttttgaattgtcaaatactgtcactgcaggcagtgttatttcctgtacctaagactgtttctgaaagttggatcactaatgatgtctgccaagcagtatgtacacaaagttcctaaagtcctatttaagttaacattgaacacacatacttcagagtggaatatgaggcataatgttctcaggaactttaataggaaacagactctaggcacatgtgttttttctaccccatgggctgtttagttctaacttttcagttggcattctgcttgaataaaccaggcctctaattcttattctcatgcttaggatttcagatttttgtgctatggtgtagcttagatttatttcttactgtaaaacacctaacagcaatgggtttctagatttttttttagccaggtgtggtggcacacatgtagtcctagctacttgggaggctgacgtgggaggattgcttgagcccaggagtttgaggctgcagtgagttatgattgcgccactgcactgcagcctaggtgacagagcgagactgtgtctctaaaataaaaataaaataaagatttttttttaggtgtgggacgcaagtggcctagtttttaggaactaacagataatcccattgcctttattcttccaattaaaatgattgtaaatactttgaacattaaatatgtataggaagaagggaatctgactcctaattttcaactaatcaatgtgaatcatcccgaaatttcagacacgtgcctgtgctctgcaagttttatctgccatcttggaaggctcaaagcagtttctttctgttgctgaagataccagtgaccacagaagggcttttacccccttctccgtaatgatcgcttgcagcattagagagttgcacagatgtcttttgttagctttggtggcggagtcatcctcacagaccgttactcagataattaaggtaatgtaccaactgtgggttccagagcaggcttctctgttttaattttgtatactgttttacatagctcaaaagtaacttgacttaagaatataactaagtaatagttttattaaaaatacactatttggaagtctgtacctactcgtctgatcttatctataatctctgtatgtcccaataaatgatttgctaaaaatacttctttatctttagttgtaccaatgagaatacaagtgttattaaaaaaaaggggggctaatttttagttgtgtgaaaacttttcttttttaattaaatgctgcaaaatttgttctatgctgtggtttaatcaagccttttgatgagctactttttgtgttttacagtgccttgcaaatttagtatcaaatgcaccttatgatcgtctaaaactcagcctgctgaccaaagtctggaaccagataaagccttatattcgccacaaaggtttgtagtggcttaaaactgatggcttctttgtatcagtcagatgcagactattagtaaaaatatacagatatagatatatgtatatattcaaagcatttttacaactcttaagagatctctgcttattcttctcaacttttcaggggtataagctgttgcaagaattgacccctcaagtcccagtggaagtgagctagaggattaattgtaaagtttgcctgtttaatgctcagggcagtgaccagagtatccctttagaattaagattgagccaggtgcaagcagcccccctgaggagtatgattgtttatatcccttacacataggtagaggatggatggatggttagatagacagacagacggacagatagatattatctactttttggaaagaaaaactggaatacaaaatttaacttctttattgttatttcctatgaagttcagataaaaccccagaacttcaaatctttactaagtgcagtcttattatttcctcctacacataatgtatttgtgctataaacacttgccttttgtagatttgcctttcttttgtttgcaagctttcagatcggaccacattctgatgagttcagtttttcaggcagaattgtaacaaggaaggaatagtggatgttttctgtgacatagtgggaagagcatgggacctgaagtcaatccaagggtctggatcccactcccatttttgccatctcatggccatgaccctctctgaaccctaatttcttcctaacagcaagaattataactacatcataagatttttatgaggctcaaatgagataatgagatgtaactaagtccagttcactacttacactaatatgtaaaaaagggacccagaaagataagtcttaccctaaggtttcccatcacattcatggcagaaataagatgag

SEQ ID NO: 87418 - DNA, 1044 bp, Homo sapiens
atatcaaaatgttgccctcttgttctccagttgtgttttttaattgtcagccttaataacttgttatagagacaaattgtcttaacatgttttgattgtagtttgaaagaaaaatttttaataacacattgacatctttaggaattatttagaatgtttaatttttgaatgtatcatttgaattggtggaaataaataccatttcatgtttgcattttttttaaaaaaatgattttttaagtgttttttcttttttctcttggttatgaaaggtcttaccaagctaaagttcgccaaggagccttagtttgttttctttctactataaaatcgatagaaaaaaaagttctttatggctactggtcagcttttattcctgatacgcctgaacttggcagcccacagtcagtgtccttgatgactcttacattgaaagacccttctccaaaggtaagagaatttaaactctaagctttataataggaagaaaaaatttacagatccttattgttatctctgccttatcctgtctgatctgaatatagctcttagtaacactgacccaagttccgacttgaccactggacagacaggaaaataggaagtgggcttatgtgaataatacactgaggctgatcatgtaggatcgcttcctgccccagggcttgcttgaagcctgagcacactgaattctaactttggtgtctcccttgaactgcactgaagcagctgtgcttctcttccttttatgaaaatgttgattgctgtggtatttataataagaaaacatcagaaatggcttaaacaactcagtagaatatcatggtacataatggctatgaaggatgcataaggcttagaaaaatgcccaaaatgttctgtgaaaacacaggatatagaattatgtatacagtaggatcccaaacatgattttttcttgcaacttttctagttttcaaatcatgtgtaataaatatttacatattttaatgagaaaaacttatttttaaaaagaagaaaaaaatgattggcaggcatggatag

SEQ ID NO: 87419 - DNA, 1058 bp, Homo sapiens
agggtattaatgaagttacacttttttcttttctcttttcttctttctttaaactacatgttggggacatatttagtcactttaaaatgaagaagtaacgattcagtgaaaagccattctgaagtagttattatatatgtcttcatttgctcccacaatcagaataaaaagaaaaaatccaaagtaaaaccaaagaaaatccagcaaggagaggaggaggaaaaggaatccagtggtgaaatagaggcagccccagtcactggcacaggcagagtgaacctgcatgaagggaacacttggtgtccctcctccctgggtgtccagagtttgcctttagatggaagtggagctgcagaaaaagatggagtctcctcatccttcagttcttccagttggaaaagggtcagcagtagtgagtcagacttttctgatgctgaaggaggcatgcagagtaaaatgaggtagtagtattttgttacatttttataccttgtattctaagttgcatgtaagtttataacttaacctgaatgctgcatgtgatttaacttgaagagcctgatttctggggggcatggtgttattcagaacatgacttgttctctttttttttttttttttttttgagacggagtctcgctctgtcgcccaggctggagtgcagtggcgggatctcggctcactgcaagctccgcctcccgggttcacgccattctcctgcctcagcctcccgagtagctgggactacaggcgcccgccactacgcccggctaattttttgtatttttagtagagacggggtttcaccgttttagccgggatggtctcgatctcctgacctcgtgatccgcccgcctcggcctcccaaagtgctgggattacaggcgtgagccaccgcgcccggccgacttgttctcttgatctgccattgcacatgtcattcctctccttagaatattcttttttgccttttcgtcttgctaaccactactcatctttgatatgggctcagaaatcatattccccgggaagccttttctgccttggtgttattcgta

SEQ ID NO: 87420 - DNA, 1056 bp, Homo sapiens
gttcctccctgaaaagggactgatataaccacattgtggggttcttatgagaagtatatgaaataaagcattcaaagggcctactgttattgttgttgagttttacatttagcagagggttagcttcttttataatcattatcataatcatcaaaattgaagtttttaaaattttcccactatttcaaacaaggctacagttcacatcatcccaatgtcggaagtgtttcttaaggagagagttctagaaatgagattactgagtcaagaaatcaatcttggtcagaattgccctccagaaaccaagtttctataatttatcagcagttcccacatacatccccttgcttttaagagggctgggtttgccatattacagagctttcccaattctgatctgtgctatcttttttatcccttgtcacatttttcttgctaaacatcttctctcttttttcttgctcaccatttgtacatagtggtttataaacatgtacaataagaccacttcattattcttttcttctagaaaagaattcatggtagtttattaggtctccttagatcttcatttctgctttgtgtgtgtatatgtgtgtctataataaagttttttttcatcatctagagactgtctctcttccatcctaagtggtgctagtaagttgattcctggacaaccagattttattctgccttctaactgggtctcccttttccccctagttattgcaaaatgcattaaaaggtatacagtcacttctaaatggtgggagaatgaaactaacacagactgatgaacttggagcacttttagctgtgctaaaggtaaggcaagtcttcatatgatcattgtctttcctgtttcaacccatggtacaaggaccactttacatccttattctaaggctaactttgaggtattaaaagttcttacatatattttgagagagtagacaaaaatgttcatattcaaagacacttaatattaagaacagaaaataaatctccatttaataaatgcatcaaaattttaaaattatttatgaatcttag

SEQ ID NO: 87421 - DNA, 2117 bp, Homo sapiens
tgcctttctgtttggttcagtaaaccaatatcattcaggccccccaaccttataatttcttttttttttttttttttgagacagagtttcacactgttgcccaggctggagtgtggcgcgatctcagctcacagcaagctccgcctcccgagtttacaccattcttctgcctcagcctcccaagtagctgggactacaggcacccgccaccacgtccggctaatttataatttcttatggaagatatatttgaacaaaatatatctaagaataaattgaaataatcccctgcctctttcccaccaatatttttcccctttcctgaagctaccatttttatggtctacttttgatgcttctaaaatataagaagtagcttggggccaaggggacagcaggataaaaagaccccagttatttatttaagactgttaccacatgagtatgtgaatatatttaagagcacaaaacatatcaactagcattatgtgaattaggatgcttttggctgcaataagcagaaaagccatcccagagtcactaaacaatttttaaaaaaataaaaaggaatcactccatgtcccaagtcccaagggacgcatctgtagccccttaataataagaggctcatctttcccttcaccgtcctcagcatgtgggttatcctcagctagcatgtctcacagtcataagatggctgtgccaattctggacatcccatgccaaagaaatgattactgttcagcagaagctaattaactttattttatgttgtgtctcttgtacttaacagtaaggaaacgtgtcccatgaactctctagtagactccccaatatcttgctggagagacttaggtcatataaatacctctctaaaccagtctttaagcaggaggatggtcttattgtgaatggctccagctagtagtttcaaccttcactacacattagaatcacttggaggaggacttaagctcccttgatgcttacaatgtgcagccacagttagcctacatcagggtttctcaacctcagcactattgatattttggctcagatcattgttttaggggctgtcttgcacattgtggaatgtttagcagcatccttggcctctacccactagacgccagtagcacctctccaattgtgacagtcaaaaatgtatacaggcattgccaaatgttccttgggggttaaggttgccccaggttgccccactctcttaaactaattagcgtttacccttaggtctcacatgggagaggtggacatccaattaaattagtactctgccagcagggaaggaagaaatggatgctagtaggtaaccaacagtgtctgctgcatggagtaaggctgttttcagtttagaatctttgaaactaacatgaggtagcttctgtatgtttactattctcaggtgtatcatctttgtaacactggcaattggagatgttcctgatcacctgtggcacctataaccctttaccagctttccagcacttggtgacagtttgtctcaattgtccataaattgacacttggattagcctggtctgtcccaacaagattatcagctccttgacagcagggatatgccctctcttcatggtgtattcctcatgtcatgttagagatgcagtaggtatttagcagttatattggttcactgtgtattcattgagtgtttattatgtataaggcagtttaattaaatttcagtgcgttgaaatactcatatctgtgtattcacagctgccaatgtctggttagttcaaggaaaagttacaaggacttcatcaagttctactttactaaagaggaagaagtgagcaagaccttggggtggggagaaggcccctacgttgatcaaactttcaggccctttagaggtgatccttttgacacataaacgacagacacacactctctcttttatacagcttgattcaggtgagcatacatgtccataaaagcataatattttttaaaagttagatcagaatatatcttttcctgtcctgttaggtaattgttgatgaacagcacttggatttcctgttggcatatactatttcggctattcatcagtgtagttcctggacacacaggga

SEQ ID NO: 87422 - DNA, 1934 bp, Homo sapiens
gatggtggcttcccaggcagatatcagttcccagcatacacacacacacacacacacacacactctctctctctctctcacacacacacacacacagatatacaaacacacacactcacacagaaacacacacacaacacacacacaagcacacactcaaacactcacactcacacatgcacacacacactcacactcacacaaacccacactcactcacacacacaaacacacactcacactctcctgtcctggtgctcagggaccagggagcatagagtgacctgagtcttcactggcacctgctgtcatcgagagggcatgttccctgtggaataaatcggtagcagcattaaaggaagaaaggcgttttgctgtttcccataataaaacggggagttgtttctatcccagtgacaccccttgcagggtgcctgagtgatggtcctttacgcttttatttgaatgctgaccaattcgaatgcaaaccctgcagtctgctgtgttttggtgactgagcagtgctgcccgctcctgaccctggcccacctggtgttggggtcaccagggttcggggaaccagctcctccagggttactcctctccctcccattcctcagatgatgctcagcgcccttcatcagcagcccccccgggggtcccactccacagtttccaaagccctctccatccacctcctttaaactctctgacatcccagggaagcggattatctctgcagttcccattttacatttgggaaacccagggcttggagaggccatgtgcaccacctcatgaagttgtccctaccccggagctcacagtcaacagttggcaaccctgttcccaccctgttccacactggggctagactccccagccttgcatgtatgtttctgtggaggaggaggaggagggcccagggagggcgagagtggagttcggagctgagcatccctgcagcacagccttcaggccaccccaaagcgtttctgtgtgggaactgagtgggtgggcctgacttcagtggggtggtgggggctacaccttggtgccaggcacccgactctcagcccaccttctctccctgctcagtgccagtcaagtggggtggaaactgccagaaggaccgccagtcccccatcaacatcgtcaccaccaaggcaaaggtggacaaaaaactgggacgcttcttcttctctggctacgataagaagcaaacgtggactgtccaaaataacgggcactcaggtgggctggatggaggccccaggcaggcctgggcacccgagttccccaaggactgagaggatggggctcctcccaggagggtgtgccagacccaggcccatctgtgctgtgaggtggctgaaaatcccatgggggaggacagcttccaggaggagagagcactctagtatgttttcgttacttttgtcagaccagtctgggatgtgggggcaggaaacgttccaggaagaaggacatgtgcaaaggcgcggaggcatggaacagctcggcgtgttcagaggactgccaggagctctgtgtggaggaaggacagacagtgaagccaggcagagcccaagcaaggcccaggggcagctgggctggggcccaagggcagatcacccaggcctgaggagtttggacattaccccgaggacaccagggcaccacagaggaggtggacgcagaggaggcaccaggacagagctgcagtttggggcagtggagggtgcaggagagggggaggcaggcagggagaccaaggaggaggccagggaaaggtccggggctgtcccaccctgtcccaccccgcgccacccctgcaggccagaaccagagctcatgaaggttgggaggcaggagacaatgtcccatctgggtgaagctgggatgaagagctagaggaggctgagggaggctgg

SEQ ID NO: 87423 - DNA, 1050 bp, Homo sapiens
ccatggaggtgagggccccttcccgactgggaccttgtctgggctctgggcgcgcacctgccttgggcaaggagggtagtccaggcccttcataggtccccttttcacccctccaccccgaccagatgcacatagtacatgagaaagagaaggggacatcgaggaatgtgaaagaggcccaggaccctgaagacgaaattgcggtgctggcctttctggtggaggtgggactcccatcccccacttcccggggaacccggggctgagagcttcttcttaggattcagagacctgggactccagcgaggcaggagggggcggggagactccaacttccgcctctgtttctggggttgcatgtccccgggccaggtggggagcccagagcctcaatcccagaagctgcctggccttccgcccccagatcgggagaatgaactggccaccaccactggctccctgcagactttctcaagacccttccctccctttccaggctggaacccaggtgaacgagggcttccagccactggtggaggcactgtctaatatccccaaacctggtgagtcaggatgggggagaagggcttggggtgaggggggggattcctcccacaaaggaaggggtgggtgtgcggggagctgggctctcagagtgcaggggaagaggggctccttctcccaccctcactgacagtgtcctctgcccctatctcagagatgagcactacgatggcagagagcagcctgttggacctgctccccaaggaggagaaactgaggcactacttccgctacctgggctcactcaccacaccgacctgcgatgagaaggtcgtctggactgtgttccgggagcccattcagcttcacagagaacaggtgcacagggcctggggcagggcatgggctcccactgcctggctccccagaaattatccctctgtctgccctcagaggtccctcaggatacaggtggggagcccaggtaactgaagtccgttgttaatcatcgacattcactgaagacaggcaagaaaagcctgagct

SEQ ID NO: 87424 - DNA, 1203 bp, Homo sapiens
ttgcactgctttcattccaaaacagtggttctcaaagtgcggcccctggaccagtggagtcaacatcatcactgggggaatttgttagaaatgctaatcctcagagctactgaatcaggaactctgggggtggagcccaggcatctggggcccaacaagcccgccccccagctgatgctaacgcatgctcaagtttgagagccacagtcctgtagtaagagtgacaagagaagcaggcattgcgggccccctggggtgtgagtgaaaggaagccaatgggcacttagccttcacccatgccacgcacctcatttacatcccctattcttatcatcttcacgaccaccttgagagccaggggttcagagcccctctttcctaatgagggctcccaggacaggatgaggtgcctgcctgaggtcacacggcagggagtgcagctccccctgccccgacctgctgagccccatcacttccgcagatcctggcattctctcagaagctgtactacgacaaggaacagacagtgagcatgaaggacaatgtcaggcccctgcagcagctggggcagcgcacggtgataaagtccggggccccgggtcggccgctgccctgggccctgcctgccctgctgggccccatgctggcctgcctgctggccggcttcctgcgatgatggctcacttctgcacgcagcctctctgttgcctcagctctccaagttccaggcttccggtccttagccttcccaggtgggactttaggcatgattaaaatatggacatatttttggagaaacctttctcaagtgtgtttttagccttccacaactaccccaccctgtccccctccacccacccctgttcctcctgttccagggcgggggctttaaggccaggagatttctcccaagcaggtaccaccaggtgtccccactcccgttctatgtgaattccgtgtctataccccactcccttctaccaggacctggaccttggagagatgctgaaggcatcttggagcttcatcacagcggaagctagaggagttccaatctgatctcttcatcatatagagggggaaactgaggctgagaaagacaaggttggggccgggcatagtgattcacgcctgtaatcctggcacgttgcgaggcagaggcacgtgaatcacttgagccctggagttcaagaccagcctagg

SEQ ID NO: 87425 - DNA, 1128 bp, Homo sapiens
atttttggtctttgtttattcatttagaccctgcaagttgattctcattaattgtcagattccactaccctttcttcctcatagatagtaattaccaatgtaactaagtatttgtgttctgatatctgaggccagtaactattaatatctagttctcagagcatttggaaaggttatcttaaatggctacctaaattgaaatccttttcagaaaaaatataattgcaagtaggtaggactggcctaaattgtctaatgtaataaagtcagacaaaatgcatactttatagtttcaagattttcagtatataaaatctgtccattcccattaaaaagtggaagattttaaataatttctttacagatgttttatttaagcaggtagctcaatctactaatgttgtttgatctgtgtttgttatactggttgtaattaatttttttaattcatgaactagcagaaaatttattaaattaactattaactacattcaccttgtaaattactgtataaaacttgttgacaatgcactgactttagaaagatgttaatgtacataaatagagtgtaaataaaatagtgttgatgtaccgaaatatgaactgtataaaaagtattggtaattgtatatggggtgtacctgtttatctgtaactagtatacaaacaaattaaatactgtggatgcctccatgtgccgtttttcctcatacaagtaaacacagaaagacaaattcttcagcctccctctctgtgatcctgttttaattctcctacttgaataatttctttctgacttacagaggggatgcttcatctctgaggttggaaactctgtagagcaggattcccaaactcctgggctacagaccagtaccatctgtggcctgttaggaactgggctgcacagcaggaggtgagcggcaagctgtatttagagccgctcccccttgctcccattaccacctgagctctgcctctgttagatcagcagcggcatgccattctcacaggagaacgaaccctattgtgaactgtgcctgctagcaatctaggttgtgtgctccttatgagaatctaatgcctgatgatttgaggtggagcagttttatcctgaaaccactcccc

SEQ ID NO: 87426 - DNA, 1073 bp, Homo sapiens
acacccagcttactggcatattttctggagaaagaaagagccttaattgtttaaaagcccttagctatgaagctattactagtttttacatgtgagtcagtgtatgtgagaaatgtttatcagagaaaactggtttgaatatattaattgctgaaacccaaatttgatagaataggcaacaactctaaaactggcaatacctcagcccctttaatgactccactgtaaccgttctctttgtgtcaataaagatggttttataaatacagagaagaatgtgatagtgactgatttgaaatggtgatagtgcctgtcattggcaggcatttagaagaactaaagggaggaatcagaggcctgtcttctgaactctctattctcttgtttgtacatacagatgaggacagaactgtatttcctgtcatctcagaagaatcgccccagcctctttggaatgccattgattgttccatgtactgtgcatacccggaagaaagacctatatgatgcggtttggattcaagtatcccggttagcgagcccactcccacctcaggaagctagtaatcatgcccaggattggtgagttcaggggatccatctaaacctgtggtttccaaactctagaaaaataatctatatgaattctacatgactgataggacccagcctatgtcaagttaatcactcttggaagaaccactcagacagcatacaattcaaccatttggtttgatatttggagtaggagagatgatacagcttccttttgccaaacattctagtgtcaaataatccttccattctctaatcttttacctggattcatcctgctaatgcttcaagtaatatcctgtcttctgtgttgcaaaagtagagagtatgaattcaccaggaaatttgtataatctcagtcctctgaaattcagaatgagagtgactgcatacgtgaactctgaaaagtctcatgatacaaaaaataattctgttggattatttccataccatgtcattcttttttctttttcccttaccatgtcattttaacgtgaagtaatttcataaatctagat

SEQ ID NO: 87427 - DNA, 1037 bp, Homo sapiens
tgcgccacagcactccagcctgggtgataaagtgagactttgtctcaaaaaaaaaaaaaaaaaaaagtatctcctaagccaggcatgtttaggaggatccctttaggacaggattttgaagctataatatgctatgatgctcacacctgtaaataaccactccactccaacctgggcaataagtgagaccttgtctctaaaaaaattagaaaaaaacaaaaaccaacacacacaaaatttatgtttcctgtgtgtttgtgtaggtatgtatatcttcactgccacgtaaatgcggatggcttcggaaaagttttttgttttggggttggtttttttgttttgttttgttttttttcttagaggatacaagaatgttcttgaggaaaatcaagttgtgcgtaattcctctcttgacagtctaatatataactattgcattaaaggttgactctttggtaaaaaagaaaaaggaaggtttgaaaactggtcagtggataattgttaaagaggtagtcttcgggtatagtggcaacttggtagagtagaaagggcactgaactaggaatttagcaacctatgttttagttctaattctgccactagatagctgattgagctctttggactttagtgtcttaattttataaagtaaaggaaaggccgggcacagtggctcatgcctgtaatcccagcactttgggaggccgaagcgggtggatcgtgaggtcaggagttcgagaccagcctggccaagatggtgaaaccccgtctctattaaaaatacaacaatcagccaggcatggtggcacacgccggtagtcctagctactcaggaggctgaggcaggagaatcgcttgaacctgggaggcggaggttgcagtgagccgagatcgtgccattgcactccagcctgggcgacaagagcaaaactccgtcttaaataaataaataaataaaataaaggaaagcaaggcttctagatcaagtaaattgattgtatagcagcaacaagagaaaacgaaattgtaaaaaaggt

SEQ ID NO: 87428 - DNA, 1047 bp, Homo sapiens
catgttgcctaggctggtcactagctcctgggttcaagggatctgctacctcagcctcccaaagtgctaggattacaaatgtgagctgcctcatccagcctaatttaaattttaaatgcaacatctgggtagaggttactgtattggacagtgtcttcaaaggcaaagagaaggaaaagaaaacaagtggtagaactgtttgtgtgctacaacatggtgctgatacaggtttctgcaaaaattctgcttaatagtttccagcagttactctttccttttcatttggccaaaagtgtgagttagggaagtaaaactggaaaattaaaatcttccaataaatctagaattatttatactgtgatttctccctgccctgtgttaagagactacactgtctctggtcctcaggatacttgagaaaagagcaaagatgaaaataccacaagcttatgatactgtacttatctttgaatttgtagatttctcctcttcgccatctacaaatgaaatgttcaccctaactaccaatggggacctaccccgaccaatattcatccccaatggaatgccaaacactgttgtgccatgtggaactgagaagaacttcacaaatggaatggttaatggtcacatgccatctcttcctgacagcccctttacaggttacatcattgcagtccaccgaaaaatggttagttaaatgttaggcaactcactgccagtcttgctagtgtcatttgtgaaatagtcattttctgtctttgcaacatcattgaatgtattttcttctcttcttttctttaattttttaaaatttaataattttacaaattttatttttttacttttttatcctgtcctcaaaatctgttgctgtgaatgcattttcaatgtattatatatgctaatataagtgatcagagccaggatttagtattactcatggtggctaatgtatgaaatgacattccttatccgtatattaagaggcaacaggatagtcagtgcatctgagtactactttctttagaaatttgtgtctcctgg

SEQ ID NO: 87429 - DNA, 1008 bp, Homo sapiens
aagaaattaagagtaaagacaaattgacaccaatcatgtctttctacataccagctggggaaacaaataatctaataaatatattgcctactctaaattaagctcctgcaactggtattatttatattcatctttgggatttctgaacacactctcacctcactgacagtttcttaatatgaaatgcaaaaatggagtctctgagggttggaatttagatccctgaaacggacaaaactgaagtcagtcgtatataacacacttcttcctgtgaaaagagataatagttcgaaaattgaggttagttttccgttatttttatcaagcattcatcctttatgtagttgaaaaattattcaatcatctcgttggttttacggatgaaagcgcctaagacattcttttgaaatatgttagagagagaacttttccattttatctgaaacatctcccccttctcatcttgcttctgtttctgtagaactttcctcaggacaaccaaaaagtacgactctcagtgagtggatttttgtgtgcatttgaaattcctgtccctgtgtctccaatttcagcttctagtccaacacagacaggtaagatagaactagaactccttctcatgattgctcctttaaatatttgtctaagagttgtcatcttttttatatttgttcatgctgaggatattatagcagaagaattttggaacccaagggaaaccttactgattattccatattttttcgacgagaaacctaaaatttagagaacccaagtgacttcagttagataggtagtcgttagctaatatacccttggaattcagatctctttgaacttgtatctaatataacatggcaacagctagtatgagaggaacatactaccagaaaatataaacaatagatatagctagaaagaaatccaatattatatgtaatttaatgtggtcactcactgagtccttttagccactagtatgctttgtctattctttatattacttac

SEQ ID NO: 87430 - DNA, 1045 bp, Homo sapiens
tttgccactaccaatggacagttatatgcacttagaaataacaggtaggtcagaaagttctgaaaaattacttgactccattaaatttactttatttaaatagcctgaatttgtaagcatagttatttgtttacaaataaagaccggtagtcagcatattataattgagcaacctaattttaggcatgacttgaggtttgaaagatgtagactggggcatgtttttttggtttcaaatatgccagcaactctctttaaaaccctgcaaagccactgatacttttatgtcagatgaacaccaaaaaaatactgatttcacttaatattatccctaagtaccatctgttttagtgtttacacataaaataaaaattctaggctgaaatatttgctattatatttacaggtcagatatatctgtacacagcatttaagactttcaatgaaacctgcattttaccaataaaagatcttttctctttactagtgattaagttagatggtactacccctgtacggtatggactaagactgaatatggatgaaaagtacacaggtttaaaaaaacagctgagtgatctctgtggacttaattcagaacaaatccttctagcagaagtacatggttccaacataaaggtaatattaactactctaagaaacttttgattctatcctccaaagatgacatttttctcaattattatgatcaattgttaggttatgtgaccaagagagatactaaaacataacgaaaactgaacaacaacaacaaaaaatgccaagttttccaacccagaaacttaagagttttctaccagaataaagggataatactgatggtggtatttttgaagaagggaaatacgtaaggctgcctatatggagtgttctagctgtgtcactatagtataggtttccaccaaagactgctgctgttaccaaagactgctgctattacccttgacaactcttctgtattaccgctgttactagaattcttcctaggttaaagtattttatgtatttatgaatgtgtgttttt

SEQ ID NO: 87431 - DNA, 1022 bp, Homo sapiens
aaaatatacatattttatatgcatataaaaatgtaaaacgttatagaacaggatgtctttcaatgtgagcaaacgctgttttaatgtttctgtcttaaataacatctgtgtgcctgaagaacagtttgcttacataatactgaactgaggacacagtattgcacagtattggccaaaatacttctctttttttggggggggtcatttgacattaagattcaaaagatttcatgattatccaaaatatatttgttgaaatagaggcagactaagtactatactatttattttcttacaatggctctgattggattataggacatgttcattccaaattttatgggtaggaaataatgactgtgacttctcttatatttatagtggaccatagcaaaatatgctcccaggtttaatgggtttcagcaacaggactcccaagaacttctggcttttctcttggatggtcttcatgaagatcttaatcgagtccatgaaaagccatatgtggaactgaaggacagtgatgggcgaccagactgggaagtagctgcagaggtttgtcagttttgagtttctaatgtaagcaatagacaaaatgttctggccacaaatacatgtagcacaacttaaatgcaaactcaactattctgagatcagaactttactgcaaaaatgaatgaatttctatttctgtgcttaattcttatgcaataatgccaaaacaaaaatacgtttaatgaaaatagaaaactgttgccatttcatattgtaaactttatgggactggatgtaggaataattatccagtggaatttaaagagtccccgtaattgctaaagtaatggatacagtgacctataggcatgctttatacttgttaatggacaaataactttaatatttaccattgttaccttgataagaacaaatgaaaaataggattttccatctcaatttaatattttatgttaaatgaagagtaaggattatattctttacatttaaatccaatatatttaact

SEQ ID NO: 87432 - DNA, 2074 bp, Homo sapiens
tactatctttcaaagattattgttacatataaagattacatgttacaaagattatatgttacattataaactaatggtgtggccgagcacagtggctcacgcctgtaatcccatcactttgggaggccgaggtggctggagcaccagaggtcaggagtttgagaccagcctggccaacgtggtgaaaccctgtctctactaaaaatacaaaaattagctgggcatggcggtgggagcctgtagtcccagctactcagaaggctgaggcaggagaattgcttgaacccagaggcagaggttgcagtgagccaagatagtgccactatactccagcctgggcaacagagccagactccatctttaaaaaaaaaaaaaacaaaaaacaaaacgtattcatgtaaccaaacaccacctgttccccaaaaacctattgaaattttaaaaaagagaaagataacgcttatgaagtacacattgtctttctgtcatactgccacctaagttataaatatttatgaacaactatagtaggccagatatttgtgatatgttatataactacaaagaagttgtttttttaattgttactcatttttatctctgtatttgtttcaagtttactaaccaaataacaaaaacatttcctcctccttacacagaactaccttactcttctggatgatgaggatcataaattggaatatttgaaaatccaggatgaacaacacctggtaattgaaggtacaagatggaagcatgcatctatattaaattttcaaggggaagaatttaaagagttactaataacccattttataattttctccaaaacaactattatttgattattatgtttttatgataaagaaaccctttggaaaaaaaagaaaaagaaaaccctttgaactcttatgtaatcctaccatacaatttagattgctttaaagggaaaatattctgtttttagtcattgactgacaaagaatgggaatggtagataaaaaacaagtgaattcagtttacacatttatagttccttaaaattttcaagttgctgctttgagtttgagtaaaaagaacaactttcttgcatagttagtagcacaggctttcattagtcaccaacattggctactcactgacagagctatttgtatattcatagatttacacactggcatgcacatgccattaaaaactttttaagtgtatcttttcccatcaagttttgtggcaacattgttagctgcctttgtattaaaatgaataggccgggcgcagtggctcacgcctgtaatcccagcactttgggaggctgagatgggtggatcacttgaggtcaggagttccagaccagcctggacaacatggtgaaatctgtctctgctaaaaatacaaaaattagctgggtgtggtggcacgtgcctgtagtcccagctactcaggaagctgaggcacgagaatcagtcaagcccaggaggcggaggttgcagtgactcaagatcacatcactgcactccaacctggggggacaaagccagactgtctcaaaaaaaaaaaaaggaataaattactctgacagttgttacaatttaagaaagaattgtaatttctaatgttttaagtataagaaattccattgtttctgaactttaattacttctgtagatggttgagtataattttacttcaagtaggtaattgagggataagattattcaaaccaagtgactttaaagtcctcaatatgaagagtaggaatggttttagagccaattacaggcatgtgctgcaaaaagatgtttgtcaacaaaagacctgtatacagcagtggtcccataagattataatactgtatttttagttgtgccttttctatgttctaacatgtttagatacacaaatacttaccattgtgttacacttgcctacagtattcaatgcagtaacatactgtacaggtttgtagccaaggagcgacagcctataccatacatagcctaggtttgtgtaggtacactctgtgatgttcacacaaagacaaaatcacctaatgatgcatttctcagaatat

SEQ ID NO: 87433 - DNA, 1027 bp, Homo sapiens
aaataatattaataatcatgagcaaccatttacacaaattctcagactatgttaacaataccagcatgttattataatttaaataacttagtatgcaagaactacctctaaaccctgaccaaaagaagtacttgctctcctttgaaattgaacaaagttagttttgtatcttcattaaaggttatattcatttaatatatgaagattcttttattttttattttttatttttttcgagatggagtcttgctctgtcgcccaggctgaagtggagtggcacgatctcggctcactgcaagctccgcctcccaggttcacaccattctcctgcctcagcctcctgagtagctgggactacaggcgcccaccaccacacctggctcattttttgcatttttaatagagacggggtttcaccatgttagccaggatggtctctatctcctgacctcgtgatccatccacctcggcctgtttggtaagaattctttcagtagtgtttcgtagtaattatagcaaagcattggcccctgtctaccaaactttgtctttggggaaaacagcaaaatcaaagaacagtgaggctgggcatggtggctgatgcctgtaatcccaacagtttgggagactggggaggaagatcatttgaagccaggagtttgagaccagcctgggcaacatagtaagatcctgtctctacaaaaaattgtttaaattagctgggcaaagtggtgtgccctgtagtctcagctactcaagaggctgaggtgggaagatctcttaagcccaggagttcaaggttgtggtgagctatgattgtgccaccatactccagcctgggtaacagagcaagagcttgtctcttaaaaaaaaataaaaagtgaaggaaaccattttttaaaaaaggaacagtgagatagaacctttatgaaacattcttgatttaattttccattagaaggattagccttgcttccatggcacccattacaactttttcaattctctttgaaagataacatgaggc

SEQ ID NO: 87434 - DNA, 1095 bp, Homo sapiens
acatgtcagataatttgatcttagagcttcatctgcctacctaagagagtacttagctttaattttttctcttcataaaatgacatatttacttacgaatattactaattgtgagggtagtatgtttcaaatactggcaagactaaatggaaagatcagagaccaagggatcaggaaaaatgagccatcctttcttagaagtggctaaccccagatttgctgattcactggagcatgaataatttgattgtgtctctgctcatggaatcttaccagtctttccccgctttaatgtgtcaagctttattcttctatgtgtaatctcctaaaaaaatgtaaatggggaagaatggtgaaatcttttctatcattattacattacataatgtgtatcttcctttttgagaactatgaaggagcagctattactattcacatgcagattttcctatttagttatcacgtaactttagagctagaagatactttaaatcacctttcgtgcctctctcccatgggctttggggggtccctgttctccttagccaaggctggaggccaagagcagccctcgaggatcgtcgtcaggactgccacgagtggggcagccttgttttcctgcctcagacatgtgtagttgagtgggaaataaaaggaatgaaacacctctcttctctgaatttacaaatgaagcctctgaggtccttaggttttataattgcccaaagctgtatcagacaattattttattactttatctagcactctagagctcagtgtcctgagtcctgccttagtacctaatctgttgctccatgctgccctctatttttccaaagctagcatttcagtcactagtgaaatatgaaattgacataactgttaattgattcttgtaacatacctatgtacagggcataaaaagtagtagtatcatcaatagagaaaaaggtgaatcttgacccatattttagaacacataaactatttatacaactcacagggaatcctaaaatctcaaaataaaattctcttatattaaaataagtacctagtccttttgtgaattgttgactcagaaaatgaggacatttc

SEQ ID NO: 87435 - DNA, 1515 bp, Homo sapiens
gctgagggtggtaataggaattgaccaaaaatggctacagcagtctttttggattaattgaaatgttttaaatgttctcaaactgattgtggtgttggttgcacatatctgtaaagttatcaaaatcactgagttgtacacttaaaataggtaagttttatatatatgtaaattattcctcaataaggctgttttgaagaacatcattggttacatgaacattctgcaaaaaatgtaattaattaattaattggaaacaccagttgtttttctaattttttttaatttttaagtttttcccagaatcttttcctgaagtaattattcttgatactgccctatgactcttgaaattggtttatcaatagaaacagtgttgttttactaattgggttttggcagtctctcctaattacatctaaatgtttcgcggttttccttataaaacttctaatgataatttttgtgcgttgccacctatttcacactttgtttgatgtatttaatttcttttgtacatacagaggatggttagaacgagagagcaggtatggtctgcaagcaggacacaactggtttatcatctccatgcagtggtggcaacagtggaaagaatatgtcaaatacgtgagttagattcctgtctatttacatttttcacaggattttcagctgcgtgagacttccagccaataataaaatgctatgactaccagccaataataaaatgctccaacttaaataaagattcgaagggaaaggaaatgagtgtttatatgatacttgctatggtctaggctttgtgattacacttccacatacatttctttccttgcaacaaccctaaaaaaagataatattgggtacgggggtacctgcatatgtcacatacatcacatctcatttatttctcgcaccacccttgtgaggaagataatattatacccattttacctgtggggaacctggtgctgaaagaaaaagtaacctgaatgtcatgatcagggtggaagatctgggatcaaaccgaaggactgactttaaagcttatattctctcaactacatcatttacattgtcctttattttaccttttccattaaaatggaatttttttcagaactagaaaattgaaaagagtaatgccaagaatcaagtatttgccttcttggagagccaactgatatatacactcattgccaaatgatcactaacgaaaattctaatcatttgattcctatttgcctgtatttcctctgtcactgcttattatcagaatattggtagttacatactttttacattatctatctcatcattctttctcatcctttttccattttgcagagtttattaatgtgttttcacatgtaaaatatattaattgggaaacacggactttggtgtctctgaaggaataaaaagtaggcaaatgacttcctggaccttgtaggtagataatgatggtatgtgtaggtagaaaaatgagaatattggggtacagcatcagtcatt

SEQ ID NO: 87436 - DNA, 1050 bp, Homo sapiens
gtacacatgtagtcctagctacttgggaggctgaggtgggaagatggcttgagcccaggaatttgaggctgtagggaactatgatcgtgtcactgcactccagcttgggagtgacagagcaaaaccctgtctcttaaaaaaaaaaaaagaagaaaaaaaatcagtacaggtaaaagtggtgtgggaaacccaaaagaaatagcttaatttttattttaaatgttggatttaacagcctacttaaatggggaattgtagatttcttttttctgttttaaagcttcattttgtttattttggtttaattttcctaccattttggatataataaatttcagttttgtttttggtcgtgattattttttagcaattgaattgtgaaactaaaatatatctgtggaagatatattatcaggatgaactgaactcctgagaagagaattctgaggttttataatcttttttgatttgacccttagtggaggaatcagacatcattgatcttgagaaacgctattggttattgaaggctcaatcccggactggacgatttgatttagagacatttggcccattggtttcaccacctattcgtccatctctaagtgaaggtagggatcattccattttctacatatgttcactggtaaacatacctgagcccatctcatatttgtaaccaatacattttaactctaagaaaccatcttctcatatgtttgcaggtttaatggagtggggaaaaacaaatgggaattattattatagtcttgagcctgatattctacctgttataaccttgcataaatcagtttagctctctgcacccgagcatgctcatgtataaaatgtgtttgaccaaggcagtggttgtgatactgtgttccagtaaggtgcattagtagctagtgcctggagtcatgtggtggccactgaatgggcagagctccatgtttccacacatgacctcgtctcttcctccagtagggtgcctctactttttttcttttacataagaagattccattgctgtattctcccctccaaaaa

SEQ ID NO: 87437 - DNA, 1034 bp, Homo sapiens
ctgaggcaggagaatggcgtgaacccgggaggcagagcttgcagtgagccgagatcgcgccactgcactccagcctgggcgacaaagtgagactccgtctcaaacaaacaaacaaaaacaaaaaacaaaatgcagtttactggttttgggatatacttagcaaacaaaatctggcttattggcagtgtactgctttactgaattgatgaaataatttgtagttaacatacagattttatgcaagtagaagttatgaagcacaagtatttttgaaaagtttgatttccaaatatgtatatacaccctgcagtgttattagataatccttcctttgtagacagcagaaaggtaattgccaactaattgcaaatttcaggttgtgcaggttccaagtaagataccttaaaatttgactaaacttatgttttcttgttttaattttagggtgaaaaggtaaactatgaaaagtttagaaattggctttttctaaacaaagatgcttttactttctctcgatggcttctatctggaggtgtgtatgttaccctcactgatgatagtgatactcctactttctaccaaactctggctggagtcacacattgtaagtaatgacatttcattgttttctgtttgcctttttttatatatataattggctggtaatatgagaatatgcttataaaggagaaatttatttaaattctgtcccaggctggagtgcagtggcaccatcgtggcttacggcagtctcaacttcctgggctcaagcagtcctctcacctcatcctcccaagcagctgggactacaggcactcgccaccatgcctggctaatttttttatcttttgtagagactgcaggggtctatattgcctatgctggtcttgaactcttgggctcaagtaatcctcccacctcagtttcccaaagtcctgagtcttgagtcacgattacagttgtgagtcactgtgcccagccaagactttttttttttttttttttttttttttgagacgaagtctccctctgtt

SEQ ID NO: 87438 - DNA, 1057 bp, Homo sapiens
aaatatttagagcagttcttaggacattgtaaacatttggtattagctctgtatgaaggtggtagaagggtctacctggagatagcatcagatcccacagcttgagggattagttccacaaaactgacccctagacatcttcgctagcgatcatgattgattaaatcattgaccattggtaatcagctcaactttaagccctctcccctccctccctagaggttaatcattgtggttttctttttttttttcccagtggccagcccccatcctgaggctatctagcagccccccacccagctgtggggtccattcattagcatgcagagtcatttatcactttggagattacaagaattttaggagttgcatgccagaaaaagagatgaagaccaaatatatatttaacaatatcgcaaccactaagaaattacaattaaaggatgctattgattttaagacttatcccaatgtcagagatgttaatgtgtgtaaaaatgtgcatcagcttgtagaatttatactaagcttctttctagactaaacatgggatacagaaagaatatgggtaggaactctcatctctaaacatgttggcagtgtactcatatgtccctgcaacatgtctgaatgtcattgtcaatgtcaaaataaaaatgtatagggcatacatgaagactgggtgatcttcaatatgtccaaagaacaaagagaaggttgggagttttctaaaaatgggagtgttacatatggtcctgagagaaagttcattggtattagtaaagctttagggagctggcaaacttcagttggtgggcgatggtggtgggcaaaattagttgcagcaagtcatctcagcagctggacttacagagaattacatttcgagagcaatgtatcgtgaatgctttctaccccgggcctgttgactctgatttagttatgacaagaatgacccaatttgtatgatccactttcacaccatattcttccattcagaaaaacaagactgtcaatgtcttgattgcttggattgcagtcacgttaaatgttctga

SEQ ID NO: 87439 - DNA, 1051 bp, Homo sapiens
ggtgttttttgtttttttttttcctctcctgagggaaagaaggatacttggaaacattttttaatatagttgaactaatgagtaccacatttttgatagcttcagaagtttgtgaaccaggagaatgataaattgtgtatttgattcgagaaactgctggaagcaaatgaataaactagaacatttgtcatcaacatatgttaaatagtcattttgttatattatggaaacgaaaaaaactaatgaatacttaaggacattctctccatgatatgtttaagactctcctgcagcgtttaagtatacaacagatttcctgtgacaataaactaagtgatgtctttctaaatttatgttctgttcttgtgggcagttttcaaagacacattcctcctcagaaattaatttaaattgttaattttatagtggcatattttacatgtttcagaatgggagcattcattcttagtagaggaaaacccatccaacttgcgtatttctccatttgtcctctaaagtttataaattgttactggttgattcatggacaaagagctttgttgtacaacatacagatttcattctatatttttcttcacatttttatgcttgttaatacgaactttctgttagaaaagagcagaattttctcagactacgattttttttaatgtgatgtattcaagctcagggatgctgggggaacagaagtagtggcagatggggcaacctgatgctttgcaaagatggggtggttcattttgattacagacactggcagtctgtgaagtaaagatatggagccaccatccattctacagtctgtactaaccatgtgtattgtggtaaagccaagaacaactttgtatggacatagtagaagggaagagtggatccacttttagtttccaggcacatacccacatatagtaatactgttaacactatatctttgtgttaacattgagcattgaggccaaatggcatatatatatatacatgtatctttctctctccacactgttttctactttgaattacagatggtctg

SEQ ID NO: 87440 - DNA, 1068 bp, Homo sapiens
ctcacccctgtaatccgagcactttgggaggctgagacaggcagatcacctgaggtcaagagtttgagaccaccctggccaacatggtgaaacctcgtctctactaaaaatacaataaaaattagctgggcatggtggcatgcacctgtagtcccagctacttggggagactgaggcaggagactcacttgaacccaggaggcggaggttgcagtgagccaagatcgtgccactgcactccagcctgagcgacagagcgagactccatcacaaaaacaaacaaacaaacaacaacaaaacaccagaaaaaggaaaaatagtgttaagagataatttagtatgtattgtttgtacacttcatgggtgtgcatatatgacgtgtttggttttatagtgaaaattctaacattctgctgtatggtttatggtgcattgtagacgttcctttaagtactcaatgataaagatgaaaattactaagatagagagtaaatctatattatatgtagtcatttctcagtttgcatagtagtatgggactgtaaaaatgaccatgcaagctgagactattcaaagggatcatagtaatcagtggaaaagattatgattgttctgtgtgacctttaaaattttttgtcaaaacattaaaaactctctcacagttggttatagatatatagggtaagaagaagcgtggtatccacagagaaggagggagcttcataaacaaagacaaacaggaatatcaactaccagccaccaacagcacttttgtaaaacttatttaaatattacaaaaaacaatatacaagattactaagagattggaagataaagggagaaaatttcactaatgatctcatcaccaaacacagctaattatttgctgttactcttttttcaaattagtgtttagtattgttttaatcataatgtacataaaattttgtatcttgctttttctgagatgtctgtttctgtccatgttatacatacctatacagtcatgtgctgcatgatgatgttttggttaacgatggactgcatacacaactgtgatcccataag

SEQ ID NO: 87441 - DNA, 1042 bp, Homo sapiens
tgtatgggtgtctctgatggcctagaagtgctgctagcactgtgctcattttatagtatatgctcaataattgagtgttaaaggatttaatttcctagtcacttataggtagttgtgtttgctagtggaataattaagcatgtaacagttgataattcagtacttttcattttgcttatccaccaaatctaagatgctttaaaacattgactcccaactaagattttgttcaccaatttctcagtattaatcttaaaatttcgttagatttatactacctatgatgtgatgttagttcgtttagcataatgtatcattctatacacggaaattgaatttcacagtcagtaccttctgggatgcgtatttatctcccttattaaagcacttatttgccttcctatgaatttttaaaattcaccagtgaactttctagcattagtttggaattgttggtttcggttaagccttttaaaagtataccagatcttactatttgtaaaggagaaaaatggggcagtttttaagtagtctgcttatatgtagtcacctgagtgattacaaaggtgctgttttcactaatctcactgtttcactaatttcactgttttcacctcactaatctttagttcgtaggtttggtgtgtctctgacaagaggagataaatatattgatgaactctggattttgggggatgagcaaaatgaggggacatcacttgctggttagtgagctccccatttaccaaactggacagctcttgtttgtttttccttgttcattgtctctctttgtgcttagtgagactttacagtgacagcactcagggttgccttccagaaagatgtgtaaggaagttagagttgggattgtgatgcccaacccatagccagatattttctcaggacgagaaaaggaagatttttggcactggattacatgcttggatcattggaaaagttagagaagtgattattatttttgttgtcactagagaaaaatctgtttttgcagcaccagagtaatgctgagagtttgaat

SEQ ID NO: 87442 - DNA, 1052 bp, Homo sapiens
tcgttcctaacagccttagctggaaggggacgaggaggcggctgcaaagcgctcctctctgctactggaagccccttcgtatctggggagtccctgccttttcccagagcctatgcctgtctcttgagggctgtggccatccgcttctgccacccttcaccgtttgagcggctgactttgataagaacgatctgaaatgaagttgtgtttgaggtgagatgagactggacagctggcgttggcaccagaccttgtcttaggtttcatctcctccgacgttgaccaaagcctttgactgcacttgatgcccagttctcgctccatccctctccatgaaatggcattgggaagtccagcattcagatattgtgttaaatctccctttagagactggcctggctgccagtcccggcctgctgcttattggctctgaggcacagtatattgttggcagccccaaccccctaccactcactctgataccgctgtccatgatcactaaagcacacactaactggaagtgtcttgttgcacagtttatggccggaatgtcttaatttttcatgactgggatttcagtgtgtgtagatctgtgtatgcttgtatttcttttagacatttaatggatattcttggtaagaagtgaaaaaacattaagaagattaggagctaggcattattgttaacaggtttccaagtcaagaaatcagccatgctccaggtggttttagtagctaaggatataaaatggtaattagattaaaagacgggtattcaaaatgaggcttgagaagtgaactcttgttcgtatataggaagaagaggggtaagtgggtaagttcagttgaccatcacctgacagtaagatacagaattgagatgtattggtggtggtggatttaccagaataacacagatatgccttttatgtctttctttctttttcccttgtggaacagtataataattgtttttatggacaatctcatttgaactttttttgtctgccccaatatgagaaatattccaaattcttgatgtgtttccagccc

SEQ ID NO: 87443 - DNA, 1800 bp, Homo sapiens
tgatttgctcataacaggtatcattaactgccactttttatgttttccctagaatttgtagccttgctgcttgcttttcttctgggtggcaaagttactactggaaaaacactataagtacaaagtttttggggttttatctttgctttagaagtggatgtgtacttcacctcttggctgtggaggaacttagttgccaggaaattttttttttttttttcagacggagtttcgctcttgttgcccaggctgggagggcaatggcaccgtcttggctcactgcaacctccgcctcccgggttccagcgattctcctgcctcagccttccgagtagctgggattacaggctcctgccaccacgcctggctaggaaattttttgttgttaatatgacatttggattaatctccagcttcaacagtacttcttttgtccataaatctcaggaatgttttaggcagaaaactggttttaccctgttgataatcagaaggagtgtgctttaggatttattgcataatactattctttaattgcaatcctaggtatctatagcatgagtggccttagtgagtttgttgaagtgcacatgtttttcaagagtaaaatttaagattaaaaatatatcctatatatagatatctagaaaacttggtttgtggtgcacagttaagtgttggatcactaaataaccattgcaggtaccgtttgtgtaacattactcatttctgtatattccttttatgggaagatattttgccatggtaactaaaacttttcagttctacttttatgatgtgaatgaatgctacgttttattaaatattaccaggtcagtactatttttatactttattaagcaacaggggattttagtttaataggctcaaaataaaaagttcttaatggaacagttaaaaacaaaacactaacaatctttacgtgaaaatccccactaatagtgccacaataatttctatagaaatatctaaggtcattaaatagatttttgaagacggttcttcattgtgtcaggatgacctttcatatcattctcaccaacttgtagtgcccaccgttatttgtaactattaaaccatactaagtatgtttgtaaccagcattgtgatatattctgtacttgtattgctaaaaatgaattattgacctaataaatatagtgttcctgcattcatagtgtatctgtttccaatttggttttgattgcttttggttgggattaagctttgcagactgtttttattagagaacagtgtgagagaaactgttggaactagaacaaaagtgctcttgttcaagaaaattaagatgtgtggcagaggaggcgcatggtaacatctggagattgtgctgatgaaaagcacttggaaaaagacaaagcactgcattaatgcaaagggattttttagtctttacaaaagtataccattcttttaagaatcctctcactctaaaggctgaagatgaatgatgagacctggtaaagttctgctggaatagtgaagaaaagcctagattggagtttcagttccagctgtctctgaactggaagattctgagttacgtcattccagccctctttgtgttttatttcctcacatgaataagggggtaaaatcaggtctttaaaaaacttcaccatgaaacagcataaatctgaaggactcagaaaccagttgtaggaaacgaagccatatttttaaagattaggaagaaaatattgtagacaaaatcccaccatcacttggaatatagtcagcaccagcttcactgcctgc

SEQ ID NO: 87444 - DNA, 2012 bp, Homo sapiens
tgcaccaccacgcccagctaatttttgtatttttagtagagacgggtattcaccatgttggccaggctttcaccatgttggccaggctagtcccaaactcttgacctcaggtgatccacccaccttggcctcccaaagtgctgggattacaggtgtgagccaccatgactggcctgtgcatgtgtatttttctgttgttggagatgctgccattcttctttgagatctctttaaacagttctttcaaaccatgaatttttataattctattctaatgaggccaacttctttagacgagaaaattttttttaagtcttagtgatagctcatggttgggactgatttaggggatgctgatacaagaattatatctattcctttcaggggaataaacctaagccaccctgtttaaagaattgaacttgtgttcatgttatagaaattgcttgttatctcattatttgtgcttttttttttttcctttttcttttttgttacagggaagaaactttttggtgagggctacagtggactagaatatgattatcgaggtctcattaaactttacaactccattggaaattacgagaaagtgtttgaatatcacaatgttctgtctaactggaaccggttgcgagatcggcaatattcagtgacagatgctcttgaagatgtcagcaccagcccccagtccactgaagaagtggtgcagtccttcctgatttctcagaatgtcgagggaccgagctgctgagggaggacctcagttaaccaattaccttttcccggattccagggaattcatactgtgaaatcaaaaccatgttgttttggggggctggaatttgcattgaaacactggtccagtccattgaagaccctattttgggtgatccctatcttgcagaatgtctgtaggaataagcatatattcagttatattcagcatgtaccgcatgtgtaagtagtctggcccacattttcaacctagtagaacaaacaacaggaaatcttttttttgttgtttttaaaaaattcattttgcagaaagcctgaaagaaaaaaaatacccctaaataaaactatttaagagtttaaaagagttgcattcttattatgtaaggatgattttaacaactttttaatatgtaattcttccatgtggaggtattcaatactgtagtgtaaagaaattttatgcggaaaatctttatatgcagtatagaaaagttaacacaagtactaataaaagagggacatcccgacttacgtttttctaccttgcccagataagtggatacaaccactctatattacaaggaaaggactgtcagattcatctgaactggaccagtgttgatctgtaatgtaatagaaaatctgatagaccagcacttctgacttttttttttttggtacaacaatgcaagatgctctgatagcatttgctaacaggaccaggaggatctaaaaaggaccagcctaatgtagaaggtggttacttggaccagaggctttagattattattttagatcctacatatacttttatcagtagaatgatttcatttagatgtataatgaaaaaggataatgcaaaaattatgtaatagataccaaattagggaagtttggcaatttcaatggcatatttttagtcaaggtacacagatggcagtgccataagcaagtctataaatatcggctgcagccatccccctcattttaaatgttgccctaataatcaatgcagttaacaagtatattggctgtgtgtcatgaaatagttcatgttcagatggaaatgttaggttactgtatggtttatggagattaatgaaaatgaatgcccaaaaataagtcttagaaaatcctccatttttatggtaaatagtaatacaactaggtcatttcatttgaaatctaggagtcaaatggaaagatcccctaataatacacctatttcactaacttgtctttctgtttattgggttttgatttgattttttgta

SEQ ID NO: 87445 - DNA, 1587 bp, Homo sapiens
aatgttgcaaggctcttgcaaaatacccctatcttccatttcttattttaacttttcttctgattaccaccaaggctttttcacgtaatgcatttattttgctaacatgattgggtcacctatgtgttatttccgtgcatgttggatatgttctaccttaattctggaactgagttttttctccctctaggtttgtattttttaagttgcacaagtaatacatgatgttagatagaaaagagaaaaataaattgccttaaaatcccaccaatcctcagtcaacattttggtgaatattattttagacttttcttacttcaaataagataactaaatgaatgatttaattttataatctgattttttcacttaatatattacattttttcatgtctctacatatatccttttttctaatgtatttaaccttacctttattatttgactcttataattatttttaaccttttctttttaaaaaatgctacagtgaagtaaatctctttttcttacctttgtgtacatagacagttttccaataaatcaaattatctggtaaaataatatgtatattcttaagactttagatagaatttgaaagtcttgaatggagctttgaaattgaaatgtcttgcctgatttggttggtcagatgagtaggaggaaatcagttcttttagccgtgtttggttaaaggttatgttttataaagtgtgttttcaaaattttcagaagtgcttaggtactccttgacacagtttcatgactttaaaaaacttgccttgtgcttccgtttaatttgaaaaacaaatttcacatcagcaaagtatagcagtctattaaaatagaagctaattctgcaaaatcgtttataccattgtttttcttaaatttgaatatatatactgtgcaaaatagaatgaccaccaaaaagtgtacttttttgttaaaagtggaattctttcatcttgaccagttccaaaccataatcacatataaatatattcagtaaacatttatattatttaagtttaaattagatgttcttactagctttggtagatggttttgaagtacactaatttattgccttcttttttagcacttattttagaggagattgcaattgattgtcataataaggaaactgaacagaggctgcttcaagaagctcatgatttgcacctgtcttcactccaactagctaaaaaagcttttggggaatttaatgtacagactgcaaaacactatggaaaccttggaagactttatcagtcaatgagaaaatttaaggtagaaacatgtttttactatatttttctctcttaagtaatgaaatagaacctgaaataataaattttaagtaagctcaaataaattatacacttattgcacaaaggaattgagaagatagtgagtataaaacaacataggccaagcacagtggctcattcctataatcctggcactctgggaggctgaaatgggagggtcctttgagaccaggagtttcagaccagcctggacaacatagggagaccctgtctctacaaaaattaggcaggtgtggtggcacatgcctgtctt

SEQ ID NO: 87446 - DNA, 1062 bp, Homo sapiens
acttttcctgaatgttgtaggatcactcagttatccactgagtgaagagattaggctaaattttgaattatggccttgtaattgataaggcaaaatgctttttatcttattccgtcctggaaaataatggtgctattatttaaaagagaagcagttagcactttctaaaaggagaaaaataaattaactctataaaataatctttttcttttcttacagacatttgcttcatcattgttttcaggctttgatggatcatggtgttaaagttgcttcagtcttggcctactcattcagtaggcggtgctcttatatagcagaatcagatgctgcagtaaaggaaaaagccattcaggttggctttgttttaggtaagtaatggtggaacagaagtattttgtcctgtgatggactcagaattaaatctgctaacaaagaattcttccagggctttcccaaagtctacgtaagaaggttatgagaagaacatcagaaccacttaaccccatgccaaagcattatactatacatttaaatagtatctttctaaatcctcatgacattccaacgaagtgatggtattaatagcattttacaaatgaggaaacagactcagaaaagttgagtaactggctcaagtcacatagctagtagtagagctaagtttagattcctgtgtctatgtgattccataatatgtgtttttctaccatgtcatgctgccaccagcctctttgacctgcttactgtaggctgtggcagagaacttcatcctttcggagcctcagttttcccatctctaaaatgagggttattctgtatttcctcatgtggatgttatgaggatagtgaaaagaaatgtaaaagcaacatagtgagaccttaaaaatatgtgatagagctgggcatggtgactcatgcctgtagttcctagcactttgggttactgaggtgggtggatcactgtcagtagttcgagaccagcctggccagcatggcgaaatcctgtctctagtaaaaatacaaaaaattagccgagtgtggtgacgcatgccagtaatc

SEQ ID NO: 87447 - DNA, 2114 bp, Homo sapiens
ggagaagcaccccatctccctatgccctgtctcttaagctttggggccttgaagtaatcttggggagtcttgctccctgttggtgttcccttctacacagtggccctcttgggtaggccttttgcgtggacttactctatcgcgcccctgtcccacctagtcctttccttctagcccgtatcttcaggatattttccatcctctccttccaattaagtgtcagcatcagctggacttttttccgtgctcctccccccacccattcctactttctcatctcgccgccttccttccccgagtgttttggtgtttttgcttcgtgttccttcgtttctcctttcttttcccaattgggaaggagttagggattattggaaataatctgtgtgttttatttgcatattctttaaagctttgatttttttgtgggagaggaggggctctatacttgaattagggattttgtgaaaatgggagtgctgatcaactgtttgaagaggacagggagagatctttactgaaagaaaaaaacactttagattatgttcctgtgtttgaaagttgcaatcttgcagcattcttaaatcactccccctcaaaaatctgaacagcaagtctcccaagccactctccaaggagtttcaagggtaagtgtccttagatgtggactatttttgcagtgttttcagagtgtggagaactttatggactcagagcctgcccttttctctcccccacatttgaatgtgaacactggatttattattcagtcttccttgtcttgaatccgcgtcgataactcctagtgtccagtagccacccatgcaaaatgtgactaaaagtagaatgtaatttattttttagaccttaaatacttcctcttgatctgtaagttggctggaacagtgtaaactgatattttaacagatgtttatgttcttacgtatgtacagtgttttgtggcagttgttttattgggaagattgcctgctttctccacccctagatttttttttttttttttttttttttttcagaattagcagttgatgggctgcgttctactaaatccagctgctttgcaccaattctaacaattaaagtggggtttcccccctaaatatttggagaagattcatttaggtcatgcgtattattattttggatttcgagaaaaagctcccttttttcctaatccctttgatacattgatttacttttgtgtattctaaggaaattttgttcatttaagatacattcctccccaggaaggacaaattagatttgtctttctcagcctgggaaactgcagctttgtgtgtgctctctgtccattttattaaatcatgtgtaatcttgtacctcatatgtaatctctcagaggaaatcattgggaatgtaatccaagtgtatttactagttgaattcgttcaaaatacttgaatatcttttagtaactttcacttctaattgaagcttttcatttgaagattattagtatgaatagatggtgcttttgttagaatttctgtttcacatagttcacacagttttaatattgctcctttttggtacacttttacttcttaatagttgtatgcttattgggagtatggcactgtgctaagatgagggaagtgttaaacatgtgcctgtaactatgttgtgcttttatgtgttattttgtttaatcttcagaattaaactgtgaagtagagtacagtataaccttgctttattggtgagaaagttaagtaatttaattaaggtctcaaacctgatatttagttcctgagttccttgctcttttacttagatatctatcttaagatagtagattattttaatgaaagatattataacactaatttttttattagcttctatggaagtggagtgaaagtcagtcccaggactctattctaatctttaatggagatgtaagaagaaattattctttttattaaaatttaaaaaaaatagagatggggtctcgctgttttgcccaagctggtcttgaactcctgggctcaagctatcctcctgcctcagcctactgagtagctgagactacaggcatatgccaccgcacctgacttttcttccttttaaac

SEQ ID NO: 87448 - DNA, 1053 bp, Homo sapiens
aggaaaaactgtagtgtttccttagagaatctgtcataattctgctcctgaaagtcttatccctctcggttgcctcctaccggtggtgtcagttctccagattgacccgggattgctggggttggttgctggagtaaagcgtaagctaatttagaagggctgaaacgtaaccatccggcaacttaaagttttggaaggaattccgttgtaatgatggtgagatgtttttaggatcataaacctgtactgcttatgaaaactaaaaacgcggaacgtgttgttacctcttaaaaactggccccgtgttaagggtgtgcgttagattctgcttgggttttctttttggaaattgccttagctgattgctttcagatagttcccaaccggttgttcctagtttaaaaagtacttataaattgtaactgcccatcaaaataagaaaaggcaaggaattactgtatgctagaaggaaataaaggtcttaaatgtctaaaaatttcggtgtagttgtagtttcatctaagtttttttaaatgtttgtaaagcaggcaggatttctgtgcccaacatttacagaatcatcttacagcattataattgcttatctattgcagtgaataaatggcatgcatctttgttagagcaaagaagacaatacttccagtggtgggaaaaaaccttgtttatggcagcataataacgttgctttattttcagcagagggatagagacatagagaaaagagttagatttagcaaatacagaacatttttagaaaggtattgtcatagagttgtagattagccggtttcaaagtctgttttccatttgcttggctttctgccaagagttagttgattgactcaaaaaccagccactaggcttgttggaggcgtttcccatccatcccaggggcccctctttatggatttattttgtttttgtgtaggcaccgtagagctgaaagcactgtagtgtattgtagaaatatgtgatatcattgactgcagggcaacgagaagtcgacagcagcacaagagaggaagactaggc

SEQ ID NO: 87449 - DNA, 1079 bp, Homo sapiens
caggttcagtggctcatgcctgtaatcccagcactttgggaggccgaggcggcagattactgaaggtcaagagttcgagaccagcctggcgaacatggtgaaatcccgtctctactaaaaatacaaaaatattagcctggtgtggtggcacatacctataatcccagctactcgggaggctgagacaggagaatctcttgaacccaggaggcagaggttgcagtgagccaagatcacgcctctgcactccggcctgggtgacagagtgagactgtctcaaaaaaagaaaaagaattgagggatacttaaactaccaattattaaaaagtactataaatagattagtaggatgagtttagaaatagatctaaggcaaaatgtagcatataataaaggtgacatttcagatgaatagggaaagtatgaattagtcatttttaggtcattgcaaaatatctctttgttcatgttaggcttttgaccaaaagtgtgatttaaataatattgcatctaaggatatttatttttagctcgttttttcacttgccattttgttttaggtgatttttgtgaatggctgaattatttgtatactgtaggtaaattttgttttgttttctttcttttactctttaggagactgagtcttgctctgtcgcccaggctggagtgcagtggcacgattatagctcactgcagccttgaactcctgagctcaagtgatcctcctgcctcctcctctgaagaagttagaactaacagatgcatgccactaaacctggttaattaaaaaaaaaaattttttttttttttttgtagagacagaatgtggctgtgttccccaagctggtctcctggcctcaagtggtcctcctgccttggcctcccaaagcactgtgaatgtaggcatgagccactgtaccctgccaaattttgtgttttgaatgtgctgtagaacttctgagagttcgcctcatttattcattcacatttattgtagtagaagttttttttttgtttgtttgttttttaatttacttcagtttgtttaaaaagaaagaggatagccaggcacagta

SEQ ID NO: 87450 - DNA, 1047 bp, Homo sapiens
ctgcttgtgagattcttgtgtgctttatgtagtattgtccattttcatgttgaacaacttgggctgttgcccatttgtagcccttattattgttttagagacagggtcttgctgtatttcccaggctgtaaactcctgggctcaagcgatccccctgcctcacagcctcctgagcagctggtactacaggcacatactaccatggttgactcatgtatttgttgtgtatgtatgttaatttgtggtatatacctaggaggtagtcaaagagtatacatatctttacctttaataagtaatgcctaaatgttacctgcaatgtaccagtttacactttcacagtagttgatgatagtacatgttgctccattttcttgaccacagttcggttgctattgtcgaactttaatttgtgcggtcttgtagttatgcagcactatctcattgtggttttaaattagtatttctctgataattaaagaagctgaatacctttgcatattttgtggctgtttggatttcctattttgtaaaaggcttgtttaagctttttgtccattctcccatttgggtagtctgtctcattgatttgatttgtaggaaaattttatatattctggatgcttttcctttggcgcgtaggtgtgtgtattctgttctctgtgttgtttttattctaataatggtatcttctgaagaatagatttttttagttgcttttaaaaaagatgtgcaatgtgatagatgattttatgtatgtatacattgtgaaatgattaccacagtcaagttaattaacacatccatcacctcacatagttacctttttttggtggtgagaacactcaagatttattttcagcaaatttcaagtatacaaaacagtattattaactatactctctgtgttgtacattagatactaagaacttactcataatgggaagtttgtgctgtttgaccaacatctccccacttctcctaacccctaatccctggcaaccgtccttctactctttccttctgtgactttttctttagattcca

SEQ ID NO: 87451 - DNA, 1029 bp, Homo sapiens
aacagatgctaagtggctggctaaatgataccacaactcttgaatcaaaactgattcagattaaaaaaacctcttaacacattctttcctatcaatgtagttaggactaagagtcatgtagcagtagtaaacctgtcctgtaatatatttctcttaggattggtttgatagttgtatcataattgcattatttataacattaatttattaatgtattcattaattaacctaagtcctttagtagttttcagaatatttttcttaaattgtttcctgtgctaattcgaatgttaacatgctaattcagagtttgttgccatttgtatcctgacagtgtattaatgtttatacttgcaagagtgaaatattttatttcttattacagcggaatggccaaagactatgacgggtcttcctagcacatcagggacaactgccagtgtggtcatcattcggggcatgaagatgtatgtagctcacgtaggtgactcaggggtggttcttggaattcaggatgacccgaaggatgactttgtcagagctgtggaggtgacacaggaccataagccagaacttcccaaggaaagagaacgaatcgaaggacttggtgggaggtaacattctgtcgttttctctttcctcttttggttctatttagtccttttatgctttactaatgaaattgacctactactgtcccttttactgaagttactttcttagtattacaggttttttagtttgtctgatgtaatactcatgtatgtatgttcatatttttctcattactatgaattgacttttatttctgataatgactctaataggaaataatatttcagtgagccccaaggaaacaattcaaggttttactgaaaacctttcagatgactttcagaatctagacggagcagctcttggagttccagagtagaacactttgaatctggctgggggaaaaagattaagttagaattaaccttcagcttttttcattgatttcagatttactgcaaacctttccagtta

SEQ ID NO: 87452 - DNA, 1040 bp, Homo sapiens
tattagaagagaagcaatgatacaaggcatagttttcttatttctacattttaaagggaatacttttaacattttacctttaagatgattattacagaattctggtggatatactttatcaggttaagggagttcccttttattcttagtttgctaggaaatcttatcatgagaggagtttgaatgttatcaaatgcttttctgcgtctattgagatgaactgtgtagattttctcttttaatctgttgctgttgtactattagcttccaactaatacttcttgctttttctgctcccttcccccaggtgatttgtggagctatgatttcttcagtggtgaatttgtggtgtcacctgaaccagacacaagtgtccacactcttgaccctcagaagcacaagtatattatattggggagtgatggactttggaatatgattccaccacaagatgccatctcaatgtgccaggaccaagaggagaaaaaatacctgatggtgagatgtgattgaataacttgatattgttgtctaaacattgttttggtacttctgtcagaatcttgaatatgaactaaggacattgaccttgggtagatttttgcatttgccttgatctgctagtgggtaaaacataggctttgtagctcctaatcattagaggaatgagacaagaaatatataaccgaagtctaataacaaaacacacaaccactgacttcagtataaattggcctgtgaaacgttgctaattccttatttttttaaatgacatataatttccataccataaaatttatcgttttttttttttttttgagacggagtcttgctctgtcacccaggctggagtgcagtggcacaatctcggctcactgcaagctccgcctcctgagttcacgccgttctcctgcctcagcctcctgagtagctgggactacaggcgcctgccatcacacgcggctaatttttgtatttttagtagaggtggggtttcaccttgttagccaggatggtctcgatctgacctcgtgatccgc

SEQ ID NO: 87453 - DNA, 1081 bp, Homo sapiens
ccacagcgaacaccaaatatttaatttgatatagatacagatgtagtggcagctaaatctgagttactttccttctccttgttcttttgaatacagggtgagcatggacaatcttgtgccaaaatgcttgtgaatcgagcattgggccgctggaggcagcgtatgctccgagcagataacactagtgccatagtaatctgcatctctccagaagtggacaatcagggaaactttaccaatgaagatgagttatacctgaacctgactgacagcccttcctataatagtcaagaaacctgtgtgatgactccttccccatgttctacaccaccagtcaaggtatatagttccatagtttttaagttatgttttaatagacaccagttctttggttagcgtcacctggaaacaatttttaaattcttacaggattttggatttgaactcgattcaagaaagtgatgtaacttattatcagagagccatctttacatcaatactaatctgaatgccagccatgtgtacagcactaataaaaaggtgattgtgggcccttaagaatattattgtttgccatctaatgctatgaacattatttttaaagcatttagaagtttgtgaagcacttaaatatattttatttgaatctcgtagcccagaagtagagctaatgttattatttcattttatcagtaataagcctgagagattaaactgtctaaacaaggtcatagagaatcaaaattgagctggacctgaggatagcagacgttacaactggttgtctgttaactcgtataagaaactttattcctatttcttatccatgttaatattgattgagtttaagatatgctttgaaataagcaaattttaagtagatatcatacttttttgatttactaagaactcaaatacttggttgtgttttcatcctaatttttcccaccaaaaattagcagtattgattgataattgctttaatacatagcatggctaacctggctttctgagaatgtgttttcagtagactgaccattaaaatgggaaatgtagggaaatctaatgtcacctattcagg

SEQ ID NO: 87454 - DNA, 1065 bp, Homo sapiens
agcaggagtcttccttacattgttttgtggttctgagacctggtcctattaaaaaacaaaacaggatgggcgcggtggctcaagcctataatcccagcactttgggaggctaaggcggatggattgcttgagctcaggagttcgagaccagccttggcaacatggtgaaaccccgtcgctacaaaaaaatataaaatttagctcggcatggtggcgctcgcctgtaatcccagctactcaggaggctgaggcaggagaattgcttgagcctgggaggcggagattgccatgagcagagatcgtgccactgaactccagcctgggcgacagagcgagactctatctcaaaaataataataaccccccaaacccctcattataatttgaaaaaaattaaaaacctacttcctccttttttccctttctggtgtaacaggaatttctgggaaagtttcctacatttgaggcatttttgacaagggatctctagtgagtaatcataaatcttcctccctacccccaacaacgatccatgtttttctgttttttgtttgtttgtttgttctggaaacaggttttatgaatgaagctatggctacagattccccaagaagacccagtcgttgtactggtggagttgtggttcgcccccaggctgtcacgtaagcacatttcagataaacccaatagctgaagaaaagattactcagaatactaacatttaggttttctttatgaacagtggttacttttgtaaaaatcttttaactgttggctttatgggatgaataataataattgccaagaccaaatgaagaattggagagttaagttgacgtattcagcacatttacagagtacgtgaagagcactatgctaaatcctgaagagcagtgttttcaaactccaggtttaacaaattagtggattgttaaatcagtttagtgggtcaggagttgtagtagaaaatgaaatagaggccgggcgcagtggctcatgcctgtaatcccagcactttgggaggcccaggcaggcggatcacgagatcaggagatcgagaccatc

SEQ ID NO: 87455 - DNA, 1041 bp, Homo sapiens
aactgaaggaacatgtgagttcaaacggcttttgtttgatcttcctttagaaaatcaggctgaaggggaaaggttaaagttgccttaaaacactcctttctatgtgtgcaaaaatctggaagtatgaaaatatgattacaagttccattcattatttgtgttctgtggttttcgtattgttcttgaaatttacttcctgcctgcctgaagttttgtattatgaatttagtgtcaagaccaaaatacagaccgggttgctgttttctttatgtggtcagcaaatatctgttctataagttgttactcctcacaaatatgcattttaggcgatttttatggcttgcattttttttcttgatggtatacacagtaggttacagagatactgacactctgatattaactgaatcatttgtggttaggcaggcaaaaaacaaaacaaaacaaaaaacttgttcccctcttcctcctaattttaggagctttcaaaaggactgctctttactattaggaaaactttcctcaaagtatgctatcttaagtttttaaaattgtggaggcagagctgtaaaaaataaaataatacactaacagtgacttgttagagaaaaaaaggcctgagtttaagaactattttgaatatagtgtatttataggagattctgatgcctctttgggctggttatttttggcagcctttttctttgtttccttatctataaaatgaaaatatattatcaaattggcttacagggtgttttgagggagagactgtcagctttcagtagagctggctctgtagttactgtggccactcatgtagctaggtgagttctttttgttgcttcttaaccgaattccttagtataagatgatacctgccatgcctcccacattctcctttacgtttttacaatttctccctaattaaaagtaaattgttattaatttttaagttaaaaaaactataatgaataaatcttctttttaaggaacttcattccttccagttgtatctgtatgattagtacatgtgaagta

SEQ ID NO: 87456 - DNA, 1034 bp, Homo sapiens
ttttactttttacaatttttaatttttacattttacaatgtcttgtccacattgaacctctagaaatttgtcaatcacagtttaggtgttcctaccttggtactgagtcctgaggttctcgcttgtggatttctgccctggtaaattgtgattctctgtatctgcctgtttgtctctccaatttttggggcagcagtttgctctatgacgtcatttttctgacggatgtaagaagagctgttcagctttttacctgtggtcagatctaagtgaagtcttctgagctgcatgtgttggcctggaaactgaaagtctgaatgttcacaaatcagtgtatttcagcttcgaaggacattgtgttgctagaacctaatcattgcaccttagtttgagggaaggattggtcattattgtatttggaattaagatatgaatttcattatgtacaaaaaaactctacttattccaagagctgcttaatcgagtccttgaatctcattaatatcctgtactatcatacctatctgtggtccttcaggacaaaagtcttacatcatctgccctcatggagggccattataataaagactaattatttatatatttactttgaggcagcattacatatccattggagactgatttatgcatttcagttaccatgcatctattgatttaaatccataatttttggacacctaccagaatggctgacactaaatattggctaggatgtggagcagatagaactcttgtacgttgctggtggaagtgtaaattggtacaatcacattggaaaattaaatctacaaaagatacacatgtgcctgccctaatatacagaagtagttactctactagatatatatccaagagaaatacatatacatgtttactaaaagacatttgtgagaatgtttacatcaatattctttattatgttgttttcaaaatggtaaaacagtgatctcatacaactatataagggacagatatcctgcattttttttaactcattgattagggatttggga

SEQ ID NO: 87457 - DNA, 1534 bp, Homo sapiens
tggtatgtttaagtcttatcagttatttagatgtagtcacatttatctctgtggaaaatataaaatacaataatttgtatattgtaaagtaatgtcatttttaattttttgattagtctttttcactttcttgaaaaattcagaagaaaacattctgaatgcatctgtttgtcagttttgtccgtgcacctttctcagacaaaaaaataaaatgtacgtttatgatgatgaaaacagctgcagtgcatacttctgagagtcatttgtcaaacgaagcagcaatagaggaaaaatgataatacaccactgcactattaagtataaaactgctgcaattggtgccgttttaaattattaaacactgtaaatgccataaagttaattagaagaggaacaaactctacaaagataaatgtgttttcagtatgattgttaggggagggtacagtagaaaccagtgaatagagaggaaatttatttctggcaggactctacacatggaactgtggctgaactttttaccctaattacctcctgctaatgcctgcagcgggctggaatcaaagtggtgcttcaggccctggaaattctctgatgtggcaaacgtttgttgtgtgaggagggtttcttaagaaaaagcagaatattgtgacaggatttaaaaaaaatttctcagttaccacccacctcacttgttgcctacaaaaatagagtaattgtttgcatctgtgtgtgcttttttatcccctaagaaataactgttataaatcaatgtgacatagatccagtgaactgaggcttgcctgaggtaggatttttttttgttttttaaagtttctcctttaattgaaaatttagattccaaatgtaaagaggttattttttataattgagaagaaacattctatgcatttttaaggagaatttggatcttaaagtgtgcttttcaaaatgaattctaaaaacttttgtagtatcaaactgataactattaaattgcttaatcctggaaaaagtgggaatttccagtttccattattagttctccatctgagactagaacctaaaagacatttctctaatctttgtgaaagttaatatcattccacttatgtgtcacaaaaggtttggccatgtatgcatttttgaaataaaaagaattagttctctaaaagcacctgcttttcaacttctgcctttaaaggcagtgtttctatacaatgtaaaatacaagtaccatgacaagtcattttatataatctatttttaaaaaatagagataggggtctcactgtattgcccaggctggtctcaaactcctgagctcaagcgatcctcccacctcagactgccaaacagctgggattacaggtgcgagccactgtacctggcccattttatatattctaaaagaatccaattttcaaatagtctgcccttgtgcatctgtgctgtcttgtgtctccagctccagcccttatctaatcttcttgaaataccttttagataattcttgaaaagcactaatagcact

SEQ ID NO: 87458 - DNA, 1059 bp, Homo sapiens
atgtaatataataacatttatgtaaaatgaatgtaaatattcttactagttttcaaacaaaacattttatggtacaagaggaataattttgttgtacttcaataatatgtcagatttcttagaagtattaatttagaacaggatattttattgtcttcttaataaagataagcaaaagcttagatttttctgctatcattttaagaattgacaaggaaaataattgactataaatttttacacatatccttctctaaaatgtttcctgttctgtcttgatataacaggttgttccttgattttgagaattagactttaagcataatctattaattttggctttacttcatttctcagcatgtctcaaatgctgtgatgaactttggttactttgaaatgtttagtgaagtggtttctattgatttcatatgtgtactcaaactaatctacattggtagattatcaagttttaagatgatactagagtaataaaactgggcatactctttcacagtatagtagtatatttggcctcactgtgcttgcttggcagaagatggtataattaacatctttttatgagttgagctagactttagtatcctcatttcaagtaccccatgtttttttgttagctatggttgtgtgtatctgttaatatgaaaaatgactctgtatttttttgtttatcataactgataaggagttttaagttatattgcttttagggaaataaatcccggcaacatcttgctttttgtggttgttagtgcttctactataaccaacttataaattttccctagtatattcttttagttttcaaaagttccttataatagtatgactcaaaactaactgtacatgatttttagggaactttatgatgtatttctttatcattaactaaaattttaatgtttaatttttaactggtctgttttgcctctctattcttctgtattcctctgccagcagtttctgcacttttgttatctatcagaagaaagcgataaaataggaaagtacaatagaatcttctaatggacattaaattca

SEQ ID NO: 87459 - DNA, 1052 bp, Homo sapiens
atgtgtaagtcctttgattacgtttttaaaatttatttgtggaaaggccaccagaccccaatcctaccatttcagagtttatggattcttaaagaccattcttcttgtaatgaaaaccgtagttgagcatgaaactgcctgagtggcaccagtagattataaaaaggggtagaagtgtctcggcaaagcttttagctgtttgtctgaaatacactcatgcaaacattcccacccatcaccatcactgttcacggaaaataagctctatcctgatagcctgtagagttaaacagattaatagaaatgacgttctgcttctctctctctctttttctcagttgattcgatgtcatcagtcccgtggtggagcctgtggagacaacattcagtcttatactgccacagtcattagtgctgctaaagtgagtacctccgaaatcttggagagttgtggttatgtgtagtaattgttcagatttctctcctgaattatattttctattgtaatgattgtagtgcttgtacttatccaattttaaagattttaagtctgttaactagcttcaagactgttacctaattaataccacatttggaagaagctttccatgttttaaacagtgacttctggattctctgtgatttgcatcgttctgcctacactgacatccctttgcatctttgaacatttcagagtcttcttctcatgaaaagaatattattccctatgaaaacttgagtcagtccctcgtcacattcaaagattcttttatatcaaggggctgccccttcatgtttgtcaagtgagctctttttttcatgtgtgtgagggttaattttgatgatgtctggtaaactttatgctgattataaggtattcttgtaaccactatcctttagaattgtgaagtatacaacaaaacaattctaataataggaatgacagagtgaatctaaaagacaacatataatagaaagcacaaccattcagaaaagaacaacagtttaaagcaaaccacagagtgggaatcaaaggtcacactgttttatgt

SEQ ID NO: 87460 - DNA, 1025 bp, Homo sapiens
tattggatgatttctctatacacctgtttatttatgtttaacaaattatgttgtttcccccccattcttatatttcaataaggggcaaaaaattgtgatttcccagcagatcgcataacacagtaagacctgtatttcctgtccttggataaagcgctaagtgattacattttgtaaagaattgaaaatagttgattgtatcattttttttcctctgaacctatacttgaagaagtaattgtttctgtcatctacagtcaagtcagctgactctttttagagtttatatgactgatgtgcgtgggggcatgttatatctcttcctcaattctaaagtggaattctctccttatattggcaagaataatctgctagagtggaaacatgttatttggtcagtggtttgtgatgtgccttcttataggcttcaagctcggttatcagtgagaaaatatttacctccatttgtctttatttctttgtgaaggtgcttgtgagtgaggattctgacagtgatggcattgtggcccacttccctgcccatgagaagccagtgtgctgcatggcttttaatacaagtggtaagttcgctctctgtcttttttttttttttttttgtagaccatttatataatgggttttccagccaaatatggaatatggaatctgacttttcttcatgtatcagtatatatcagaaaagttattaagtcattatattgaataaaggaatttataataaaaatttagtacccctctaaaatccctctaaaattggttttgttctcgataaagtagctattaaatagcagccatttaaacaatgctgttgagttacatgaatttctgtttataattactccaagaacttcagtattccaaactagaatattaatggatatgagcagtattttttttttgtaacttgaagttttgtgtaactaacttacaacactttgtaagctaatttaattttctcggttttttttttagtggtgctctttttctttttcttcttaaggttt

SEQ ID NO: 87461 - DNA, 1054 bp, Homo sapiens
tcgtcatttagcattaggtatatctcctaatgctatccctcccccctccccccaccccacaacagtccccagagtgtgatgttccccttcctgtgtccatgtgttctcattgttcaattcccacctgtgagtgagaacatgcggtgtttggttttttgtccttgcaatagtttactgagaatgatgatttccaatttcatctatgtccctacaaaggacatgaactcatcattttttatggctgcatagtattccatggtgtatatgtgccacattttcttaatccagtctatcattgttggacatttgggttggttccaagtctgtgctattgtgaatagtgctgcaatagacatatgtgtgcatgtgtctttaaagatatgtaatttcaataggccttaacacagtagttacaatttttaatttaaattggctttttccaaaatataactaatagatcctccaatgacatactccagtccttctttacccatacatgtaaccatatatgttttaaaatttatattaggaagttttaaccctctaataattatctaatttggttaaaggtattttcatggggtatgtaatatggctaataaaaacagtattgcttgttagaatactttttactagtttagggaagtttatgtaaaacaaacaaaacatgccaaaaagttgattgcatgatttttgtttttaaagctgatcttactcaaaccagtttacctgtgtttgtcactgttacacttaagaatataaataaattccttttagtcttcattcattcattcattttttgagacggagtcttgctctgttgcccaggctggagtgcagtagtgtgatctcggctcaccacaatctccgcctccaggttcaagcaattctcctgccccagccttctgagtagctgggattacaggtgtgcgccactgcacccagctaatttttgtatttttttagtagagacggggttttgccatgttggctaggctggtcttgaactcctgacctcaggtaatccgcctgcctcagcctcccaaagtgttgg

SEQ ID NO: 87462 - DNA, 1136 bp, Homo sapiens
tttcatcttagctgagccatcagtcaatcaggcccaggtatttaaaggaagctctgtgaatccagtgcctcttgagccagtggcatgcttctgacagtggaataaaagataaagtggctgtaatacccaaggttctgctcaaccagactggctgtactctggaatataccatttccatttgaatagcggtccctgttggttgggctcttcccaccttgttcattttcaaattttagttgacccatccccaagtaggtctagaaagtcacaaggcctccatgggtcagttgttcaattacaattagaactttgtagctggttaatagcagccttctaaaaaagggagtgtacttggtggctgcatcaggcaggtggcgatgttgtactgagataacacctctgagtacttcagcagccattaagtctttacctaaacattttactcttggaatcctacgttgtttctggcatataatatgggaaggaactggaagtctagtaggtggtctgttgtgcagttgtcccactatcaccttggtgtacatgttcgatgatatcctctggcacaagcatttaagtacagtcatgtaagccattaataccagttatatattcaccaacataagtcaaaatgatagtacattgaatcggactaaagggtcccaccattttatatcccattccagtgtatttttcctccatgaaaagcatggactagcgtttttaatgtgcacatgccagttgctccagtgacaattgcccttcagtaatgttatcccctgtgcatggcaggggaagctaccctttgcataaggtgggacagctaggatgttgggcttttatctcacttggccttttttttttttttttttttttgagacagggtcttgctctgtcacgtaggctagagtgtagtagtgcaatcattgctcactgcagccttgaactcctgggctcaagagatcctccacctcagcctcccaagtagctgggactacatacagttgcataccaccatgcccagctaatttttataaaaattttttagagaggctgttgctatgttgcccaggctggtcttgaatccatggcctcaagagatcctcccactttggcctcccaaagctctgagattg

SEQ ID NO: 87463 - DNA, 1045 bp, Homo sapiens
aggttgcaaagtgccagtcaatgaaggatttcatcatttgtgaaaggacagtagttaaagagcaatactactagatttccaagtcaaaatatattgttttctctcagctttattgctttcatgtctctctgcatgtttttttcagaaatctcaaagaggagaatccacactgttcgactatgctgctgtacttaagattttcttttgaaagcaaggaatttcaggcagcctattcctcctgatagataacacgtgttaaaattttatttccagaatttccgtctattactctgtgtagtttttctcatttttgaagcatggactttagagtgatggtcatttttcttcatgtttttttgtatcttacatgtcataacaaaatgggcattgttggttagttctaaaaatgatgtatttacagtttgtgtgggtaaacagtctgatgctggtcaaaaacaatgtaaaccattgaacagggagggattcatcttgaaaatgaatcatgttttggcggtattaccgttgtttgtctgtgctctttttagccaagtaaaggaaactgttaaataacagttgatataggggtatttcctttttactctttggacccaatccagtttaggttaggattattttatctatttgccaatttttttaactttccagaggatgtttatttatttgaaatatattctttataaatatctcttccatttcctatcttgttgcctgaacatccacttagtctacttgaggacttcttgtgatccatgaacaggataggaaaaaaatttacatctttatattcactatcctttaaccaaaagtaagcatttcctttttgttatgaacatggaaaatacatgacaaaaacattaacagtgcttgtgacactgttaccaatagaaaatgcagaattactcatatcactttatatatgaaatatatatcttgaagtatcttgcattattgaatatattttaaaatattgtttttactcatcactactttgaaattatgattatataatattttagtattaatt

SEQ ID NO: 87464 - DNA, 1030 bp, Homo sapiens
cagacttcctggtggtagaatctatcttccatgatttcctaactctgtaatcttagacaaattatttattctatctgtacctcacttttctttctgtaaaattggaataataatattaccaatcttatagagtaactatgagaatcagagccctttaaatagtgtttggcacatatcaaatattcagtagaggattactgtagtttctatcattagtatcattattgatactgctgttaatgtgagagtctatagaactgattcatttttcgtattttggtacagtacctgttatccagaaaacagaataaatgagtaattcactaaataatgagtaaattaaatataataattgtgaacttattctttaaaggcttttagaacaatactaggctcaatgttgataagctcagttgctacattgctacaccaatgcaaaaccaaaagtgatggtagtattatcattttaattggtttttgctcattttaattgtatacatcaggaaatatggttttataaatcagtacacctattcttgagcctttgccatttcttaattttgcaaattagttttccattttaggttcaaaaatatagagttcactgtgtcatgggacttagaaggaatttgttttcttcctgcaatttccattgagttaacaaacagatcttggattcacttctgcagttctctagagttcctgcaagtgtctcctttcctattaacttgttcgtcctcagaggggtcatctttgagtcacagcttttggcatctgaattctagattctgctttttctaaatggaagtagttgatgagactcggagacctttgtacaaagcctctcatttcttggacttggagcctccatatttcagtaaagtgcttttacaaaactggaagtatcacttttctttttagcatctgtatgaggcattccttttaccactcaaagactctgtttatagctttcatttgatggtttattgtaattttaacttacgttgatcagtagttttcttgatacaga

SEQ ID NO: 87465 - DNA, 1056 bp, Homo sapiens
tggggggaaataaaattgccagtgggatatattttaaaggaaacctgatattatattgcctctaaattatactttaaaatttagtgctatgaaaattaatttaaaaatattttaaacctaaataaactctatgtagatattttatatttttgtgtatttcattttggatataacacatttcttttctctgtaagttttgcctttaaataaatgccagatgatgtagttatcccttgaaactaatccagaatttcttctttgctttttactgcttgtggaaatattttttcttttctatgtattttttacatgggcaaatcataaactccagatttcaaaatagttttatttttaaatggttaatgagacatgcctctagagggcaatattttctcattgtaatcaaggcaaccctggcatgaacctgaggtactagggatgttaatgtcttatcagatcttaaatagcctttcttcctttttattatgttttctgtgatttattcttcaacgtcttcttagagaattcaactttggaaatatattactatcaattaatatcctttctgagtactacatgcagatccagttcctctgagtgaataccattgaatgaatagaggcaaattttttagttatatcatttgagtatgtggggtcattatgctaaatgtttttttattctctatgtgttgctattcagggacttgttatctgtatactttataatatcagagtgattaaacttcatttttgaggcattgaggcattataagggctaatagttatctactcttttctattaacattgattggacacttactgttgttgtttaccctttaaatataatttttattttttatcaaagaaatacatgcatttattataaaagtcaaaaatataattttatagtgaaaggaggcactttttggcctatcctccccactctcgggtgtcattccccagaggcctcttcttttaactcttctgtttttttctcagttggttttttttgggccctttcctggaaatcctattacttgaataatgtatctt

SEQ ID NO: 87466 - DNA, 1049 bp, Homo sapiens
ttattcagctaatcaacaaatcaatactaaggaactgattggaagctttttgaatgtgggaagggcataccgccttataggtatcagtggtctatcaggtaggaatgccattttattatcatacctcaaatagtcactatccgtaggtcttttcatgtacgctggtcagttttcccacaaagaaattcttctatcctctgttcagggtggggttggggtaataaagagtttctggcaataaacttagaagttagttttcaaggagttgaaggagttaacattatttttgtctagtgattagaataacaaaaagaggatttggagaacctgtttgcatttgattattgtcttacttccctagttaggaggacagttaagtaagaaattctggtctggttccactgaaataaaaatatttctatggaaatctggagatggaatttttagttgctgaagtgaatgaatgtaaaaactacttattcagataaagaagtgcaaatgggtagaacaacaaattttgggaaaagaagtgaatgttcatttccttatgtacttatcaaaaggaagatctgaaatgttttttttttttaatttggagaaaaattggagagggagaagagagtgagtaggcttcttaggatttgtagtagccagagtttgaatgattgacccatatgaacagatttagaaattatcagacttgagaataacagacatgaatagtcttgaggttgaaatctgagcaggaactagaaatctgctagttgatagttgtaaactacaaaaggacaacaagacagggatcagggctataccaggattatgcacagaagtagaaattttgatggttcttaccatgatgaggtaaatgatattttgaatttggaggaggatgagaaaaggaaaaggatttaaggttcattgaaagagttattaacattggatgatgtgtttttgcaggtgagaatattgaagctagaatgaggcacaagagggaaattactatttcagaatggaccaaggtggaattaacatgggcactgttgttg

SEQ ID NO: 87467 - DNA, 1039 bp, Homo sapiens
cccctccccatctttatatttactcatttcatttcttctcttttcttttgagacagagtcttgctctgtcacccaggctggagtgcagtggtgtgtgatctccacccactgcaacctctgctcttgggctcaggtgattctcttgcctcagcctcccgagtagctgggactacaagtgggtgtgtgccaccatgcctgtctaagttttgtattttttgtagagattgggtttctctatgttgcccaagctggtcttgaactcctggtctcaagtgatccaactgccttagcctcccaaagtgctgggattataggcatgagcaaccgcacccggccatgtttattcatttctttgtgaagatttaggtggttattaggaagcttcagatgcaccctgtagaagtaggttaagtaatgtagtggaaaaaatatggaattgggagtctgaggccctggcttcttctcatctgggttctgcacctatttgccagtgtgtcctaggtaaatttcttcacctgaaaaaaaaaagtttatatatatggattataatcttttaatccttatcatgtatgagtttctaccagttctttggtcccatttctaagcctcaggactgttgagcagccgtaagccagtgctgatgggctcaggccccacttagaaagcatagatgcttttaaatgatattaaatggaagcattaaatagcatttattcagacacatccagttgatatttgtagaccaaatctaccatcagacttggctatgtgagtaaatgatattggcatatagtaggccttgcagaaggtctattccttattttaattcaattaggtacaccttggctcagttacacagtttggcctgagccttaaactttataggcaaagttcggagaattaaattggaaatatttggagaaagacccactagatacagatataatagcttgggtaattccccacctcatgtttctgccttatgtaagtaccagttcttcatagctaagcaatggatgtttggttctagatattaaat

SEQ ID NO: 87468 - DNA, 1079 bp, Homo sapiens
agagagctatccttgcttggcattggcattggcatcatctctaaagttttgttttattttttatctatcctatttttccttctacctcactttcttctagttatctcttgcgtgtctctgttcctttctttgtatataatgcgcttcaagcctcaaaattgtactcactatcgtgaaaacatttttctcaagttttgctttgtggtcaaatatactcagtttactgggaaaaaaattaaggctaatcagcaggatttttattttttaattctagaaccaattttgaagaaggaaatacccacattttaccaatgtgcttttctcctccatttgttatgatttccaaatgtcagatgttacagtaccatttggtttggatatcattaaatcactcagttttctttatgtgcagatgtgcatggcatatcttaaatgctaggaacagaattttgagaagaaatatgtataacattgaagtcccagtttcccagttgtatttaaaacaagtgattgtagctttagtttgctgcgtactaacctaatctagtgcagaccaggtaaaggaagctaacctcttagaccactattaagagatatcctaatttcctggattatggccaaaaatagagaaaaattatactagttgtacttagtgttttttcctttgaccaacaatatacaattcaacttacgacaaataagcagcttgaaaaatatgtgcctctttctgtggttctgagactggaaccagtgaaaagcagacaattcatatcaaattttttatccagtcatcgttagctaattttaaccattttgtgtcacatagctacacatttgttgctattgatctcactcttctccatctggttattccatttaacttataccttgttttaaagggcttcagcagtgaattttattttattttaacttagaaatactacaggggtgctccagaaaagggggagaaatagaaaattttgaatctctaactctgaaaattaagggccttgttactacacatcattctgtttattggttatatcagacagtatgtacagcagaattgtaaatgatta

SEQ ID NO: 87469 - DNA, 1004 bp, Homo sapiens
acctttctatttcttatttccttatgtattaaatgtacctatgtaatggactcactatgagtattaaataagctgatacatatctcagtatgtgttagtatataacagtgcctggcacatagtaaatgtgcagtaaatgttagctgctaccactgtttcttttcctgtttcagggaaaaataccgtgtttcaaaagaagcttatttaaattagattatgtttttcacttttaaggatatgttaaccagtgcgaagttttgagaaatgtaagctatattaattttattaatttagtcagaatactgaaaagagttctgcacatatgtgtagttctcataactgctaaatggggattgttcatactgttctattacactagaaaaaaacattccaacgttttttcctcttggacagaaagaagcttaaatagttctttaaggttaattattatttgacacaaacttatttcaatgtttatatgccataggaagatctgaaaattttgttattgcttaataataggtgacataaaacaaatcaacataaaattttcctccttgaaaattataattagacacagtttgcaaaactattctaaacaaattcaggatatacaagaatataaatctcatgaaagttgatctttattcattttgttaaccagatgtcttctaaaaacaaataagatacacagatcttacttatgagccttccagtgatcagtgaattttaaatgccacattcaacatatgacaaaatttctttgtaaacttagaattaaattccattttaggataaattcttcttctaagtacaaagcaaagagttgtagtatgttaataaagattgaagttttgcatagaagtaaaagatggaataacaactgttgtatgttaagtaagtaaagttcattccttcaacagcttacgtgctcctcacatttaagcaaaagcacttgtcaaccagaaatgatttgaggttgaaacaagattaaaagagccaga

SEQ ID NO: 87470 - DNA, 1137 bp, Homo sapiens
aaatgatccctgtccttttgacattttaaaatattcttgtattgatttttggaggctccagcattctttactactactttactatgctggattgatctgatcaatatctgatttatcaagcttatttaggagtgggcagatctaattaaagttactacactatcattgttgaaatagtaacttatttcagaactcagatgctaatttgatctataataagtcatccatttacacagctgtgttttattaaccatttttacctacttcattttattttaaaatatacacatattttaagaatagagaggtcagaaattacataaattagaactagttagttgtaacatttgaattttacacctgtttaatcttctgaatgtcttgcctatcctgttggagggtcttctgctgttaagcttatattgactgcatgttatttgtatgaaagactgccacctttttattttttctaagcagatggccttgtgtttcaggtttcatcacattcattttaatgattacaagttcattttaatgatcacaaaagtagtgtgagtttaagtcactgttcataagtgatgacagtcatggtgatttacatcccatctattaagcttaaatattaatattcttctcctgtttccttagaacccctcaatggaatgaattgcagccaccgtttaatgcaaaccaccctctgctcctcgctgcagatgcagtacagtattatcagttcctgcttgctggccgtaagtagttcagattttttttttcctttcgtatggtctattcagatttcatcttaaaatgctagctttgaaagcaaacattaccactggtccataggccatgggccttaaagaatcagtttgaggcaaataagatatttaatatgaatataaactgtaagccttagtatacattatgtctctgactgcttatattctttacctatgaaatatatttctgtaataaaagttaagttgatagggaatatctggagggctcaaaaattcaaacaaacataaaaaccaccacctgaaaatgctaggatataataaaaagtttcataaagcttggaatctgtttctaacatggaaaaaaaaaaaccccaaaacttagcacagttaaaagtgc

SEQ ID NO: 87471 - DNA, 1050 bp, Homo sapiens
tatagtaacatttcctacctatattaattgaatggaatgaccaaaattaatgaatttttatttttattgaagaattttgctgtatcacaaattgataccccaaattgaggaattttggtgtattgtaaattagatcatactagaatgttccatacagaggtcactgtagaggcacagatgacttctctgttattaggtggaacgatatgaaattggcatttttaataagttttttaaaagtctgatatttcagcagtttcacagattaatttatatatgccaactaaatatatagatggtaatctaatttttctgtttaactcagtaaaagtaaaagtcaagaatttataatccaaaagatgtttttgccttggtcaaagaaattttgggaatagtttataaaaagatgacagcagaggtcattagtgatttctgtgttagcactgtatttactccctttaaaataaaaattacatactatattgccttccaacacaggcattatatttcagtgtattcctttgccaaaaacaaagataaaccatagaacatatcagtaaataccaaccagctttgaatatgatcccaaaatagacaataactttttcttcagtctgctgtagagcttccaatttgtaaattaaaaacagagcttactgagttgccttaggaaagccttatttaagggaaaaataatgtttcctcctttctttcaggtaatttggcagcaacagtgtttttaagttgctgacattaactagctttgtggcagagtgggtttcagagtttggacttctttctaaatcaggctgtgatgtgtgaaaagttcctctgtaaacttactgagttttatttgtaatagaaatatacattcattcaatagaaatatagcttagatatacaatagaaaggtgactggggtccatagtacttccctgtgtattattgggtgtatacttggtttcttctaactttaaaaggaatatgagaaagatggagaaaatattttatatgtttcaatttgatctcaaattttggggagatttagtg

SEQ ID NO: 87472 - DNA, 1155 bp, Homo sapiens
acacaactttcatacaaagaaatcagtaagtctcttgattttagtcagtctacatatagtattgaaaagctttgtgacaagtaattctttctaatgttaccaggctgcctgtgtaaatacagaaggccagcctaggagacaggataaattatctgtgggaagggcccataatcaatagccaacattctagtttaaaattcattctcaaatgctttgggcacaaaaaggtaaaaataaactaagtttttgctctttttatatagcatatattttcttagtttgtactaatacattcttatattacaaaggcaatttcatggaagaatcttccttttgatattgaatcatctgaaattacacaaatagaactatacattcaaaaaaattctcatgtgaataacaaaaaagacaagttaaacaacaacaaaaaagcttcctttctattttttttaaatggtgaaaagatatatatatatatatatatatatatatatatattcagaattaggcagctggactcagtttagatgatcccaattttgttggcaacatccaaagcatcgtaaccaggagccagtcgaacatatgccttcttctctccatcaggccaaatcagggtgttgaccttggccacatcaatgtcatagagcttcttcacagcctgtttaatctggtgcttgttggctttaacatccacaaggaacacaagtgtgttgttgtcttctgtcttcttcatggcagactcagtggtcagcggaaacttgatgatagcatagtggtcaagcttgtttctcctgggagcgctcttccgaggatatttgggctgtctccagagtcgcagtgtcttcggctgccggaaggtgggtgacgtgcggatcttcttctttttgtggctgtggacacctttcaacactgccttcttggcctttaaagccttcgctttggcttcggctttaggaggggcaggagcttccttcttcgctttcggcgccatcttgtgaaaagggtctttttttttttttttttttttacacagggtctcactctgttacccaggctggagtgcagtggcatgatctcggctcactgcagcctccaccttgtgttcaagcgatcctcccacctcagcctcctgagtagctgggattacaggcg

SEQ ID NO: 87473 - DNA, 1069 bp, Homo sapiens
ttggggtaatattagggcagtataataaatattataatattttattgtggaaataaagtggctttgggcattaaaattatttcagacctttacttttccttggatggttcaagaacaacttcacgtttgtcataagcttgatcctcagtgaaggaattgcttttaatctgtggattaataggtgtagtattcagtgcatgcccacaacatggtaagtactgtctagaatgaatgaaaaggtagaccctacggagctgacactagttatatgaggcaagcaactggtccttttactttcatgtgatttttgtcttgtatatgtgtgtgaggtgtgcatgtgtgtctgtgtatgtatatgtacacaaaatgtatttttggcttatgttgatgaaaagcagtagagggatattttgaatgtctacatcagctgtgattatcatcaccttttaattatgggtgtcctatccctttgccactttaacatgggcttcttgaagaatgtgggtgttaagaggaagaatgggggattgtgaagtctctcaaatcaggatcacaaaccatttaaatcatcattgctactccattccaggttgaaattgtaacacacactggaccccatagacgtctgtggatgggtccacagttccagttcaaaaccatccatccctcaggccaaaccacagttatctcatccagttcatctgtgttgcagtctcatggtccgagtgacacgccacagcctcttttggattttgatacagatgatcttgatctcaacagtctcaggtaggaaatgagaattagggagtgatttgaacaaaaggattaatatgttcgtgtgaaatgagcatcatatgtaatatttaggtttccccttttggcacagtatcatgttgcagactacatgtactgttgcacgtaattccctgtcattacttgagatggtatatagggtctcgtgggatcacattacgtgcaataaatacttgcttttcagattatattctccctaaatctaatagtcactgcacttttcaagcaattccactttttgatgctttgcttatat

SEQ ID NO: 87474 - DNA, 1005 bp, Homo sapiens
gaaggggtccagagtgtagagaatatttgtagtgttttatccttgtgcagcaattagggactgcagctcccctgtttgtcttgttttagaatggatggttctttaatggattgtgctactccagcattcctgatttaaggtcatttgtagcaagtgacagttttgatgccagtaacatatgtgaattaaattaaattgcattgcaggatccagccagtccgctctgaccccgtcagcatgccagggtcatcccgtccagtctctgatcgaaggggagtttccacagtgattgatgctgcctcaggtagaaaaccacctctgaaatatttattgggcagtcctgtgcatttttaactaattttctcgcacaatgtagaggatgacatttatttgctttcctctctgtttttttgttttgtggtgtgtgtgcattttaatacagtactgtgcctatatttcttgctgaacaatgccatgcttttaagcattcctaaggttggtgaatgatgcagtggagttggcacttgattaaatgtaatgaacatagtattgaaggctacagggttgatgactgttttgcctttgatcactgaaatgtggagaagcaaccttgacagagaacgtaaatacaatctatggattcaatttactcaacctgttgagtatcaaagtgcctaatctgtgggagtagagaggagacagtccaaatgctatagcttgaatgattttattatcaaaagcatcaagtttaaaaattcattaacttaaccctggtctatctatcacagttattaatttcctatccttggaaacaagctatgaatatgtatcattagtacagagaaggagatctttgcctttataggtgatcgttgctccattagtattataaaacttttcagccaggcctactaaatggtagaattgtctgtagtgatatattttctcgtctctaagtcaagtgataaaataaggacagtgatgccttgctttatagtgcagctg

SEQ ID NO: 87475 - DNA, 1048 bp, Homo sapiens
tttcctaagcattttgagagggaattgatgcaatacttctcactgttgatatagtagggttccacatatttacatgggactttttgaccaaagacccaacttttcacttttgtacatttactgtgcctctcatacagggctggactgtttatgtagtctgttgcatcacactatggtggcagggggacagagttgggggcactattagaatttgtttaagtctgaaccgggaattccatttgtcttagtgacatgagtgtcaaaactgttagtgcaacactattttaaactgtctgcaagagcctgagaggcttatgcttataggtgccatctataaacttagaaacaaacaaagagcccctctccattgaatagtaagcccagtgggcaattaaagaacagcttgggaccccacttggtcaactagtcagaaccagagcttctgatattccctctggatattgttgagaactgtcacagaaaggctaaagtaaataatcaaaatgaaaatagttgttccagagaaaagtcttgttctggaagcttggtgttaaggaaagaataatgaccactaatttgtggatctttgttagttctagtctcagcggagtccctttcagcttgaaacatggatgaacctgtgttttcaagcacctctgaagatgtttttaaaattagggtataatttgggtatagcaaaaatgcatgttttaatcatacagcttgatgaatttttatactcagccaccactcacataaaaacatagaatatttccgtcaacccagaaagtttcttatgccccttccagttaatactaccagtgacctagaggtaaccatttttatcatcacagattacctttacctgtattaaacttcatatgattggaatcatcttgtgtctgtgcttttgtatctaacctcttttgctcaacttaatttgtttgagattcatccaggtattacatgaatcactagttcatttttaatattgcagtgtagtgttccattcttcaaatataccacactttatatatccaatattctg

SEQ ID NO: 87476 - DNA, 3268 bp, Homo sapiens
gtctattaagtcaaaattatttttatactagtatcaagttattatttgcctttgttttttctactgtggtgaaatttagtatagatggtgcagaagcaattgtgggtaaaactggtggcctgttatcatagtaaaggcaatggcacctaactattgctagtagcctctgctacctacttaagagttcttttttaagctgtattcacctaagaatatctttaaagcagtaaaaatcatcaactttaattttattaagttttgatccttgtgtaacatcttaatattctgtatatcaagtgggaatgaatgcacagtagttgtcttgagggaaagccattgtgatttgtaaactgaactagcaactgttttcatggaatcccattttatctgaataaaacaaactatgtttattcagacatgggcatttggcagaaattttctcaaaaataagcaaaccctgtcacttcgaagaaaacaactaacaatatttattaccaataataacattctagctttcaattgaaaattagaaatttgaaaaccttgtatccaccactgtctgtttaacagagtcccaatatttaaagacatttctcggccggacacgatggcacacgcgtataatcccagtactttgggaggccaaggcgggtggatcacctgaggttagttcaagaccagcctgaccaacatggtgaaaccctgtctctactaaatacaaaaaattagctgggtgtggtggtgcatgcttgtaagcccagctacttgggaggctaaggcaggagaatcgcttgaacccgggaggcagaggttgcagtgagccaagatcgtgccattgcactccagcctgggcaacaagagtgaaactctgtcttaaaaaaaaaatttctcattaaataagtagtgatattaactaatatgattttttgcataatagatattaaaatatatcagcatttggaacatctgcaacattttccgaatgaccagtttcatgttgctacaaaatcatgcaagagtaaaggactcattccaaatgcaagataggacaaaggattttaatgtaatagaatatgaaagttaattgatatagtttcagattccacattgcaactaatttgttaaggatcatatcaaggaagaatatccccagaacctgaaaatgctattaatatactttatcttttagcagttacgtatttgagttagaccaacttttcttcgtgtacgtcaaccaaaacagcatatcagaacagatagaatgcaatagcagatatgagaatctagctgttgtctattagaggattttctcttaaaaatgttacttttctcacttctttctgtttagaaaatatttttatatagaatgtaattgatatttctacatagaggctttatcattgtttttaaattagctgatacataattgtattaaatgttgatagatatagtacatataaaccaaagatctttggggtcctgggttttttgttgttgttgtcgtttgtttgtttttttgagacaacctcactttgtcatccaggttggagtgtggtggtgcaatctcggttcattgcaacctctgcctccaggttcaagtgcttctcctgcctcagcctcccgagtagctgggactccaggcatgcaccaccatgcccggctaatttttgtatttttagtagagacaaggtttcaccatgttggccaggctggtcttgaacttctgagctcaagtgatctgcccaccttggcttcccaaagtgctgggattacaggtattagccaccgcacctgactggggtcctgagtttttttaagcacactgggatcctgaattttaaaatgtttgaaaaccactggtatgcatattctcgtacacacacacacacacacacacacacacattaaattactagtttgtttgtttatttctacagaaattcagatgagattggattgggatttcattgaatctgtatatcaaatttggaagtattgacatcttaaaaatactaaatctttcaaaacaagcttttttaattttttgagatggagtcttactctgttgtccaggctggagtgcagtggtgtgatatcggttcactgcaacctccacctccagggttcaagcgattcttgtgcctcagcctctgagtagctgagattacaggcaaaacataaacttttataactattcacttatttaagccttctttaatttctccttgataagtttcaatgtagaagtcttacacatcttatataaaagttttttctttctattattacattttgatgataactatagcacgtttttatttcacttgtcagttttctttacagcatatagagtaaaatacttttctgtataataaacttgtatcccagcctgggcaatatagtcagacctcgtctctacaaaaaaaaaaatttttaaattagctgagtatggtggtatgcacctgtagtcttagctacctgggaggctgaggtgggaggattgcttgagcccaggaggttgaggctacagtgagccaaggctgcatcactgcactctagcctgggtgacagaggggaaaccctgtctcaaaacaaaaaatgaacttgtttccagcaacttttccaaattcgtttattcattctaatagtagaatctcttggattttctactatgtaatcatgtcatctgcaaataaagatggttttatttctttttaatctttatctttctcccatattacacttgtttaaacctccactacgatgttgaatagaaatgatgatattgaatattcttgttttcttctcaaccctaggaggaagggtttattatttcactatgaagtataatgacaataagcaaaaatttatcaaaactgaagcagagagagaaaaatactgaaataaaatagaactcactgtgagcggtatatcaaactatagcagtatcaaactgtctaacatctgtgtaattatttcacatatgtggaagaaaagaagaggatatggcaaaagaaatgcatgaagggttgagaattttccaaagttaatgaaagacataagtcaaagttttaagaaactcagtgtatgctgagtgagatattaataaacacaaagaaaaccatacgtagacatattataatcaaactgttcagatctaaacataaggaaggaattttaagaagcctactctgtttctttatttgtttttttcttttttcttttttgagactgagtctcgctctgtcacccaggctggagtgcagtg

SEQ ID NO: 87477 - DNA, 1067 bp, Homo sapiens
cagagggggaaaaatgatggcttataataaaggactgtttgagaacaagggctgtctttgtatctccctttgcctggtattggtaccttccacagagcagataatcaatatttcttgatatctgattaataatgatagtcagtgatgattaataatgatagtcagtgataatcaacaatgataaccattgttgatttcttataaaacataaggctttaaatatcataacatgattacaagttggtaatgctgagtctttatcttcgttacctgacttaaacctggtcctcagttaggtttgcccttatgttatgatcactattcctttgtatgggcctatggtcaattgtgtaatcaagtgaaatattttacaaagcatttcaaattatcttttatgttatgcttttaaagcagcattatgtttaaacagaatatttctttgatacaagctttcgttctattaggcttagcatggaaatttttgttttaaggttatctttataaagcattaactctagcgaagtcttgctttctggaatctatggtcaggactggtaaacatctgttgaaaagaatggacaggcttttgctttctgctcttactaggctaactttcagacataattttagggatattttgggctgcctttgaagctagcccattttgggcataggacattggcatatggagaactgaccctaagttccattaagccaaaacattttgttgaagaatttccaaaattttagtggtgtcattacagtttagttacttgtacttatgctctagacagctacaagaaacatggtagaattgacttctgttgtatgaagtggcgtcttgagtcttaaacctattttactttggtgttctacaatatttggaaaggcaacagttattatataaatgttcaatgttaagactgtagagaacactaagttacacttgacacttagttgaactccccagtcagttatcccttctttagatgagtttatgtagttctcaaatgaatgcttgtaagactgggaacagaacccatttactcttctgtttctctctacct

SEQ ID NO: 87478 - DNA, 1042 bp, Homo sapiens
atttctcttgaaacatgttcttaatctttctctttattccaactcacccccttgattaaattaattactttctcatgtgttcttaaacttttactgttatgtgtaccatctgatattaaaattagttgggtattgtttttcattctagactatgagctcatctttgtactccccgtagctccctgaatggttttgacacataataggcactcagcaaatgttaatgaattcaatatttcatcatggaacattgaaaccaagttcttgcatttgcctggaacagtaattacctcctcaaagagaaactgtgtggctagggagcagaagtgacaaggagaccatctttccactagagtcctttacaacacggccctgcattatccatgcaaacataaattaaactctgtttttaacaacatactttttagattttttgttttcaacagttgaagatgctgaggttaagagatttaaataacttgtctactgtcacagagctagtagatggtagagcaaaggtgtgaatctgtgaaaccttcattttttcccggaccttgaacagcatctcagccaaccttgatttcattcatataatcatcagggcatgtatgtgacctaagaactatttatatttattctttttatcatatactgttgtatcatagaggacacaaaatacatcacctccactctggaatggcacctctattttaaaagaccattggcaaaacctctccgatgagattttgatgatggaagaatgttatattcaagactcacctaactatacctgcatctcacagatacttatcctttaagcagtaaacagttattttcagctaggaaagccactctcaatcaggtagtggtttcttaagctgaaaaaggctttccacttaagaatcgtgataggccaaggtcattacctttccgtctacttatgggaaaattcaaactaaaggaataccagtgtttgaaactcacaattcactctatagtggggagtgggggagtgcaaggcaagcaaagtgattatatttcc

SEQ ID NO: 87479 - DNA, 2208 bp, Homo sapiens
ttgaggttgtgatcatgaaaattaacgtaagctgatataattttgaattgtatgcatctgttttcatgaaagaaacctatttggagaggtttattcttgaaaaattatggaattaaaagttaaataggattcttaacatctgtttttaaatcttgaattatatgcagctcatagagtttctctcctgtatgcatattaaatgatatataatgaactatcagtggttttaggtaacatttggttactgaatacactatgctaagcatttcacgtgcattatcacctgtattcacaaaatattatgaggtaaaagcactgttacaatttccatttttttcagaagaaggtgtgatttagagaaattaagtactgtatactacctcccaactttggcagtgtcatctgaatttttttgtcatgaacatgttttacatagcttgttgttaaagtccatttttgataaattttttgaatagacgtgtgtaatgcaagtgcatgagctttgtggttaggtgtagatttcattcccatttctgtagctgactgggtacatgaccttgagtttctttgtccataagaagagtataggaacatctgtctctgatgttgtaaaaattaatagataataaaaatcttctggccatagttcaggtacataacaaggactcattaaatgtcagttgtcaccaccttaccttctttccgtaaaatatttcctttctgtctgtcccaaagttttagttttgctcttcacgtgtatcataatgtattatgagcatcctaagaagataggttatactattgtccccattttacagttgagaaaacagactgaaatgttgtagattcctggttgaatccctatagcagtctgattccagagcctgtgtttttagctataatgtgctttggtatgaagatatattccaataacagattatattctgatatttcagacaagaatctaaatcccagaaattattctcttgtacccgcatccctaccattcagttcttcccttcttagattatgctggtataacagtgtatctccttattactcttgtaataaatttgtatattaaatgctcaaacacccttctgattctaaaatctgtgatcctctgtcatttggatacatttgcagtagtctgaggcagctctgagaatcgtttaagggaaaagtattcatcactgtggctttagtaaggaatatgttgacatttttactctaactccaggaactcctactgacctgaaattaaccagttcatggaggtttttggtggggactaaggaatgaaattaactccctaagtctcctcttcttaaaaaagaacctcaaaatactgctgcccaaatggatttaactttagttatatttgtttttacatgcaaatacattttactcagcctaaaaaggcaaagaaatgaagctatttggtttgcagaggaacagatcactctcctgagcatgtcagactgtttatgtgtgtttttcactccatcttactctgtctttgtctttcatgttcttttttctgtctctgtttcagtttgtcctgtttctattgctccctcacagcaactatcttcctattttgataatcctgtttcatctctataaggaaaaggctctctcaaggatgcagaaaatgttactatttttataacagtccctaaatacacaaaagattttaacttggctataaaactttgttcttggcataaatttggcagatagtctttcgcctgggtgagacttttcattgggatcctggaagtgttgggatgtcactattctccactcttgcttctccaagtatgacattagtggttttagctcttgttgacccatctttaaaccaaagctttatagcctattagaagcacagtgtggatttttcttatgatacgttggaataaaagaaaaaacttttctaaagttacaaatggtttcatttaccaaaatgactatttcacttggaaagttttgtcttttctgtaaaaattccaggagttgggtgggcttgatgtcctctctcccattccacctccccacccacagactcatgtcagcaaagatgctgagagttttattccagtcttttaggaggcgagaccttgaccaaggagtagctaagacatatttttctgcttttattttttaaaaactttttaaaaaaagtttttcatataactttttcat

SEQ ID NO: 87480 - DNA, 1010 bp, Homo sapiens
catatatttagcatctgttgtcaatacagcaatgtaagctgatggctattggaattcacatacagtttgcatttactttgatttatgtttaaatggcttatctcagaaaacttgacccaagagataaagactgtgaaagattccacattatgggtaagtcttttttttttttttttgagatggagttttgcttttgttgcccaggctggagtgcaatggtgcgatcttggctcactgcaacctcctcctccctggtttaagtgattctcctgcttcagcctcccaagtagctgggactacaggcgcccaccaccatgtccaactgattttttgtacttttggtagagacggggtttcactgtgttggctaggctggtctccaactcctgaccttaggtgacccacccaccttggcctcccaaggtgctaggattacaggcatgatccaccacacccagccactgggtaagtcttctttaatttctctctacactacatttccttaggtgcagcatatatgtgacctggtgccccacacctccactgcttccctgccaatatcgctgttcccccagatggacacacctctcaatagttttgtagtatttgatataactcggacatattcagtataaaaacaaccagggaacccctgtgaagctaagaaaggattttcaaaaataataatgataatatatactatagacaaagaccctatctgttttttatcacccttgagcaaacccagccctatttggtatggggccttacatggagtgggcagtcattaaatgttgactaaccctttttctaagtcttttttttttcctattttaatttttattgggggggagtgggggtactcagtcccagaagacctaagtcttttaattctctacttgtagtgcctctgtaaagtgatccgtaatctgcccagtattaatagtttggctcctttttctctgcaaacatattattaaaagttgaataaagaaataaatcctgtgcat

SEQ ID NO: 87481 - DNA, 1797 bp, Homo sapiens
cagttctaatcaaatcagttcttttatgtgcttatactacatggttttcagctatcaaatgttatttcaaacttgtatctaggagagagatatatatatatacatatatatgtttttattatttaacatttggagggaagtcagatatctttgatctcatttcttttactcattttgtgtttgtttatttaacaccaatggtttcctattggcttctttagctggaaaaattatttctacaggacaataaaacctgggattctcctccacaaaatgaaacatgaagtgataataccattaatctattaacaaataattgcccttgggttcttttcctggtatctcgagccaccaagatatagcttttacttgatctgaatttgtcagtctataaaagtagggattataatataacaatgcatctttttatttagtttgttaactacattctattgtagaactgttcttatttttaagatcgtagagatccatagaagtattggcattcttgtaccagttattcatatttcactgcatgttagtattttggcatcatttcttacataccctgttattgtttaggggaaaaatgtggaagcatttcttgatattttttcactatttttccctagtgagttatgtagttaatcatattaaactgtttttcagttttgaaatatgagagatttgtcagccctttgaaaaaatggttatagttcattttccatatattactcagcattatgggtctgcctgccaagtgatcccaggtgtgggattgcagcaggtaatttcctgagctgtatggtacagatgattttctgtgttagaagatgctatcggctcacctggcctcttagtgacagagaaatcctttgtttattcatttagtaggcagattaaccctaatgaatattggcttcctggaaatagatacaggtgacaatggcaaagtgaggagtggggagatgtaagacaaattcccttttctttcttcacttataaataatggtggctttcataggagagtgttttaaatcagaaaggaatgcaaaatatttgaactaaaaagatagatttaaataatcaacctttaatttttagttttgaatgtctaggtatgtgtatatttttcagaagaactagagattttctaattttggcaaatacttaaaagttttatgttgccattatagctaaacgaaaatatttaattaaatacttcatactggtttgggcagagctactcacttgaacacgaaaatgctttcctaatatgtccttgtattcagataaattttgtgaattagagaagtgtaacattcatcagcctctctcagcctgtgaaagaaaatgtgcattattctgtgtcctttcttatagtgtggtcatattgcttcaatgacatatttgttttctcagagcaaggatgaaggactaatctaggcatcagaaaattattcatagagttatgctataaactataaaaagttcctagaaataagctattttaaattcattgctttgttatggcttttagaatattgacaaaaaaaatttttatcaatataattttatggatatttgattgtgtaattatcaataatctatgatgaaaatgaaatgtttgtgattgcaactcttaagttttgctcaccaacagagtactttacaacatttttctgtgaatggttttggacatacactattcccaagatgggaatgtatagatacagatgtggaaatctcttaatgttcaaccagacttttccagatcttacagctatgatttatact

SEQ ID NO: 87482 - DNA, 1073 bp, Homo sapiens
tttaattcattagaattgtgtgtgcgttgtggcatgtgggtacatcagaagtatatttgcaaattctgaatttacatatcaccttgagaaaatgtgaggcaatcctttactgaattgtcagtgatacttattttcagagacattagaaaaaaagagcagtgtatatgtgtcatgttatcgcacgtgaaccactgcctatgttaaataggtttttctttccttttagtgaaaaaccgaaggacaatagtcattatatgattttgtattttaagtattttcataatccaacataaattggcccacccaaggattatgtctgttttataaagatgtgtttatatagtcattgggtgaaagattgcagaagttgaaccactagttttgaaagttgagccagaccaggaaaaatcaggatacaatttggcacttatggagacgaaatgatttcctttttagctgctgatttctactgggaaatgtatccttggactgaaaattgcatccggaaaaatgtttatgtagtgtttttcaaatgactgattattcttgtaacctttaacatgaactgtgtctaattttggtctctcttaactctttcacgactaggggatttttctttgtgggaaaaatattacaaccgtatcattactactttgaatacaggaatgtcttacatggtaacaagaatacaaaatgtgttaagatttctttctgggttatttttccaagcgggtagtagaacgcccaaggttatacacccttcgtcacaggcacttaagttttagattgcatttaaattaggatacatctcgaaacataaacaaaagaaaaaagagagaaaaaaaaggatacatctcagcagctgcatctcttccacttcactaccagctacacacatgcagtaggagcttcttgacattttcatgggtaatatttggtcttcgcaagtatcagtacttctctattttctttcttgtacatttagtgacttttctggctaaattattgctgaatattgtccgtcgcagattgaggggtctctattccatgttatctccattcaaggagccagg

SEQ ID NO: 87483 - DNA, 3557 bp, Homo sapiens
gccacattatcatattagacagtacaaggtttagaacatttttatcatcgtagaaagttctgttgcagactaccaggctagaactttaagaggatggggaagtacagctatcttgtatgcccagaggtgggaaagaaggaaatattaccaaacttcaataatgtctgtcatcattggtaaactgtatgcttgaaaattactcctcagatcctctatatcctgtttttctgtttttgggggagtggaatagggaggaagggggctacaaagttagttgggtgatataaaaaaaaataatacatatacacacgaatgcatacatactgcttctgtgtgaaaaaagaaaacttaaggagtacatacttgaaattaacattctgccaagcaggagtcattctgttggatgccttcctctgaaggaagactgtattgcatttgtgtggctttggggaagacattcagcaaagaacaccacaattcccattgagctcagaaaatgtgattaaggagtttgaatgtaattacccaaagtttggcttttcttttaaagaacccattcattttagagattccttgatactgtaaacctgacaactcaatctggttttcttttaggaagccttccaccaggaatagtgtgagtcaaggatgagtacatgaagatgaagcccatgcaatgaggacagcctaggccgtgttaggctttgacttaaatcagatttcatctacggctgagatgcagaggagagacttagtgaaatatgcagagctccattccagttcctttcttatttgtttgatgtacaggcttatttaagtgaaaggtgggacaccagtagatatacattcagacaaatcaccctgcagttattgctcaacagagtaataataatagatttggagaatgttctgtgttttcaaagacagaggttaacaagcaatggacaaaccttccgttcttctctatcccaaatcgtttgaatcgtttgactgctatacacaatccccagcacttataaaataaaaaaagtatggagagagagaaagcaagtaacccagcagagtttgtgacagaaactgttagccctcttttgtattgtttctgcatcgtcctgtcaaacatctggaaaccagcatattggcagtcgtctcacaacatgattttgcatttacatcatcgtgctagctggtagaattttttcccccaggaaaaaaaaatcggcaacttttggtctgtcacaaggtcaagtgatgattagtgatgtagtctctcctaaacacatggttagcacagaaaatttaaatcagttccccaaaatttggtaaccattaaattacttcctaagtcacttccggatgtcaggcctaaggtggagagggggacagggctatattgagttctccgcagttttctaacagagagatttagtttggcagctgatccagccaaggaaacgctcacgcaagggcagagctagacaggaaacacttttgaaagtgctgttttgatagaggatcaggagatcaggcaaagagctgtgaactttatgtgtagcctaggccatgtagcactaggctagccacctgagggtatggagtaagaaaggaaattaaaggagaagggccagagatcttacaggcaattttcttttctcaaaagagcagtgctaaaaattatgaatttctttgaagtagaggaacataattaatgaatttctttgttgttgttgttgtttgtttgtaaaacattctgccatcattattcacctttacatttttaacatgattgttagcttagactacgagagctaacctcacccattctaaccacctttttatagctctcagaagagctgtcttctaaggaaaacactgcactgagcaaaggttgtacttttgtaagatggacgttttataatgataagttttgacaacttgctctggttgccatgtgtctcccagtcctgctggtgggtgggtatttgtcaggaatgagaatacgtctgagatggtctgctttacagcagccagtcttgattttcaacttccagggccttcggcatccttttggctctgtaaacatagaaggctttgctgcccttggctgtgctgttggagaaaaggagagcatcctgtttagggaggtgccgatcttcagtttcagaaccattgtttgacacctttagttcctcccgtggacttcatgtccttccttgtccatagtttggaacttacaatctgagtattccttctattgagctactcttcaaggtctacagaagccatttttgtttataaagctgtaatttctcacagcagatcatttcattatttctgtcttaattacagaatttcaaagaaaaataaaatccttatctgtacttaacaaagactgccaacacttttccatagaccaccaatgattcttgttttgtagctttttgtttataaaggcaatgttgtattccacagcatcattacacactgcttctgtgactcagacagctggcaggtccaagatagagcatatggatgatgctctaatgacatctgtccagttgttgtaatcacatatttggtggacagctaaaagacccactttcaccttaactgagtttatgtgactaattttaaatttactgtaaacacttttttatacgtctcatgcttattaatacttaataataattccacaagtatttctctcaattctaaatcccagagcaccatagaaactggcaaaatatcttcccaattaattatgagaaattcatctgtacaattttcttattaattctcgtatccaaaagaaccacaatacaacccaagaccccaatcattagaataaccacaaaaccgattcttaattacctcttgcctgggacactgcagaagtaaccaaatcggtcccacaaacataagcctctctaaccctgccacctcccccagtttatgttacgtaatatggtgagaatcttcttcctcaaatactttttatcctgtcatccctgttctcaagaatcttcagttgtatcccattttacaccaggaagttcaaatgtttgaatggagatttaaaaagtctagctatgcttcttgtacatcccctctaggagcacacccactctaatcaaactgacctttttagtttagctgggctccaaccagttctgttctagctcctgaagtcagcgtcaagaaatattggtcttggccaggagcggtgcctcacacctgtaatcccagcactttgggaggccaaggcgggctgatcacttgaggtcgggagttcgagacaagcctggccaacatgcaaaaccccgtctctgctaaagatataaaaattagcctggcctggtggcgggcacccgtaattccagctacttgggaggctgaggtgggagaatcacttgaacctgggaggcggaggttgcagtgagccgagattgcgccactgcactccagtctggcagacaaagcaagactctgtctcaaaaagggggaaaaaaaaagatgttggagacctaggttctagagtaaactctgccactacctag

SEQ ID NO: 87484 - DNA, 1048 bp, Homo sapiens
atttatcctctgttcctctgccttgggcttattaagttttgaattaggtatgaaaattattaagccaggggtataaattacaattcgttaaataaattcataatatattttatacgcttaaaatgaaattatattccaaactcataattaagtatgaacaatttgcatttgagattttaaaataaagcctaaacatcggtcccttccttcttcattaatttatttctccataaaggcctttcttccttgaggtctgtgagcctccaggcctttgcagcctgtagtggtctgcacttctctgtttttctttccctgagagtgctgattagtgacttgcggtgtggattctgatttatcgcagaccagagctgccccttaggggctgagcagaaacactcatgaaggagccctgattaaaaagagtggtaatgaagacaaatgtttcagagggagttgagagaaaaccagtccttggcattccccatagctcctctgagcttttgaaaaggaggtagtggtagccaaaggaaatatttcttctttgttgtttatttctcatggcactggaaacatttttcttttcctcttgggtgttctaattctcacttgttaactgcttttcatgcagggttgcaattaacccctggcagatacctcaccgtgttctccttatagccactctgtccccaaagaagtttttaatgctttgacctataaccattttaaaattcttcagacttgacacttgcctaatttctcagatcattaaatcacacttctggttttttccagtgatttttactaaatttgatgttaggtacctataattaccttcccttcttcttatttttacaagacagaatgccagcagaaaaaaacaaattcctgttcacttggtaattttaaacacaaccaggtcaaaagtttcaaatctagtgttaagtccgtaactgaaggcaccattccaaaactacttgagtataggtgagaacttgacagataattatggttgcttgacctgggtcttggggcatctaccaaatcttaa

SEQ ID NO: 87485 - DNA, 1023 bp, Homo sapiens
catctccaaatcacagaactagaattattcatgaagagtcagccacatcaaagatccaaaacacgggttttaagatttcaaatggttaatactctacttttctcttagattgttgttttgtttttttttgaaataaaacatttgtacaagtcagtaaaagtgatatacagtatttcttcaaaactggaatgttattagagttcttgcttgaaaatagttccaaattaaacatatgaggtttccagtagtttgaagactttagaatccgacttgagatcaaatcggaactgagacagtgaggtcacctaaactgcgacgtgtgaagtgccctgtttcatgcttcttataatgacatgataaggccattagtattatctttattataacagatgattataaatggtacagacttggtttcttattatctggtactttttgtcacttagccctaattttcttaattcaaagacatattctgttagtactagggagcaagtttaagactgactttgccacactaatcaaattacatcagtgtcaagtgctcactaattaacacaaaatttatatctgcattaggtaaatgtcatttcaccacagtggcctgaaataagctttttattcctttgaattagcataccatttcattgtaagtattacaaacaagctaatgacaaaatttaggcccatgtgcatttgttatttagctggaaatagccagaagacagtcagtacttccaaagatctgtaggaaaatgccctgcttcattttttaactgatcagctagctgacttgtcaccttgaggtcctgtgtgtacatcatagaagggcttagcagactactgccaccccctgtctatatgcagcccacgggctagaacagttctcacatttttaaatgggaggaaaaacatcaaaagaagattttatgaaacctgaaaatcacatgaaattcacatgtcaggctcataaataagttttaatgcaacagagtcatgtctgttcacttatgtattatctat

SEQ ID NO: 87486 - DNA, 1030 bp, Homo sapiens
atggaaaaaatgccgtttgagctagaatttgaggaatacgtggaattttggcaggagaagattgaggaaagggatacctactgtcaagacacaaagtgatatgaccgggcacagtggctcacgcctgtaatcccagcactttgggaggccgaggtggatagatcacttgaggtcaggagttcgaggtcagactggccaatatagtgaaaccccatctctactaaaaatacaaaaaattagctgggcgtggtggtgcattcctgtaaacccagctactcaggaggctgaggcaggagaatcactggaacccagaaggcggaggttgcagtgagtcaggatcacaccactgcactccagcctgggtgacagagcaagactccatctcaaaaaaaaggaacagagtcaccaagacatacacatactggaccaatttgggaaagtacggaagtttgctttgaatatatagcaaaggatatgtgagggatagctgtggaagatccaactgtcaaggaaggttaggaccagactctgaaagtagagtgctggtgggagatgtggaacaggggacaagagatggaaggttttgagttggggaaaagtattctggcagcaggattgaaacattaaagaaaagtaaccctgttaagtggttatcacaatcaaacatttaccaagtaatcactgcaagtggattcaatttgtaaagtcacataaaagttgcttatctctccactttttttttttttctggagaaacagcactctggcatttggccatcttagtatggcctttatataactttggaatgcaaaagaaaagagaaaactctctttgtaaagtcaattaaaagctaattgtttgtgattttttaagttaataaatatatatttacatagtttatagttgttacataaaactttcatgttcttttccttatgaaatgactctatgactttgggcacattacagattgtaatgtagtggattgatggtacatgatttaagggaaatcttgtactaatctgcaagt

SEQ ID NO: 87487 - DNA, 2897 bp, Homo sapiens
attattaaggtacttggctatgtactgtatataccttatctcattaatcttgttgacaatctgctaggtaattgttattatttccattttagagacgaggagacaaagacttaaaaaggttatttgcccggttagtaattggcagagccaaatttaaacccagatctgtacaattgaagctgatgtcttaactactatagtacagcggctttcttgatgctagatgatgtggccccagttttggtaatggaggaatactgatccaatccaaagtggatgtttgcatggaggagtcagagaattttaagaatgaaagggtacatggaagccatcagccctcatgtaaaacaaaagtcctgtgtatctgataaatgttctctgtttaactagatttgtatagtgccctgggagtactagttagcattagtaacaacattctggggcaggggagggtgggggaacgtatcatcagaaaaaatggatttggggatatagaggtgaaggcaggaagaggcagtcatatagaatgatgtgcttggaagatctctgccttttcatgtactgcatctgacaaaaatggatttgatgacatctgggatttgcttcaaaataatagaggaggagggaagtggatttggatgtggatgggacgggattggcctggtttgatggttgttggggttgtatgatggatgcatgggttttattatgtttttctattttgatgtatgttcaaaattctccataataaaatgtttttaaaagttatttgaaagtactgtttccatgattttatagtggtcagattatgtatatgttttcttatccaaaattcccttggtttttctcagaagctttttcttctagcatttgttcccttttagaatctccctcacctctctttctgattatttattaaaagaactcaattttttcagtgctgaaggagaagttaactatcaaatgcccatatagctacagtattgggataatttatctaatttttcttatgagtaagttctctttgactttatttttgaactcaacttgcttgcattgttcttgttagtaaaaaacattgctaggatgtacttagtaattggagtcagctgcacttaagactgttcagccagactgttattttagccttcactagtagggtttttaacaccagtttgaccttactttgaaacattctcaaaataccatactttaatatcaatttatatactttcatattaaggcagggccgggtccctggggaaaaaaataatgaaatttttacttcccacaaatgtagaataaaggtagatattctgattttgttttttaaagaaaaatagaggtaaagactttaaaatttttctttggtcaggacataatgcttgcaaatacattctaaaatataagtgggccaggcatggtggctcacgcctgtaatcccagcactttgggaggctgaggcgggtggatcacctgaggtcaggagttcgagaccagctggccaatatggcgagaccccgcctctactaaaagtacaaaaattagcccggcatggtggcgtgtgcatgtaatcccaggtactagggaggctgaggcaggagaatcactgaaacctgggaggcagaggctgtagtgagccaagattgtgccactgcactctagcctgggcgacagagcaagactctgtctcaaaaaaataaaataaaataaataaagtataagtcacagaaagataggacacctacaaattaggggtgctggtttcattggccagtgtgtcctaccattgctttgggatagagactgaatcctcagtgtgaagcaccaagtagatggtgattattcatgaaatcagaaagaattttttttctgaaatactaaattcccataacctatgcaaattacattttaggcaagtaatgctcaaattttctataagtgttctgaaaataagttataagtttttgttcatttcataggaggacagttgactcctttctactcttttttttgccgttgtccctattttttgccactggtaaactcctgcctagaggaatgccagaggcagaataaattttggagcatggattttttttttaaggagggttatagtatcctgaagacttcatttctttctctgaagacacaactatcagcaaatccatataaggcaagtgactccctaccatctcctccgagtcttctacgtgtatgtctagatactatgacagatccagtgcctgtgaagacctggaacatttcagacaatcacacagatgttttcttatgctatatataggaattaagcaagtgtttcataatgaagtgtccctccaagcattctctatcttctggtaatgcaaaagtgttagacatccagtaagcagccctttttaggcctaaaatgttgactactttatctctgttacctttctgaaatgtttggcctaatattttttataacatctctgtgaaagtttgaaaatttatgattgttgatcctcaatagtcaaaaaagtagtcatttaacaatacaatatttctctcgtgttcttgagcatgtatttaagttagctttagttaaccctttattttctggacttcttcaagtcagctctcagaattgtttttacgggttgctgaggaagctaaaggtcaaagatattttcttagtcagttgatttacctcaaagaattacttcatgtagattaactgaaataatgatgctgctaagattcgcagattaagatcattatagcatttgagtaggccctcagtgacaaattgctctaaacctgtttggctcaccaccataaggtttaaaacataaaaatataaaagtgcttaaaattttctttctgtttccttatcagaaatattcatttagacc

SEQ ID NO: 87488 - DNA, 1963 bp, Homo sapiens
caagatctcttaattcacaaaagcatttgctctagttcctgttctctgctgcaggggctacggagagggagtgggggctgggggaggaccattgggagaatgttctgaggagaagagaggctctcttcacactctactgagtacacagactttggagatgaaaaacagacggagagaggcatttccaaccatcttgctgatctgtgcaggagttcattgaactgtacagcacagcaccagacccttgtgtcatttaatgttactttaaaaaattattcttaaatgttcagcacaaatatccctcccctttttacttaagctgaaaaagaatataaaaattaaagagaaattgaaaatctaagtcttgcagtgagaatgaccagaaatcgtttccctctctggggggttcctgtttaatatgaaagtcctcttaacaagcgtggacagaggaagttttaggtttgatttgaacttcatgtacaagacatatttcatttttttttcttccctcacaaatttcaacccaggccacttgtttgcagagactgccaaaccttccattgccgcttccaagatactcctggaatctgagattaccttttatcctcttgatggaccatgttgttatttttgtcattttccctgcagctcttctgctttgctggggaggactcatccccctatgcatcatctaccccccgatagctgacacagtactgttcacaaggttacttactggttttttgtttttttttttttgagacagtttcacgctgtggcccaggctggaatgtagggatgtgatcacggctcactgcaacctccacctcctgggctgaagtgatcctcccacgtcagtctcctgagtagctgggattacaggtgtaagccactacacccagctgatttttttttttttttggtgttttttgtagagacagggttttgccatgttgcccaggctggtctcgaactcctgggttcagggatccatccccctcggcctcctaaagtgctcggattacaggtgtgagccactgtaagcgactatccagccaaggtcgcttacttgtgtaccagtttgggtcactctgaaaattgctttgaaatacttactgtttaaaatgactgagctcttaggagtgtttctgccctctccccacaaccctcaaatatctaaaacaacctaatcaaattggtagttttcatggctttcaaaatggaactaaaattaaagtaaaaatgatagaatcttgagctagagtggcagatttgaattctaggctttgctggtccactgatgatgttcattttctttccttgtgactctcataatcagagtaaaaagatgagattgtaagtgataacacaatccattcagaatgtatgactttgctgaattgaggttgatctttaagtgtgagtaaaatgttatgcaaattggtagtttaaataatatttcagaggggaacatgcacttgctagagaaaatgaaaatatttcaaacccacttagtttttttaatggcagatgtttcctttttttaatttaaaaaaaatttttttaagacagggtcttgctctattgcccaggctggagtgcagtggcgtgatcatggcttactgcagcctcgacctcccaggctcaagcaaccctcccgcctcatcctcccgagtagttgggactataggcacacaccaccatgcctggctaatttttttttttgagacagagtctcactctgctgcccaagctggagtgcagtggtgtgatctcggctcactgcaacctccacctctcaggttcaagcgattctcgtgccttagcctcctgaggacctgggactacaggtacgcaccaccacacctagctaattttttgtatttttagtagagacggggtttctccatgttggtcaggctggtctcaaactcctgacctcaggtaatccgcccgcctcagc

SEQ ID NO: 87489 - DNA, 3010 bp, Homo sapiens
tgttaaaccacttcatggaacattcaaaaactcagaggctacactggctggatttaagtggtgggggttatacagcaaattacctacatttaaggttgctgctgccgtttcattccatgttgccaactgcagaaatgtgggctccgtgttcccagactttccatttagtcaaaagagacaggaaattcacatttttatggatatttcctgattttttaaacactacaggctaactgaaacagtttgtgacttttgcattgtatgttccactccattttatcctcataacatccctacaagataggtataattatttgtatttgcgcactctcaacacagctaatacagagcaaaagtagaaatctactgcaggtctgtctccctccaaaaactatgttgttattgcgcttcctcatctggttccctaaactcatgaaggtggtactgttggcaaaaaaatgtactgtttggttaaagccaggcccttaacaaaattatcaaacagcatggtactgtaccacagagtgccattttccagaaaacagttatttatggctttgggagaattgattgtaacatgaagataatgataactgcaaatatcaaacaaaagctctgttgactttgctccagattttttatttcaaccccatggtacttctagaaaaggcacacaaatactctaaattgttaacagagttcttcaagtttctcaaagagtggcaaaaatattagtggcaattttacaaagcctgaccttgccagaaagagatatcagtagttctcggtgtctactaaatatttaatcacttttattaaaattctaaatgaacttagacgccttgaggagttaatgcacctccacaaacctgctttccgctggtaagatcaggcccattattattattatgtacagctgtaaaaagctggttccatagcataaattgcgaaatacttaggcaagaagattattcgagaagaattgtattgcttgttcagttatatattttgatctttatagctagtagttttttttctcatgagagttggagattaaccttgcttttaatgtaaaaagtatatcagtgagggtaaaaatagaaaatgaaaatagatttttaatggcaactttggttcttagcattaattttacatgcatttttcattctgaacttttaaacagttttgagaaacatatgagagatttgtgaacaggggcaagggagggtcaaatgtatcaaatccttggattccagcaaatgtaggatttgtggaagagctgagaagcacacatgtgttgggaatgtaaattaaaataaaaccccactttgtgaaggctttgaaaagagagtgcaccctgttatggcaaatgtctgaggcgtttgtcttcttaataaattaaccaaatattaaaataaacattacttttatcagcctgcatttttcctctctggatgaaagtgtttcaggaaaaatcataaaagaatctatggtagctcagagaggttaaactcaacagttgttttctttgaagtctctggccatgaggttaattgccaaaactgcttgtggaaaaggtggtaacaatttaacaagactgtacaactgcagagacttagatgaatatcaggtgtttgcagatgttttttcctaacaggaaagggggtggggaggagaggcggaacagaatgagaaacaggggaagagagaggcctgaataaagtcccaactaaacagccaataattctttgtttgcttagccaatcatcctgtaattggccaggaggttaataggagtctattgattggtcaggaagattgcttactgtggctgtttttacagtatgctcccagacagaagactgcaattactggagctctcattcccactctttagggccatggctgctctgatttatgaaacccgatcaggttgctgttggcagtttatgttttaagtgttgccttctgggtctttgctgcttatgggtcactgtgctatttctcatcatttattgtggtcatttgaataggtaagcttatttatgacttactgaagtaggaatacattaaaagtaataaccaccacccacgtgcactgaaaagtgggaacaatcgtacaagatgtgtgacagagctctgcttgttctagaaatagagattctgctaccagtatagagtttacaaaagaccaggaaataaaataatacagcccttcctttctctgtcttcaacagacatgtttctcaactctcctcattaattcctgctaattgattacacttagatttgctttcgtataacttctcataattagatttggttgctggtatgttagagttaggaaactgaggccaagttgtaaatgtctttaacccccagactgcttttggaacttgtgacagggctcttctaacttaacccatcctgacctggtcttgaccttagcattactaataaggtacttacctcatcatttcgtttctcacttactgaacgtgactataaatcctcctgttactcaagatcttggttttccacacttttgcaaaccttcttttgtagttccctgggagcccagttgaaggggagtaaatctttaattctgataaggccctggagccacagacttctgtgtagccacatctagacaactgaatttcacttacacttccaacttctcatttaaagctacaatgaccacaactactgcaatgactgttactgctactactactgctattacaggttgaccatcccaaatccaaacatctgaaatctgggatgctccaaaattcaaaacttttttgagtgagtgccaatattacactctaaggcaatgttcattggaggattttcgatcttcagattagggattctcaaccagtaagtatataatgcaaatattctaagatctgaaaaaattcaaaattcaaagcactcctggtcccaagcatttcggataggggataatcaacctataccactacctcctcctcctgttttttcc

SEQ ID NO: 87490 - DNA, 1060 bp, Homo sapiens
atgttgtaggacagtgctaatccgacttgtccttcagtgtggtaattatgggccaagtaaagtaaaatgttagttgctaagtctccagtggggtactccaccaccagttctactggactttgagaatatcattcctgcctttcttcttggttcacgtctaggcaagattacctctttttctctgttttcttactattttaataattgtttttactatgaatatcagagggaaagagatgactttgcccttaaaagatgctagccacataatctctgcaacctcaccaaacccccagtgtaaggtagcatctcctatttaatttggaattcataagagaagttagcttgttacttttaaatggactacagtttctttatcatctgctttaccataatccaaaaatttcagaaccccagaggaaggtccttaagattaattatctctaccattgtatgccgttagaatccttgtatcatgtatcattttttttcttgttttttcgtttgtttggctaaactttgctgtttacctcattatcaacttttatatcagaactcaacagcagtcatattaggattctttagtaacacagcgatgtgtgcacttttatcttcccatttgggggtgaaatctgccactgttttccaaacgaattaacaaccaaccaacaaccacacacaaaaaaggaataattcatgttctgacactagccagcttaaaagtctcattgttttggtatcctttcactgttgctaaagaaattaagaggatggagaaaacaacaatccattggtttagtgaagggaagcaaggttgagggagtaaatgtgatgttcatccccccactgccactttgttctcctgaaggacctttcctttagatatttgtcgcactgccttccttcagtttgttttcttttcccttgttttgttttgaaccaatgtgtcctttgaggaaggaaggaagggagggaaggaagaaggaaaggaggagagaagaaaactcatgtaatacagccaagattgtgaactgagagttggggcaaatgcaatatttgg

SEQ ID NO: 87491 - DNA, 1547 bp, Homo sapiens
cttaagcgaccctccccacatgggtctcctgaagtactgggattacaggcatgagccaccgcgcccagcctcagagggattttgttcttgagaactaaaacgtgacttctgttaatcatcagaatatttatttaatgtgtttaatgtaaaaaaggaattacatttattgtaaatgaaggcactaaatatatttttactcttaaattacaatgttgaagtatccttttgatcaaatgcaactggttttttttttttggtggggggtgtttggcttgcaaaagataaatcatttcagaaatgtttttctatttgcattttttcttgaaattttcttttgagtatggaaaagtgatcaacaaacaatacagagaatttttaatgagacatgtcaggcatcgtggaaggctcttgcctgggtcacttatgtgatgacctcaacaaacccattttattatacaatgaaaaaagtgtacgaagcttacatatgatttttttttaagtttcttcctgccagagcatggattaaagaaactttagtaaagagtaaaaaattttaaaacacacagtttgatatgaattttggtaaaagttatcagagacaaatactagtgggccaacgaaaacactgtatttataggaaaatttgaattggggcaataaatatgtcctgaggctttggtggcatcaaagtattggtgctttattttttgtgatttattgttttatcaacagaagtgagcacttgtgttcagaaaaggataattcacacttaaatcttgtttttatttaatcaagcttaaataacaggttagagtggtagcaaaaaaaaaaaaaaaaagtctaatatttagtttgaatcttaaattggtcacccagagctgctctctctaggagcgaacctctctatttgtcaataaacaagagagagatacaggctcccagataacaggcatttggtaaactggcgacagtcatacaagcgagaatgttaaaatgacttcagctctttctagcttcattatgtcagcctggcagatcacatatggcattatggaaatcagcaaatgaaaaccatattgatcagcattgagaacaaatgtaaaaaaggtggtctcagggaggagcagagaagaagaatgctttcctgttcaacctgataggcccttgttaaggccttttaatcatttattaacataaccctccttcttccctctccactcagattacctcagccacagagcatcctgctccatttatcttttaatgcttcctttatttaatttatttttaagctctaagttatactcttatttcagaattgagttttacttttcatggtattgtttaaagtgacttaaatgacttttcccaacaagctcaccaggcattcaaaggaagaaaagcatttgctgagattcacctatcagcaaataatttactcggtatgcaccacaaacaaacgcagagagacagagaaagacagtcagccagacacattaaaaaaaaaaaaaagaaaagtaaaatctgagttgttactaagcctaatt

SEQ ID NO: 87492 - DNA, 2239 bp, Homo sapiens
cttttcagggattggaattgagcctggtaaaattccttaggtctaaaactggaatctcaggcaccttctctttccctcttcattttctgagttcgggagaaaggtggacttttgttttatcttgtttcttttgggggaaacttagagtaatatttggtctgccaaaatgagatagagaaatggaaatacgtgctttgtggaggatcctgttttccttgagtgtccttacctgaaatggtctctttggttttgtaggttcagactgaggttggaacgggcttgcttctctctctcaccttctccctacccaacccctgcctccccttttatttttatgtcgagtttcatcatttggtaagaaatttcagagggatttttaaatatgaaactgtgtctttttgtagttgatgagtaacctgtggatgtgaatccttggaatcctaattggcacataacaataattgtttctatcctgctataaaccataagtaactcctaaaaaaattcacatgcacacaaaaaatctgcagtgtggatataagttaatgccctgaagctggtacatacagaccacctcaacgatggactcctttatgaatgatttaggtaattgacacaatttaatatttgcaattatttttcctttgaaacaacacttaaaaaaaacaaattctacaacatttaaacagttgaggcatcactctcctataaatttagtattaaatttcaaaatacgtatttgttttaaaaagcaaatgtggttaatctcgaaatcattgaactttctctttgctctggactccttgtctgaggctgtttgggatggattaattttaacttttctttcctgtttctttgctttcccagtgcatctgggggaaataactctgattgatttggatatcaaaagatgtacaatgtgaagatctaatttatcaaaacagaattcaataattttattcattttggctctcccttgagactccaaagatatattcagtaatatatttgaaaaatccaggtataaaaatgtcttttatcttctcttcatcttgtatactccttgatttctaagtacttttcctcttagactcatattactatcccactttcctttctgggctctacatcaaacagtgtaggaattacagcaggagtgctatctgtggaagacttactccccttgtttgttgcagaagagcagaacattaaacagtgagtggactatgcagaaacgctctccctctccggctcttttctccctccctgcctctttttttttttcattcttgcctctccttctcttcctctgtttctctctttctctctctctctctcttcccccccacccgcccccattcccaatgggagtgttgtttatagagcattataatttataactgaagagagtggatttaatttcagtggagaggctcgccagcagggcgccagcctgcaatcatatgaatcagcaagctgcaaactctattgaatggaaagtattatcgctggccacaaacggacactgtttctcctaaacaactcccttggtgcaggaagaccttgtcttcattcatctattttacatatctacttctgttttaattttgccatttcctaaaagtgttttctgttttagattgcagcttttctctaactaccttatttcctgatgcaatattgaaaactgctattgtatatttctgactgatttgatatctcttctttccttattctttaccatgtatgactagttttctgtttgcttctccttcctatatgcaactcttttttttatgagacctgttaaacctgccaaaagactaaccattagcattaatactgtaaaatgctagtcagtttggatcacctcaagttttatttaatcatggatattttgtttatactccgacattttttctacattcatggaaagatttattttgttgtcttgcaaacatctgggagatgatttcttattctttacatgacccatcaaatgtcttgtaatgttagtacttgtgcctttataccacatttttctcaagtgtttcagtcatttttttaggaaaagggatagaatatgtgcatgacttgtggctggtatttgttttttgctttaactcaaaatcagctgctttaatgtagctgaactaaatctctaggttattctaaaaatcaagttggaccaactttgctgatacctttttaagaagtattttactgaattcatgtagct

SEQ ID NO: 87493 - DNA, 3143 bp, Homo sapiens
caacaactcaaaatatatgtaatcataatttttctcatttcaagcacaaacttgtgaatccatatatattcatacattttatcctttaaagtgtgagaatagagttatagtcttcactgtctcagctaggtttttcttttcttttttcctttttgcctttgattactccataagaattacacacagaagcagaaaatcaatatgtttacctctgcttattttcaaaattgaatgttgctgtggtttgataccagagacggtatacccagtatcagctttgagagattttgtttggttttagtttaaaattccttgtgtgtgtggatattacctctgacaacaattaactatcagtaaaagtaaaatgttcattttttttttccccaagaagtagtgagtgaaatgaagaagaaacttgtgagatgatttcaggtgaacatctttctaaatccttttattcatgacttaaaaccatttggtaagtctgacccaagatgtatggatttttattgaattattaagattacaaaaactacaggcagctatcttcacacatatcttcagacagtaatcttgtgcatttttaacatccttgaggaggtgggagaactatgttgaagtgcagacatttgattaaggttggaatgactcaacagtagtgaaaacacccttgccttcatcttttcagaggcctggagaggcagaccctttgtcttttcacttgagtcctgccttctttgtttttgtgttttgttttgtttttgcctaaaagatgttcctctctacctgtaatgtaacattcaagaaaaatctggtttatctgtgcctcatcctgattaattcctattttcaaaatctaccataagaactttcaaaatccagtcctagaacagataagttgtgtttgcctgtgtattctatgcaaaagattagtttctttaaatttatacacacaagttaatacctttgagaattttctgcaattgaagtaaaagaaaaaatatgtggttggcatctttgatttttttttttttgtagtgacagtctcgctggtatctttgatttaaataaaaatatatattgaaaatagaaccatctataaatacatttgtccaaaatctttatatgctactagattcaaagatataaattaactacaaggaaatgccattcactaaaaagttgctttttatcatttaaagcagggtggtttttttttttgcagaatttttgcatgttatggtgacctgacttcctaacatattatctgattccttgatcagaaaaactttataaaaatagtctgagttaattttttttttaatttactggataaccttgtaaaagtccctccactagtcatatagtgaatatgtcacatttaggtaattgccattgccgtgctggatggttaatatacggaatttccgagcactgatctaatagaacttgctggggcatcatggcagacaagtatgtctcccctccctgtgactgcgctcctgcatggtatgcttggcaagcttagcaaagcttaaaagtcagctgcatctgtgtgatccaactttgctttgactgggagcaattgagtacaccatttgttttttctaaatatcacaaaaattgtattttccatttactagggccttttaagaaaaaaatgcctagggctgatggtttaccaacttttttaccatctatgcctccaaaatataaaaaaggtcatggtcttactactgattatagtggaccacactatggtcactctagttaaaactgtgaccttgaagcgggggttgggtaaggaaggccctacttgtggcagctttcctccacattttggagctttgatgtgttcctgcagctgatataaatgcagggagggggtgtcagggagaggcagctggctggcagcgacagattaaaatatttctgacccacaaatgtaaccaaatgcccatatttcttcatttaacataattaatgccttgtatttccactgactttgataaagtggccttcctcttcccatcccatcccccttccctgtgtcaactttgggacgactacaagagatctatagttaaaatactctgcagatgatgaaggatagcatgtctgaaaaaagctaacataaaagtctcaattaggttgctgcctagcaggaagcttataaccacattaaaatggaaaagttatttcatttttagtatactgtatttcagcagcaagagttgcaatctgagagtaatatgaaacattttggtttggctgccaagtacatccacattttgttataaatgtataattacaggaaatatgtgaaaagtgttaaatatttcttatcaaatattgttaaagaggtattctggttacatttggaatttagaaaaggcctgggatggattttgatcatgttacaaggcccacttgttgcatttaatttaaagcagttgtcccaatttcattaccacagagcatagcgttttcaaatttattctttaaaagacagagatagtggcacaaaatgtgctgtgggtttaagcaatatttgattgatcatgtgattctatcagtatcttttttttcttttattttgcctcagtatacacatttctgaatgaaaagatagacgatgtctttattttaaacaatctagtggtggttgaagaggccatctggaaaggtgatgtcaacggagggtagggtggttgctggtggaggggagtagccagcgcccctcccctcagcacacataccagcccccgcaattccagtttcatggtgcctgagttgctgtctggttggttgaactcattctcctcagcttatatttaactcgtcgcttgttctggaaaagtagtagtactgccttctctggcctttataaacatgattgctggacaaagatgagcagcacggatttgctgcgatggtcagaattcaattatattactctctctgaggcaaaaagcacacatttaataactaaattggattccttctactaagagatcctaaattcgtgtttaatagccagctaaatgtagagctgatttatatttataggctggttgtagatttggttgatagaatataaagtttgatctgtatgtggatggttttactaccccaaatgaaat

SEQ ID NO: 87494 - DNA, 1050 bp, Homo sapiens
gcatttgcctctacaagaatattctcacaccatagatatagagaaaggacaggtatatacatcgtattttatttgaaggtatcctgacagaatttctgcctatcttttttcctgctacagtctgttgtacagcagcaagaccaagatgattccagtaataagccttattggtatggttcactgatttttttggactctgcatttattttagcagacttccccaataacattttgcagttttcagcttttagttgttgaaaacaaaaataataagtaaaccagttcagggatatacttctctttctgaaactgattccatgtcataatgccctccttggggaggagcaacgtctccagccgaggctgcaacccgaggaaccactcctgatggaatatgagaaagaaaagtgtattatttacattcttaatgttttgccttttgttgttatttgggacactcaagaggaccaacatgacgttagagctttttacttaataaattatatacatatatatcttgcttaagttttataggtaatcctggaagtttagtcttactttgggaaaagatcaaggcaacattctattcacattcgttcagcaaatatttgttgagcacctattatatgtcataatagtgagtgcctagaatacatttaccagaggaaatgttgttcctactaaatgagtaaaaccctgcggcacacacgataaatattatttttaaaaagtggttttaggccaggcctggtggctcacgcctgtaatcccagcacctggggaggccgaggtgggcagatcacgaggtcaggagatcaagaccatcctggctaacacggtgaaacccagtctctactaaaaatacaaaaaattagccgggcgtggtggtgggcgcctgtagtcccagctactggggaggctgaggcaggagaatggtgtgaacctgggaggcggagcttgcagtgagccgagatcacgccactgcattccagcctgggcgacagagcgagactccgtctcagaaaggaaaaaaaaaaaaaaagttttttt

SEQ ID NO: 87495 - DNA, 1211 bp, Homo sapiens
gagaaggagcaggttctgccctgtgctgcaagatctgagtcagcgatcaaggtcagtctcagttcattaacttcttctgaaggcttatagtcattgcaaatataactgcttataccttatgttatcattatatagtacggttttggaatgacttatgttcacctcaaatgtgtcctagagtaacagaaggatgctgaaatgtctagagtagtataaactgatttctgaccattttgcctagtttcctaatgcccacaaatggaaaagtctcacctctcaaggtataagtgtggataaatactctcacatgtgctgagatcagacaggggcctgcttttaaatgaatcatccaaaaatcattatttattttgaggagcaatatacaaggattctcactgtacttccagccaatacattatttaacattagaatatatttcatattattaaggtctcaccattaagaaagatgttttctcaacagttctaatacctatgtcattcttatgttcagacaataccaaaactctttttaactgtaaattgctacccttaagcccacttttaaatgatgtttaatatattccacttgaaacaaaatggcaaatcatattaagcttaacagtttttgagaagtctggaatgaaggtaacattttatgtgcccagtcctttacatagaagtagaataacttggtttgagatttttgtatgtggataacctagctgtgcaatgagataggattctttttccttttctttccttgttatttaaaaaaaattgagatggggttttgctatgttgaccaggctggtctcaaactcctggccttatgcaatcctcccatcttggcctcccaaagtgctaggattacatgtgtgagcccggccgagatagaattgtttcatttaaggattcctcagtgtactttagaagcactccacaccaacctttataaataaacagaaagtcagaaaaattgttatactttttcatttgttaaacatattttaaagaccatttgattttcagacagtggtggtggtgataagataatgtattgaggttgtttttaagccaagaatatctgtggatatgggaccatttttacttatctcatgtaaaatagattttgatccaatttctgtgagttgatttttctgaaaatgaaataattaacattattttcttttcttttgagacagagtcttg

SEQ ID NO: 87496 - DNA, 1603 bp, Homo sapiens
ttgagatcataggtcatttgtccttacatgcctggttcatttcacttagcataatgtcctccaagctcatccatgttgtcacaaatgacaggatttccttcttttttaaggctgaatagtattccattgtgcatatgtaccacattttcatttatctgttgatggacattttggttgattccataacttggctgctgtgactagttctgtaatgaacatgagagcacagatatctcttcaacacactaatttcctttcctttctgtatatacccagtttcaggattgctcatggtttgtatggttaaaataaggaaatggccaaagtatgatttcaataatcgcacggtgtattaccatacaaagagattctcttccctgcttccctacaatgctcaaacggggagaaaatgagaaaaaatcttgtagggaatacactcgatagacacagtgagttccattttatttagagtccaattgatgaattctggtagctcaattaagatagaatcaggcctcagtggaagtaaagtctaatcacagttcgatatgtacttttctatgggagcttctcaggagagatggtttgaccacacaagtccttgtacactagtgagtggtgcaggtattggcaggtgagactttggagaacagcttgaaggctgacaaagagtagtcctgctgcatcctgaggtctcagtgtgtcttgtcaaagtcctggggttaggtcaggcatgggtggttcacacctgtaatcccagcactttcggaggccaaggcaggaagattacttgttggcaggagttcgagatcaacctgagcaacttagtgagaccccatctctgtaaaaaatataaagattagctgggtgtggtggtgcatggccatagtcccagctactcaggagactgaggcaggaggatcacttgagtttgaggatgcagtgagctatgattgtgtcactgtgctccagcctgggtgacacagtgggaaaaaaaaaaaaagctcttgggtttacatgtgttttggagtccagtagttgagatcagtaactcacatatgtggtctgataaggggtgatgtaacattgtcatggggaagggcattatactccatgtttttatcttagcaaaacatatgtcaccaatgcagcaaattatgtgaatgtttggaatcatttcaaagctgtcccagctagattatatgatagctctatttttaattttgggggaaacctcaatactgttttccataatggctgtgctaattcacattcccaccaacaatacactgtggttcactgggagaaaatattaacggaagctacacattggtagaaagtattttccgctcacccaactgataaaggacttgtatccagaatatataaatataaaaagctcagaactcaagaataagaaagctaacaactgaattaaaaaataggtaagtttgagactaggtgtggtggctcacgcctgtaattctagcactttgggagactgaggcagaagggttgcttgagtctaggagttagaatccagcctgggcaacagagtgagatcccagctctacaaaaaataacagaagattagctgggtgtg

SEQ ID NO: 87497 - DNA, 1060 bp, Homo sapiens
ttagtttagtactttaaaccttagacataaaaaagaagactatcagtgaaaatcaattgaaatgtagttagataaagatctgatgtacaagcagaaggcttagttgcagcacaatataatcaattaggactctccagctgcatacagagttttacccatccaatcacttttcacacgtttcttccattagcttgactagagttattcttctttttttaatgtgaattatgatgaatgagattgttgttatgaatatagagatgggtcattatcctacagaaaccagattgtgctggtgtttagtgattagggctatctgcttctgctatcaataaagtacagatttatctgtctcaaattatgattgggaagccagtagtcattgttatctaattcatttaacaatgttacaatacaaatgtataatataaaattgtttttgttcagctgggtaattgacataacttttaagttgtgagggtaaaggaatataatttatcaaatagaggtgggaaatttttcatggcttaaaatcaaataaatattcctcaggaattagtacccccaaatttaacaccctgggtgtagcctttaagatgtcaaaatgtggaaagaacaaatgaagtttacgtaccctatatgaagacgctggagctttgcaaagtaatgagcatcggtttattacagaagttctgtaattaattattacagtctaaaaaatgatacgatgttttcctgggcttgggttgaggaattcaggaggtgggaaggagttattggatctagtttaatgcaccaagtgactggaaatggcattgctaggtaaattgggccgtcagcctaacattagcattttttattaaaaaaaaatactcaatccttagaaaacttacacccaggtagattagtagagaaggtcttgctagaaacagctatttaattttaatcaaacttgtttttctttgcccttaaaattgaatttttgtttttgttcttattttaagtttttcctattccagactcctattgtcaaagaaaaagccttttttttttttttttt

SEQ ID NO: 87498 - DNA, 1989 bp, Homo sapiens
catctaaaccatttttagctagttgtttattaacggtagtggaagagtgtggactatgagtttgtgataacggttttttttaacttcttattttgaaaaattttaaacataggcagaaggagaaagaatagcttaaaaaaaccccactagccatcacccatcttcaataattatcaataaataaccaagcttgtcttatccttatctccctaatcctactctttgctggttatttttattttaacagccttatttaggtataatttacatacaatacaattcatccatggtaagtatacaatttaatgatttcttagtaaatttacagagttatgcatccaacaccacaacggagttttagaatattcctattaccctgtgttcccatatgctccttaataggagctcacactccccaaccctacgcagtcattgatctaatttctgtctctatgtatttgtcattctggacatgtcatgtaaatggaaacatacaatacgtagtcttttgaggctggcttgctggcctaatgtttttgagactcatccatgttgtcgaatgtagagtgttgtggactatgtcagcactttgttcttgtggccgtgggccccttttcactgagccttctttgcctttatcttcacttgaatttgtgggctatgtgctgaatgacttccctgttactttcagtgttgttttagaggaaaacacagttgttgttttgtctttgttttaatgaactgatatctcctgtgtgtccatgctgattcttaagttgtttaaggaaatatttccttaatagaagaaccttctttcaggatcctcctattcttcctcccaatattgaaaatcattttttaaaatttgccattaaacaaatttttttgtttttcctgaagaaactccccttcatttaaaaatctatagtttcttgcttttagaaaagaaaacattactttaaaatttgccattttgtttgtcagttaccaaattgtccactctgggaaaattcgatgtgaagagctcataagaacaaaagcatgatcttaagtatggtttttagacaaacatgttttgaactccatgttgtctcaaattagaaattttcccttatctccgtagttcaaaatatatttttatttaattatattcaatgtaatatatttttaattaaactatattttaattcatatgatgtctcaagctaagcattgtacaaaggactcataaacatatgtttgttatatttttctacatgatgtttgttaagatgtttaaaatgtcccctaagcatggtgctaaagtgctatgtatctgttgttcctaagctttatttaggtaaatgttatagtgcagtttgctgtgagtttaatgttagtgaatctacaatatggtatgtccagaaaaagaaagagggagttcaccaacctgtacaaagcttcttgggaaaatgctagggtagtacctatagtgcctgattgaaactatggaaaagatagaaaggtggctaaatttgtgaatttatgagaaaatgactgatacaattgttgataggctgaaagccaaagaaatttacattacccagggtcaggaaaatgttatgcccttctcagctagtgctggctggtttgaacatttcaaaaggcaatatgttgtgaagaatattaaactttcaggcaaggtatggtctgcaaatgcagaagaatttttaaagtaccagcttaagtgttacacaggaaaagggttatgtggaaaagccggttttcaacactgttgagactggcttgttttcaattgaggagacattggcaaatgaaccaatgttacatattaataaatgacattttagttgatggaaaatgtcgtgaccagggtcttgcaggaacctaaccctgtttttcccagagaaaatttcagtattcactaattcagtgttcatagtgacttcctaagtaccttgaataatgagaatagattgtcattgataa

SEQ ID NO: 87499 - DNA, 1116 bp, Homo sapiens
tattttaaattttcaatcggttcaaaattcaaaacataaaaggatacataatgaaaaatcctttctcccttccctgcccccagccacccagtttctctgtttagaggccaccaatattaacagttgttttttttttttgagacggagtctcgctctgtcgcccaggttggagtgcagtggcacgatctcagcttactgcaagctccacctcctgggttcacgccattctcttgcctcagcctcccaagtagctgggagtacaggcacccgccaccatgtccagctaattttttgtatttttaatagagacagggtttcaccgtgttagccaggatggtctcgatctcctgacctcgtgatccacccacctcggcctcccaaagtgctgggattacaagcgtgagccactgcgcccagccaacagtttctttattcttccagaaatgttttatgcagtacacatttgagtaggggaaaaaaatgaagtaacccttatttattcaaaatttcaagagtattaaagtaccattggtttctacatgttatttttattgagtcaacttgccaacacaaaccaacataaaccaagactgtaagtgttatcaaggacatcaagatagacccttcactaagagattttaagaactcactcaaaatactctcagcatgaggcttttagagtttcctatctttggactttatgttgctgacatgtgttctcagctagatttctggtatgtctgtgaaactcctttcttatcattcgtcttttagtcgtggacaaagccagtaaaagagagcatggatatgagttattgagtagcactgatgaccaacagagttacccatgttgcttttcccttagtttatagtctatacttaaaagtttttccttctaaaacacctagagctgagaatgacagttttacccccttaccttcataataaataaatagaattttaaaacacagaacagaaagctagattccagaaaaatgttggcaaccatgtatagggttatttattgatgactttgctcattggcagtataaagggcgtgtcacttgtcattagcagtaacaatttcaccacattatgttctctttttattttctc

SEQ ID NO: 87500 - DNA, 1094 bp, Homo sapiens
tgcactccagcctgggcgacagagcaaggctctgttaccaaaaaaaaaaaaaaaagaaacatagagtttagaaacgtcaacatttatataataagagttccaaaataatatgatagggagaagcaatgttcacataataactaccaagaatcttccagaattgtagacctcagattgaaagtataacttgagtgttgagcagagtaaataaaaataaatttgtatctatgtacgttgtagtgtaattgaagaccattgatttttaaaaggctagctgagagaaaagacatcttttctacataaatgtgaaaattaggttgatgatagacttgtaatttggtgacaatagatgccagaaggcaatggagtaatataccagagtgctgagctgataaaaaagatattatttttaattttacagttctatacccagctaaaattcaatacttttacacagtggcagtttaccactgtcatgcttttgttgaaaaagaaaatcctttaaaaatgtgcttcaccaacaaaatataaatgtagaggtaggagtgatatgtaagattcagaattatgatggtagttaactttgaattttataatgataatagaatagcaatacctttcatattataatttacttacatggaatgaaaacctcagacagtaatgacaagaatgatgtggagttgttcgctggcaattaaagcatattcaagacaaatattgagatactgagtagcccagaaaaaactatggtataaaaatttaaggacactgcggggcactgtggctcatgcctataatcccagcactttgggaggttgaggcaggcggatcacctgagctcaggaattcaagaccacgctggccaacgtggcaaaaccccttctctactaaaaatacaaaaattagctgggtgtggtggcacatgcctgtaatcccagctagtcaggaggctgaggcaagagaatcacttgaacccagaaggtagaggttgcagtgagccgagatcatggcactgcactccagcctgggtgacagagggagactctgtttcaaaaacaataaataaataaataaaaatttaaggacaaacc

SEQ ID NO: 87501 - DNA, 1800 bp, Homo sapiens
cttaccatactctgattactagaaatatataaatgaaaccaacatttctctatcctggaaaaaaagtgtccagtagagtctgtccttcctgagcttagttaaagcaattcttgtatctttgttttatattttttaaccttttccaatccttaatacatttgtggtcttactgggatatgccaggaagaaatttcttccttctatttcttctccctctttttagctgtctactgtataccatgtagaaccacaaaatgcatgtttttatctgttctgttgtgtagaatgtatatgctgccagccagccttactctttcctctctacactgccacagctacaactgcttccctgtcaaacattagaaaaacacaggtgggcacctagtgcatggtgttacagtaaagacaactcgacatcatactgactacaaattacctcccctagtttaaaggcaaatagtagctatcacaaccaaatttagaatgtgacaccattgtttaggtgtatgtgattcatttttattatctaatcacatatttttttcccttctaatttgtgccctgactgcaccttgtgaaaggttagaactgggataataactgtgatgaacaagttattcaagaaatacttgcaaggtggacaatgttaactttgaacagtgaacacaaagggtaatgaattactaataccatagttcccttctcaaacagcagtgacagcttaattttgataggatccctatgatctttgtaagcgtattcatgccaggaatgttgtcctcagcaatagatcctatctctatcccttttccaaaagcccggtaaagttagtttgcttaaaactacctgaaaatgtctttctagacatccaccttactgcagggccctagggtcataacctcttaaccttacgggttataggtctcttgctttttgatctttcttggttctttagtttttgcctacttcctccacaacattcaagccttgttatataaggaaattggaaacaccaattttggatgagataagttaccctttcttccagaataatccaaaaagatgattttaaatagaaacatgcttgggaaaaatttagcaaaactacagcatcctgtctaagccagtttgaagttgccccccttcatttcttatcctctttataaaaaacaaaacaaaaccaacttagaacttactgttgacttagtgataaagtttttattcaggtcccaaaggcagcttgcttgagacatcagaaggagtcagagtggtctgagcgaatgagaaggagattaatattaatacaattagttagttagcttattattcttgccttactgggcagtacactgtttgataatagtgacaactaacatcaatttggcacttactattgacaaagcattatttattattttatagccatagcaacttggtaaaggagagattattattcttatttcataataaaggaacctgagcttcagaaagggccctcggcttgccgaaggccgtatggtaaatcaatgaccgagctggtgtggaatgttagcctcctggatcctgatcgttcagcctccgaaacattcctactgaagaggcattaggactagagcgtatttcttttgattatcaatgcgggtggtagtgaggtatcctcagctgtttggctggctctcttattatattagtatctttttactattatcttgcttctgtttcagccaaaatttggattttgtttctttgccacacccataggatcaggtacagttaacctgtttgagcctaataatcaag

SEQ ID NO: 87502 - DNA, 1019 bp, Homo sapiens
tcctcgctctgggaggtttgatacactcttcatcctcctcagctcaccagagtcactcagtctctgagccaaacctgcctttgtttacaacttttccggaaattttcacagagggagagaaactctccctcctctttcagtgttttatttttaagtcaacacttttctcaagtttatttgtgctaaaccaaattctcctacaaggtattgctctgtattcaaatgggaattgctgcatttctataaatagaatgaaggtcatgtgaacgagttcagaagattctagatatcacattttacgggacctttacatttagttcactattttttgaaaataatattctatgtttggatttgtctttttttcccacattcatatttgactgcgcattatgtgaaaaattgaatttgggaaacattgagtggaatattttttaagctgaaatacccatgttaaaaataacaaaatgtgttgttgcttcatcattgtaactttcttaaaaacagaatttatagcccctttattaaatatttctagaatataattgcctctgaaaacacagtaccagggtttttttgttttcgtttttctttaaatctcattcccattaattgctcagtctttaccttggcggagaatgaaaaactgccttggaacttattaataagcatttagaaaaactcgacaaaaaattaaagaattggcctggcatggtggctcatgtctgtaatccaagcactttaggaggctgaggcacgcagatcagttgaggccaggagttcgagaccagcctgggcaacagggcaaaacaccttctcaacaaaaaatatagaaattagcctggcgtggcggcacatacctgtagtcccagctactcaggaggctgaagtggaaggatcacctgagcccagagaggttgaggctgcagtgagccatgattgtgccagagtgagaccttgtctcaaaaaaaattaaagaatgacaggataaaaatttagggaggccgattccatctgca

SEQ ID NO: 87503 - DNA, 1114 bp, Homo sapiens
agaatgaggtattttcatttctgcatacttctaattctacaagaaagatagctgttgagagagctaatatcaaggaaatggcaaacaaacaccttaggtgatcctgtgtgacattcaggaactattgcagacttccaggactcaagacagtctcctcagccataatgtcattgaccttgacatactcagaacaaattggtctgtgtgattgctaccacatgctgtagcgcctcctaaccctgccgttggtctggagtgaagcagagcaggagaaagggctcctcatcagaggatatgcttcttttatgttccttagactcttgcccagcatgcttttcccactctatttagtcttaaaatggctaatttaaagtttctgaagctttgtaggagccgcagagtgtacctagttttgccaggcaaggactgaataggtgaatagtcattgtattcttagggtgtgaaactgtttcgggagcaaaagataaggcaaacacaaccaaaaagacagcccttttgcttagttaggaagataatttatgtccccaaagctctttcagtgatctgtacccatcagaccagtagaatttgaacttttttcccaactgaagagtcaactgagatgagtaataagcacactcctcacttctggttttcttttacgtctgtaggtttttttcatttatatggagaacacaagtcgtagccagtgaaagtttgtataggcccctctgtttcttgcactctagttataggcacttgctaaatgtttcttgagtggatgaatgaataagtgaatcctggacagattgagatgtatggggtgagtcataatcctggcaaaaccctaattaaacacagtggaaccattgccttatgcacagggcaacctcaggcattctgcgttcatcgtgtctgcagtgttctccaaattctgaagcagagatgtctagatgcttgtttagtgcggagggtcactttctttatattttaaaatcagtaaggtcatacttaacttcgtttgtacatattaatatatccataaatgttggtagttcctttgggtactatgagtgactataatattaactaaactgcatttttagattagaaa

SEQ ID NO: 87504 - DNA, 1127 bp, Homo sapiens
aaaaaaaaaggccaccccgaaacaacagctagtgaaaaaaaaaaaaaaatcttgttctgataacgtcttttccctggcttgcttacagtggactgtggagtaggaatgactctagagccgtttcaatttaaaaagatttgtaggcaaacttgctgtcctcttctgttgctgaaaatcgtgattgtcttggttacagtgattattttaataaaatgcaattatctgaataattaatgtatttgactactctactgtgtcctccattcacagaggccaaaatgtcaaagatcaagtagattgggagaataggaaaattctcattataaaggcaaggggaggagggaaaggatgaaatatttggaatttcagtgcagtggtttctatttatccgaaatgtcaagggcagtgtaaaatgtatttttaaaatgtgtttctgtatggtttgtgcccattcttggcgtggctgtggctgtacagagaccattgttctttgaggaatatgagggggtgtctttgtccaaagtgacaaaaagaagacttggaagactgggcttcctttgttcctgtgcggtgctgtaaaatttggtttgaaattaggacctcagggaaggaccttcaatagagagctttcatttcctgccagcattttaatcactctggggtttaaagtggatggccggccagcataatggccctatgtttaatagaacagcttgtatcttgaaggccagttaagggatctgtcatccgcccaatattcgtcttttctgtttcctgtccatttatgaagatcacccacccttttaggtggcttccctggatcattttgtaggggagctgctgccactgcttcttaaagaggctgaacagaaacccagttgaatgtggtccagtcttcagcccacgcagggaagttctgcagagtgctttaattagacacgaagttcaccacatttgggagttgattccatcagttgtagagggactgtgtcagatttcacaaaaaatatagaattggaagaagattaaaatttatccatatctcagaattattggcacctattgacctgatatgtgctcacatcatcactgtggtggatgttaatgtcatcctgtcatgcacagga

SEQ ID NO: 87505 - DNA, 1785 bp, Homo sapiens
ccaaggcagggagaattgtttgaacctgggaggtggaggttgcggtgagctgagatcatgccattgcactccagcctcggccacagagcaagaccctatctcaaaaataaataaataaataaataaataaatattttaggctgggcgcagtggctcatgcctgtaatcccagcactttgcaaggccgaggcaggtggatcacaaggtcaggagatggagatcatcctggctaacatggtgaaaccccgtctctactaaaaataccaaaaaaaaaaaattagctgggcgtggcggcgggcgcctgtagtcccagctactccggaggctgaggcagaagaacagcatgaacctgggaggcggagcttgcagtgagccgagatcgcgccactgcactccagcctgggcgacagagcaagactccatctcaaaaaaaaagaaaaaaagaaaaaaattcaaaaacattttttaatgaactatagggatattttgatggactgttctttggaattaacaggtccacaagccagtggcttttctggaaattactgaaagctaattcttcagaagagtatgttctagctaagggtgtactataaaggtggtaaccagtagctagcaataacaagcttgttgttggtttcactgcagaaaatttaccacttgcatgtacttactgcattggtttaccctcaagaaaaagaaatacagcctctatatacctcttacacccactagatagaactaatcaggatctcttttgatcactggagcagataagcaggaaatataactaaccaagattaatttcacatattatctattattatagtttttcctaatctaccccttgacttaatctaattattttcagttcagggagcttcctgaaaatggaggacaaggatacatttcacctatgtcttatgctttaactctttttagagaggagaacaaatctcttttgaaattcatttgttaaagaaaatatttcagagtcactagcaaaagaaaactactttcttagttgattctttttgctctggatggagaatctagagatctggggttttactcatcactgtcagtaactagctctctgtccttctgacacttcacctctctgttcttcagttttgtattttgtgaagcatctacactagatgattcctgtcctccctctagatttgtagtaattctatgatatattacttgaagaacagaggcaacatttaaatgtaaatttccaaacacctgcattccaacatctccataaagtgcgaaccaagatacattatgccactgactataaaatacagaggaacatactttttaagccacttaagctcaaactaaaattgttagaatttaaagaagtgtggaaggttaacattaacctctcccaatttccatctcttttcacatttacctccttaatttgctaacccctcagttcttgatatccaggctccattaaatgtgaacactaacgtctcttagtgcagtagttctcaaccttgactatatattagaattccttggagaccttttaaaaattccagttgaagttggagcttaggcatcagtatttttcagactccctgagtaattctagtgtacagccagatttgaaaacctttgtcttagtcagatctctgtgcttttcaggatataataggtaaatccacttctctagtatattcaaatatatattttggttggttctcccagtagtagatcgctgatatttcagaacactctgctgaatattttattgaaattttattt

SEQ ID NO: 87506 - DNA, 1006 bp, Homo sapiens
attcaagctgagttttgttatatggaaataagaaaggaaagtcatcccaggcagggagaacagtgctcggaaaacagggtgtacatatggggacgagcaggtggtttggtttgcccatcagacagtgtggcaaggacagcaaaaggagatccagtctgagaaataagactatacagtgtagtcctttgaatactttgcagtgtttcatatacatctggagtcaactggtttgttgggatttgcatcttgcatccaccacttcttacttctgcaacctcgggcacattcctcatcatctctctacttcagtttcttggtccgtgaaaactaacaggtgaaatgaattctaagtatatgtttcatttaatgcagtaaatctaagatatcattatttcaagatttaatcaatataaaaatagactgaagtacttttagcacatttggcttcagcctagccatatttcaagtgctcagtagccacatgttgctagtggctaccatattgaactgcacagatctagaacatttggaacccattcttctgttctcctgtctttggttttatgcacacaaagagagaaacattaggattgaatgcaagccatttcatgttgataggcatagctaccacttacagatgttgctgagatgccagaagttaatccaaatacattttggtctcagttggccacaggagacttgtcagcagttacatagaatgaaagcaatcactgctagcaagtccatccttttggacatacaagtatcgctctgccttttttttttttttttaaagaaataagactcatctctcctttattctttcctgaccatgcctgcctttgtattcctgacagccttgaaaggacacagattatgtggtaaatataataatcaccccttttcacattagacgcagccctttgaattcccagcactgatctaattccaattgcttctgaagtttacctttcacacttgtgttggttttagccggtggatacta

SEQ ID NO: 87507 - DNA, 1132 bp, Homo sapiens
aaaagaaagagaaaaagaaatcaggagagtttaaaagcattccacaaagtcagtggttatatgttaatctgtgtagtgtgctttgtttcccagataatttagaagcaattaattctggatagacgtgtgttgcatgtaatgacagatactgattgtaatgttttattttggccaaaaaaaaggtggggggtggggagtaattttcctcaaaatcattatctggcagggtgggaggttgtttttcttttgtatacagagaaacagagtcccaggtaggaatatgtgttgtattcatggcagttcggcagacccttggaatataaccttcttcatggtccatgttctagtcctgctttgagaaccctcttttgagtaaagaaaatcttcaaaaacccatctctgggtttcatcctgaggatccaggaccggtgttctctttcttaagaggaaaaaaaatcacaatggtagaaaattctttgcaaatcctattgtagtcttgattgatctctcttctcattgctcttcgtcggcctcttcaacccttctgactgtgtgtattagaaataattattatcaccattaaaacaactttctttgtctatttcaattattttctttatgttaactattttctttttagagttgcttatctatttagcaggctactgcattagccttgagctagtattgtaagatgcaaaattatgttgccggcatcagttgggaatttcatggaatttgcttctatttgactatatttccagatggaaccatgtgccgaagtgtttgttttgggcctccatgaagtcattcctttgcagtgatctgtagctagactgcgctctcttgggactaacctgtgtgactaatttgagtaggagggtgataaactttgttaccacttaaaaaggggctaaaaatacttcttttttaaaaaactcctctccatattatctagcaacactctttgagggataatggaaaggaggtgataaagattagagctgattgggaaggttctgaatgcccaagtttcatttaggaagcttcacacctttgagccccagggaagagtttggaccccaggcttttacaggtttgtagtaaaatctgagctgcccagaacactctg

SEQ ID NO: 87508 - DNA, 1989 bp, Homo sapiens
cagtgctctgtaaaatgccccaatcagtgctctgtaaaatgcaccaatcaggatcctaaaagtagccaatcgcaaggaggattgaaaaaagggcattctgataggacagaaacggaacatgggtggggacaaataaaggaataaaagctggccatccccgccagcagcggcaacccactgaggccccctagcaggctgtggaagctggttcttttgctcttcacaataaatcttgtggctgctcactgtttgggtccttgccacctttaagagctgtaacactcacctcgaaggtccgcagcttcattcttgaagtcagcaagaccctgaatccactggcaggaaccagctctggatacagtacgtgggacactgaatactcaaaataattctggaagaaaatagagactcagagaaacgaagtaactttcccaagactgctcagcccataagcagcagagtcacgattgaaatctggactgaccgtagacccccagctcttaactgctttttgtattactctctattccttttaaattggctgactttatgatcataatgcaaaatagattagccatatttttatatggaggcaggaagcttgactctaatggatcacccatattcctgaattggatgatgatggtaaagagaattgctttacaggggtgatttttatgttggagaagatacagttatgatcaccaccctgagttggtttaaatatacgggttataactttgtatgaacaagagttttgtttttgtttttgttttgtgagacagagtttcacttttgtcgcccaggctggagtacagaggcacaatcttggctcactgcaaactccacctcctgggttcaagcgattttcctacctcagcctcctgagtagctgggattacaggcacccgccaccacacctggcagtttttcgggttttttttttttgagatggagtttcgctcttgttgctcaggctggagcgcagtggcatgatcttggctcactgcaacctccgccttccagtttcaagcgattttcctgcctcaacctcctgagtagctgggattacaggcgcctgccaccacacctggctaatttttgtatttttagtagagatggggtttcaccacgttggccaggctggtctcgaactcctgacctcgtgatccacccgcctcagcctcccaaagtgctgggattacagttgtgagccaccacacccaggcacaagagtatttctgcttgaccaattccatcataatgagataatctgccctcatagctatttctgacagtgatttatggtagtgcagagctggctttggcaggtcttatgtctttatggccttgctttttctgagcgacacatttgctaccattggtgtatggctctccatttcccagtttccacggggtgtcttcaccgtattcttatcctctgctgaccctgctgctgtcttgttttctttcctgtcctctttgatatactctgttattgtaagccaggcttgtggcttctgggaggggtgattggcagggtcagtcagacataagcactgaaacgtgtgtcccagaggtggaagccaaatttcctctcagggccctgaggctaacctcctgtgatggcttcatggctagaaatagcaaaaatcgaaatggatattgcagatagtccagacaagcaaacagaagtccaaaatgcttgggtacctaagatttttttaatttgttcgtgtatatttttagcaatagaagcaatatagcatacctttgagccagtttttcctaggtgtgccaggtaggttggcattcacagttctcaggagacaatcaggtactgatttagtgagctcatttttgaaatgcaaaagcaaaaaggaataaaatagcaggttaccatagtatagatagtaggagttgattggcaccaacatctttatttagtttgggttagaacagattctctgcatatcagatttgaagaga

SEQ ID NO: 87509 - DNA, 1035 bp, Homo sapiens
ttgactacagcagatgtttcttcttttgacttggcagtaaaattttattaagcagttttgcaagtagagagcagcatactctacctgatgagtggctggagatcttagcccttttgtgcaatcagcttagttttctcctatctaccatcaggcccccgcctctaggttccttggatctcaccaaccaggcctcaggccttgtaaactgcagtcctcttgggtttgcttccctacccacccatgtaattttcccaaagaaaataatgttagaagagcagccgcacttgtggttacaacttgcggcattgaaaggctgtcacattggaactttgttcctaccagttgtgggtttacaaaaaggagttggggtactttgttgggatgttttgttaggatgcttttctgaatttttccacatctctttggtttggatgttgacttggaaatctcttttgaattagcttcttttggagagctttctgcttttctgagcacttcttggatcctttccccaacaaagccaccaagggaacttcttctgatcctatctcttttgtaggtggtaccctatttgagtccttctgaagactggagcacataaaggcctgattttttcttctgagttggattggatggtttaacataatttgtctctatgttttctgtcttgggtaaaggaatatatttgtgaattgtggctgatactactttaaaaaattccaaaaagaaaatctaaaggaccattcctatgattattgcaacccatttctcaggtctttcaaagaaaacaactcgtaaagatactggcagttgaaggtctaagtcccagcctggcatgaattcccagagagccttgggccttgggaggaggggtaatatacaagattagagtgcaaagtccatctggtgagaatttgtctggtttgtgcttcctcagcagggaggaagtagcagtgacctcagtcctgaatggttatttcagaagtgtatcatggtgggaatttagccagctttgtggcagatgaccaaccctga

SEQ ID NO: 87510 - DNA, 2048 bp, Homo sapiens
atcacagggtcaagagatggagaccagcctggccaacatggtgaaaccccttctctactaaaaatacaaaaattagctgggcgtggtggtgggcgcctgtagtcccagctactcaggaggctgaggtaagagaatcacttgaacctgggaggtggaggttgcagtgagccgagattgcgccactgcactccagcctggtgacagagtgagactccgtctcagaaaaaaaaaaaaggattagaaaatttatactgctttaaatacccagtgagtatagtatatgattgctggaaaagtcgttcatcctgaccaagaacaatacaataacaacaaaaccattacctggaaaaaccaactagaaattcagtgagaacattttagctttttccttttaaatttttaaaattctgacattgcctggttacattgaaacagccctgttgtgtcatcctactttctttttcctggtattttcctctttgggactttggtttcattaatctcaatttgttctgaaggcactaaggcagattttcaaagagctgtaattgtcacagggagagcacaatgacttattgaagtttcacatgttgctctttttggaactaccagagattggaaccaattctccatccacatctctatccgagagttaagttttctcttctctggtgcttgtcaaaagtatttctcccagctaatctcattcccagttgccaaagaaaagatctcaagcataactcctcatctccaggtcacccgacaaggtaagaagagagattaaatgaatgtgcccaagtttctttcccttacagcctccagatctccagaatataccttctttagtttccacatcacactttcctacatttcttcttaatttgatgatgtcttgagagtatctcaggaaactggtatgactaccaaggggacagaggcttttgtagcgcatcaatacccctaagtctatccatccttctccagaaacacagtgggcacatctttgcaccctgtggaatcaatgttagtgctgaaatcagagtagacttggctttgtacttttgtctgggtagttggcttaagtgccgtgtctgtattgagtgacacttctccatcagaattcttattcttttggaagcctagactatttcttcatttgaccacactgtgcagggttttagtgctaaagggttccggatgtagctgctcttgtggagaaccttatcacagctttcttttccctaagttatttgtggtaaagtcctggcagtttgtttagatgttcagtgagtgacacctaattgaagaagtggctggggctggacttcaaggtggatggttttcttaccaagtactatgaagagatttgctcctagactttagagatgggaaatgctgctctcttttcccctgaaaattgagtctcgtcaaactgacaagttattttctgaaactccgagtcataattgtaccatatttattttctgattttttttaacctttcagttaataaatgttttccagcctccatcagcctctactggtaatcaggagaaatgggccaatggctttatgtaactgaggtttctgttttaacatgaaagtactatatttaccttcaaaatgaccctcacttagatcagactacctggggttgtcaagccttccatcttcaagccaagaggtagtttggtttttgtttgtttgtttgtttgtttgtttgtttttcatttatttttatttattttattttatttttattttttgaggcagagtttcactctctcgcccaggctggagtgcagcggtgtgatcaaggctcactgcaacctccgcctctggggttcaagtgattctcctgtctcagcctcctgagtagctgggattacaggcgtgggccaccatacctggctaatttttgtatttttagtagagacagggttttgccatgtttgccaggccggtctcaaactcctggcctcaagtgatccacccacctgggcctcccaaagtgctgggattacaggcgtgagccaccgcgcctggcc

SEQ ID NO: 87511 - DNA, 1001 bp, Homo sapiens
aaataacttgccgaaggtttaaacagctactaaatgccgaagtcaagacttaacttcaaagccctgtttccactttatttacagaaagctcaaaatgcccctgaaactctgaaatcactgtggtatttcacactaacttaccagaaattcccaggacattaattcagggatctgagtttagtgtgtagagcattacccaatatgaaaacagtggagttccacagttttatgagaaaacccagagaaacccatagtacgttagacaaattggaattgaaacgcttaagtaaaaaaatattcattttaaggtcatctgtttatactgacacaaggtctatagaaaatgagagagttggcatcatgtttctgaaatatgcaattttacaatgggaacgtgttataaaatgccctgccactgttgttttccttgggatttagagtgagagacatgaaggctgacaactctcttcctgttgtaggtcagagcttcaaggaactctgtaatcttcccaccagctttattctctcctgaaactcacgggtaaaattagatgctggctggacgtcagtagttgagtttgaaagctttcagaggccaagtcagacaactgcagcagactgctttctcacagtaccagtttgagagacactttgtaccgactaacatagtttagtaaaccgatgagtgtctggcaattttgccgtaaaacgccattaataacaacgcctataggagcagaagaaaatgatctttgtgtggttaatcttggaaacaggatcaggctttatcttccttttaccaatatgctgcctttacctcttgatgttgctctactctagtgtactgttacagttgaaaagcaacaactctagatgaggatttagttggaactattttattatatgcattataattgactctaggaggcagacatggtgaaaagggtgtgggaagaaattatttaaagggtgaatgctctcccaaactatcatcaaacgca

SEQ ID NO: 87512 - DNA, 1379 bp, Homo sapiens
tcctgacctcatgatccgctcccctcggccttccaaagtgctgggattacaggcgtgagccactgcacctggctggaaagttaatttttaaattgccacagtggttggtaaattaaaagatattaagtcatgatgtcaagacttttattttttgaaaagaaaaaactaatttaggccaggtgcggtggctcacgcctgttatcccagcactttgggaagccaaggcgggcggattgcttgagatcaggagttcgagaccagcctggccaacttggtgaaactctgtctctactaaaatacaaaaattagctgggcatggtgatgtgtgcctgtaatcctcctggattacaggcacacatcaccttgaatccagcaggcagaatgagccaagatcgtgccactgcactccagcctgggcgacagagcaagactccgtctccagaaaaaaaaaaaaagaaaagaaaagaagaaaggtggcaagaaggtgaaacatggaattttccagagcaaagccaggaagtactgtgtaagaaaggaccatgtgatctgcaacatgaccgtaggggaagactctgccctcctttgttttattctcctccacgtccgagaacctgtcctatataggtcttcgtgtgtacaaagctcaccgaaaacccatactcacccctccccgagaaaactgggtcacatatctcttgaatatttaatgtaatgtcctacatttggtgcctagagagaaactgttactcacttgtagatgtcactcaggccacagacagactgtcattcactgaagacacagtatccttagtcacatttgatcttggggactctgcatctctgcttcttccacctttgtctgttttgcatttgtcatttattcattcagtattttctattagctaaggattgattgcttgactactcagacttgcaaattaataagacatagactctgtgtttaatgtatattcctcaatctagttgggaaagtagaattttacagtcaatgatagtgtttctgcctgtctatccctctctttttgaatcactaccaccgacccccaccactaccacaattttttcattttcttttgctttctatttgccagattcaaattattttttaaattgtcatataaaagaaaatataacattatcatcttaagtgtccactacagtaatacgtatgtatattatggtacaacagctcactagaatttttcatcatacaaaactgaaactctatacccattaaacaattcccatccccaccagtaattgtctttctgggttttttttgttttttttgttttttgagacacagcctcattctgtcgcccaggctggagtacaatctcggctcctgggttcatgca

SEQ ID NO: 87513 - DNA, 1042 bp, Homo sapiens
tgtggtgatggttgcacaattctgtgaatacactaaaagccattgaattatgtacttttttttttttttttaaagatggagtcttgctttgtcacccaggctggagtacagtggcatgtctgggctcactgcaacctcctcccagattcaagtgagtctcctgcctcagcctcttgagtagctgggattacaggcatgtgccaccatgcctggctaatttttgtatctttagtagagacggggttttactgtgttggccaggctggtcttgaactcctgacctcaagtgatccgcccacctcggcctcccaaagtgttgggattacaggcatgagccaccatacctagcctgaattatatactttaagtgggtgaattgtatgttaggtgaattatatctcaataaatctttttttttttaaggcagcctaggtctgacacacctaatagaacagaagctctcgcttctttcttctctttccatcagtcagtgatgccctttgtgggcaggtttgtgcacagatcaggggttccattccattccttattatttgggttcttcttgaagagcagcttctgcctagcccatggtggctaagagattcacaagccagtttgtattttgcaaactttcccttggggcctcagcagaggatatttttagaacagctgtgggtctaattttgatgtggcccagtgactgtacaccaggcctcatcactgccttgggataagcatatattacattcagtcttaatcccttggaggacacagagttgttcagtccatcctggtgtagaccacaaaccatgtttaaaatagtgggctaagccactgggcctccatggtgaggtggcactggtccctctgcttgagtgaagaaaaaaaaaaaaaactaggcaggtaaccacaagccaagttgggcttggctgctgcaggctgattggatgactgtggcagtaccagctttgctaaatctcctttggctcactttttctccctctccatgtctctacatctttcttttctctcaatcctgctc

SEQ ID NO: 87514 - DNA, 1157 bp, Homo sapiens
tgtttttaaatgaaaaaacaattccccttaagaagtggaaagtactcaatagcaccaaatattaatttttaaatataattcaagaagcctggctgagcacaccaagcttttatgcctgtaatcccagcactttgggaggctgaggtgggaggatcgcattaatgcaagagttcaagacaagtctcggcaatgtgaagaaacccagtctctacacaaagtaataaattagctgggcatggtggtacatgcttagagtagatcctactcgggaggctgaggcaggaggatcgcttgagcccaggagctcaaggctgcggtgagctgtgtgagctgtgtgagctgtgattgcaccactgcactccagcatgggtgacagagtgagactctgtctcaaaagaaaaaaaaacaaagctcttttctttaaaatatttctttgaaactaagcctagaggtactattacctttggatcactattattaatcattccttaatagaactttggatttttccccaggcttaagtacactggttatttctaattctttgtgattttcctggcttcagatctttccaggaacagctctgggtctcttggccaatttggcatcagggctctgggcctttgcccccagcttctgtgattctctcaaaggtctttcagtattgatcagggagtcattcccactgagtccttcaagttttcttttactgcttccccacaaaccgtagaatgagaaaaggatgattgaagtgaagagcctagcctagtgccggcccaagttgggacttgctgaacattggtttccagccctgtggccccagaataccccacagttacacctcagctgtgggttcctctgggactgttccccagaaggagatttttctgccagttttaatttactttttggggaacgaaaaaaactacctgtaatttttcctgtctacttttactagagtttactagaggtttcctcaagttccttgagcataatctcagagaagaatctaacccatgttttctttttcccattgcatttactacagttacaacgataataaatgttgaattaactttcactagcttttaaccaacatgtaagcactcccctttaaactgtgtcttctgtgtttggtgtctacctgtgtaaaatag

SEQ ID NO: 87515 - DNA, 1036 bp, Homo sapiens
tccagctggcgtgtctttgaagttggtcccatcatgttaaatgttaactgtaatttctcttggcccttgctggagagtgctttccttcccgttggtatgataatagccgcagctatattggccatgtgctagctgaccacctcagcaattgctttcactcccggagtgacatagaaggagctttgtactgtgcatcgtgaaacttggggtttgacctggttctgccaggaagccatgtgatcttgagcaagctcattctcttttctgatcctcatttttctgctctgtacaattctgggtaagggctagaggatttctaaagcccttccacttccaaatctgtgattccaagattgggagaatgcacagttactcgcaactcctttttctccctctaccccgggcctacacccctcgctacagtgcttctccacatgctgatcccagtaggtagccagggtcagagaatactaacaatatgtagagagctcaggatcattctgaccctttgaacttgaaatcctcagagagctttctattctaataaaagggcataatcttggtgatatgacaccccctacattaaactccattatattaaggaaaccttagaactcggatgtacaatctagcttgataatttacaattctgctgggattagtatgaggaataattatatctatttattccactgtcagaatgttgactctagaatttcatattgtctctgtcactgaagattataattaaataatatgtcgaatgtattgatcatatttttatacatttgcttgatatgctatagaggctttttttttttcaatatatcacgagattaaattcaaaagtttgccaggccatctaggtctgtttaagagattttttttttcctgaataaaccacaattttttgatggcttgtcattttgacatcaactaaagtaatttatttactccttagtgcagaactgtatctcttttagcctttagtcagactcagtagctatcatgacattagaataagaagtagtatgtg

SEQ ID NO: 87516 - DNA, 1006 bp, Homo sapiens
catgcacagttagcctgggctttaaaaccccgctccctccactgccaaatgagttgctgatgggaattttttgaatgtttgactctgtgtctctgtggaccacaacaggaccacaggctgttacacagttagcatttaacttacattatgaagtgacagaatcgcacttgtgtggctgatagagaccattgcaagtaactaacaaccgtacaaatagcgccctgaccttttcatatctgtggggcctgattctcaacctccatcctgtcctgcacatactcggcgtggcctctccccaccctgccctgaacagttattagggctcacagggcttgcagggtgaccctctgctccagggatatgggcactgcctggagggtggtgagcctttcctgggaagacctgcactggctctccctgagggctttccataccaattcattcttggtcagtggcaggcacatttcacactgaattccaccccatggggctgtgtctaattggacaaatttgaacagcaggcagcacagccactgccgcagggagcattgatatatggcccaagcaagggactaaaatcttaaagtgacagggccccgttttcaaagaataactggctggcttccaggagtaacaggcctgatgatgaccagcaggagagagatgggccaactccacaaagcaggggcttttttagggaggtgtttttgaaatgagtgtctccatttttcctggtcttggtggcaagataaacaggatagggtggtccctggggacagtcatctgggacccagtcatgctgaatgtttctctcactagagactcactgtatctgtatccagattaaatctggctaatatatactgcagggaagcctcggcagagaacagagtgaaaaatcgtgttgtcatacattactaagcacccaccattcatttgtttggcatccatcaaatctctataaatgctaactgtgtgtgctattaaatgcgcactgcccggacac

SEQ ID NO: 87517 - DNA, 1049 bp, Homo sapiens
ggaaaagacattaatcagataatctcacaaattaacataattacaaattgtgtgaagtataatgaaggaaaaattccatgtggtatgagagcatctgaaaagggtatgcagggagagtttccctaaggaggtcccatttaagcttggctctaatgggtgagataaatcagcaaagggagtaagaggggaagaggaaaaagaaatgcttaaggagttgaaagagggcctgggtggctggagctcagcacctaagcgggacaatagcctggggtgactgtggggtcttgctgctcatgtggactttagttttatcctaaatgagaagcatgttttcagcagagggtgagttttgaaaagatcactctgaccttactgtggaagacaggagactgttagagaagtcgagtagaacatgatggaatggattaggctggcccagtagcaaatagaagtggacagtaatgagtgttatttaggaggtagattccacagggctttgttacggagtggacatgggtgggtggagaggaagagatgttaaggatgctccccagttttctggcttacttcactcatttgatgtcattcactaagagctcctagtcacatggaggaggaggcttggatacattacatttccagtggatttgaagatgttaaatctacagtcagatctatgggtcttcagcacagaagaggtgtttggtctaggggtttccttaggaaagaatggggagagaagaatgggaggtgataaaaagatggattggacaccatctctccctttaggcaactcaaaatctatttgtatttgttgttagaggaagaaaagaaaaaagaaataacaaatagtagaaggaaaaatatttttaaaggaaatataaaagggcaataaaatttttaattaaaaaacaaaacaggccgggcgcggtggctcacacctgtaatcccagcactttgggaggccgaggtaggcagatcatgaggtcaagagattgagaccacctggccaacatggtgaaacctcatctctactaaaaatacaaaaa

SEQ ID NO: 87518 - DNA, 1448 bp, Homo sapiens
cacttgatgtgaggccccttggagaagtactggttgaggaagcgtatgcagaggtttgagccaaacaactggatggcaaggcaacagacatcccactgccgttcctctgccacctctgagtgtgatcagatgtctctcctgtcagattccctttccaatattatcctccaggaacttgtgattatcctctgtctaagtcaaaagcagcttaattcctctaaaaacagtgcccgttgggcattttgcctggagagagagaagcaaatctgtgtcagcgttctttgctcagttctgctctgcagcccccatggcgacaccctctctctttggaccacctcctcccctttcgcttccttccacacagtccagtgctttgttaggtacctgcatcccagcaggactggggacctggctggatgtgggcttgggtagagttggccagatgaaatgtggttggcaagaaggtcctgagtgtgctgagacaggcaagagtcagtaataagatcagagagtagaagactagggccaggagcgtgggacaggctaaggatgccggctagcccccaatcccagagagcatgcagctgagtctaagagaggcttcactgatacccataaggaggcggaatatgcaaaccctctttgcttaggagaacctgagttcacctgccaaaatcatcctttgacattaaaaaaaaaaaatccccttgcttttaaagagccaacctcttaccagttgcttctcttttgtcagagacatgggcctcttcaaccaagtctctgggtcttcttgtcaagactaatttccttttaggcccagcttcatcttcacggggactttcttccatctgtgcactgatgttagtgtcccgttgtcatttaagtccttgattctctgagaccactatagagactttaaagaaggtgggtcctaagttttgagggtaccatggagagcaaagtagatgatatctctgcccccatggggcttatattctagaggaggaaacagccagcagtggcagtagtgtgttacatgctgatagggcaggttcagggcacctgacctaacctaggagaggatcagaaaaggcttcccagaagttcgatttaagctgcagttgagggatgagcaaggcgaagatgtaaaggccctggggtgaaaggaaggaggttgttggagggactgagggaggttcatcatggcttaccaaaaggaagggagtgggagagatgagccatgggaagccagcagggcccaggtcattaagtaagggacaaccatggcgaggagttgcaatgtcactccagccccttgtttgccaccatggacaggtattttatgattcctggatcggaaatacacacacacacacacatacacacacacacacgcacacccctcacagaaaaatagccactctgtcccttctcatgcggaggaagca

SEQ ID NO: 87519 - DNA, 1018 bp, Homo sapiens
aggtggggtgtagcgttcagagtctggaaagctgctagaggccagatgatagacagttgtgctaagaagattgggcttaatcctgagggcagatgagtaaaatgttcagattcacattgtagaaaaggtcacccaggtggcactaggaagaatgaattgaagggaagccacattaataggcggaaagaccagtttaaagattgctagaataatcccaatgagaactggtaagagcctaagcccagtggctaaggaaagtaggagacaaattcaagagggcttgggaagtaaaatccacaggacttactggtcagctggatggacgggcgatgtttgggccaatgagaagatggtgttgccacccacctaagtagggatagagaaggaagagcaagggctggagaagttaggtcatgaatttgtttgggagatgttgagttggaggtgcctgtggaacatccaagtgagggtgcttggtcttacgcagatggttttggagcccaggagagacctgagttagaggtgcagttttggaagtcagtagcatataggtagtactgggtatttgtaagcgttagagtagctgaactcacccaagaatagtttacagagaaagaagagaagaggactgagggcaccaaaatttgagttgcagagagaataaagcgaggccttgggagagacttgggagcggtcagagagggaagaggaaaactgaggaagctagggagtagtcagcaatttcccaatgaagtcaacttgctttatagagtctgggttgcccacaagggaccacatcattgtacctaagctgccatgatcatgggaggacagtcacgtgcttcttgcaacctcttgggcagagattcttttttttttttttttgaaacagagtctcactctgtcgccgaggctggagtgcagtggcatgataccggctcactgcaagctccgcctcccaggttaatgccattctcctgcctcagcttcccgagtagctgggactacaggcgcccac

SEQ ID NO: 87520 - DNA, 1063 bp, Homo sapiens
ggccaaggctggcgagggctgaacagatgctctgacatgtcaaggcaggaaatgacagttcccaggcagccctctgtttcaggtgtggaacaggctccgaacacactttgtgtgataaattgtagtaacgccaggctgagctctacctccacccccttaggctgcaagactaggacatgaggctgaaagtcagagaagtccctgtgagacgagggccctgagcaagcactggccagactgtagcaaggccactcaccaggccaccccgctggttctacttccgcacccacctctggcagccatgatgcttctgcagcatgccagtttgttcactgagaccttcacagaaggtcgcacaaccaccctggacggtgagaaactaaggtgactgaggcaagtcattgaaccaccctgagccttggcttcctcatctatgaaatggagttgacagcatctgtcctgcctgtggtaaaaattgctgtgatcccacaaccaaaaggaaagagagaattatgagaaaaatatgtacttattctgtgaaaatatgtgagattttcatgagagacttcctgttccagtggactcttccaccgcccttgagtggggaacatccaggccttcacactcacgctcagcccatcacccctctgtgcaaggtgcaaggtcctctgcccacctgaagcctcaaggcctgatggaaaccatccacagccactctagtaagtgacccctccattgtccaaaacagtgctgctgcttagcctgctcttctcaggccaagtctttgttgaacagcttcagtgcaaggacctgggaagtcgggattctgtaatgtaccttgcccccagtcaggatgggaggccaggcccagatcttcttcccaaggaccctgcacctgaaaatctggtacaggtttgtcctttggagtgagagctcttgggtttaggtggttgagagaggtggaaggttgaccacacactccaaatacacatgtttattgcccaagctgggaacaccatttttaaagcccacatagttaggagactaccaaaataacaaagct

SEQ ID NO: 87521 - DNA, 1047 bp, Homo sapiens
caacctgagcggagtaagcatgaagcaggctgggctggtttcagcccctaccagcttttcctcatgctgcctttggccttgcattcttgcctctgagcgagtccagcaactagggtctgggtggcttcctgcatcccagagcaatcagaagacatccttaaatgatgagggagccctggcccaggcaagtgcatgttcatgtgcgcacacacgcaaacacacacacacaacatgcactcaggaaagccaccaatcatccatctccagtacagctgtaatacagcctgcctcttctttccaaaacccttctttgttctagatagctgtgctgttagtgactgccctagccctgcttttgtgctgacagaggctgccccagcaggcctcttccctcctttcagagggaactttctgttgggtgcagctgactctggctagaggccttttctctcctgcttgcctgagtcctctcaagactctgtcactctgctgtgcactgctccgttcccgttccacatgcctccctgcaaagaaccccagtaaggagaaacttacaacaatggggcaggcgctgatcaggaccagcaagattcagagtcagagcactgaggcagggcttgaaatgtctgacatcatcacacagtcccacttccccgtggctcctccagatctttagatgtttaggtttatggtcaggcgtttccctcatccatccccatgccggtccctccgttccttcactaagacgtgtcatctccacagcactagctgtgtggcctgcccgtggtgctcctgtaataactggcaaatgaacaggatggaaacgataggtgcaagggaggaagagggggagcttggctacatgggtagcatgtcatcatgccactgttctcccagctggacccagagatgagaagcatttaccagggcttgacttcgcttcccctggaagggggcctaagtgaggaatgtggcttacggcacaggcttttgcctgcatctctggggtccctagccagcctcggctcacataaaccggagcccggt

SEQ ID NO: 87522 - DNA, 1036 bp, Homo sapiens
aatagagacgcagagacgatgaattcttactcagcctctggctacttctcagtccttttcttctgtcgtccttaggcgtatttctcaaggccttgtcttggccctggtctcttctctctcagtacctggcaatctctgcttccgtgtctccaattactatccataaactgatgatttccaaataatttccaagttggctttgtctcctgatctccagaaccatctattcagctacctattgacatatccacatgtctacgaactgaattcctctcttcgggccctttccttctctcgagtttccccatcccggtgtccaaagccctttgagaccagccactgccctcgctccagactcatctcttgctgccctgggccagctccagccaagctaaactcccagagggtccccgagcatacgcagtctcttgcccgcgaggcttctgtgcatacttttccttttgcctggaatgctgtctctcaaagccccctcctctctctgttacccccctcaaaataacttgactaattcctgcttagcagacattcctttcaatattgccttttctagaaaaatagaatttttaaagtaaacaaaacattgacttattccaactgttttgtgtctaggtaaagatataacttaataccagtaaaaaagctttttaaataaacacctgtgtacatattaagtacattttctctttcgactttaactctttcaataactgtagctgcaccttgtctttctttttagtgctctcacacatctgatatcaaaagcccaggccttatgcatgggtccagatccgtgtgtaaagtattccttttttttttttttctgagacggagtttcgctctgttgtccaggctggagtgcagtggcatgatctcggctcactgcaacctccgtctctgggttcaagcaattctcctgcctcagcttcccgagtaactgggactcagatacccaccaccatgcctggctaatttttgtattttttagtagagacagggtttcaccgtgttagccagg

SEQ ID NO: 87523 - DNA, 1039 bp, Homo sapiens
acaccgggccaattatcttttagccatccctactctctggtcagtctcattttaaaagcagataattgatttatcagtattcgctacagaaagtagttgaccacatttgactttgcagacatttcagaagatgtggtggtggttagaattttctgcatcccacatatttttaaaatctgcaatttagagagaactttatccagtccagccctaggggtagatagatgcatcctactggcccaactcattgcaaggccatggaaataggaactgacagtgttgccccagaaagctggagaagtgacatttacatgtgttatgtgggcctctcaggtccctttcccaaacctgagattctctgattctaagtgaaaggtgagcctcctttatgggtcctgggttagccacactgttcctgtcctaagcaaacccggaggttgtgtgagctgaagatgctgccttcacagggccatcgtggctcatagccccataggtcacattccctgcttccctaccacacacaaccaccaagctgctttgatctttccagagaatcttctctcctcttcctacagccactctatcaggcaaactggtatttaccccagatacccaggaagggttagtctttcggcctcctgaaagtaggaatcgctctcctctccaggatccccagtgtggccgcccatgagacccagtcttgtcttttaattttttcctccaagccttacctctccaacttcctgggtccccttctcaagatgcacaagggtgattcatctgtgcaagccatagcttctggcttggtctggctctcttgccaaagtctctaggcttctctgggtaatatctctgattgcccagtgctcctaaaattgcacctgtctcagcaaatgctatcacccaagcaacttagccagaacctagggcttttcctctgccttatctaattgggccctggagttttcctccttctacagcatctacaaaagttctctcagtgtcttctcttaatgacctcatcagtggcccaacgtgt

SEQ ID NO: 87524 - DNA, 1088 bp, Homo sapiens
tcccagctacttgggaggctgaggaaggagaatcagtttttgttttttggcttttttttttctttttttgagacagagtttcactcttgttgcccaggctggagtgcaatggcacgacctcagctcactgcaatgtccgcctcccaggttcaagggattctcctgcctcagcctccccagtagctgggattacagtcacccgccaccacacccagctaattttttgcatttttagtagagatggggtttcaccatgttggtcaggctggtctcgaactcctgacctcaggtgatccacccaccttggcctcccaaagtgttgagattacaggcgtgagccaccgcgcctggccaggagaattgtttgaacccagaaggcggaggttgcagtgagctgagattgcaccactgcactccagcctgggtgaaagagcaagaccctgcctccaaaaaaaaaaaggaagaaggaaagaaagaaagaaactctcataaagcctgtaccacaatgattagaaaaattggcataggggaaggtgaatggaaccattaccatgaaagtcataaatgccatgaactgaaagaaaccatgaacagaagatcctccagtgggaagggaagccgggaaaagcagccctccagggaccattctgcctggatttggatatggggaagtcctgggcaggaggccgaggggcagaggcactgaagcctgaaacagggcaccccctctcacagaggactgcaccttggaccctgctgtcccttcagctgtccagagcccttccaggccagaagtggcaaacagtcctgagagacatggaggtcctggagattcttggagagggccaggcaccactctgggccttgtctgttagacggattcctccaccatctctcatacctctcctccttcgtgtacagggagggggcggggagaggggcgcctccttgccgcagtcccagggccccaaggtgagaagtaagaggtggggaagggcctcaccgtgtcctgggctgtagggccgggccaggccaggtacagggaggtccttgtcccaaagactccagaatcgtaaccctcaagcact

SEQ ID NO: 87525 - DNA, 1018 bp, Homo sapiens
gaccgcctgcgagagggaggggcggccgagcgcgcgtcccccgcctgtctgcgggacctggccgatgcgaagtgacaggggccggagctttgttgtggagcctcggccgcctggcgccagccgcccccgcccgcgccctccccctccagccccgggcggcccgcgaggcgccccccggggcctcttaaaggaacacgcacactcggcccccggggctccgccaggggagggggttcctgggaagggggagggggccggcctaggtgggggaggggcccagcggaggcctcacggcgccgctccagggcctcccaggcctccccagcgccagctttcggtgagcctcgggcattcctagctggagagtttggctgggggtcgctacagactcttcagagcggctgcagcaggacctcagggtgatcgcgggaccgcggggcggggcgagtggtgggatcctggcccggacagagccccggaaagccagagggaaggtcggtgccactgtaggtggggtcgccgtccccagatgcagccgctgcactgtcgccgccaggtttctcggtcaaataacccaggcctgagtgtttcaaactcttcaggcctcggacccctggaccagctatggatggactaatgaaatggactaatgtctaaaacgcacacatttagatgtacacatactcttacaaggacaaaagtatgtgtctacacacacacacacacacacacacacacacacgcgcgcgcgcgcgcgcgcgactttgcgaatgtattcacggattcctaggccggtacctgggttcccggctaaggaaagctgccctggttattatctggtcacctcaccggctgcgcaaacgtgtccacaacgggtccctccccgagaggccacatctcgcctaaggtggagccagcaggtatttgcctgtggaaaactgcagtggatcctgccccgtctgcgtagactgcgcagctcggagtcaaagattcgttctggccagagaggaggtactaa

SEQ ID NO: 87526 - DNA, 1045 bp, Homo sapiens
ttgaaaatatcaccaaattcccctccatgggagctgtactgatgtatatatttccaccactgctgtggccttaccaataagggcgggagagcaaacttgtggatttttgtcagtttgacaggtgaaatgtggatatcagtgttagctttaatttgcatttcctttattatgagtaaggttaagcatcttcttttaataaatttcctctcctgcgaactgctgttctcatcctttgctcatttttcttgtaggtttttgatatcaatttctaggaactcttataaattaggaggatgtagctcttatctgtgatgagttacacatgtccaggttatcatttgtcatttggttttgcctgtagtgatattcccacaccgatgcttttgattgaattgaccagtcttttccttatagattttggattttgagttattgaaagccctaacccccctccttacttataagggacttttcttttagtattttatggatttatttttacatttaaaccattgatccttttgaaatttatcctggcattgatttgaggtgtgaatccaattttttttttttttctacagagctatccagttgtcccagcatcactaattgagttgtcccctttcctcccctggttgaggtgccttatttctgaacactaaatccctatatgaatgtgtgcctgttcacacgccagtcttttaactgttgagactggataataggttttagtgtttggcaggactgggcctccttgatcttcttcagagttttcttggctagtcttgtctattttttcacataaattttagaataagcttgtagtgttaaaaaaggagcttatttgtatttttattggattttccttaaattataaatttacttagagaagactgataggaaggcttttctatttgctgagggttttctggttcttcaaaacgtattcaggtttccttgaaatggccctgcacgtttcttgttaggtgtgtcacctgatttgttaccatgataaatgcagcctttctttcactacattttctca

SEQ ID NO: 87527 - DNA, 1044 bp, Homo sapiens
caactaagtctcaaatgcttgttgaattagtgaaaaatgtgaggttcagtgctttttcctgccatacaacattgcccagagagcttttagagcttcaaaacatgctttcctggaatatcataaaaatcatgtatttatagtattgatatataatactgtacttttagaattttattaatttttttaaatggagagcccagctatcattttactgattttcagggaataatgtcaataattaataatttgttacaaaggaacttaccctttaaaaccaatcaataagtaaaattttttaaattaaaaaaataaagaccaagcaaatgttttatgttatttaataaaactcataatgtatattgattgacagaaaaggtgcttatactctgaggcactcttcttgtaagggatacagaagatctaaagtaagcagaaaccaatggattccttttaatgttaatttttttaagcacacatgggactgttagagtatttgaagtaatataagtctatgaaatacaagaacagcctttggaaacatacaagatggttttgcaaccaggttacaactgcactatgagttttctaactagtctttgttgctttactgaaagtataatctttgtctcaagccggcataattcatttaagcaaggcagtttgaaaacaatggtaaaaagaaaaggtgaaatcttttttctttgaattgtttcattaacagaaatacctttctaccataccatagaatgctttaaacataaatcaaactggaaccaaaatacagtggcacactgactttccattgactttcaatactcttctgtagtattgacaatattaatcttcttcctatccttcccagtgttatggtctgttgccttggagcctataggttactttaaaataatatcaaaaaataatgccctataaaatttagattttttttgtctttgtagaaaaattgaacatttatgttactcttcaccccctcaaaatcctatgataataaagaaatgaaaatgtcaaacctacaatattacaaag

SEQ ID NO: 87528 - DNA, 1353 bp, Homo sapiens
gggaccactatcatatatgcacttcacactgactgaaacatcattatgtggtgcattactatcccttaatttcatattgtagggcatcaacatctaatttgtaaatgctataattaggttttgtgcaaattaaatttttttttttttttttgagatgaagtctcgctctgtagccaggctggagtgcagtggcacaatctcagctcactgcaacctctgcctcctgcgttcaagcaattctcctgcctcagcctcccaagtagctggcactacaggctcgcaccaccacgcctggctaatttttgtattcttagtagagatggggtttcaccatgttggccaggatggtctcgatttcttgaccttgtgatccgcctgccttggcctcccaaagtgctggaattacaggcgtgagccaccacattcggcccacaaattaatattttatattctctatgaaattttaattaacttcaccatgtaattatttatttcctagtgaagctgtaaggcatttggataattcatagaaacaggttgggccaggtgaggtggctcatgcctgtaatcccagccctttggtaggtggaggcgggtggatcacctgaggtcaggagtttgagatcagcctggtcaacgtggtgaaaccccgtctctactaaaaatacaaaaattagctgggcatggtggtgtgtgtctgtagtcccagctactggggaggctgaggcaggagaattgcttgaacctggtaggtggaggttgcgttgagctaagattgcgccactgcactccagcctgggcaacagagggagactccatctaaaaaaaagaaattggttaagagtaaaatcatgaaaacatgatcagttgacatatttgcacttcaaccagaagtcccacaactaatcataatcttaaccagtcaaataaaaaatttttatttttctggtgtcttgtgtatttacattagcccatttgtaaaccagatggcatgtgggttcagatttgtgtatcgcttagacatagctatatgtatatatatacaaatacataagctatgtgtatttgtgtatagcttagacataagactacaacaactagatttaagccctagaacatgtcacccactgtactccccatcattttattttttatttttgtttttattattattattattttttttttgagagagtcttgctctgtttcccaggctggagagcagtggtgcgatctcagttcactgcaacctctacctcccaggttcaagcgattctcctacctcaacctcctgagtagctgggattacaggcacatgccaccacgcctggctaatttttgtatttttagtag

SEQ ID NO: 87529 - DNA, 1046 bp, Homo sapiens
atccttttgattatttcatattgtctattgctgctataagtgctctgctacttatactgtttccaataaaaccaaggcatggagaacttaagaaactttctgttcaatctcaagtacattatgatataatggtaaaaatcagaatccaaaatcatataacttctgcttgaatgccatctgtctattgggtatttttacccaattctaaaccgcctcagtcttaattatcaatgcctttgatattgaggatcttatttctacttatgtcagttaggttagattttgatgcagatatatatttatttgtctaaaaactatcatagtaagggagctttacatttggtacaaacttgaccttcaattatgaaatgataaatttttgtgaatctatgcagcatctgaaccaatgggttgcaaactcaagcagctacatgaattaaacaggttatttaaatgagtgggttagttgaggacagtggtgagatagccaaagttttagatggtagcaaataaattttaattattttaagccacagtaagggccacacaaaacacaactatgggccttcagtttgcaactgttaataaaatagtttgtctttttcctgctcttcacacccctccaaaattacacatacactaatttattggggatgggaagcaagtagtttaactgtttccaaaaagtacaattaagtatagctttctattttgggaaaggcttgtaaaatgtatttgaaaagtaatgttaactgatctaaaagatcatcttcccaaaccacacttgagctcagtttatggtgcttactttctgtcaaaacttagaaaaaacattcacagttaacttccataatgtaaaatgtctgtctcattaggcattaaggaagcattggtcaacaggtataatgttgttagattataaggtaatgtgaatgtgggcatgacctcccaaatagatcaaagactaatctctttgacagttacaagatggcagagcttgccttgggccttttgctggtggtgcacattgaaactatttgtttgga

SEQ ID NO: 87530 - DNA, 1003 bp, Homo sapiens
atggaggagccagagagatgagatttgaatcttctctacagtgagattcaaatatacaaacatttcataaagtggaatggcctcatcagaggttagattacaacaaaactattcagattataaaactattcagaataggccgggtgcagtggctcacacctgtaattccatcacttggaggccgaggtgggtggatcacttgaggtcaggagttggagaacaacctggccaacataatgaaactctctctctctactaaaaatacacaaattagctgggtgtgatggcacaatcccagctatttgggaggctgagacactagacactagagttgcttgaacttgggagggggaggttgcagtgagccgagattgctccactgcactccagcctgggtgacagagactctgtctcaaaaaaaaaaaaaaaaaaaaaagaaagaaagaaagaaagaaaagaaaaaaagcaactattcagaataataaagcaaccttttttttttttaatatctggctagagcaccaagtattataatagactcaggggacagagtgatacacaacacagtttatagccccttgtctcatgttgcttatagtctagcaaggaatattgacattaatgtaatgaagaaacaatcacagttgtgataaaggctataagaaaaagtcacaggaaccctgggaatgttatagcaggtctttggggatcaagaaaggcttcctgaggaagtgatatttaacctgacactggaaagaaaactaggagttatgaatgtgtacagaatggataagagtattctcaacagagagaacagcatgtgttaaggttctaaggttgaaagaggatagcagtttccaagaactgaaagaagctgaagttgtgagtctgagagaatggcatgtgaatagaagctgggagaggtatttaggagccaaatcacttaggactctgtatgccattttcaggatttgggacattctaagttatgggaaaccagatc

SEQ ID NO: 87531 - DNA, 1056 bp, Homo sapiens
tgtgttgggaaaccaaaaaattcatgtgacttactttgttatgatattctccttattggggtggtctggaaccaaacttgcaatgtctctcagggatgcctgtatatgttttcctgtatccttagacatttttaaatctttggtgaatctgaatgagtgagaaaaatttagtagatacagattttattttattttcaacttatactgtctttggtcaacaggagttattttcaaagtctggtcctgggccaggtgcattcgtatcacctgggaacttaatagaaataaagactttcaggctcatccagacctgccaaatcagaaactgtggaagtgaagcccagcaatttgtgttttatcagtcttttaaccacagactcatgggttcctccggggaatcctggggtcttttgtccatctggctcgcttctttccagtgtcctgccttgcagatcttgtgatttagtcactccatattctgatctcttccacctcagctcaacaggaccactgcgctctgcttgtactttaatgctctgtgctgtggtcaggaaattatacccaagcagagaactgggataatggagttcacctaatgaattccacttagctccagaattactgtcttgtgctgtttggtgtctactacctgaaaacaattgctccattttgcccggttatgcgattacttacaatggaagaaatattcttaaaccagttactcaatcttggccagaaacagttgtatctcattatcactgactgtttcctaaacaatatatttgaaaaactatagtaataatttgagcctaagttgaacttattgttcatcaaggaggattttcttttacttcctacaggcatttgaaagtgctggcaatctgagaaaatttgagattttctgaccactgagctgacttattgattatgacctatatccctccccctaggatacagtcagttagggtctcataccaaagcaggagttctttcattagaatagttatctttttaattgttaatactttactaggtactgtgaattagataattttt

SEQ ID NO: 87532 - DNA, 1044 bp, Homo sapiens
caccgcgtctggcttttattgttttcttttcacatgatttcaggaaagtagaatttcatgtgtaaatatgttagttgttttacaaatgtcattttttgaagttttttgcattgtaaatatcattgtatatttttatcagaatgtatcaagaagtaactgtaaatcaggtgtcactagtgcattactgcactagtagtgcagctctgacattttcagagtcctcagtattttaactaatttatgagagagagtgttccttttcagagagggctgtaggatcttcatttccagttagattgccaacagaggtcttactttcactttagggcagtatttgtctatattattcctccaagtgcacctccaactgcacctgtgttcattgaaagtttgattctgaaatataacccagcctcttgaggtgaaagtgctgagtcaaatatcaccaaacaggaagctgtttcaatagaaattcatattcttggttttcttatattttcagtttgtatttagcaaaaattaaggacattcatttttactgtaactaaaaaagttatttaaaaaacactactactttttcatttttattagtatttaaaaggaactcttttttatttctaacatatgccacatatgggtacatatcaactgaataaaagaaagtaaacatttaaaacatatgagtacctcatgaaatgaataatgaagaatcatctttagatggaaaaatataccaggttctacttatgaaataaattatgtgagtaagattacaaaagatggtagtctgtttaggcaggcctattaaaagcattaagacttgagtactggctattaaagtgagtaaatggcaatattataaagttaaacacatgccaaaaaacattttccagaggactgggattgtaacaataccactaatgagggcaaagaggtcttaatgcaatttgcactttctaaagtttcaaaaagaggctttgagttagtgtattattaatgtactgaacatctggaactgtgtaaaagctatggacattgagcaaa

SEQ ID NO: 87533 - DNA, 1049 bp, Homo sapiens
ctttttgctagagtgtaattcatttacattcaaggtaggtattgaaaggtaaagagttattactgccatttatttatttatttatttatttatttatttatttatgacagggtcttgctctgtcacccaggtcagagtgcaggggtgtgatcataggtcactataaccttgaactcctgggttgaagggatcaacctcagcctcctgagtagctggtactacaggcatgtgccaccacacccagatacattttttaaaaacttttttttttttagagatagggtcttgctgttttgcccacactggtcttaaactcctggcttcaagcaatcctttggcctcaagcaatccttctgcctcagcctcctaaagtgctggaattacaggcatgagtgaccacgcccacccagcattgtgaattattttctagttgttgtgtaggtactttgtttctttatttctcttgctgtcttcctttgtgatttgatggtttcctgtagtggtatgccttgaggcctttctatgtttgttatgcactgcactgtaatttaaatatttttcttttggatcttattcactagattgtgaagcgatgctttctccaaaaaatttctttcaagttttagagcaacaaatttacagcagattcagatggcaatacttgaaagtagtaacttttaggtaacattatagtggttgcttcttattcatctgcttccctcagcctgaattctaatagtgcaagagcactgacttcattatagtttaattattagcccatttacagaagtatagaaaacgagttgcctttttcgcctacagttaatctattcaggaaaagaatgaaacatatagttgaatttgtgtgaataagtttatacattcagattttagccaacattattaactcagtcaacagttcttcatttttaaaaagcaaaacaagtcagattatatacattttaactaaatgattactttagacattgatgaattaactgttgatgaaacaacagtaattcagaatttatgtttcaaagagttaagaa

SEQ ID NO: 87534 - DNA, 2042 bp, Homo sapiens
atcttctacaatttctctcatcaacattttatagatttcagcgtacaagcctttcttcaccttggttaaatttctttctttctttctctctctttttggtagctattgtaaaaggagttctcttaatttcttttttggatagtctgttattagtatatagaaatgctactgattttttgtgtgttgattttgtatcctgcaagtttactgtatttattcatttattagttctaacagttttttgttgtagtctttaggggtttctatatataagattatgtcttcagcaaacaggggcagtttcacttttttcttttctatttggatgctttttatttctttctctttctaaatttttctggcaaggacttcagtactgtgttaagtggacatagtgaaagtgggcatccttgtcttgttccagatcttagaggtaaggctttcaattttttcaccattgaatataatgttaagtgtggtcttatcatatttggcctttattggccaaatatgcagtacatttcttctatacctaatttagtaaaagtttttctcaggaaaggatgttgaattttgtcaaatgatttttctacatctaatgagatgatcatatggtttttgtccttcattctattaatgtgctgtatacatttattgatttacatatgttgaactatctttccatccagtgataaatcccatttgatcatgttgaattgttcttttaatgtgttgttgaatttggtttgctagtattttgttgaggatttttgcttttctatttatcaaggatattggcctacagttttcttttcttgtattgtccttatctggccttggtatcagggtgataatgctggtcatgtaaaaagaatttagaagtatatcctccttttcaacttctttgaaagcatttgagaatgattggtattagttctttaactgttaggtagaattcagcagtgagccaacaggtcttgggcttttctttgattggaaagaactcattattggtctgtttaaattttctatttctttatgatgcagtcttggtaggttgtatgtgtctaggaatttatccatttcttccaggtatccagtttattttgttggcatataattgtaatagtcactttgatcctttgtatttctgtggtatcagttataatatctcctcatttgtttctcattttatttgaatattctctttttttcttgttaatctagctaaaggtttgttgatttcatttatcttttcaaaaaccaattcatagttttgttgatctttgtgttgttttcctagtctctactttatttatttattctctgatctttattacttctttccttctgttaattttgggcttagttcttctttttctagatccttgaggagtaatgttatttatttgggatcttcttttttgatgtaggcatttgttattgtaaactttcctcttaggactacgtttgctgcatcccttaagttttggtatgttgtgtttccatttttgtttgtctcaatatattttttttaaatttcccttttaatttcttcattgcccccttggttgtttggttgttcaggaacatgttgtttaatttccatatatttgtgaattttcccaaattttcctgttactcatttctagttttataccattgtggccagcaaagatacttgatatgataacaaacttaaatttgttaaaacttgtttcatggcctaatatataatctatcctggagactattttatggtatttgagaagaatgtgtattctgttgctcttgaatgggatattctgtacaggaataccttattttattgtgctttgctttatcgcactttgcaaatattctgggttttttttttttcataaattaaaggtttgtggcaaccctgtgtcaagcaagtctattgtcaccatttttccaatactatgtactcacttcatgtctctgtgtcagcatttttttagcaataaagtattttaaaattaaggtatgtatttttttagacataatgccacttgtacaca

SEQ ID NO: 87535 - DNA, 1025 bp, Homo sapiens
tttttagagacatgcaattgttaacagcataagacaaaaagtgaataatttggcatagtcaattgttattcctgtcttcagatctgactgcacaattcatctcagctttctatttctttaagatccaaattaataggcattatgtttactaccccttctatcctacctcttatttggttatctcttaactagatctcttccttctgagacactgtgcatatcaatgccaggtcagttttccaaatattgcttttattacatccttttatctgcctaaaaatctattgcttcctttgctcatgagataaagttcatatttcttaagcttacactcaagatgctcaatagtctgacctggatctgcccaatttgaatccttcaaaaattacctcatactcccttgaggataccttgttctttactctatctttgcttttgatgacacctctttggaatgccctgtccactctttgtctgtccaaatccaaatcctacttatcttttaaaccccaatatatttcctactcttccatggttttttctcaacttttcagctgtctgtgtattcttacttcctcaaaataactcattgacaattgctttgtgacagttccttgtattagtcagtactctttctattgcaagtgacacaaacctaccctaaaaaatgcttaagaaaaaatacttgattctctttattgtgatggctttattctcaggcaagttctcactcttgcttatggaacaaagataaccataagcagctagctcacctggagaaaagagcatggccacatattagtccctccaaattactctggttggcctaccgtggatcacatgtctgttcctgaacctgaaccagtcactgtgaccacagaaggatggaatactctatttaactgacaatcctgggccttacccccattgtgaaagtggtgatgtcctttgattcacaggttaatagtcctgccagcatcacatgggagttggagaagaacaattctccaactcccatgttggag

SEQ ID NO: 87536 - DNA, 1702 bp, Homo sapiens
taaagctttaagtggaattgatgttgaaaagtgtaacatcaaaaagtaagttttcccagccttgagaaaaagctactttattggattacttttatgcttagatagaatgtatctatatagtacataacagtgcattgggccatagcattctagtattcacatgaatttaactgtatcataaggaagagaaatagtataattgagggaaaaaattgatggtatgaaaaagtaaattaattctaattgagttaccttaattctttttgtatgttaattgattaatgtgatcattgcaaaagccaaaaagaattcagtcagaaatatcatgatataatttgcattccattttctctgtgaccgtaaattgttggatattgcaacatatgtaacataaaccacatgtcagctgtttcctgcctcactgttgacaagagccccattcataactcttctttttatccttttagtgaataagtaattattcaatatagaaggcaggatatttggaactggctatttaatgtggcagcactctgtaatgaaatctgctgttactggcaacctgagaggagaatgtaacaattccagcatggctgtaactttatctgctttgactgactgtttatttggcacatcagtgaaccttttatcccagtgagtgacagctccagaagggtcacatttacatccattctatcatgtattgtaatatttaatggcggacaaggttgagtgagactgggagtaatttgaacttgcttttccactgagttgaggctaaaagacagcttcatccccagtattgtggtgtaacatgctatgacttagcatttgtttatgaaggctaatcttactgattacaataataaaaaaaaacagtcaagtagagtgtttgttctactaaattaaaactctttagcacacagtcttttaagttacaatgctatttaccttttttccctccccatcaatgaccacttctataaattaaccattttacactatttctctaaaatgagactttgttctgtgtcatttggtgtaataattgagacttagaaggaagtagttattaagaacctgtgagttctaatatatagcattaaacttttttttttagtatttgagaatttggaaacagaagagaaaaatcaggtaaattaagtagactatattcctgatgttccatatggtttgtttaaagagacatttatataactatttcagttatgaaactgagttacaagtgaaattgtccaggaaaaactaccctggatgataattttactgattggtttacactccatgacaggtaactgaatttcagatatacttgttccacacaagcaacctgctttcattattaaatattaatattttgcatttattttcgtacctttgctaaagaagaattttctctttttgaagttgttaagtgatcctttagattcaacttgataattctattcttttgtaaactatatttaaaagtgcttcaaaagcattggtgtattaaggaatatttgaatgaactatgctgtgaacaaaactattaactctaaactataatatcacaagttcgtatgaagcctaagaaaaaattaaaattgttcctactttgttttatcatttttataatttatgaaagaggagagttaaaatgtactcaaaacatttggaattggagagttagagtggtatg

SEQ ID NO: 87537 - DNA, 1025 bp, Homo sapiens
tctttgtcagtaagatgaggtgatccttgtcattgtcttctccgtggcttgatatatagggattccaatgtctcttgagtcaatgaatgaatgaaatgggatattagatgaaaaatgtttagcacaaggacaggcttaaaaatggcagtattattactaatgaaaatattgggatatatgtttgtcacgactaaaatactagcataagatggtttttctttttggccttgaaaaatagtaattgtcctgtactttttcctttaaaagctaatctggattttgaagtatctttttgatatgtgcagcacttcaaattaggacatcatttaagcatctgtcagatttaattgtaatgcatgggtacagtatttggttcagggacatttagtcataattcatcagtttaaaaaaagctaagttacagttatgtgcaaaacaccactctcgatgaatgagctatataaagaaatgtaagacatagtttctgtcttcaaggaatttgcagtgtggttggaaagacaatacatgcacatgtggaaagttatggaagaacacaagtttttgtattttttttttttactgtttcattgacctagttttccttttatttcactcaaacaggtttctcttcattctctttttctctctacttctttatatacttagttttcgtactcctgcctgcttttgaaattcaatttgtagtctcctttgagaatctctcctgatttacagttagcaaaggaacttcttctttggcaatgaaattagttcctatttctttatcattttccatttctaaaaatatttaattgctatgctcatttttcaggtatttaggcatagtatttttttgtgtgagtggtagggaaagtttggagaaagttataaatctttagaagttgacattgtggtatgttaccgtttgaacttataattatagcttgtgaaaggaacagtggcaaggactcagcaattcatctttctttcaagatcaaatcttcgaactcttcatctttgaaaga

SEQ ID NO: 87538 - DNA, 1052 bp, Homo sapiens
aaaaaaaaaaaaaaaaaaaaaagagtaataacattttttgaaaaacctttaacattataaaaaccaatacagaataaaaattaaaatgttctcccttatgttaaccccatctccctttctgctttccagaaggaaacaccatgaacactttcatgaggatctttctagatccgtttctataaatttataaggatatttttaatagttcttttacagttttgtttgtgcatttaactctcttgtttatgggatttattttcatgcatgtatgaggtcaggctctaattgcatattttcccaaatagttgatcagttgtcccagtgtcacttaatcatttttccagttttgaagttttgctgttatcatgtactaaattgttatatgtacttggattggttcctggacttttttttctctttaattttttttttttaacagtatgtgtgaaaaaatatgtcaaagaattccacttggcttcaaacagaaaagcagtagacccctgccctaattctattattcaccaattcccactatctgaagtaaataattttcaattatttatcctttgtattctgatagtttttgaagtagcatgcatattttgcttttctcttgagttttcggttttagatactttctgttgtcttcctcctattcttttctcctttctcattacttctacccttcagcctgccagcatttggtatttgtattgttataattctataaatatttaaacttattacagttctttccccaaaccagtatttattttttttggtgctagtagttgtcttgtcctttgcttagtttcctatgtacctgtaactatttatctccaaactctctgttagaaagtaaaatctatcagttcatttaaatacatcaggtcaagatgtccatatttttagactttcaatatttagtggaaataatgaaaaatactcttttatattgaattaaattttatatttctaaataacttttttctgaatataaaagcatcatctaagagaaaatttgggaaccaccaaaatgtgtacttaaatta

SEQ ID NO: 87539 - DNA, 1010 bp, Homo sapiens
gaaatcatgactgtttacattaaaagttttattctgagttcttttcaatgtagaattatgcttaaattttgatttacttttattttccaattagatataagattggactttccaatattgctatatttgatgtccatatgatgggactattttatgagaagttcattttacaatactctaattttgatacatcactaattaaagatagtttggctaagattcatgagtcactactatgttctatttcctttaagtgttgtaatgaggtgcttatttgcatttttaaaatttcttttattattgcctgttagaaatagtctttttttggatgcaggaaaaaaatacatagagctgttttggcctttgagaacaactagccagttaaacttctagttcaccttaaacttcattttggttctgtgtttacagattagaaaacgtcattgctttggaacagaagtacacaatttggatgcaaaagttgattcaggaaagactgtaaaactcaactctccactggaaaagataaactccttttcgccacagaaagtatgtattaatgccattgttcagttttaaagaaggaagatatggaattttctaaaccaatttttgacaaaagaggaacaatagtataatacaaaggacagtagcaacccactcagaagtcctcaatgctgtcacatctctgttactaatgtgtgagatggcaaagcctattctctctatgcctcgtttccttatttataaaataagagaattggactagagagagatctgaaagtcatttttttctgttctgtattttaatgtttgtaaattctccaactccttacagttctttcaggattcttagggcaacagttctcaaggagtagtccaaggagttctagatattgagatttttttggggagtgatctgtgaggtgaaaattatttttgtaataatattaagatgttgtaggccaggcgtggtggctcacgcctgtaatcccagcactttgggaggc

SEQ ID NO: 87540 - DNA, 1032 bp, Homo sapiens
gcagtcactgtggcttagagaaggtaactaactttcccgaagtcacacaactaatacctggcagagtgaaggatacaaatctagatttgttagactctaagacatgctcttgaccgctgtgatttataagactaggaaattattttgtttccatttgttttgtttatacttttattaattccagtttctgtttccagatttctcccttagttttggttctctggttttctttgtaaggcgtgtctcaatatttgacattttcatttctgttgtagttaggaatctgaaataaacaggaaagcactatgtcttcaatgtggtctgaatatacaattggtggggtgaagatttactttccttataaagcttacccgtcacagcttgctatgatgaattctgtaagtatttttcagcagttaagtttttattaagatatagatacttatgacccataaagtacattgagtatttgactgcattcatattctcagtaaatggagaatattttctgggttcacttggaagaatatctaacctctgggaaactactgattgcagctaaactgtatatatctgtggttaaggcaaagaagaacattctgaaaaatgttctcagctcatttggaatttctatacttttaatgaaaaactgctatacttttaagtaaaaacagagtatttactatcttttacacagaatactatttttctcaccattgttttgtttggatcatgtagaaaattaatatacaaatttgagtaaaccagctttccagttttgttacagctattttgccatatgtacttcatatcttatttactggtaacaagattattagtatcctgaatttgttcttttcctttcctagccatgtttttatacttttattacatatatatgtatccataaacaatatagaatattattttacatatttgaaactgtgcattgatgtgatacggtaccttactttttatgcagaacttgagttttttaacttagcattatttttaatgtatagccctgttgat

SEQ ID NO: 87541 - DNA, 1083 bp, Homo sapiens
atattaacatttactaatatatttacacattttatttacatcatcaacaaatctgatgaaaaagagcatatgtgattattttaacacagcaggttatgaccagtctttgaatattgatccaggaatgtgcactgcatttaattagaaaacatacttttaactttttctgaactcctagggcatatctattcacacaaaatatcgcaaggcctcagtttaaaaaaaaaaggagcagttgtatttaatcttaagggactacaaaactgccttgtttaaaaatatgaaaattcttatgctatttttaagatacttttattacttttatttttcacatcaaaattacttaattgaacattaagcatctaataaaaagttataaatattctatcacatgtgatactatgcacttcatgatttgaaacagctacaaactcattctcatagaatatgaggtagggccagtagtaaccccattttacaaaggaagaaaatgagatgtgactatttactagtgaaaaggctaaagttaaatttcatttctcaaaaactacaccttcttattagcctaatttcttttacaagtgaagcggtctggccaggtgcggtggctcacacctgtaatcccagcactttgggaggccaaggtgggcagatcacctgaggccaggagttcaaaaccagtctgggcaacatggcaaacccccgtctttactaaaaatacaaaaatacaggtggcgcgtgcctgcagtcccagctactcaggaggttgaggcacgagaatcccttgaacccaggtggcagaagttgcagtgagccaagatcatcccactgcactccagcctgggcaacaggggaagactccacctcaggaaaaaaaaaaaaaaaacacaagtgaagaggtctgtttcaagtgggggtggggaagtgtgtgattgaggtatatctcagagagaaaaaagggaattactttctacattgataatttttttttaatgattagggtttacctgaatatgtctgcctaatcaatggaagttactgacagaggactgcaaaatccttcggcaagacaatattttctac

SEQ ID NO: 87542 - DNA, 1536 bp, Homo sapiens
cacgtaagtggtaacttattttcaagggttatcttaatatctcaaacaaaaaggccaaattcctttccaaatttcttggccttaatgttttttttcccttatgttgtaggtcttcaacaaataaaggagaaaccaagtggatggtctcaaatctgtaaagattcatcttataaaaatggatccagggacactggaagcatggatcctgatgtacagctctgtcactgtattgaaagaacagtaattgaaataataaatatgagtgttagtggaatttaaaacaaaatttaaaacaacaaaaagttgtttgctgcatatacccaacatgaatctgcatattagtaacaactctaaactgaatgggaacagtaaagtattgtcttggaatcactaaaacaattcaattcaacatgagtatagtttagaactttatgagaattatgcttgcttgtttctgattggcacatctttggatctactttgctgatatgtttctattgtagcagctgagctttttttttttccactgggaacacatgtaagaaactcattattggaaagggaatttggccttgtatttagcttttgaagtgaagactgccatgcctttaatttcttataaaaatgagtctgtgggtagccctagtgtttattttaactgtgagcttgtaacagaatgtgacaaagatgcaaagatgggagaggaaaaaagggtaaagggaaaggagaattaaggaaataataggagttaaaaacacaagtagaaatctcaaagatttgcagtgcaagtaatagtaatgcaagttggaattctagttctcaagaaagagtattgagaagacttttaaaaaggcaagtagcttttgtaaatgatttctgtggaaatacagatgaggatttaaagatttcacatatttgcttcaatttttattaatatatgaagccatatgtttaaagagatacttgaataatttggaattttaagatactggtgtaaaagtgtttacagaaacatctttgttcaaagaagaacctgagagatctcatttagttttatgttttaaatttatttttataatgctttattaacttacctaatgctcagaggggggaaatatgtatcaaattaaatgaaggtagagcaataaaacccactggattaaagagctcttggtttgtcatcaggattataattcatatcttactttgagaagatctttgagtaagaaaatgcagtgtttgaacctgaggaaaagttaaagtgtagaaaatattgtcttgccgaaggattttgcagtcctctgtcagtaacttccattgattaggcagacatattcaggtaaaccctaatcattaaaaaaaaattatcaatgtagaaagtaattcccttttttctctctgagatatacctcaatcacacacttccccacccccacttgaaacagacctcttcacttgtgttttttttttttttttcctgaggtggagtcttcccctgttgcccaggctggagtgcagtgggatgatcttggctca

SEQ ID NO: 87543 - DNA, 1047 bp, Homo sapiens
taggacaattgatctctctctccagtcttactagttatacaaaacattttataatttttaatacctaaagatattcttgagaaacatgtaataactggattttgtattgcagatatttgctatccagttgctttctcacttgtgtatacaatatgcattaccaaagtcacttagtgtggctcgtttagctgtcaatgtcatgggaactttgttaacaggtatgtagccaatcaacatcaacaaacatctgacataaattattatagttcctatattttctgcatttagtgatgcaatatgttttttctgtcactctgagacagtatgatacaatatgtgttaaatactagtttaacttatgccgtcttttgaattcttcttttggaaacttctgtttacaaatgtgatttatagtgtagtgggaatgaataggtaggcaaattgtatttttcattttgtgaatgagtatatatagatttgtaaatataagctttctgtattttataaatggaaaacaaatacactttcagaatgtaattgtatcagtagataacaaatgttcatttattacaaatgctcagagttccagaaaaatatcatcatatgtataaatgaaagataaatgtattagatgtcttcataagttctaaaacatattctgatattttaaccaccttctggtttgtagaataaaatggtctgaaaataaactactttaaaatatatgaactataatgcaacccttaatgtaatggcatagttaacttagtattctttctcattataatatttccataataccctgttgtttttcttttcatcgtatttatatcctgttataattatttgtagtgattaagagtttacactgcctgaattcaatctcagccccaccactaactggcttgtgatctttaacaagtttcttaacctctctaacctttttttaagagttttctcatatataaaatgagtgtcataatagtactttggtcattcataagattgtaggaattcaatgaaataatgcatgtaatgtacttattg

SEQ ID NO: 87544 - DNA, 1041 bp, Homo sapiens
ggagactttatgatgataaatccagaatagtgacttatatttatggaactagatacagaatgttttggcaagtcttatttcatttacaggtattatgtcatttctattttacagacgaggaaacagtttagagagcctcagtgacttacacagagtcatatagcaagtatggtataactaaggttttaactcaggttttaattttatatgccatgattattccattacaactgtgaacgtttctgaaactactttgtgtttactgttttatctctgtgttttttaaagagatattttaataggttagatgtctgtagcttaaattttttcaaagttcattcatatgtattttctaattatttactgaatataactttctaagatagaaaggactggatggctacagattttaatatataaaaaactgttttgaacatgtgattattttcttatcaggctatgggtaatgacggttaatgcacttcagccttcaataaagtttgtacgacaacaaaagtatactcagaatgacctgatgatagatcctctcattgtcctaaggtgtgatcagagggttcacaggtacatgtcatttgagtttcatttttattatagagctgtactttggagagtcaaaagaaattgatgaaattcagtttaaacttatattttaatttttcttgcagataagtaggcagtgtgacctgtgcggttttttgtcttatttttttagttgtgtttattcatgaaatgtatattcattttaatatttagtatgtgattaataaaacctagctttagagaaatgccattcttggttttggtgccacaaatagtggtttttctctctcacaatttagaccagtaaagaataactatttctgttctcacattaaaaaggtttttaaaaaactggtttcttgtgaaccgttacctgcgttaaaactgtgatctttttggcatgcacaatagtgatgttagcttcattgattccacatttggctctaaatccttaccaattgctaaacttcagcattgctt

SEQ ID NO: 87545 - DNA, 1056 bp, Homo sapiens
caagcgatcgtcctgcctcagcccaccaagtagctgggaatacaggcatgcatgcaccaccatgccctgctaatttttgtattttttgtagagacggggtttcaccatgttgcccaagctggtcttgaactcctgagctcaggtgatccgtccacctcggcctcccaaagtgctaagattacaggtgtgggccagtgcacccagccaaaaaaatgttaatgatacattatctgatgtgttatgattaagtgtgaagtaaatttcccctcaataatgaagcttggggatgaattagttattggttattgataccaatttaaaaaactgagcaaatagaaaaaaggtattaactaacccaacatatatgttgagtaagggggagggcacttgcataagaatgaaattgtaattaaaggattatcacatagctcaattatgaaaccacttctgtagtcataataatatgcatttgaaatattgctttaacaaaaattttaatatacctgtgttgtgagaaacaggaaaaggggcaatgtgtattagaagaagtgggactcacaggagtggaagcaagtaagagagctaactaaccttcaccttgtagagtagaaagtcaacagataatttctaaattggaaaatcaggaaattacagtcattataagagatatatggggaggatataaataccagaataaaaagataaaagagatgaaaatagtagtctctggggagctaaagtctaaaatacaaaggtgtgaggcagaccttatatactacttaacttgtatactatttatagcccagtattctgttttctagacctgtccaggtgttaaggatccaatctatgaaccagcagagacccaatgactaaagacaaactttgctgcacactgaaatcacctggggaatcttttaaaaagtactgacgcctgactcccacccacaaacagtctgatttaattggcatgggttccaacctggggatcagtagtggtaaaaactctccaggtgattttaatgtgcagcaaaacttggaacaactgcaaagatc

SEQ ID NO: 87546 - DNA, 1458 bp, Homo sapiens
ctcctgtctcagtctcctaagtagctgggattacaggtgcctgccaccacgcctggctcatttttgtatttttagtagagagaggggtttcaccatgttggccaggctgatctcgaactcctgacctcaagtgatccacccgccttggcctcccaaagtgctgggattacaggtgtgagccaccgcatccatctggcccttattttaataagtttagttgaaattgtacctaggtttctgtaggaaacaatagcaagtaactatagttactttttagccacattgttttcttgatttgtttggtctatagtctgagagaacactactacttcctgcttgataaactgtacagaatttaggttatgattgctaaattttctttttagcattttcagctgtcccagtaaataacacacaagtgatgcagattatagaacacttgactctactctctgccagtgaacttataccatatgcggaagtgttaacatccaatatgagccagctattgaattcaggggttccacggagaattctgcaaacagtcaataaactatggatggttcttaatactgtgatgcctagaaggtaaattcagtgtattgttacatgtaatagataattatatagcagggataatatacaataacctaaatttaattgtttaaaaaatttttcaccactcatagcagtatttgttgactatatgacaatatatctcctttcttaagactactaaatagttgttatatctttaagtaaagcaaactttattgaaatagaaaccttacagtatttctaactttaggaagttcttgaaaattgggttatcatgtatagttatttgtggctaattatgatttagatcactgttatatcttggatctttgcagttgttccaagttttgctgcacattaaaatcacctggagagtttttaccactactgatccccaggttggaacccatgccaattaaatcagactgtttgtgggtgggagtcaggcgtcagtactttttaaaagattccccaggtgatttcagtgtgcagcaaagtttgtctttagtcattgggtctctgctggttcatagattggatccttaacacctggacaggtctagaaaacagaatactgggctataaatagtatacaagttaagtagtatataaggtctgcctcacacctttgtattttagactttagctccccagagactactattttcatctcttttatctttttattctggtatttatatcctccccatatatctcttataatgactgtaatttcctgattttccaatttagaaattatctgttgactttctactctacaaggtgaaggttagttagctctcttacttgcttccactcctgtgagtcccacttcttctaatacacattgccccttttcctgtttctcacaacacaggtatattaaaatttttgttaaag

SEQ ID NO: 87547 - DNA, 1202 bp, Homo sapiens
ggaagttcttaaactgtagtttgcatgcacaagaagtgcacattcctaggcctccattctagagcttctgatctagtacctgggatggtattcattattctgcacatgaaacaagcttcccaagcttatggtgctggtggtgctctaatcattctttttttatttttgaacgggagttttgctcgttgcctgagctggagtgcaatgttgcgatcctggctcactgcaacttctacctcccaggttcaagtgattctcctgccttagcctcctgagtagctgggattacaggcacccaacaacacgcccggctaatatttgtatttttagtagatacggggttttgccatgttggccaggctggtcttgaactcctgacctcaggtgatccacccgcctcggcttcccaaagtgctgggattacaggcatgagccaccgcgcccggccatctaatcattttttgagaaacactgacttagagcataaccctctttccttgtgggctgatggcttgataaaaatgagaggggtggggaagcttctggtgtttgagcatgaagaatccaattgattttctgtaaattttcaagggttgcattcagctttactacgtctccttgctactaactacccacatttatgtattgtggatgactggatttgtgaagaagaaatcacagggactgatgccctgctacggcgaatgctcctgactaataatgctaaaaatcattctcccaaacaactccaagaaggtatagtaaattattgatactcctttaaccccttttgtagtacaaggagatgctaggctaattgaaatcttataatcatacagaattttcccatggatataacaatgttttggtgaatgtattttaagtatataaaatactctttgcgtttaaggaattttatgctcccttcccctcccccctttcctcctttccccctttccccttttactcctttccccctttcccccttttccctttcctttccttttgtgtttgtgtgtctttctctctgtcacccaggctggagtgcagtggcgtgatctcagctcactgcagcctccacctgctgggctcaagcagtcctcctacctgagtcccacaagtagctgggactacaggtgtgagccaccaggcctggctgatttttttagtttttgtagagatggggtttcaccatgttgccc

SEQ ID NO: 87548 - DNA, 1021 bp, Homo sapiens
atgcaacccttgaaaatttacagaaaatcaattggattcttcatgctcaaacaccagaagcttccccacccctctcatttttatcaagccatcagcccacaaggaaagagggttatgctctaagtcagtgtttctcaaaaaatgattagatggccgggcgcggtggctcatgcctgtaatcccagcactttgggaagccgaggcgggtggatcacctgaggtcaggagttcaagaccagcctggccaacatggcaaaaccccgtatctactaaaaatacaaatattagccgggcgtgttgttgggtgcctgtaatcccagctactcaggaggctaaggcaggagaatcacttgaacctgggaggtagaagttgcagtgagccaggatcgcaacattgcactccagctcaggcaacgagcaaaactcccgttcaaaaataaaaaaagaatgattagagcaccaccagcaccataagcttgggaagcttgtttcatgtgcagaataatgaataccatcccaggtactagatcagaagctctagaatggaggcctaggaatgtgcacttcttgtgcatgcaaactacagtttaagaacttcctgacagtcatttgatcaagggaaactgcttaaatgaagatcctgaagtaatgtgataaacagtgaggtgggaactactacttataaagaaagctttcaactttcttccaccccacccaacataacagtctcctaaagttgtttgacatagcaatggttcaagagttcagggtagaggaaagaaaaggaggagaaaagaatgtccatttggggactatcatatatggtttggaaaaggtcctattcagaaatactgataggcttctgtagagaacatgccctttcctccaaccctgttgagaatcatcactatagatatggtaaaattaaagttgcccactttgaatacctgaaaggtctcaggtactttatgtacgttttctcatctctccctaacattcatacaaagtaagcaatgcctcc

SEQ ID NO: 87549 - DNA, 1002 bp, Homo sapiens
caggagttcaagaccagcctgggcaacatagtgaaaccctgtctctactaaaaatacataaattagacaggcatggtggcgcacatgcctgtaatcccagctatttgagtggctgaggcatgagaatcacttgaacccaggaggtgggggttacagtgagccaagatcatgccactgcactccagcctggatgacagagtgagccactgtctcaaaaacaaaaacaaacaaacaaacaaaagaggtagtgtacaatactattcagagttaaaaaaatttttttttttttacctctgttaagtgtctgttaggttcaaccacaagaacctgctgtttctgtagctctaaattagctgaatatctgcaatttcatacagttcaacctacaggagaaaaaagcctgaaaatacatatcaactgaaaatagctagggttgcgttttagggggcaggctggtttgcaataactgaaataatagatttagtgagggaggcaaagaggaatttcactcttgaactgtttgaatttttaacattaagcacctattacacttcataacattataaacagaaaggttttttaacaataaactttagcagtaaaaagcaaaataaaacatacctcccaactcctgctgcagcccttgagcctgtcgaataaggaatttgataggaatctgatccattaaagaagaagaatatgatttgggctttctttgcatggcagctatcaaagataaaaagtgtaaaataaataaaatgtccagaaacaacagaaatcttaaccttcaacccaaatggaaacaaaaacaaagtcaaattacttttaatgcaattaacctgcgaatatagcatataaaagatgaagaatcattacgaaaacaagtggctacacaggaagaacaagaacatacctggagcaagatctggaaaatgtcctgaaatttaaaactagacagaagaaaattcataacaggttgagagaagccatgtgcaaaagtgc

SEQ ID NO: 87550 - DNA, 1070 bp, Homo sapiens
caatgatagttaagtgataagtctcctgtaagtgcttttcagagacattttcttagtctatctgagggtttgctgtgaaggacctatctctctctctccaaattcctatctaacgtgagctctcccatgacgacacacatggtgctctaaatacagatatggtagggacttaaaatgtttttcccactacttaaaaactaatagattaaaccgaaaggcaagcttctagtggagggtgcacctaagatgatacagatataatggtagttcatattttaaaatcaaaggcagttatgatactagataatatatttggaactgccaaaagttaatagtgagttttactgattcataattcatgtaaaactgtatgtacttttataattttgcttggtttttctttttgccacaattaattcagtgtctataacattctttcttaggattggatttatagacagctgtgtgaaacctctactccacttcatcctcaattacttcctttgattgatgtgtacataaattctatacttactcctgcgtcgaaatctaatccagaagccacaaatcagccagtcacagaacaggagatactcaatattttccaaggagtcattggggtaaaatagtggttcttttatatctattaacttatttttcttttagttcttcttacttaacccatatttttattttcctatcagaggacttctaggtagttctgaatttaaaattagattaaatttccttagatcacctctaaaaattaaaagaatggtattagttccaagtagtttgctaaacaggcacttttttttttgagatggagttttactcttgttgcctaggctggagtgcagtggcgcgatctcagctcactgcaacctcctcctccctgcaacctctgtctgccgggttcaagtgattctcctgcctcagtctctcgagtagctaggattgcaggcgcctgccacaacgcctggctaatgttttgtatttttagtagagacagggtttcaccatgttggccaggctgatctcgaactcctgacctcaggtgatctacctgc

SEQ ID NO: 87551 - DNA, 1034 bp, Homo sapiens
tatattggttctgtttttgagtattaacactttaatgttgggtttgggaaagcacttctaaaacagagtagagtacttgaacatttgaacatttatgtgtatcatagccattttagataagttccctagaataaattgtgtttcatatatttttacatgctgttggaattcttttggtaattttagattgtaattaagccaagctccttgagcaggatgaagacaatcttcacacaggaaatttttactgagcaggtatttctttttattcttaggtacttatttaactttcttttacaatattctttgggagaaaacttgtgtgtcttaccttaagaaaataatatggtcttttttctttttaaactcatgatgatttatttcatctttgaaactttcttaaagaataatccatttaaaatacacttttaaaactagtcataacataccaaggcatcttttgaatttatgtatttttggagactttgagtagatacttaggagaatactcttagatgttgctggtagggcatctcaaggggtaattgttttaatgtgtctggagaaagataaaatgaagtcctatttaaacctttaggctgtaaaattcatttctaactagattacaggctagagtctaaatttcttatacttaacatgttcttctttagccttagcacttttgtccatggataagcataaggatttttttcatttcttttttttttttatctcactttgtcacccaggctagtatacagtggtatggtcatagcttactgcaacctctgcctcctgggttggagcaattctcctgcctcagcctcccaagtagctaggattagaggtgcacaccaccacgcctaatttttgtatttttagtagagatggggttttaccacgttgaccaggctggtcttgaactcctgacctcaggtgatccacccacctcagcctcccagagtgctggggttacaggcatgagccactgcacccggccagttgttgcttttttgtggctattaatatcttta

SEQ ID NO: 87552 - DNA, 1041 bp, Homo sapiens
atttttcaaaaactaatttatattaactatgtgaatagagttcctatgaaggagctaatgcagattgcgatttaactcgttgaggtcacttagctagacaacatgtatactgcttagatcctgtagtctatttttaagctactgaatcatagttttttaaaatattcaagttctattttatagcccatttgaaaactgattttaagctctgctttttaaaacaaagttaacatttatttattggatgcttcatatatgtcaggtactgccttaagcacttggcatgctcatcttgtttgtagttgtcttttgtattcaataaacctttattctttgaacttactgttattattaaagcaggtctatcatattttacttagagacactcaaaagataataattaacatttgtctagccctgtatagtttagaactgctttcatacatgtattatctctgttcattcatctacttaacagactttgagtgcttgctgtatgttaggcacaatgttcgactgtgcagagtgagagaagactaaggcattgtccctgcctgaagaactgtagtggttatagaattgtaaactcttttgttttttttgagacgagagtatcactctgttgcccaggctggagtgcagtggcgccatcttgactcattgtaacctccgcctcctgggttcaagcgattcttgtgcttcagcctcccaagtagctgggattacaggcatgcaccaccacacccagctaatttttatatttttagtagagatggggtttcaccatgttggccaggctggtctcgaactcctgacctcaagtgatccgtccgccttggcctcccaaagtgctgggattacaggcgtgaaccactgcatcaggccaagaattgtaaactcttaattataggagttctataaggtaaatattgttgataaaatatttccttgtcattaaggaaattggggttcagagaggctaaccaatgtgcctaaaggtatataatcgtctaatagtagagctggcatttaaaccccaag

SEQ ID NO: 87553 - DNA, 1435 bp, Homo sapiens
ctgcctcagcgtcctgagtagctcggattacaggtgcctgccaccacgcccagctaatttttgtatttttagtagagatggggtttcaccatgttggccaggctagtctcgaactcctgacctcaggtgatccatgccccgcaccccccccccccccgcccccaccttggcctcccagagttctgggattacaggtgtgagccactgtccgtggccctcaaatgtatttttgtctcgtactttctttgtctctctgggaccgtaattgcaagtgtgtttgaatgtgtaatattgtcccagagtttactattcttttttaagtctcttttcattttttgcttcattttggccaatttctgttgttgtgctttcaaataccctgatccttttcttctgtcatgtgaaatcttcatgaacaattaattctgaaggctgaagaagatggtttctatcatgttagtttgtaggggcctgataaaaaatggagaacgacaagatgaagaaagtcttggaggaaggcgcaggacagatgccttacgcttcttgtgtaaaatgaatccttctcaggccctcaaggtccgaggcatggtggtaagtgatcctgtgttttattagacaaaggcctttatattaggtccaagaactcttctcaagatggttttagagtcctgtagaggtggggaattttatttatatactggatatgttaccttcctctctgggtttttatgttttgtaggagttcttcctctaaactttagatactttagatttggaagcatcactggcctttttgcttatgatactgaattcagtttgttttcttttctgtgctaggtggaagaatgtcacttgccaggccttggtgtggctttgacattggatcatactaaaaatgaagcttgtgaggatggagtgagtgacttggtttgttttgtaagtggtttgcttcttggaacaaatgcgaaagtccggacttggtttggaacttttatccgaaatggacagcaggtgagggttaaatatctgtataggctaaggatcagaatactttagcagctgctaaaagagaaagaaacattttttgaatgatgtcattagacaagtggttctcacactttctagtttcagggacctccttatattttaaaaaatcactaaggataccaaagagcttttgtttatgtggctttttttctgttgatatttaccatattagaaattaacacttaaatatttgaaatatttatttagttcttttaaaaataggaacagctggtgtgttggtatgtgcctatagtcctagctacttaggaggctgaagcaggaagattgcttaagccagggggttctagggtatagtgtgtgataattgtgcctgtgaatagcgactgtactttagcctgggcaacatagcgagacctcatctcttaaa

SEQ ID NO: 87554 - DNA, 1173 bp, Homo sapiens
ttggatgattcctggagacagagaagtgcgctaatgagacgcgtctttctcacatagcacccacacatctgctttttacccggtaacacaggggacataggatagtgttgtggcctccagagccttgaatctggcattggttctgcccagtgatttgctagtttttccaccgactcatggagggtgagaaagagaagcccaatagttcttgatgtatatcggggtaggcatgtgaaactatcggggtatgaaagaaagcacttaactatgaccattcacttttgtttacattttgtggagctcatgtgactgatatagtggagaaagtcttggactgggattttagtagatgaggattcagccttggattgtgcctctaactagtaatactattttgggcgtgttacttcatctctctgggcttcatattccttctttgtaaaatatgagtattagagcagaagattcctgaggctggaagagacattaatatactctgttttctttcccatttcccaggtgacagtataaacctagggagacagagaagccttgtcttgattgtgccaggaacattgccaacatagggacctattaaagatacaccacatttttcagggtttttagaaagttgggtgttcatacatgtgaaagttaaactcctactttcatttgtatttttaccattaggatcaacaaacagtaataatgactgaatgtacaagtcttcagtttgtcagcccttttgcttttgaggcaatgcagaaggtggatgttgtttgcctggcatctttaagtgatccagaattaagacttcttctgccctgtttggtacggatggcactttgtgcacctgctgaccagagccaaagctgggctcaggataagaaactcatccttcgccttctttctggagtggaagctgtcaactccattgttgcattgttgtccgtggactttcatgctttagaacaagatgccagcaaagaacagcagcttaggtaatgttatgttatattatatgtggatttggatttgacaaagaacagggaatcagatattttttagagctctccagaaaagagagaatgagaatctaaattctggagagcattttacttaggtcttttctgtatatagttacagttccagaatcttttgacttccatgtta

SEQ ID NO: 87555 - DNA, 1058 bp, Homo sapiens
cttatgtatagcgaaaaactgcaaatcaagcttttttttaaagggggtattcacttgtaaaaccacacacatggatatttttattttaaacttcaaaatatatgaaagtttaggaaacgggaaaaatcacataattcagctacagccacaatggagcaccaatatgtattagtacattgataattttggtacatttgaaaatttggaataccaaacattcatagctcactgcagccttgaactcctgggctcaagcagtcctccttgcctcagcctccttagtagctgggacttcaggtgcatgccaacacacctggctagttttattttttgtagagatgggatctcgctatgttgcccgagtctcaaactcctggcctcaagccatcctctcgctttggcctcccaaagcattgagattacagtcatgagttgctgccatacctggctaaatctaactgttttgagtgtattcctgaggtgtctattctgttattctgcttttgccaatatcttcctgtctactgtaggggagttatcaatcctggactgaagattaagaacctctacccttagtgtactatagctataaccagaaattctgcttgagattaatagaaattgatactgttagagctgggttttgttttgtcttttccttctagagcaacccaacagaaccgtcaagaatgaccttctgtttagtttaaagtctaggccgggcacggtggttcacgcctgttttcctagcactttgggaggctgaggtgggcgtatcacctgaggttgggagttggagaccatcctgaccaatatggtgaaacccgtctactaaaaatacaaaaattagccaggctgtgttggcatgcacctgtaatctcagctacttgggaggctgaggcgggagaatcacttgaacccaggaggcaaggttgcagtgagccgagatcacaccgctgccctccagccttggtgacagagtgagaagatcctgtctcaaaaaaaaaaaaaaaaaaaagtttaaaggctgatgctttaaagacttccttattttgctc

SEQ ID NO: 87556 - DNA, 2815 bp, Homo sapiens
ttttagggactttaattcacccctccttcaatacaactttcccccttcttgtttgcacatgccaagataactgcttttatgcaggctgtacccccttgaaaaatcctttctacagtgctgctcacaaaagagcccaagttcgcctcctacctgcattgctgacttgaattcacagtcgccgagtctacctagctttcttggaagcagtctagcaaaatttctatttgtacgttcactaattatctacaaggacaaaatcagttgtatttacaaaactctacttcagtgtttgttttagtttttttttttactgaaacttgtttttgtgaatactctgtgcttagaattaaatatcactttcttatgaacaacataacttcttcagattgtgtatatgaaaacattagcaagtcttgttttttctatgaagcaaacacaattggtgacaaaggttgtcaatcatttcttcaaaattataatgcagttctaatggtcagcatattttgatattaaatttaaagatcacctctctgcatttgtttttaaattatgctaatacaccacacattatgttggtatgttttgttctgtactttctttaaaaaaaaaaaaaaaacttgtctgagatttgaaggaaaatgtgcttatttggaatttccataaaaagagtatcctttttatacacttaatagtgactttacaaaataaaagttatattctcagttgtttaaaatcactaacctatgataaccacacctcaatttgaaagtagatttaaaattattccctgacaggttatttaatatggagccataaggagggaacccagtacacaattattttttatttgggaatcagggaatagttcccaaatatacaggatttattgataagattttttttcttcccttcatatatccattcaaactcaatggaaagttattaaataaccattagaaaagctcagtagacttatttgagaaattaagccttgtgcaggatgatggatttgacttactaatgtactgtcacagacaaatatgggtagttttgtttaaataggtaagcaaaatattatactttatagcagtggattaccaacaccttgacttctttgttacagtgctaacatctttttttttgtgcaggtatccatgattattaagcagggtggaagttcagtattttgtcatttaaaaagattagttatataatgtctgcttccagccagtgagaaacatctagccatacctttcttatgcaagccattgagttatcaggactgtgaattaacactgtatgaataaatttctgtacaccttattgtttggccagaaggccaccaagtgtacttatatgtaatccttaaattttaaagtagctgtaatttttaaatatttctaaacttttcttaaaccactaaaattaagctcttactacttagtcaactatcctcagctgtattcgtactcaattgtcagtatggcacagattactgtattaaaatattctcctttcgtcttcatatttaccttctgaggtaattttttaacttaatgtgttactacaaagatttgcagatctttaatcaagcactatgttaatactgtaatatcagaatactatgttgcattatttaaaatgttcaaattgaatagattaaaaagtttttaaatgctattgcatcatataatttgctattcatccactatggcattgcatatcaatcagttaatacacttaatgttgcatgagtgatattttggtctgggtttcctcttaagattttagtttgtctgaattaaggaaaaatgtttttaatatacattcttattttgtcccacccctccagaaataagctggaaatcttaactttttggggggtcttttttggtgttttaatgggcccagaactgtggtttaaatttttatgtatgtattttcttttttgtggagtataaatttaaaaactggatttgggacctaaaatactcctcaggttgatgtattcatgaagttttaaaacatctttagttttcaaagtaaactggatatgtggaccttaaagttattgagtttaagctacaaattgtaacgtcattactggacatgtcagcatcaaccctctcaaaatagcttggtcactttatgaaggggcgttttaaagttgttgtttagcagtgacatttaatatggtccaattgcttttctttttaacgtgacaaaaagagaataaggaacaaacactattgctgccgaatgccataacactgagttgtacaaattgtgattgaggaaatgaaaaggtttatactttttaaaaaaaaaaaaacaaaaacaaaaaacaaaacttcaaatggaataaattattcatgaagccttcattgttgtgtcttattctgttgaaaatatttccatattaaatttgtgcaaaattagtagcaatatttttgtgtcattataaatggaaagggacagcctagaaactgattaatggtcttttaatttttctgaagtattttattttaaaaaggattttaatcacatacaaatgtacagtatgtagaataattgtatatttgtatacctaccaattccttgtaggctggccagttaggtattgtctagtccaaacaagctaccttcaaatatttaaagcttagctgtatcctatttttatttgatcataagaacaatgttcagaagtgagtaatccatcaaaaatagttctgcccatgttctgtaagcacacatttaaaatatttttgtccagacttaagccaagtaaggacatacctcaaaattattgtgatca

SEQ ID NO: 87557 - DNA, 1722 bp, Homo sapiens
taaacactgctattctaacttgagtaatctacttttgagaataatttttatggaaattgcttctttcccctcaaggactctctgttacactcttttttaaggtgactttgagtcttaaatgccataattgaaaactgcttccaaaatctaggttggaaataaataaatgacttatgcagtttatttgcttttcaggtttgttttggaacagtacaatgcactctcctggctaacctgtgaccctgcaacccaggacagacgctcatgtctcccaattcattttgtggtgctgaatcagttatataactttattatgaatatgctgtgatcttcatttgatggaactgtgcaagaaaagaacaaggaaaaatggatgtttcgctgcaggattaagttacaattatcttctcagtgaaggtcatttgtgatggggtctaattcttattacttcaacaaatattgttttgacttggggggaggggctataaccctgctatttttcattgactctattgaactctttaggatgatgactgatcatacaaaacgtattataacattttcgtagcaaaattaaccttttttttttccagtcacagtatttgtgaaaagtaatgagccatagtacccagtcatgttaaatgaatattaaaagcatggagaggaaacatgaggaacaatgaatttcaacatatggcttcagaacatgaagatgttcttgtatggattatagtatctagtattcaaaaatgcctgcatctcttctcttatttattgtaagtttttaaatgtataaattgtcttatatttcttaacctcttttataaaaattttcctagaaggtttatactgccttcttgctttaaagcaattggtctaaaatatatgtaatcgtcttaattaaaaagttgcagtagggttgcttttagagtattatttttttgtaagggggtgggtgggacagtaaatttgtattgtctcgatgtacagtttaacggggatagagggggaataatgtccataccattgtgtgtggaggatttacagctaagctgtagttgcagagtacatgtacagtaatgaagttcactgtgtttataaattgaaaaggtaccaggtcttacagcattttatatatcacatctttacagaataacatgatggcaatatacaagtggtattgttaggtggtttaacttagaataaaatgagaattcttcagttatattttgtactatggtttagggctatgactaatatttcaggccatttccggtgaaagaaacttagttttacaagaaaaaccatttgctactgaatgcttaaactaattttagtgtttaatgttacatgcttaaatttttttcagttttaacagtggcatatttaggcatggaaatattattatgaaatttattttcaggatctgctataaggttgaaatttagcccagctctaggcattttacaaattatttttcaagcagtcattcttgattgtttgacttttttttttaaattaaagattgggaatgtatgtgagagtatgcatatgtatgggtgtgtgtgtgtgcgcgcaatcaaactgtggtgtaaatagattctcagtgaattctggtattcagactctattccactagtgaaagaaccattttttaaacttcccttgccttttttatttatttaattttcttggtttggagatgtcagtcccaaacaccag

SEQ ID NO: 87558 - DNA, 1592 bp, Homo sapiens
ggccgtgactcacttattcttatgtaaaaccaccggaagttgactgtttttaatccacaagtcatgctaatttaaatacttgctgccgggtgcagtggctcacacctgtaaacccagcactttgggaggctgaggcaggcagatcacctgaggtcagggattttctatatactagtagtctttggtgtctccacaaaacaaaggattctttggtcctttgggagggtgctacacatgctatctgtcctcttttctagtcataatacatgtatgcacactaaagtctgaaaaacagaggtaaataagatagtttacctagcatttcccaaacttattaatacacaaggaaaggattatttaacacctgttaatagtttattatcttagtgtttcaggggatgtgttcaggaaacacaactttacaaaaagtccaagggactatctagagcttttcctactcagtatttatttgcagaaaggatagtataaagcgggcattcacccttagatacattgtaacaagattaggacttctggttatgaactatcacctaaggcataatttaccatactttttgttcacttttttttttcatatatcttattttagttttatactgtaggcagtaaagccacctggtttgtttctctttgcttggaaatataatgggttgttagctagatccctttttatcataggaatagagtactggtactaattacattttaaaaatttgtagtgatttgcagtgtgagacttgcttataactccataaatcaagagtttgtagacagttgaaacatagctatttttggttatattcctaaatgtactacatgagtttctatatgtattgcagttgcagaggagagaacacctaaatataaaatagtaccttatacagtgtacagaatgagatctaccaagagttactgcagtgaacatcaccattgttttatcatagctttttaatactatattgacttataaaaaaaatgactcatttaattggagtgtggagtagtttattcctttctcccactattcattgccatatctaaatgagtgtgccagtttttacctaccctctattatgaaattgagtgggcaaagcaggcatctgtgcactgtattacttagagtgttctcagttcaaccgaagatagcttgtttaaggtttattgtgctgtaaccaaactatttgcttatgcttattcctgttacttttttcagtgctagacgtaggtatgtctgcgtagtcataaagggtgtcatatatcttaaggacagactactcaggtttaactactcaatttagtgcctccttaaacatttactttgcacatctaggcaaattagacttagcaggtaattagaaattctttttctaaggattattgtatggtctcaaaaacaataaagctaaagaaaaggaaatagattcaaagtaagttttgcacttaaaaatcacttctggctaggcacagtggctcatgcgtgtaatcccagcactttgggaggccaaggcaggaggattgtttgaggccaggagttcaagaccagcctggtcaacagaacaagaacctgcccc

SEQ ID NO: 87559 - DNA, 1063 bp, Homo sapiens
agcttgcagtgagccgagatcgcaccactgcattccagcctaagcgacagagcgagactccatctcaaaaaaaaagaaaagaaattatatatactggtgatttgattattgtagtatgcataggtataaaatttacccttttaaagtaaggaaggatctttccagtcttactttgcattccttcctcctttttgtaactgcaaagaaattagataggaaatacatataacaaaaagcaccagtaatcccaccaccttaataaaaccatttttacttttaagcaaattatcttctttccacatacgtttatgttgcaattttcaataagtataatgaggttttaaatattgcatttttgctataccctaatttatgtccttcccaaaatattggacatgtaagatttttttttgttatagataatgatgtaatgaacgttttcatgcatattatttttattttatctatttttaaataccaagaaatacattaactaatccaaaggatatgcatgtgacttggtagttgtcccttcatgttgccataataattttcacaacactattaactgcattttatagatagtgctagattaacaaagctaaattgaatccaccttttgattggggtgtggttttcaggacttaaaggaatattagcaaaaaagttaaagatgtcattgaaaattttgtattttttactcatctgtgaagttttacaaactttcccgtgaacttggcataataatacagacttgttaaacagttggcatatcatgcaatccttaaaatatgttctattaatgcttttacttataatactcctaagtacatagaaactggttttttttcaatatccttcagtattttattaaatcgatgtcataagataatgagactgattgctatgagccattctgtgtttatatctggtacttagttacactgagtgaactaatatacttttaattttgtctttttaagggtcagagtactgatcggctactatcaacagaacctcatgaggaagtacctaatattcttcagcaaccattggcccttgg

SEQ ID NO: 87560 - DNA, 1027 bp, Homo sapiens
aaaatgtttccttgcctttgtcagtttctacaggctacttgcattccttggctcatggtcccttcctctatcctggatgccagcagtatagtgtcatcacatctccttcactggctctaaccctactgcctccctcttattaggacccctgtgattacattggacccacccggataatccagaataatctccccatctcaagatccttagcttgatcacatctgcaaagtcttttatggtaacatattcttagattcctgggattaggatgtggacatctttggggggccattattcagactaccacatgcttgtttatgcataattatttgtacggcttttagcacaatacttggcacatggtagacactcagtaaatgttggttaaattaacccattttggttaaaatttcatttattttgaccctttcctgtgaatgaccataggatatggaaaatggagttttaaatttcttttctttctcctgtttagatggagcagatggaatgggtatctttgatttgttagacacaggagatgatcttgaccctgatatcattaatatccttcctgcttctccaactggttctcctgtacattctccaggatctcattacccccatggaggtgatgcgggcaaggtaactgtgttacaagttttagtttttctcggccgggcgcagtggcttacgcctaaaatcccagcactttgggagggcgaagcaggtggatcacgaggtcaggagtttgagaccagcctggccaatatggtgaaaccccatctctactaaaaatgtaaaaaatagccgggtaaggtggcacgcacctgtagtcccagctactcaggaggatgaggcaagagaatcacttgaacctgggaggcagaggttgtagtgagccgagatcatccaattgccattccttaacttagtaatggattaatatatgaaatgcaatactatttttccttggaaattagcaagagttgagattaattaacagtacattcatgcatttctacatcat

SEQ ID NO: 87561 - DNA, 1534 bp, Homo sapiens
tgattttatgaatattctcgcttaggacttacgtaaaggttttgtgaagcactaaaattaaggagatctgtttttcacaaatttgagctctcttaaaatgtcgggatggcacggtggctcacacctgtaatccagcactttgaggggacgaggcaggcagatcacgaggtcaggagctcgagaccatcctggctaacgcggtgaaaccccgtctctactaaaaatacaaaaaattagctgggtgtgttggcacacacctgtagttgtagctattcatgaggctgaggcaggagaatcacttaaacccgtgaaggtggaggttgcagtgagccgagatcgcaccactgcactccatccagcctgggtgacagagtgagactccatctcaaaaaaacaacaacagcaaaatcatataaattttagaaatatttatgacactctctttattcacacaatagggctcgtcggaaaaaaagttctgctagaaaatttggtctacagaaactttgggagtggtgcttaggacttgtacaaatgagttcattgccatggagagttgtaattggtcgtctaggaaggattggtcatggagaattgaaaggtaaaattgtgcttttattagtatttatatttccgttttatgtaaattcacacacagttctgaccacgtctaggtatatatgttgaataaaatgcaaaggttatcaaataaggaaccacatatgtctaggccacaaatggcttaattcaaattttaaaaagacattttactcttattttaactttaatatcagtcttattactgctgttcttaattgttttctgttttttccactttctgattgttatttaactcatcctctgttgagcagataccaattgaatttggtgtatcctaatattagggggataaagaatgttcagtagcatcagcagtaagaattttggcttgatgatgactcgtgttggaggaatacactaatttaaaagccattaactatttttatattttaactttaacttggttctacaggatattaataatgctgttactttgattttttttttttttttttttttttttactgttgatacccacagattggagctgtttgctgagtcgtcgaaacttgcagtctctaagtaaaaggctcaaagacatgtgtagaatgtgtggtatatctgctgcagactcccctagcattctcagtgcttgcttggtggcaatggagccgcaaggctcttttgttattatgccaggttagctatctttagtttatatcagatttaattctttatgcagttaagtttttaagtattatatacaatttattcttcgtttattaaaagaaaaaatgtctttcattttcagattctgtgtcaactggttctgtatttggaagaagcacgactctaaatatgcagacatctcagctaaataccccacaggatacatcatgtactcatatacttgtgtttcctacttctgcttctgtgcaagtagcttcagctacttataccactgaaaatttgg

SEQ ID NO: 87562 - DNA, 1147 bp, Homo sapiens
tttttttttttttgagatggagccttgctttgtcacccaggctggagtgcagtggggcaatctcagctcaccacaacctctgcctcctgggttcaagcgattctcctgcctcagcctcctgagtagctgggattacaggcatgcgccaccttgcccagctaattttgtgtgtgggaggagtttcaccatgttggccaggttggtttcgaactcctgacctcaggtgatcgcccacctgtgcttcccaaagtgctgggattacaggcacgagccaccgtgccctgccaacatttttatgatactatgcaaaactaagtgcaatttttggcttagctgtcattttccaattatcttataattgggtagataagaattacattttaaatgcaatatttctctaagattgtatagtatgataataccttaattttttattttatagagaccagagtgtattcgactttatgcacctccttttattctggctccagtgaaggacaaacagacagagctaggagaaacatttggagaagctggacagaaatataatgttctttttgtgggatactgtttatcacatgatcaaaggtggattcttgcatcttgcacagatctatatggagaacttttagaaacttgtatcattaacatcgatgttccaaataggtatttgtatttccctaaatatatcatatcattccatttgtaacattttgtttcatttttaatgaatagaaaaccagtttgaaggttttatatatattaaaatattaagatgtggggttgtgggtgctttttacttttttctttagtgaatgtttatattgtataactaacataattaaaaataattttgattaatctattatatgaacaaaaaagattaaggtcactaacttctgtgtcataaagcttgaggcaattattttagctgaacatttttgaaagatgtaaaaaaatggtctagtaaagtatctatagaacatttaaacttttctcatgtaccatctaagatatagcccctaataaactgagtaagttaacttcatttactaaaattggcgatttaaaattttatcatttaaatgttaggatgtagccgggtgtggtggtggttgcctataatcccagctactcaggaggctga

SEQ ID NO: 87563 - DNA, 2115 bp, Homo sapiens
ctttgatttagggatatttgtattcataattcatgaattggtgttaatgtatacctaaaatgactgcatttttatgctcacttatgtctgcattctgcaagcttttattcaaacaaaatggttctagtactattgttatctaggtgttttttcattagagatattttaattttgaaaaaaaattaatgaatttctaatgtaaaaatgaaaaagacctatggcaccatttcacccttgatatgtttatttttttggcctacttctaaaaacacccttgatatttttatcataactgttaattgcaaatggttaagcttattttaagtagctttcatggttggttttataatgtgtatctaaatacaataataaatttactaattctgctttctgtatgtatatttgtagtcctgtcgattaggtcaacatagacctgtttctcgactgttaacagatgggatcatgagagttggatctactgcatcaaagaaactatcagaaaagttggtagcagaatggttttctcaggcagctgacggtaacaatgaagcattttctaaactcaagctttatgcacaagtctgcagatatgacctaggtattgaatttgtatttattgtataaggctggtgttagcaaaatgtggcctgctccaccagctgtttttgtagataaaattttattggaacacagccatcctcatttatgtattttctctggctgcttttgtgctacaacattggagctgagtagttttcatagagactgtgtggctgcaaagacaaaaatatttattatctgaccctttacagaacaagtttgctgatccctaatgagggatcccatcaggtaggaagaaattatgggttataaataaattttctgttgcctctgtagggtctgatgttttaataacttgaagattcttcatttgttacagtttagagataaaataatttatagttaatctctaccaaaccaagaaatagttctttgttgtagctaagaaaacgacagctgtttaagacttgcttgttacatactttttttctttcattctacccgtgcctaactgtattgcttataaatactcttgaaaataaagatcagtggacttcctttagacttaatccaaagagatgcagaaccaaaatattgaatctcattagacattcctataatttgaaccccataacattataccattttatattttaattagctgtcaatgtagtcaatatttatttgatttgtgatttagaaaccctttgaatagtttgatgaatattgctagataccttttttacatttaattatacttagaaaatagaattttgttacactttcatagtaatcatttctttaattttgagtgaaaattctggctttttcaattccattttaaatatgtttcttcagtctctaggggaaaatagaaagcaagtgtaggtcacaccattagcaagcaatttcggggctataattaccaagaaaacatcaactggattatgattctgtttacacagtagaatttaaaaaaaccagtcagtgaaataaagaattaaatttcgtacctgtttttattctttaggtccttatcttgcttccctgccattggacagctctctactttcccagccaaatttagttgcccctacaagtcagtctttgattactccacctcagatgacaaatactggaaatgctaatactccatctgccaccttagcatctgcagcgagcagcactatgacagtgacttcaggtgttgccatatctacttcagttgccacagctaattcaactttgaccacagcttcaacttcatcttcatcatcctccaacttgaatagtggagtatcatcaaataaactaccttcgtttccaccctttggcagtatgaacagtaatgctgcaggatccatgtctacacaagcaaatacagttcagagtggtcagctaggagggcaacagacatcagctctacagacagctgggatttctggagaatcatcttcacttcccactcagccgcatcctgatgtgtctgaaaggtacctttaaaaatactgatttttgcagaaatataaaaactatgatgctgcttctttcttt

SEQ ID NO: 87564 - DNA, 1051 bp, Homo sapiens
aataaaaagacttgtttaggaaattccttaatgttgaaaagtcttgaccactggcattaagtatttttgtctctaataaaatattttcactaataatgacttcattaacttttgacatttaaataaaaaggaggccgggcatggtggctcacacctgtaatcccagcactttgggaggccgaggtgggcggacacaaggtcaggagctcgagaccatcctggctaacacggtgaaacctcgtctctactaaaaaatacaaaaaattagccaggcgtggtggcaggcacttgcagtcccagctactcaggaggctgaggcaggaaaatggcgtgaacgcgggaggcggagcttgcagtgagccgagatggcgccactgcactccagtctgggcgacagagcgagactctgtctcaaaaaataaataaataaataaataaataaaaaggagacatgtcttgtttttaagtgttttcttaaaatacatctttcttatttaggaactgatgaatccccagaaccactgccaatccccacatttttgttgggttatgattatgattatctggtgctttctccatttgctcttccttattgggagagacttatgctggaaccctatggatctcaaagagatatagcctatgttgtactgtgtccagaaaatgaagccttgttaaatggagcaaaaagcttttttagagatcttactgcaatatatgaggtaggtgtttaaaaagagatgacattttaaaactaccttacgatttgtattgttgtatatacagcatactgggcagttcagttgattgggacacagtgatgatgtcagattagatgtttatttctcatactagccagttacattctttgctgagtttgacccagtctgttagatgtgtatgccgtgggtcagagtggctatccccctataggaggaagaaacattgagggcatatagatatatatcccttttaatgtggctttttctaaaacaaagggtaacaatgttaaatagccaggaaaaaagttacatttacaaaaattctagtc

SEQ ID NO: 87565 - DNA, 1081 bp, Homo sapiens
gctactcgggaggctaaggcaggataattacttgaacctgggaggcggaagttgcagtgagccaagatcgcactactgcactccagcctgggcaacaggagtgaaactcccatctaaaagaaaaaaaaaatggctgggtgcggtggctcatgcgtctaatcccagcactttgggagactgaggtgggcagatcatgaggccaggagtttgagaccagcctgcccaatatggtgaaaaatacaaaaattagccagcatggtggggcgtgcctgtggtcccagctgctcaggaggccaaggcagaggagttgcttgaacctggggggcggaggttgtgttgagctgagataatgccactgcactccagcctgggcaacagagcaagacactctgttgctattgtgtggaaaatagcgttggggtttggaagtagtgaaagtgagaacagaagcaggataaatcagttggaaggcagtttcagtagcttaggtgaaagatgatggtagcttagacaagataagaggccagcgagatgtaagtaataggttttaggttatttgggaaatagaacctacagggtttgccaaaagacgtgtaaggaaagatgaggcatcaataatagcttgagcacctgggtgaatggtagtactaactacagaggagggaaacacgggggagtaaatcagatacacatttggagataatatgttttaaattcagaggaatgattgggtctggagatagaaaaattttgtgtgtgagttattatgaaaagctgtggatctggatgaaataaactgtagagtaattgtagatagagtagtacaaggatggagctgacatttataagtggggagggagaaaaggcaccaggaaaggaaattgagaaggaggttggaggaaaaccaagggagcatggtatcctagaaatcaggtatagggaatttttgtttgtttgtttttgttttgagacagagtctcgctctgtcaccaggctggagtgcagtggcgtgatctcggcccactgcaacctccacctcccgggttcaagcaattctcctgcctcagcctcccaagtggct

SEQ ID NO: 87566 - DNA, 1556 bp, Homo sapiens
ttagtgtatagagtgcttattaatgatttttgaacttgttaattgatccttagtcaacaacaatcacttagagtagatatgttaaccagaaataagaattgactgtgcttgtaattcttgcaatacttgtcctttcataattttctatgtaattgaaaaacatttgggacgtttttagttgtatttcacattactaatatgttcctttatatatatatttgatcttcttttaccctggtgatgatagtgatggaagtaatatggatcaagaatatggcactgcttatacacctcaaactcatacttcttttgggatgcctcctagcagtgcacctcctagtaacagcggagcaggaattcttccttctccatccacccctcggtttccaactccaaggactccaaggactcctcggactcctcgtggagctggtggacctgctagtgctcaaggttcagtcaaatatgaaaattcagacttgtattcaccagcttctaccccatctacatgcagaccccttaattctgttgaacctgcaactgtcccttccatccctgaagcacacagtctttatgtaaacctcatcctttcagaatcagttatgaatttgtttaaagactgtaactttgatagttgttgcatctgtgtttgcaacatgaacatcaagggtgccgatgttggagtttacattccagatccaacgcaggaagcacaatataggtgtacctgtggcttcagtgctgtcatgaacagaaaatttggaaacaattcaggattatttcttgaagatgaactagatatcataggacgcaatacagactgtggcaaagaagcagaaaaacgttttgaagctctcagggctacctctgctgaacatgttaatggaggactaaaggaatctgaaaaattatctgatgatttgatattattgctacaagatcagtgcactaatttattttcaccctttggagcagcagaccaagatccttttcctaaaagtggtgtaattagcaattgggtacgtgttgaagagcgtgactgttgcaatgactgctaccttgcattagaacatgggcgtcagttcatggataacatgtcaggaggaaaagttgatgaagcacttgtgaaaagttcatgcttacacccctggtccaaaagaaacggtaaagtatgccaataaaatacttttttgtttgcttatttccctttagttacattcttaggaaaaagtaataaaggcagtttcccatgtggcaaatacatttaaagttggacttaaaactctttatggatgatgtttttaaagggagaatttcttagcagtttagtttaatttcaccaataaaagtatggttattataaatctgtaattatatacttatgtaggaatatgaaaggcacattccatatatttattagcataacattgctagtggtctgctttattcaacattctttcactcattaagtatttactgggcaccttgtatgtgccaggtattagcctagattcactgttgaacaaagcacacatattctttgccctttttgaatc

SEQ ID NO: 87567 - DNA, 1875 bp, Homo sapiens
tagctggaattacaggcatgccccacccagctaattttttgtatttttagtagagatgaggtttcaccatgttggccaggctggtctcaaactcctggcctcaaattgatctgcctgcctcagcctcccaaagtgctgggattacaggtgtgagctaccatgtccggcctcttattactgggttttaagttaaggttaaccttacttctgtgtattttgaaagtattggtcattttctttggaggaactttttccttttaatttggaggcttaccaaataaattaatctggagtcagtgattaagaaatattttatatctttcaacactagtatgtatttggctgtatcacagattcaaaatactacttttaatgaatgggctttactgttaagttatatctgaatgattactattttgagatcacattggatgtaaaattttagataaatatgtgctttttttaaatagcctggatctaaaaaatcagcaaatggatcagatgataaagccagctgcaaggaatcaaagacaggaaatctggacccgttatcttgcataagtaagcttccctcatctgtgctcgagataaatttgcgaacttttaatctcaacaaagctccccactccttttggtttaaacacagattcgcctatttttagtcatgttaaaatgtatgtttttattaaatataggcactgcagatcttcataaaatgtatcctacaccaccatcattggaacaacatattatgggattttccccaatgaatatgaataataaagaatatggtagtatggatacaacacctggaggaactgttctagaaggaaatagttctagtataggagcgcagttcaaaattgaggttgatgagggattctgtagccccaaaccttctgaaattaaagtaagtatgttttttctagaaaaataattcacttcctatattttcttatagaattaatttgttgctatagtcaaaaattattttatagtggttgcggttttgtagctaagttgaggactgaattattgttgtcactattaagaatgcatttaagaaaataatagaattgtatttagattttattctgtttaaagaaaggaaaaaaggtccagagcctgtttgtttatttattttttcctcctagaagataagatactgaaaacctaccatctttatattgtaggatttttcttatgtctataagcctgaaaattgtcaaattctagtgggatgttccatgtttgcacctctaaaaactctaccaagccaatatctgccccctatcaaattgccagaagagtgtatttaccgtcagagttggactgttggaaaattggaattgctttcttcagggccttcaatgccattcatcaaagaggggtatgatttatgttgttacaatagtatgtgactgcttatacagctttaatttttttttcatagatttacctggtatgctggaaaaataaaattggtttttgaaaattctaaaaattatttctggttaatcaattatagtgattggctgggagcagtgaatcacgcctgtaattcccatactttgggaggccaaggcaggcgtatcccttgaggtcaggagtttgagatcagcctggccaacatacgaaacctcgtctctactaaaaatacaaaaattagccaagcgtggtggcgcatgcttgtagtcccagctacttgggaggctgaggcacaagaatggcttgaacctgggagtcaggcattgcagggagccgagatcgcaccagtgcactccagcctgggcaagagtgagactttgtctcaaaaaaaaaaaaaaaaaggttaattgggtatggataaactattaggaaacttaagactattat

SEQ ID NO: 87568 - DNA, 1054 bp, Homo sapiens
agctttctgtggtctgtcagtttccactagctcatctttccaacttccttgttgtcttctcttttattctgtcatctcctgtcattttattggttattttaggagaataaagagaaacaatttcttagttgctgtgttgaaccagaagactaataacttaaaaattgatgtgccaatgtgattagaaaactcagatacttgcactgaaacttcactttccattgtgaaacatcttgccagaattaatagtaataatgctattttcatgaaacacaaatcaggccttcaaaaatttaaaacttaaagtatatctactcatggcagtaaaaaaaaaatacataatcactttccttgtataaatgtataaattgtttaaaagtattttactcacttttataaagctcccactttgagtcactgtactggagcagtttagatttaagagcccctttcagggaatggatttgtacaaaatagtgtgcttgaggacttgagaaccgtgagttacctaaaccgtgaattacctaaagacaacatattttggtagaaagatcatatagttaggaaacttggattttggccccatttctctatggctaaattttagacttcaataaattatttaatattttcatgcctcctcatttctgaaataagggattgtaggttagataatctttaagtaattctaaaaacattatgatacttaacgtcattttggaaatttttaatgcttatgtggataattaattttttttaatttttttatgcaggttaatggtgcaatgtaagaaacctttaaaagtttctgatgaattagtgcagcaatatcaaattaaaaaccagtgtctttcagcaatagcatctgatgcagaacaagaacctaaaattgatccatatgcatttgttgaaggagatgaggaattcctttttcctgataaaaaagatagacaaaatagtgagagagaagctggaaaaaaacacaaggtaagagaaatcacagtacaccaaagggtcactgttgattttgtagcactgcatatagtaacactct

SEQ ID NO: 87569 - DNA, 1060 bp, Homo sapiens
tatgtttaacttttcattgactatgtttgtaaaagtaaaatttctctaatttgttagaatttacttgtggggaaggagaggttggagtggaacatagcataacccatatataagatacacgtggcaaatatctttttttctaattctttttagtttatctattagttaatgatagcatgtatttcagaatagaggctaagaaccatatagattttaaagatagcaaaatttctggcaagaaacattatatctttttttcatgggtttagcacttagttttagaagaatttgtgattgtttagtctgtgattctgattcagagggaaacctgtctaaaccctgagcaaagaaagaactgtatttgagcatagttctttacatgttttattctgtagccaaagtatatcaggatatcttagccatgatattcatcaatagaattaactcctatgttgtgttagtggtataccagatttgtatgtatatagttgtagaatacattatttgatctctaaaacatagttctgaatgcctttgattcacagaaagaagtctgtgatgaaataaacttgttttgatttttctgtactctaaatcttttaagtaagtcttctatatttgctgttttattttaatgcaaataaagctttcctttgacagtgaccttggctcagtttagggattgattctgaatataggagacggtaaaaaaaaaaaaaaaaaaaaaaaagtaccatttaaaaagtgggagattttaggctgggctcagtagctcacacctgtaatcccagcactttgggaggcaaacatgggaggatcacttgagcccaggagttcaagaccagcctgggcaatatagtgagatcctgtctctacaaaaaataaaaaactagccaagtgtggtggtacacacctgtagtcccagctactcaggaggccgaagagggaggatactttgaactctggaggtggaggttgtagtgagctgagaccgcaccactgcattccagcctgggtgacagcaagaccttgtctcaaaaaaaaaaaaaaaaaaaaaaag

SEQ ID NO: 87570 - DNA, 1039 bp, Homo sapiens
cctagttcttcacccatgttacctactggtatcctacttgtctcctgatttagctacaccagcatccttgataaattattcaaaaagccaagctcattcctcatggccttttagaattggattataaagagggtgaactgcttatcccttcttatcattcagtgctgctcaaaagttatcttctcagggaagattttcctcaccattttatctaaactatggtctttctctcccaaatcactgcctatcctgtatgctgcttttaatttcttcttagcatatatctgaaattatattatgtatttgctaatggtcttttccctattagaatgtaagctctatgagggcaaggactcttgtcttgtttactgctgtattcttctagcataaacacacacacccccttagaacaattctggatacacaatagaaattcagcaaatgtttgggtgaatgaaatggccctaaaatactattttaaaacttgttttctttccaggttatattttcttatttaatgtgtgtaaaaatgtggtggtatgaagttttttggttttaaaaccttcaatagtgagtttttgtgggcacattgtattcataagagctgttaattctagccataactttaaataaatgtattggttgcttgtgtacatgactatctgtaagtaaaatgaaggtctcttagaagttaatacagtttaaccttaaaatctgttctaaaattatttgacatttttctcactgaataagaatgagaaggaggaagcatagtgtagaaaagtagcgtgcagggtagagtggtactggattgtaattatgtaagttaaggaaataacatgctttgcctattccttgtcaccctttttttctgccttatagacaagggaaaaaaaagattgaataaaagagttttaattttaatcatatgtcttatgtgaatattgttttggttatactagttactgaaatgtgtatcatgtcacagttcactttttgcttttttttttttttttttttttgagttttgctgttgttg

SEQ ID NO: 87571 - DNA, 1524 bp, Homo sapiens
aaatttcaagccttgttataccttttaaccttaactagaatcttacctctatatttaaattagatactaaaatatttaaatcatgtaagacataatctttggctgtctgatcacatggctattaaatgagcatgagataattggcttttatgaatgtttctgcatgcccttatattttatttaggtcacgagcaaagtatttttttcccctttcaaattcaaattattttacttttagtattacatgtgaaaaagaaatgataaccgaagtgtctaatactattaactggtattatacttcgccataatagtgatactgtaaatatgaaacctttattttcacttttcaggcacaaaaatctcaagtcaagaaatgctggacaacaaggacaggcaccatctttaggtcagcaacaacaaatacttcctaagcacaagaccaatgagaagcaagaaaagagtgaaaagccacagaaacgccccttgactccttttcaccatcgtgtgtctgttagtgatgatgttggcatggacgcagattcagccagccaaagacttgtgatctctgctccagacagtcaagtgagattttcaaatatccgaactaatgatgtagcaaagactcctcagatgcatggcaccgaaatggcaaattcacctcaaccacccccacttagtcctcacccttgtgatgtggttgatgaaggagtgactaaaacaccttcaactcctcagagtcaacatttttatcaaatgccaacaccagatcccttggttccttctaaaccaatggaagataggatagacagtttgtcccagtctttcccacctcaatatcaggaagctgtagaacctacagtatatgttggtacagcagtaaacttggaagaagatgaagccaatatagcctggaagtattacaagttcccaaagaaaaaagatgtagagtttttaccacctcaacttccaagtgataaattcaaggatgatccagttggaccttttggacaggaaagtgtaacatcagttacagagtatgtattttttttaatagtcaccattataatttaagggtggaagtgatgcaagttcttaatactaggactcagtattggattcaaggtaggatttacaagaataaattcattgagtattaactttgcattattcctttactgtgttttttcctcagggaacttcttcattatgaaataactttagccacaaaaagtggagaaaataatgtgtaaacacttgtacatcagccaacttaaggattttacatacagttagaattcccatgtactgtttttcttcttccagtcttccttccactgtcctgaatttggtaccttttttttttttttgagacagagtctctgtcacccaggctagagtgtagaggcacgatctaggcccactgaaatttccgcctctgggttcaagcgaccctcctgcctcagcctcccgagtagctgggattacaggtgtgagccaccacacccagctaatttttgtattttt

SEQ ID NO: 87572 - DNA, 1050 bp, Homo sapiens
atcacaaattaataaaaaacccaaataatgttactttaaacctacctttattctcctacagcctgtttttttgttttgttttcagttgatcctcagtctgtccagaagtgggtcaaattttcttcagtatctgatggcttcaactccgatagtactagccaccatggtgggaaaatacccagaaaattagcaaatcatgtggtggatagagtttggcaagaatgcaatatgaacagagcacagaacaagtgtgtattttcatttataagttcaaaaattgcatgttgataattacttataattagaagatatctaaagtataaacagtcatttgtttgatttttctttaactcataatgttgatctttaaaattaatttcaatgctacattgaggtttgatagaaaattttatgaattttaaagaattttgtaactttaaatcttaggaggaagtattctgcttcatcaggtggtctatgcgaagaagcgacagctgctaaagtggcatcctgggattttgttgaagccacacaaagaacaaattgcagttgtttgaggtagattatttcccgatcgattgatgcctatgtgtgatagtttgttacgccactgaatgcttatgcccactttatttgaaacagcttacatgaacatatgtcaggattttttttcaaaagaaaattcaggaaaaatatttcaggaatttgaagctgattatagaagtacatgtaaatataagctttcagttcattcactgttaccagaggcagactctgaaagttttgtttcctagtagctaaataaaagacaattttatatggagctatggtatatatagtatctataagctatacagccatataaatctcttgagaaaagcattccttcctcaatggcactacctgagaaatttatcccaagagttctttctttttttaaaaaatgaagagacagggtcttgctttgttacccaggctggagtgatcatggctcactgcaacctcaaacttctggcctcagtcgatcctcctgccccagcctcccaagta

SEQ ID NO: 87573 - DNA, 1190 bp, Homo sapiens
taaacttaaacaataaaattgaaaaagtaatacacattaagttggtcagaagtgcacataaagatttaaaaaacacatttctagaaatctaaaaaaaggaaagctgcctttttccaaatctctctcagcaaagataaccaccactgacagcttattgtggtttattgtggtttcttctaaaaaagagaaaaaaaaaaaagaaaagaaaaacttatgccaaagaagcttatatttataaaaatgtatttttatttgtataaatgtgatacctacttttccattatagtacttttgagtgaaactaattcactagtcacaaaggtaattggttttcctgtcccatttttttcctttcagctggtgtccgaatgatctacccagcatgctttgttctagtccctcagtcagacattcctactcctagccctgtgggatccactcactgttcatcttcttgcttgggtgtccaccaagtgcctgcttccacaagagatcctgctatgtcttcggttacgcttacaccacctacgtctcctgaggaagtccaaacaggtatagcagtaatttgtctcatcagctctggtaatttgttattttgtgtacagtaagtacttaagaaataatttattttgaaatagtttcaaacttcttgagaatttacaagtgtagtacaagtaatttccttagccatatttccaaactgttattatttactccatcaccctgtctgtatgatgtacattcattatcattggtctttttctgaaccatttgagaacaacctacagacatgatgtcccatcactcctgtgtactcagtgtgtttcccagaattaaggacactctcctatacaactattactcgatcctcttagtcagaaaatcagcattgatacactgccatccagtttgcattccctgttttagatattttgctttctgtatttaaaagtagcgtgcttttatttttaaaggtttatgtgtttatctataattaaaattactccaacagagcagcccattgctgtgttctaattcttagcccttaagtcctacaaaaataaacccaagcttttacagtaactgtcaatacagaactaaagcgttttagctattaaaaggggtttagttaccaaggtgcttattttcagcaaaacgccctgttactcagaagaacatacgcatatact

SEQ ID NO: 87574 - DNA, 1052 bp, Homo sapiens
gggattgcaggcgtgtgcaaccacacccagctaattttttttgtattttattagagacagggtttcaccatgttgaccaggctggtcttgaactcctgacctcaggtgatccacccgcctcagcctcccaaaatgctgggattacaggcgtgaaccactatgcccagcctgggcagacaaatttttaacagtttatataataaactcagtgtcatactttatcttcacagtaacgaagtataataagttgatttttctctggaatggttattactggtttccttttcttttttataattgcacgattatttgccacatttttcactgtgttcttatttggtaaaacagtcttttgttacttatttgatgtctgctttgggtttctagttatcttatgcccatttggactaaatggcactctcacaggacaggcattcaagatgtctgattcagctacaaaaaaattaattggtgaatggaaacagttctatcctatctcatgttgcttgaaggagatgtctgaagaaaaacaggaagatatggattgggaagatgattctttagctgcagtagaagttcttgttggtatggatcctgagtattattcctaaggggaaaatgcatgattgtatgtgttagttatattttgctgaataacaaacaagtctaataactcagtggctttcaacaccaaagatttattccttaatttcctgcccacattacttaagggctgcatcttagctggtttggctccatgtatctgctcattctgtaacctaggttaaatgaatatcccagtagctaggacatgctgttcttatgagaacagaagaataatagggactgaacctaaccatgtaagtgtactcagagcttctgctgggatatggtgtatgttacatctgctcacattgcattagacaaagctagttaaatggccaagccaaagtcattggggcagggaaatatattctgtctagagggaagcatgcttaggatgggacagttaattgtgaatgaattaatatttggaggctgaaaagttgaca

SEQ ID NO: 87575 - DNA, 1052 bp, Homo sapiens
gaagtcagcattctctttactagtattatgattttaacacaagccatttaacctctttgtgcctcggattctctactggcaaatgggatatcatttttctgtagctgcttaatacaaatgctagaaataggtttgatgtggcactgcctaatctagcatacatatggaattgttgctgttagagcagccagctttaatctataagcacgtcttcattttctgttttagaaataatcttttgattaatttcagtacttaatttgaggaacttttttttccacgatggaagattgttcaagtttcatttataaaattctgcctcattcataactttttgttttagatattgtagtgtgagctcatggagagcaacagtattctctgcaatcctttatagtaactaataatacttcgaattgttattgtggtgacatgtttttgttttaactcacttttctgagtgttaaataccaaaaatgtttgatgggatgatacaaataacatttctccttggaaaaaaagcaagtctgaatttactatgttagtattttctaattgttttataatattctctgactagaatattgcctttaatataaggatttcggagatttgggtgtggtggtgcacacctgtagttcaagctacttaagaggctgcggcaggaggatcacttgaggttgggagtttgaggctgtagtgctccgcgactgtgcctgtgaatagccactgcactccatcctgggtaacatagggagactgccatctcttaaaaaaaatttcaggccggcacagtggctcacgcctgtaattccagcactttgggatgccaaggtgggcggatcacctgaggttaggtgttcaagaccagtctggccaatacatggcaaaaccccgtctctactaaaagaatacaaaaaaaactagccggacgcagtggcaggcgcctgtcatcccagctacttgggaggctgaggcaagagaattgcttgaacccgggaggcggagtttgcagtgagccaagatcacgccattgcactccaaccttggtg

SEQ ID NO: 87576 - DNA, 1050 bp, Homo sapiens
aaaaccataatacttaaaaacaacaataaaaagcagcattttgcagaacacttgaagtggtaaaccagaataatgttgttgctaagttttgtggggtttttttggttttttttttttttttttttgagatgaaaccttgctctgtcaccaggctggagtgcagtggcgcaatctcggctcattgcaactgccacctcccaggttcaagcgattctcctgcctcagcctcccgagtagctgggactacaggcgtgtgccaccatgcccagctaatttttatgtttttagtagagtcggggtttcaccgtgttagccaggatggtcttgatttcttgacctcatgatccacccgccttggcctcccaaagtgttgggattacaggcatcagcccccgtgcctggccactttctaagtattatttactgtataatgtaagtaatatgttcactgagtgagcagaaatatgtacaggattcacaggtaagatgttaacttctggattttagtatagatcttttgttcatggagctatgttaataatacctgatactggtattatacctgtaaatttaaaaatttaaaagttactctgaaggctgtagaaatacagattaatgattcccaaacttgtctggatgtgggaatcacctggagagcttacaaaaaattattgatgcctgtgtcttaacctgggactgtaatctgggctttggaaattttagaagatcctaatgtaagacaagtttggaaacttttgaattcacggaataaaaataatctcagaattaagatggctaggggaggctgggcacagtggctcatgcttgtaatccctgcactttgggaggccaagacaggaggattgcttaagctcaggagttcaagaccagcctggacaacatagtgagacctcatctctacaaaaaataaattctaaaaattatctggacatagtggctcacacctgtagtcccacctaacttcgttggctgaggcaggaaaatcgcttgagctcaggaggtggaagctgcagtgaattctgatcatgc

SEQ ID NO: 87577 - DNA, 1049 bp, Homo sapiens
attacattatgtgtatacatatagacatgtacatataggatataataaatccttgctggatataacataaagaaaataggattaaatatttggttcaatatgttctaagcctttgtattagaataattagagccctggaattagtagtaaaaaacttagtccatagagagtgataaatttttgattttgtgggataaagcagtaaaagttcacaggaaggaaaggatggctgttgttaatggccattgtattgggcagtgtagatgtagaacattttcatcattgcagaaagttatttttttgggtggtattgcttacacaagaacctttatatttataattaaaacagtacttttggtgcttcaataaagaaattcatcgattttttttttttaaggaagtaaatgaaagaatatgctttaaatttcacccataaagctgtgtttattttctgccatatgtatggcttttacattatctcgtgctctccaaaactgattaaaaataggcaccatgagatgtaagtctcccctgaaaatgtattattaaccattagtagcgttaggatgtcctttggttaggtttctcactgtctccgaaaaggcaaatttctagagaagctaggagctattgctgttaggttttttatggactcatttcctctcttcctgtcatctaatgtactgtccagtagaagtataatgtgagccacataggtaatttaaaattttctactaggcacatttaaaaagctaaaaaaaaactaaatgtataggcaaaattaattgtaatatattttttaattcagtaagtccaaaataatatcatgtcagcatataattaactatgcagaaggttttaatgaaatagtttactttttgtactgcttttgaaattaggtgtgtgtgctgtgcttagagtatatctcagtttggattggccacattttaagtcaccaatagttatatgtgtgtattggctattgtatttacaacacagttctaggggtttaagcccagttgaacttggtagtgtttattagtgaaagg

SEQ ID NO: 87578 - DNA, 1024 bp, Homo sapiens
ttttttggcaggttgaatgactaggggaattaggacaaagtaacaagtgagccagcttagaaattggcatcataggtgtagagtgtgtttaatattttccaggttatacaaacaagtgtccttttcattaatacaggaaccaattcagtatgttcatgatgtcattgaattttataaggtggaaaaatacttttcaggtaatttaatagaatatgtggcacttagaccttttattccttgtggagtaactttgaaacctgataatgtctagagatacattgaagtgattgtagcttaatattctggggtaagctagtgttgatgaatatagagtttaaactgtaaccttttttacttggctctgaatagattatagtgtcactattttattatttccttcatttctcttttagaagaagaagatggagtgtgggagaatggactttcctatgaatgccgtactctgcttttcaaagcagttcacaatctattggaacggtgtttaatgaacaggaattttgtacgtattggcaagtggtttgtaaagccttatgaaaaagatgaaaaacctataaataaaaggtaagctatcttaaattctgacgtgatatttctttagatttgttcctttttgtgtcttaacagagaatgtgggataaaacaagctaatatacagacatattccagaggttgtcagtgacagagtactagatacagtcaggttttttttttttttaaaccactttacaaacttccctttatacactttaagcattttcttactgtaggaataggctgtattttaatacagtggcctaaattttgatttgtgatgatagacttaatgtgggatgaaagcagagacttaggcttggaagtatcttttttttagtatttgtggaaatatatgcacagcactctgatattaaaattaagtaacaacacctgttaaggatagtgatctgtgagtatgttttggatcaagttaacccttcttattcccaatctctcaattccctttaat

SEQ ID NO: 87579 - DNA, 1018 bp, Homo sapiens
cgttttggttttaaatggaagtagataacggtgtctttgatataatagaatgtgaatttttcctatttaatatttatgattaatattagacttaaaaaattattctataccaattctgaaatattgtcattttctcaagcttattctacttttttttccctaagcttacctttttttttgtttgtttgtttttttggagactgaatctcactctgtcccaggctggagtgcagtggcacgatcttggctcactgtaatctctccctcttgggtgattctcccacctcagcctcccgagtagctgggattacagggctgcactatgacgcctggctaatttttgtatttttagtagagatgggctttcatcatgttggcgaggctggtcttgaactcctgacctcaggtgatccgcccacctcagcctcccaaagtgctaggattacaggcgtgagtaactgcgcccagcctaaagcttatttaaaataaaatttaaaaaaaaattagttgctttgaaagacttgactatcatttaggagaaaatataaaaccaacattaatctttgtagtggcacagaatttctagtgcagttaaagtccactatcatactttttagttaatgtttattctacccatttgttgtataaattgtgcatataaaccatgtgtaactcttaatacatgtctttgcttttattcagaagctcatattgtgtctgtttttctgtgggtatagtgtatgcatttttggtgttgaattgagaaacgtttgtcttttatttttacttaaacattgaacacagatgacccatatttacaaaatgtttataaaggtatataggctatagaaggagagttaattatatttagactaagcaatttaaaatcttgtaatgaaagttagagtgctgaagtggtatcattatttgtagcacgatttgttggatgctttgtgacagatatgaaatggatagagtacacaaaaaaatttttctgacctacatccagacttatctc

SEQ ID NO: 87580 - DNA, 1249 bp, Homo sapiens
tctttccctttaaataaaaataaaagcaaacactgcgtcctctcccatttgtcatcttaaaaaaatcatagcaagttagactgtgatgagactctttgagaaaactgataccttgtgaactaaaaaaactcagggctaaaaatatttgttctttttcctggctcctgaggtctgtaaagtagattttagtaacatgttcagatagttttattataccagaattttatcataatgaatagtgctcaaactaagtggactattgttctgaatttaattttggatgttttaattgaaggatattaactgtagtggactttaaccttaaatgacagctgttaataggattgacagatagataaacagccaggcataggaatctagtcccagccaaactaaaacattgttgtgtgccccacatagtctaaagagagtaatttatttctactattgtaaaatttacttgtgatgtggcccgactctttaaattggctagtctcctaggtgacaacttcatttgctgtatttcttctgcatactgtttttttgatcaagtgtatcttctaagttttcaagccaaacataacatactaggctgtttttaaatcagttttcaagttttgccatagataatgatgcggccaacttaaggctctcggtatatttgttgaatgtataggttattaatgattattcaggagaaacactgatctagcatttaaacatttctctttatttcaggaaatacatggtattttctaccatgttaatttttgagccattattcattagcatatgttacattttaatagttttgcaaaattgtattggagaagattcattttttaccaccgtggagatatttaaagatgccatttttttgagaaaaatgttgagtgcagggtgtgtctgcttttttggttgtgattttttttccccattgatagagaattattttgatgacttatcacatactttggcactactgtaatctgcatcttcaggaaaaaaatatggtaatcaaatttagcatttgtgttttcttccaataaatagtccataaaaatttcaagaaacactgatgattaagaactgtaatgctaatagtaacagaaaagtactaagaatgcagagttgaactttattttctctggacatagagctacaagagaaggaatttttttttcttttttttgtagggatggaggtcacactttgtctcactcagcctgcagtgcttaatcatagctca

SEQ ID NO: 87581 - DNA, 2007 bp, Homo sapiens
tagggtctttaataattgattttcagttaaaagtttgacaccagtgaacaaatgtgaccagttaggacagagaaaaatgtactctgtttgcatattgaagtgtgtgtctatatttaacatcattcagtttcttctgtttctacttggagtacatatttgcttgctattcagtgacatggtggtggtaatttttaactgtattcttctccctaaaattcttggttgttgaattataaagtctttttttgttctaatttgcagtcaatatctcaagcatacattgaaaaattgtaatgtcttaatgaaataagagacatcatattgagtacttttgactttgagtgaatatgcagtaataaaacttaatgctttctttccttcaggctgacttgacaggaattaagtggaaaaaatatgtatggcaaggcccaacttctgcccctattctgtttcctgtgacagaagaagaccccattttgagcagttttagtcgctgccttaaggcagatgtacttggtgtttggcggcgagatcaaagacctggaagaagagaattgtggatattttggtggggtgaagaccccagttttgctgaccttattcaccatgacttatcaggtgaaagaaactttccatttctaactaatgatatagcaacattgtatacttctcccagaatgtcatatgtattacaaattaagtttgtttttgtgggagacttaggaggccagataaaaattcagcttcattgttttatttcaccatgattattttattttacttaaattatccatgttgttatagctgggtttttaaggcgtgaatgactttctccttccaccacctctcttcttaatttctcacaggtagttagggcccgaagaaggcatgttacattaatctaaaaaaatggaatcaggaaacagagttcctaacaaagtcgtgtaatagtttagaagccagatgtaacttttgagtcacttcagccactgctgaagttgagtcttttgcattgaataggcagatgattctaaaagtactggaaatgtaactatccgtgtgtgtgtgtgtgtgtgtgtgtgtggtgtgtgtgtgtgtgtgtgtgttttaaggcatgtattttgttattgtcatttgtgctatttgattaacttatgaaggcatatgttaatttagttatttttggaaagtgactcatatactgttctgtcaaacataataagagaaaagtgccaacttgtttagcttttatgggacatgggatcataatctaaaaggttacacaaacaattttattgtgagcaaatcaatgtgattacttccttattttcttgacttttaggaccaaatgctactttagaaagagaaactatagcttttcatataattactgaagctttaaattgtgaaagtcagtattaactgaatcttagataataggaatataaatgattggttgtatgctataaggttccaaagacttcagtaagatagtttgataatgatttttgacagataaacttaggatttctagataattttttttaagttcttatttgaaattgagtactctgaagtttttgttattgtatctctgacctataggatctattttatttttggatagaatgtattctaggtgtctgtatcttgaactggtacttagtaagaccaacatttatgtaggaatgtacgtgttacatttgtatgttttgataattgcttttcacattctaatgaacatactctccagtgttaattgttatttttgagagtgactgcaattcttcaagaaagctttccagcttttgtagtttttctaataagatgcctgctgcagagtccagtccttagttgtgtgtatttaatgtagttctaaatgtgtaaagtgatgtgtatatgtatatacatatatgtacatatacatgatgtatgtatatatggtagttttagcgagacaatactttctaattatgccaaaagctaagtccgccagcctcctttttc

SEQ ID NO: 87582 - DNA, 1665 bp, Homo sapiens
ctgcaccccagcggcctcgcgaaataaatgagaatgtcttggaatttttgccaatactttctcttccaaagaactcaaactgatttccacgtaattctcactgatttgtgaaatgaaccttcctggactgtaaatttccccgcaaagagagggccagggccccgggtcgttttatactggccggggcacccagcagatggcgctatgttagtggccaccagctggctgccccgtcccccgagctcaccgcctccgccgaaagcttcccggccctccctcgctcacttctctctccccctcccaaccgagcccgggcccacgtgacctcaaggcggccaatgggtgagcagagagggcgagctggtccctgtggccgccattaaagcgaagggaaaacccgtgaattcggattaaagggggaaaaacaccgcccgctgggcccacaaaatgggggagactacggcgtccagccggtgaggccacaggagggcaaactttaggccggcttggcccaggaacgacacgaagacagagccagagaatggtctgagcccgcagacgccgccaccacctccgccgctgaggagactctgggcttaaggacatcgccgctgccgcgccgggggcctgggcttctctcccggttctcgcccttcccgctcctgtgcgggcgcctctccgcccgggagaaccgtcctgggcttgggctctgccgtctcggacttgattttgattatttattgtgtaatttattatttttcttgtggtaggggcacacatcccctccgtcccccagagagggacgagcgtctgcgggatccgcagtccggcccgccaggcgagcgcggcgcggccctcccgcctccggccctcggccccgggcggctgggtgccggccgggcggcgggggctgctcgcggcggcggcggcggcggcggcggcgggggggtgggtggggagggcgggcgcccggcggcctcctcttccaccgcccccccaaccactaccccccccccggccctccccggtgtctgtgtttctctctctggtcggaggcggcggtaatggcggatggtgggttgtggcgccggcggcggctgctgtgagggacgatgagtgcctccttcgtgccgaacggggccagcctggaagattgtcactgtaacctcttctgcctggtgagtgccggggccggcgggcgccgagggaggggggccgcgaggtgcgcccttgggccgtgggggagggggccgggtctggtccagatgcccgagttcccgggcgaggcccagccggagccggcgccctgcgaagctccgcggccagccccgggaggcggcgttcgctctcctacggtcccgggctctgtttaggggagtgttggcattttttctcgtcttgtttcggactctccttctcaccgtagtctcgtcctcaacttgagctccttatctggcaggacagtaacctttccctcttgtcttgcttaactgttgcttttctccttattggccctgtatccctgcttcacactttacattattgcccctgctccccaccgcctttatgtcttacccttttaatttggtttccccatgtaaacaggaccccagaacttaagccctagaaacctgtcttggttttacattttttttgtatgagtca

SEQ ID NO: 87583 - DNA, 1048 bp, Homo sapiens
tataatcccaactactcaagaggctgtggcaggaggatcgcttgaacctggggggcggaggttgcagtgagctgagattgcgccactgaactcctgcctgggcgacagagagagactctgtctcaaaaaaatttaaaaataataatattttacagtgcttgtaaagagaatatgttaatgggaagagagtggtctgcttgggtctctgatagctgcgtcaagtcagtggagccaataccttcaccagaatgtcctgtgtgacaataaaatttgttgtgacaaaataactggcacattgatatatatgtgctagtatgactcatgtgagctggtctctgtgtatactaacaaaatttagtttagcaaagctgaggaccagactttaaatatggaaatcacacgcaagtaccgctacccagactttcccagctgacacttcttcaaattgcaacacacacaagattaacataacagccacagcgataatcaaaatggcaactaacaattgatgagtacttattaaatgtcaggtatacttctaaagctctacatatgaatttcccattgagtcttcacagaaatcccatgaggtaaaataaaaaacagaagcaaacacagattatgtaatatgttctaggtcacatgttaatgagtgatggagactaaatttaacctaggtaagctgtctgcatttttagccacacctggggagggaggagcgccacactaattttgtagaatacacacacacacacacacacacacacacacacacacacacacacacacatatatgttaaggtggctcatgcctgtaacccaacactttgggaggctgagacagagtctcactctgtcacccaggctggaatgcagtggggcgatcttggctcactgcaacctccgcctcccaggttcaagcgattctcctgcctcagcctcccgagtagctgggattacaggcatgtgccaccacacacagctaattttgtatttttagtagaggtggggtttctccatgttagtcaggctggttgcgaactcccga

SEQ ID NO: 87584 - DNA, 1213 bp, Homo sapiens
cactccgaaaagcccctgaccgccggccacgagtcaagctgccctacccgaggcactctccaaggggagagaaactcctaggccagcgactcaccctgcccgcagccaggacgtgaggcccctaagctgcccgtttgattttctcagggacaatgtggagtggtcggaagagcaagccgcggcggcggagagaaaagtccaggagaacagtatccagcgggtgtgccaggagaaacaaggtgcgcttaaatgggctctcattggtatcaacagccagcgtactgccgaacgcgccctcccggagaggccagggaaccgcggccgcccagatcctttattcctggcctgatgcagatctcaggagtagagcgggacagggaggggatgagcaaggagagaaaagggctgcattgtaacaaaatcttaagtcgtagagggtttttttatatatagttttactttggaggagggtaatgttgtctttaattatgtttagtagatccacgttgatatggctagccaatgacaactgtgtggtcacgcgatcatcttagaacctgtactttttacttgatttgcattttccatgaggagatgttttccattgaagcttcattgaagtgattagattctaaatattgttgggaggggggctagtgactggtgactgtgtgtctattacttgtgtgatggttatgagaatttagggctttagtcaaggaaaggtggatgcagcagagtggagataagtctggccaaagaaaaggaggcccctgcttgagaggtggatgatttcactgcaaaatatccctagatagtaaaactaggactgattgttccagacaattgaagataggactacaaatttagtacccgctgaaagagttctgtacaacaaaaagattccagttacaaaacattcaccctgcatattttgacagcaactagatcaaagcaagttaatagttgaaagggattttgaaaatcatgtggttcaatattctctttttatagttaaagacacttggaccacaggacattaagtgcttttcccagaggtaagcagtcagtagtagcagtagtggaactaaaatcctgtttcttagggagtcttggttgattcagcaggtgagttgtgagttgttaacacacttcttagtggattccaacttccattgtcactgtcctgctcaatttgttaggtttttattct

SEQ ID NO: 87585 - DNA, 1049 bp, Homo sapiens
aaaaagtcccagatcagaagaaattgttgcttctcttctaatacagttacaggaatggagagggtagttaggatggtgcctgtttcttaggcctgggataattctcttcctctgcatttggatggtgttgcagagtctagacctggaaaaatgtctagattggtataatgtaaattcataaatggggactgcgcacgttactggaagctggttctggaactggtcagccttgggattgagtcctatggtgtgatcttagacaatttccttaccctctctgagcagtgagactgctgcctctgcactttatagttatgaggatggagataatgtatgtaaaagggctaagaacagtatctggcacatagttaagcccttaataaatagttgctgtcttcattaccacgcagcactgtgtttaggacaaggttgtcagggtccccttttcatacatttttcagcacagtctattacaaatattttcacaataataatataagctcagtaagaaaatacttcatctacaggaccatttgctagaactcaaaagataaaagcaatccttgcccttttttctagaccacctcgtttctgctaataaaaacccgtgctcttgtcttttaagggttcctgaagtcaacatcaaaatcaacaaatgtcatgagtactgtttagctctggtcactacaccttccctaatacagttaggccagattcttgttgattattatttttctagcttttctagctttagggaattaactctggaaagttctgtgattaatagttcatttctgtctgcaggttggctgtggtgtgggaaacacagtctttccaattttacaaacgaacaagtaagtatgttgtaaaagtttatgatagcaaagaagataaaagtgaaggttggctgggcgcattgcttcacgacagtaatcccagcactttgggaggccaaagcaggattgcttgaggccaggagtgtgagaccagccagggcaatgtagcaagaaaaaaaagtaaaggttttttcaaaacttgctgcatcaaac

SEQ ID NO: 87586 - DNA, 1088 bp, Homo sapiens
ggtgttttgcctttgttcacgacctgtgtgatgaagagaagagttacccagtgcccaagggcagtcttgatattatcattctcatatttgttctttcagcaattgttccagacaagtaagtttgggtcccttggctggtagtgtcacaaaaaggaagctttggtgagggacctttttttttaaaataggttcttgctctgtcagcccaggctggagtgcagtggcacgatcatggctcactgcagccttaacctcttgggcttaaatgatcctccctcctcagcttcccaagtaggtgggaccacaggcacgtgccaccagtcctggccaatttttgtgtttttagcagagatggggttttgccatgttgcccagactggtcttgaattcctgggctcaagcgatcctcccaccttggcctcccaaagtgctgggattataggtgtgagccaccatgcccagcctggcgagggaccttgatattagagttgggctcaaagtaaaaagagttttgtttatgttctgatagacacaaagaagccacaccatttgtagtgatgtgagcatctcagccattttcctaaatttgtcttgatgtccaacttctgttctggcctcgaaacttctgcagtagttggttcttcatttccttgttgtggctcaacattgggaaagaatgggaaatcagtctctaatgagtatgtggggaaattcctattgatagtctcatcacatgccgttttagaactgtgaactgtgggtgtcacagctcttaggtaatgtctcattattggatttttattttattttattttatttttttgagatggagtcttgccctgtcgcctgggctggaatgcaatggcgtgatctaggctcattgcaacctccacctccccggttcacacaattctcctgcctcaacctcccgagtagctgggattacaggcacctgctaccatgcccagctaatttttgtatttttagtagatgcggggtttcaccatgttggccaggctggtcttaaactcctgaccttgtaatctgcttgcctcaaccttgcaaaatgctgggattacaggcatgag

SEQ ID NO: 87587 - DNA, 1586 bp, Homo sapiens
ttcatcctatattcttttgaaattattgtcaatgattcatatttttagtttaaggactacttcctgagtgggaaataaatatctgaagatacttagctagattaaggctgatagaaggaattttctttttgcaggctagttcttgttttgttctttcccctgtgctcaacttttacagaaattatatgaagggtttgaggggtttatttttgctgttaaaatcaaatcagaactagggaagaaaaagtggctgtcatagaagaggacttctgagctgctttaaaacttttcaatatattactgtttgatgcagcacatagtagtctaccacttgtatgctatatttacttgagatttacctgcatttgatctttcagtgaaataattactgtgagttttgttctacagaaaattgcctcctcacattttagtgtttatggtttcacagcctactttttctttttcagcagaaatgatggaagaattgcatagcctggacccacgacggcaggaattattggaggccaggtttactggagtaggtgttagtaaggtgagtaaaatgatgatcatgaacactattcatattctaatttaaacacattttttaaatgattaagagcaatttgggtaggcccttctgatagtttgcaggggagaagatttgggtcttaatttcagtgaacttttagatcctactggtcattccagtagtcatttaacatagtaggtttgaaaatgttctatatgggaatatatgtttcttcttcctttctggtataggagaggtttctcatggttcttgttacaaggaaactaacaggatgtgtgtatagattctatgccatattttgttaaaacttgtcagccattcagaaagaaaattacaaggcattgcatagctttgttacattggactttggaggtagttacatggtagagtattgaaaaattggcctctgtgaagtctgcagactctttactggttgcacccccagactggtttgttgctcttctcattcttccttcttagtttttatttttgttgcaggagcataatattagattaggcccccattaacgggcacgtatgaagttaagcaatgttatagtttcctatgcatgtttatgtacccactggtccacccctctgctctcataggatgattttacaatgtgtaaaatgtttgattttaatacagtatgcaaagtatatttacgatattttatttaaaagctttattggtccaagatcatattacttgggcttgagatgtgtgaacgtatgagctactgaatttttttttttgagacagagttttcctcttgtcgccgaggctggagtgcaatggcgtgatctcggctcactgcagcctccacctcctgggttcaggtgatgattctcctgcctcagcctcctgagtagctgggattacaggtgcccgccaccacgcccagctgatttttgtatttttagtagagatggggtttcaccatgttggccaggctggtctcgaactcctgacctcaggtgatccacctgcctcagcctcccaaagtgctgggatcacaggcaggagccactg

SEQ ID NO: 87588 - DNA, 1001 bp, Homo sapiens
ctcttgcctcagcatcctgagtagctgggattacaggcatgcaccaccatgcctggttaattttttttatttttagtagagacagggtttctccatgttggccaggctgggtctcgaactcctgacctccagtgatctgcctgtcttggtgttccaaagtgctaggattacaggcatgagccaccacgcccaaccagcttgatagtttttgtttattcaacaaatattgagcacctgctgtatgctaggcattgtgcaaggtgttagggctgatgcttgagcacagtacctccacatctgcagtatggggagagagagatgataccgtgatgagatctgtattagagctgtgacaaggtgctgtgggaacacaggatttgttacatattcttaatttctttggccacttaaacagtttacttttgtggcactttagagtggctgtgcccctggacgttgtatactgaagttacatttacaaatgtaaactctctgatctaggtgaagtagcttcaaatagaagtgagcaatatatttgaatactaaattgatctctaaatgacctctgatgtgtctttttaacttgaagattgagcataaggctaatgtccagatctgtctgtttaaatggtccccccacccccgcctcccgtaagtcagtaagtttgtattcaaattttacatagttaagctcactgatctttggattagggttgttgttctgtttttaggttcgtgatggctgtattcaagtatacttttgatggagtagggcataagtgataagaatgagtgacattcaacatgttgctgtctagacccaacttaaagtcatgtaactaaggtatcagaaaactttaatacagtaacctatctgtttaataggaaattctacctttaacatagaaagaagttctctgtacagaaaaagaaatttacctatttccagtttttttgtttgtttttgagagggtctcactctctagcctaggctggagtgc

SEQ ID NO: 87589 - DNA, 1023 bp, Homo sapiens
cgcctgtaatcccagcactttgggaggctaaagcaggcagatcacgaggtcaggagatcgagaccatcctggctaacacggtgaaaccccatctctattaaaaaatacaaaaaattagctgagcttggtggtgggtgcctgtaatcccagctacctgggaggctgaggcaggagaatggctgagcccgggaggcggggcttgcagtgagcctgggcgacagagcaaggctccgtctcaaaaaacaaaacaaaacaaaaaaagaatatcactgtgttgatgacagctttgtttttcaaagatcaaaaaagatttcagcccctgcagctccaaataagagagcagagtgacttccctgtgatggtgccatctagtgggactggttcagcctcttgggctgtctcttgaatttctcctaactattcataacatttttcagtactttttgatgtccatagaaggaagaaagtcagtgccactgtggattctttcctagtggacaagagtgttacaagtagctacagcctttgaactttctggttgttgtaaatcttctgttgtataactttcgagttttttccacctgcaaattagatatacactccattacttagactaaaacaaaatggccaaatctccacatctattacttatatttaagttgctcattacctatatttaggtttttaattttttatttctaattttcttgcatagtgcaaatttttaattttcttgcatagtgtgtttataggtaggtactcagtttctcagcatatttacttcataataatggtaaaacaaaagtcatttattttgggctttgggatgcactatttggtttttgtttaaaagattgacgttttctgtcatgaactgatgaggggaaagtagtaatgtgcacccaaaagtctatagcaggctctctagtctagctgcccctttttaggaggacctggagccatcgtcttagcagttttgaggtgataaggttaaactgggttgtgaacctagtaattttctgg

SEQ ID NO: 87590 - DNA, 1050 bp, Homo sapiens
aagtagggattgagcagaagaagggagcccctgcctctgagagtacttgcctgagacagcctcagcaacagaagtcagggcaggatgagaaacactgaagtcgcattcttcccaggaataaagaaagccctcagggatgggtgcggtggctcacaactgtaatcccagcactttgggaggtcgagacaggcagatcacctgaggtcaggagatcgagaccagcctggccaacatggtgaaaccccatctctactaaaaatacaaaaatcagctgggcgtggtggtgggcacctgtaatcccagctactcgagaggctgaggtgggagaatcacttgaacccaggaggcagaggttgcagtgagccgagatcacgccattgtattccagccggggtgataacagtgaaactctgtctaaaaaaaaaaaaaaaaaaaatcatcaggcttcttcttcagttttgctatcctcttaggattaaaatttatttatttatgatttttttttctttcagggaccacttaatagtgagtcttccaaccagagcttgtgcagcgtcggatccttgagtgataaagaagtagaggtaagaagctatgttcatggcaggacttttcatacttgtacgtttgggccaggtttggtggctcaaggctgtaatcccagcactttgggaggctgaggcgggcagattgcttgaggctgggagttggagaccagcctgggcaacatagtgagaactcgtttctacaaaaaaacttagcagggtgtggtggtacacacctgtggccccagctacttggaggtcggaggatcgtttgcacccgggagaatgaggctgcagtgagctgtgatggcaccactgcactccatcctgggcgacagagtgagacccccatctcacagaaaagatagcactgcttaattaactccctgggtgctgttagactctgtgtaaattgctcccctttgagctgtgtgctctttgcatacgtacagttatgatgtggccctcacgggtttttattataatcatgtgtggatcttacatg

SEQ ID NO: 87591 - DNA, 1175 bp, Homo sapiens
aagataaaattgattgactgattttatttttacaacttttttcgagacatggcctcgctctgtcatgcaggtcagagtgcagtggtgcaatcatagctcattgtaacctgacactcctgaactcaagcagtcctcctgtctcagcctcctgagtagctaggtgccaccgtgcctggctaatttttaaaaatatttttagaggcggggccttgctatgttgcccaggctggtctggaacccaagccatcctcccacctcagcctccaaagtgctgggattacagacatgagccacagtgcctggcgaagactttttgttcatttgcttaactattcacagccctcatgcatgagattttttttttttatttggcatataacctagctgcctgtagatgggtctaagtgtaagtctgtagccacctactttgtactttgcagatctctcctttttggaaaaaagattggatttaaagtagaagtagtgtaacaacagttttctgagaacttaacatatggtggacatttgtcctacatttgtgctctattaaatatcttatgaaggttttgtagcagctctgatttacagatgaataaactcaagctctgatattttaagcagtttgccaaaaattgtgtggatggtttggttctagaccctaatactctttgttatactcagttttaagaggaagacagtgattcaggacttgtctgggccagttatatctgtttatatattcaatattttgtgtatactcgctgtttttcctaacgtgaaaaatttaccaaaatgctaattgtgacttatatggtatttgacagactcccgagaaaaagcagaatgaccagcgaaatcggaaaagaaaagctgaaccatatgaaactagccaaggtagtaataatttcgtatcaacaaaagtactcaattctaatgtacttagatagaattttctaactcatactaaataattagtttgtacacagggattcctgataaaggaggtttgtgtatcttaagggaatatcagactgtttattacagacttgccatttggtatacacctgacagaacagtgttagttcttcggggactcttttgttttccctgttgtaagctaacaatcttcttaaccacaggtttttctttacaccaaatatatattgtacaaaaaa

SEQ ID NO: 87592 - DNA, 1107 bp, Homo sapiens
gttagatcagtgatttgttaatgacagccagctaaaagtgcttcatttacattactgtcctttctgcctactgttcttccgtggcagttgtttagttgaatattggaacccattgggataaatctgtaaacatgatggttataatgccaaatatctttatataatcaaagaaagaaaaaatggcttggctttttttcctcccattctaaggaatagaaagcccagtcttgttgcatccttcttatcttttaaaatctacagataattcattttgtctttgggagcaaaattctcccaaagtgacaagaaaaattacagaatcttaaagctgtgaaaaattcttcctttcactgcttgttcagtcctttattttatggaggaaatagtctgttcttgggctaaggtattttggctcatttgttacaagtaaagctgacacttgggtttatagcaatgtatgtagttactgaatgtatagtacattttagtgaatgatggtttatatgtgtattggaaaaactgtatttactttggtttcattttcagggaaaggcactcctaggggacataaaattagtgattactttgaggtaagttacattttttgaaaaaacaaacaaacaaaacaaaacaaaaaaactctatagtgattttttttaaaaaaccctaaatccttgtgttcatttgaggctttagaaagtaatattttggccaggcgaggtggcttatgcttgtaatcccagcactttgggaggccaagatgggaggatcgcttgaacccatgagttcgaggccaacctgggcaacatggggaaaccctgtctctacaaaaaacagaaaaaattagccaggtgtggtggcacacacttatagtcctggctacttgggaggctgaggtgggaggatcacttgagcctgagaagtcgaggctgcagtgagccatgatctactgcactccagcctgggtgacagtgagaccctgtctccaaaaaaaagaaagaaagaaagaaagtaatgttttgcctttactgtactcttcttccctttctccccatcttcatcagttaatgctgccccatctctcaataagagaaaactgctgctgcc

SEQ ID NO: 87593 - DNA, 1071 bp, Homo sapiens
aaaaacgcttttgctatagggtctttgtacttgttattccctcttccaggaacattcttttctcagataccagcaatctcttcatcaggttgttgctcaaaaatgaccttagctaagcggtctcccttagccaacttctctaaaatagcagtccctcataccttgtcaatttgttcctaactgtactttattttaattctaagttattggcacttgacacacccatgtacatacattttaatatatatttaaatttttttgttgattcatatttatacgtacagaagagtacacattgtaagtctacagttcgcatgaattttcacaaactctacaagcacaagaaatattaccagtgctgcagaagtccccctgagttccctttcagttactaaccccctccctgccgctgtggctagccactagcctgacctctaacaacatagatgaatttttttttgtatcttgtgtaaaagacattcagtgtatactcttgtgtctagctccttttgttgcacgttacttttgtgaggtttatccatttcattgtgtattttataggtcatttattttcattggtgtgttataagtttaattttcatttaataatttatatattttaattttgtactatataattagttaattgcccatcttccgactagattttttttttttgagacggagtttcgcttttgttgcccaggctggagtgcagtggtgcgatcttggttcaccgcaacctccgccttccagtttcaagcgattctcctgcctcagcctcccaagtagctgggactacagacacgcgccaccacgcccagctaatttttgtatttttagtagagacggggtttcaccatgttggccaggatggtctcgatctcttgacctcgtgatccgcccgcctcggcctcccaaagtgttgggattacaggcatgagtcaccgtgcccagcctagaatgttaatctcataagaatggggattttgctttgctttgtttactgctgtctcttgttacataaaggtgtaatttttaaactaatttcccccacttgacatgtaagca

SEQ ID NO: 87594 - DNA, 1008 bp, Homo sapiens
ttggtacttcttttacctgtcttatgttcctaatttcccttagattttgctctggcagatccctaatactttatcaactcttcagtgcttttaatgtttttttgttgttgttgttgttgttgttcgcccatattttatcctatctgtatagtttttttccccccccagggagacgttggttcaaacaggaaaggctgtagcctacatagtgtatttacagaaatgtttttaaatctttcaatccttggcaggtatttattgaatatatggcagaaggtttaattttactgttgcagctcgttctcccatgcagtgagaatgttgtcatcaatgggtatcacaggtgttctggagcctgggtttaaactgttacatttgctggggtaggactctactcatagattcaaaaactaatttctttgtcaggatcattttacttttattttttttgacatgaaaacgttaaagaactattcctgattaaggaaaattatttcctttattcatgcagattatgaaagttcaacaattcagaaatggtgaaatagaaagttccctccaaaagaactgttattagagagtatggtgggcaaatatttctagactttttgagatatacatgtatgtttatataataggttttcttatttccattgtattagtttatttaaccagtatcttgtaagcatttatatctataaatagtgctgcaatgaacatccttatacatacttattaacttacgcatttttcctagataaatcccctaatagtaattcccaggtcagaatatgatcatttaaaaatgtcatcacataaattgctagaaggttattagcagtttgagagtaccaattttttcacaccctgctaataatactgaattttatcattgtaacctttggcataaagaaaaataccttgttttaacttgcatttgttcattagttatgtatattaaacatcatatgtttaatggccttttggatttctcttttaatgcttgtt

SEQ ID NO: 87595 - DNA, 1026 bp, Homo sapiens
tgccaccatgcccagctaatttttgtatttttagtagaggcagggttttgccacgttggccaggctggtctcaaactcctgacctcaagtgatttgcccatcgcggcctcccaaagtgctgggattacaggcatgagccactgtgccccgcccatggtttatatttttaatgtcatgtttaaaaagtcctttaccactagaaaattctaaaagcatttgtttattttttcttcttgtaattttttatatatgataaaaggtaggaatcttcttttccctttttttctaatatctgcacaaacgtcctaccatctttttaataagttcccgctaatatgaaatgcacattaatcacaacttatatatctatattatatagatctgtttctgaattctgtattctgtgccactggtcaatctgtctgcttctgtatctgtatgatactgttttagttaatgtaacattgtagtatgtttcactatccggtcaagtttccctgatactttttctcaaaaattatgtggctgattatgattatttttttaagtgaaccttagaatttattgtgaaattctacaaaaacaactgcccaagaaagcatgagagagaacctagatgaccactataccaccataagactaccccttggaagagaaaaaggccaaacacaaaatttaaaacattaaacttgggttttagagaaatttgatgtttgtagaatctgaacccaggaacatgatattaccgtttaacttagatcatcttttatattcatctgtgaagctgtatagtttttcttcaaaggtgttctgcatgtttcttaagtttgctttcaagtattttacagatttttgtttgctactttgaatctgcttttccttctgttacatgctctgattaaaatcagttggggaagctatcaattttagtgtatttattttgtatttggccatcttactgagctccttttaattgttatagtaatttttccattgatttgcttggtttcctttgtgaatggttat

SEQ ID NO: 87596 - DNA, 1081 bp, Homo sapiens
atgtattatccttttagtatactgtggaacttgttttgcttgcatttattttagatttttgcatctaaatatagtacagcaagaacagaattgagagtgaaataagcttcacctataaagtcacgtgacaggccaggcacggtggctcatgcctgtaatcccagcactttgggaggctgaggcgggcagatcacctgaggtcaggagttcgagaccagcctggccaacatggtgaaaccccgtctctactaaaaatacaaaaaaattagccaggcgtggtggcaggcacctgtaatcccagctacttgggaggctgagacaggagaatcgcttgaacccaggagacagaggttgcatgcagtgagagcagagactctccattgcactccagcctgggcaacaagaatgaaactccatctcaaaaaaaaaagaaaaaagaaaaaagaaaaaaaagtcatgggacaatgtcttaattttcatttacctacaggatagaaataatatttcctgtgtagggttgagggcattatgaagttgatttgtagaattctacaaagtaacatgtaaattcagactctcataaatatagaaccattaaaatataatgtcaaagaatttgagtaagatagtcacatttttagataggttataatacaatgataatgttggtatgctctccataattatttttagagaggcctttttaaataaaccattcatcttatatttgataactgtttttaacccgttgcatgtttgggcagtatcagattatctttctcatgtcatttgtgtgtttctttactgttttccagcgacgagtagaacagcccctctatggtttagatggcagtgctgcaaaggaggcaacggaggagcagtctgctctgccaaccctcatgtcagtgatgctagcaaaacctcggcttgacacagagcagctggcgcaaaggggagctggcctctgcttcacttttgtttcagtgagtacaaagcctaagttaattcatatcctttccattgccctagtgctccttgatgaggttggattaattattttgatagagagatagggacattt

SEQ ID NO: 87597 - DNA, 1031 bp, Homo sapiens
gatgctatagccgtgttgttctcatgtggaaagaggtggcagagactagtaacaaaatgatcatgtatgaagaaggaacatggaaacagtatgaaaaccaaaagtctaaatgctctggtacagttttgtttctctttgcttctcagcagtaccagccagcatataagcttagtagtataaggaaagaaaatagtaaaagggttagtattaatatacaagtgtaaatcagcaaaggaaagcagattcttagaaaagtaggcaaagactgtttttgaaaagaaggcaagtggctaataacatgaaataatgctcaattttggccatagagaagtgcaaaataaaacaagataacatttttgacctagcaaattggcaaggattaataagtttgatagttcttggtgtaggtgatagtttagagatatattcagttttattctgtctataaattgttgaagtcatgtggacaacttggtaatgtatctcaatgttaagtttacatatccttgggtccagaaattccattcccataaaattacacaaagatatttattgaggtattgtttattgttgcaaaaaatctggaagcagtttcccttccagtatttcagaggatatgaccttcgcatcagacctcatctgacgtaattcattagcaactattgatcacttctttcttctctaagcatacggtctttcactcggcttccactcttgatttttcctcacattctctatctctgaacattagagtgttccagggctctgtcttcagactcatttatctaccttcattttcttcttaacctccctctctttttttttttttttttttcaattgagacagggtctcactctgttgcccaggctggagtgcagtggtgcaatctcagctcactccaacctccatctcctgggctcaagcgatttccccacctcagcctcccaagtagctgggagtacaggcgttggctaccacgcctggctgatttttgtttttagtagagacagagtattgccatgttggccag

SEQ ID NO: 87598 - DNA, 1517 bp, Homo sapiens
ccacagccttctacatctcaataactgtcaacttttctccttctaattgttacagctaaaatccttggagtcattcttgtctttctcttctttttatattatatgccaaatccaaatctatcagtaaagcttattgattttaccttcaaaatatgttcagaatttttttttttttttttttttttgagacagagtcttgcgttgttacccaggctggagtgcaatctgggctcactgcaacttccacctcccaggttcaagccggttctcctgcctcagcctcccaagtaactgggattacaggcgcgtaccaccatacccagctgatttttgtatttttagtagagatagggtttcaccatgttggccaggctggtcttgaactcctaacctcaggtgatccacccgccttggcctcccaaagtgctgggattacaggcatgagccactgcatctggcctgtgttcagaattttaccacttctaattctcttcactactgccactccaacttaaaccattgtctcccactgagataactggacccattgctttgatctttgttttcttttaatctgttcttaacaaagcagagtgattgtgttgaaacgtaagtccagtcatgccactcccctgtcgaaaagtccttaaagtggccctgcatggtttgttttcctccaccctgacatgttttactaccatctacctttctcatcagattccatgcacgctagccaccttgttttctcaaatactctctctcagtgatgctctcacctcggggcctttgcgttggctgttgcctttgccctaacattcttcacccatatatcatcatgccctgctctctcagttccctctggtttctgcttatatttaccctattagagaggcctaccctggccacactataaaatagcaacttctccccacccatcccacctgttactgagctcctaggccctgcgttgtttttctccttagtctacaccagctgacgtactatgatggacttttgtctgacttccccccactggaatgtaagctccatcaggtcaaggactttgctttgttcacttgtgtatctctaatgcccagaacgggacctgctctaataggcactcagtgtaattatatgttgcatgagttagtaaaagcattctttatagaaggactggttaaatgaatcgtaatatatttgtacagtggaatgctatacagctggcaaaagaagtgaggtagctgtatatacaccaatgaaagatttctaaatatgtgttgataaaaatagcaggtggcagaatattaagaatttgatcttttaaatgtttaaaattattacataattctatgttttaacataggaaatttgaggttttatttttaagagagaggtctcgctatgttgcccaggctggggtacggtggctatttacaggtgcaatcatagcattatagcatactatagccttggaacttctgggttcaagcaattctcttgcctcagtttccagagta

SEQ ID NO: 87599 - DNA, 1002 bp, Homo sapiens
taaggattaccattttaatgtcaaataatgtgttccttatttaatcttatttatttattggtggagacagggtcccactgtgttgcctaggctggtcttgaaccatcctcctaccttggcctctcaaagtgtggggattagaggcttgagccactgtacctggccttatttaatcaactttaagtaagatctgtttactcctcgttatgaaagacaaatttaacataactttcacccagtctttctttctttttcagttgtttagttattgttacagtatgagtgtttgatatttagtttgttattttaactacaattgagtcttttctgctttgtaaattattctaagacttgaaaagaaggaacatttacaatattatgattgtttcattgtttggcattgcaaaaccaaatgattttattggactcactgaaaagaagagagacattgaattagtttagattgaaacagttctggttgtcaaggtctactggatctttttttcccttaatggcaagtctgttgtttccttaaaacttgtgtcttttaacattatgcagatgttcttcaaaacttgattttttaaaaaggtagtttgctttttttatgccaaagtattttaaaatacaattcagaaatcttgacctcctatctctaaatagttaaataggcatttttaaaaaacatgttaacattttgctagatagcgaaattagcattataacatgtctattagcatctataaaatagaactttcttatcatctgtgcctgttgctctacactgacatacatttctagaaagacaggctaaatgcttagttctttccttttaattactaatgaggcttttaaatttttttttaacttttaaagtagggagttgtttgatagctgtgacaaatagctttctctttgattatcatggcttcatggattttcatgggtgtacatcagtaaatagaatcgttcttttttggtgccagttggtcacggctttat

SEQ ID NO: 87600 - DNA, 1019 bp, Homo sapiens
acagtcctttacatgcatcccctgtgcattggatgcttcactagccttttctgactaaagcatatgaaaatacaagtgaaaaaggcaagttattacaggaataacttttcattttctctaattttcatattttaaaaattcatttgtaagcatttgatactttaaacctgtttacaggaacttggtataaaccaccatgtccagccctttgtctcatatttgaattgttttactttcttcttggccacgtggccctgacttctcactttcataagaaggggtttgtattgtggagatacaaattatggagttgtttgcattaatacaagtgtttgtggaaaaagatgccaaactttcctgtgattggtaatgcacctttattgtaggctcagcaaaacagtccctcatctacgggatctggcaacacagagcattcctgcagctcccaaaaacagatctccatccagcacagacagacccaggtaggttggtgatcgataatcaattgaggggcatacctgctgtgtaggaataagggctaacctgtgtagtctgtcattcttctctgacttctctgtatttctctgaccacctcattatttgtgtgtattatattcataacttgcattatgggtatttaaagtcctttggaaggtgctttaactttttgaggcttttctttactcttccggtgtattgtagcagaaatgcttatgctaaagcatggtgttaaggaaactgcacaccttttttttttttttttccctacagtattccacagaagaaaagtacctacgctttgaaggcctctaagttcagattctggcctgggcctcagtttttcttagtacaaatcatctgtgaaaatatggttgattctcatgatctcagacagtgtatacaaaatgtttattagtagtgtacttgtagtaggctttcaataaatgttaattctctaatttatgaaagtagttaatgtattccttttcctgcttacttatttatacctggctaaactt

SEQ ID NO: 87601 - DNA, 1050 bp, Homo sapiens
aactccctggagcacatttgaattttatctaaatcaccagctcttgtacagttcagttagatagttgagcactcaggtagcttcttctcttcccttctgattgctctctgtttccaccagatggcgcatttgttccttagagagttgtgtgtcaagtctcctgtgagatccttttctattcaaagttagtttcatttctggagtaacgtgtttctacattgttcagtgcacagtagtgagaattcatacatttgattccagaattaacatgtgtttgaagtgtaggtgtagtgggacataaggaacccagcagaggacttgaagaatgagatgagacaagcagatttcatttcttaagccatgtgattctaggccatttgtgtgagcaagtgctttttcccacccccccgagaaaggtaatgagaagagtgtgatgacatataacatgttgagactaatcctaaatttgttttacctttgtctctgtagtccgacctcacaatagaaaaaatatctgcactagaaaacagtaagaattctgacttagagaagaaggagggaagaatagatgatttattaagagtaagtattaaaatgtaagagattttatagcaagcaccatttgttatatatatttggattatgtacatatcatagaagtaattactatagccaaataacaatgaaataataaacatttgggtatttttctttaattgagggaatctgagtaggaaccaggttcctgcattctaaacactacctttaaattggaaatcttatactgtagtgttttaatgattgaatttatattggagaaatagatatgtggagtgttatatttcatctagaactgtgggaataagtataaagtgttgttttcccattccagagaagttattttaatattgttgaattttataagctatttcaaaggacttattagcccattttgctttttgtaccttttataacctactcacccaaacttttttgtgcttacaaaagaaacctttaaaatgcttcatctggaattaaatagataccact

SEQ ID NO: 87602 - DNA, 1031 bp, Homo sapiens
ccatgtgtggctaatttttttatatttagtagagatggggtttgaccacgcaggccaggctggtcttgaactcctgacctcaagtcatctgcctgcctcggcctcccaaagtgctaggattgcacgcatgagccacgattcccagctttaacatttttttaattattattttgtgatagcttaggtgtttgtgattacaagagtagctgtaactggttattggcaggagcaaaatatgatcagtagaaaaacatgcccaaattagtaattcaatttatcatttacaaatagatgatatgttatgagagaataaaggaatgaattatttactttttctaagacatagttacttcttacctgtttgaactttaattttgcttttgataaaacaacatatagaaatgatttttttttctctccctagaaactgcttttccattaatcttcttccttggagctaattaaaaatttttttctcattgaaggccaactgtgatttgagacggcagattgatgaacagcaaaagatgctagagaaatacaaggaacgattaaatagatgtgtgacaatgagcaagaaactccttatagaaaaggttagtgaataatgttggtctaaactctgtatcccaagatactcaatgtgtgtcattgtgtggcttcttattccttacttgagatgaaaatatttaaaagtagagctttttaggaacatgatttgacaattagaattttttccttacatggacaccagaccaaccatccagagtgttaatttgggatatgctttgttgctgtgcattgctttgagtgtgatattgaacagagacagcttgtcctagttgagtttatttggggtattgctctcctatattcttatattcattctatcaattgaagtgagtatcctattactattagaatcattaacaatagttgcatttttgtttcagagatggcatttagaataacttatgtatataataatgtgataattaatgctttgtgcattaaaaaattaaagttgtcat

SEQ ID NO: 87603 - DNA, 1103 bp, Homo sapiens
catcttaaaaaataaaaataagtagaacttaagtcaccaagtgtaatccatacttaaagatgagaaccgaaccagatagataacctgatttttgtaaaaaatgtttccatgtctaaatgtatatgcacaaaacattcctgaaaacttatgtaagaaacttaatagtggttattacatctcaggagtgggcatggagaggagggaggaggagggtagggaacttttacttttcttactgaactcctctgtatggtttgaattttattattttctatgggctcatttttatgattaaaattcttaaagaaatctttcaatgcaaagcaccttcctttagcctttcataagataaatgtctgctattgtttttgaaataagatcccgaaaaggtaaagttccccctattttgtgctatttctttccttttcgctttaggaggaagcagagatccaggcagagctggagagactagaaagggttagaaatctacatatcagggaactaaaaaggatacataatgaagataattcacagtaagctacttcagggcatattgggttggagattgctaagcattttatgatatgaattgaatggtctagaataatgtgtttgcttaatgtaagttacataaatgattccatggtgtatttagctcttttgtagcatctaatacaattttgtgaacaaaattatgatttgccttggtttaaatatacaattgtattaaatttatatattaagtatatatgtgtatacatatagcatttttacatgaataaagattactaaaacaatatggctttgtaattgtaaatggttgagatatgttgcatattcagattttcctacagagccttaagaaagggaagatgggtcacagtgtggtgttgtggaaagagtattgggttgagatgacactcggtttctgaatgacctttaagggctattcaggtgttgagattttaagtaagactcttaagttcagtacattaattgtagatgaattgaaactgggaaaagtaggttgaaagtagaaaggggtttttataagtaatctgttttttccccatattttttggaccctgaaacattttttcata

SEQ ID NO: 87604 - DNA, 1036 bp, Homo sapiens
acttgtcatttctttatcatattattaagaaaatacccaaggtagagtctaatatggggaacacagttatatctgtcttaaagagagaataatgaatgcacatagaacatgtgactcactttaaaatcaaatctgtttttaaggaaatagcaagtgtcttggaattttactgtatgtagttttgaaatggtgggaacatgtggcccttgaatagtttggaggagccaaatagcacaatctaaaaatctctaatctaccctccctcattgtatagcagggcagaaaaaaggaggaggagcaagaaaggtctagtgtagctacactgagaccagcacccaagtcctgtggctctatagctggtgctgttcattgtaattacactgcctctttgaactgtgtaactttatactcagtatttgccatgttgatgttgattgtcaaactaccaacagcagctataattatatgtataatgtgttagatattctgggaattttgcaagcgtggaagactgtagtccatgatctcagggtgttacatgttccctgtttccacagatttaaagatcatccaacgctaaatgacagatatttgttgttacatcttttgggtagaggaggtttcagtgaagtttacaaggtaagtataaggaactggatacaaagactgggggttaaattatcggctcctaccaacttggagaacattaagaatactgataattgtaggttgatatccattggttgaaattcaaaaactttaaaaacctgtatctttgggaaaacagctttcaataaacctaagtgaccaagcagaatacagtattgccattttcaagtttgaaaaataaataattatagatttaaaaaacaagaaggaaatatactgggtcgtggaattatgatttttattctggttctgtacttcctgcctcatacatatttgttagaaaaaagtatgtgctatctttctttcttttacagaatagatgtgtcaaacctgtttccaataagaataggtttttttccattggaaa

SEQ ID NO: 87605 - DNA, 1478 bp, Homo sapiens
tcacgcctgtaatcccagcactttgggaggccgaagcggggcggatcgcctgaggtcaggagaccagcctgaccaacatggtgaaaccccatctctactaaaaatacaaaaattagccgggcgtgatggtgcgtgcctgtaatcccagctactcaggaagctgaggcaggagaatcacttgaacccgagagacagaggttgcagtgagccaagattgcaccgttgcactccagcctgggcgacagagcgagactccgtctcaaaaacaacaacaacaaaaccacttttcatttacccagcatatagagatgggactaaaggcagggctgttttttgttcttgtttctctttttattttaataaacaatatgccaaattacagggtggttttgtaaacaatcataccaaagaagtatattgtgaggggttattttctccaggaggcaggcagtgtgtgtccctggaatttcaaaagtgacaggatgtttgaagcttgtaaagtcccagtgtcaactgaaggataagagacaacctaaggcagacgggtcccagacaggaatagatggtgtccagaaagagaatggttgggaaatgattctgaaggcaggggctatctttctgtttgtggtgttggcctggttttatgttctaaatcccttggtgccagtgtgtctggagacttctaaattatctaatcacaagtttcaagaaggtgcttgcaacactgatataagtatgtgatgtatttaataatgtattttggactttgattatgttatatgttaaattaaagcttcacatcagttacctgtaatttttcttaacatttacccagtatataatttattctctttataggcatttgatctaacagagcaaagatacgtagctgtgaaaattcaccagttaaataaaaactggagagatgagaaaaaggagaattaccacaagtaagtgatacttgagtgtctgactttttaaaattaaataatacctgtagtttgagcattatgctacaagctttacgtgcattgttgttggttttgttttatgtaatcttcataactgccctgagagaataaatacattctcagtgttacgacgaggaaactgatgcttacagaattggagtaacaggaagtggctgagctggtatttaaatccagactttcctgaatccaaagccctaggtactcttaaccttcccttcctttgtggctagaaatagctatagtaaataaagccttagaaatcatttttgctggccgggcacggtggctcacacctgtaatcccagcactttgggaggctgaggcaggcagatcacgaagtcaggagatcgagaccatcctggctaacacggtgaaaccccgtctctactaaaaatacaaaaaattagttgggcgtggtggcaggcatctgtagtcccagctactcgggaggctgaggtaggagaatggcgtgaactcgggaggcag

SEQ ID NO: 87606 - DNA, 1416 bp, Homo sapiens
ttacatcaagcacataacggacattgatgagtgctttaaaaattcagtattaaactaaaaagtagtacacttcagtgttgtgacattataaaatatgaaaatgctataaccctgctagtaaggtctgttaattgcgtttccattcatggggatgacttcccagtcccatctggaatcaagacatttattctggtaaaaaagaaggcagatttcaaaagaaaataaaaggtgtttgttttgttgtattttgaattttgttctgtcacttcattcctctcctcctcctaccataagcaaacaaaaagtaaactgattgttttatttatattataaaaacaaattttattaaaaatttttattttaaaaatttagtattacgactgctttaactccctcaaataacatattaaaaattctgccgtaggaaaaatttcacttaaaattatttgcagaagtaatttgtatcggagttagtatgcttttgtatgatactctattctaattttttaaagataaaagtaagcattttgaaaaatctaaatatatgttaacttataagagagtaaaagacattttggtggatgagtttcttccagtttctcattaaattctctgtatttgtagtgcatggatctcttggattataagttgaaagttgaacatggctcagtcattgccttgctgatgaagtaagagatgcggttttagagctgggcacaggttcagcgacactctgcaaattcccttaattggcgagaactttgaatgacattttgattcttaaatttttgctgccttttgtttcctgtgttttctgtacctcaacaagagaaattggtttctgctgtaaaatgcacaaaatcaagaagttaaaaccaaagggtagagcgctatacatttatagcatgctagagtgaaaaataacttagaacagtgatctgtttagtccctagatttttaaactttttgtttgttttttgtttttttgagacagagtctcactctgttgcccagactggagtgcagtggcgcgatctccactcactgcaagctccgcctcctgggttcacgccattctcctgcctcagcctcccgagtagctgggactacatgtgcctgccaccaagcctggctaacttttttgtatttttagtagagacggggtttcaccgtgttagccaggatggtctcgatctcctgacctcgtgatccatccgcctcagcctcccaaagtgctgggattacaggcatgagccaccgtgcccggcctttaaccttgaaaaaaaaaacaaaaaaaacaaacagcagcaccggctgggcacggtggctcacgcctgtaatcccagcactttgggaggcggaggtgggtggattgcctgaggtcaggagttcaagaccagcctgaccaacatggtg

SEQ ID NO: 87607 - DNA, 1597 bp, Homo sapiens
ctacctcagcctcccgagtagctgggaccacaggtgcgcaccactacgcccagctaagttttatatttttagtagagacggggtttcaccatgttggccaggatggtctccatctcttgacctcgtgatccacctgcctcggcctcccaaagtgctgggattacaggcgtgagccactacgcccagccagagcacctattattttctcaatggcttggtagattccagtggagaaaataggatgagcaaagagaaaagtcagatgagggaccagatggacctgaatggaattaacatgtggagacaatagagaaatgattgaatatttaggaggatctttgaagagttctaaaaggcaggccaatataccttcttgttaattttcccttttgtttacaggcatgcatgtagggaataccggattcataaagagctggatcatcccagaatagttaagctgtatgattacttttcactggatactgactcgtaagtgctgtgctgttttaccttaacagttatattattttcttgcaatgctgattgttcatggaatagagctgaactctgggtccaggacataccctctgagggaaccaagtaatttgtgacaaatgatcaaacataaattcagatttggatcagcaagaaacctctaggccaaaggacatgtgcacttgtgtgccagtaaatgtttaacagccagcttggtatgaagagagacagggctaatttatagtgtttgccagtttccgtggtgtagatattcctcctgtgtctaattttgatgtaccacctgtttatttttgtttttttttaaacatcttaattataattcacatactgtatgattcacacatgtaaaatatacagtttagtggtttgtagcatattcatagatacatgcaaccaccagaggcaattttagaattttttcaccatctcaaaccccatcataccttttactactattcatctattccaccattccatccctctgccctagccctaatctgtctgttttatctttatagatttcctattctggaccctcatatgcatggaatcatatagtatgtggacttttattactggcttctttcacttaccatggtgttgtcaaatttcatccttgtagcctgtgtcagtacttcattcctttttatggcaaaataatattccattgtgtggatataccacattttgcttataacggtttgataaccagctcacaaaattcttgaaaatttaagtcagctcttggaaactggcatgagttggtgccagcatgccactgacgtgcactagtgagtgtagactgttcaagagagtttctgctcaccccagagactcttatgaacattgacagacctttttaaaaagtactggccgtgtgattttatcctagactgagataagaaatgtggcactaatgaagacaaggctcagtgctacatgttgaaatacaggctcataggcttataggatgttagaataggaagggatctcagagtccagccttttcattttataggtggattttgaggaccagagaagttaaataacttgtctgagatagttattaattgtgggcatt

SEQ ID NO: 87608 - DNA, 1232 bp, Homo sapiens
ctcccttctggcctgcttgcctgagggtgctaatggcttcctgctgtagatgatctctagggtgcctcactgaccagtttgtcttctcagctcttccatcatctgtatgatcagttccctgaattaaagtctctctgttttaaatgttcaggtggtttttttttccaggctaaactgactgatacacccacattgtcacaacttagaaaacttcaaaacgtattcatccctcaggaatattcaaacagttcaggacaccttacttcagagtataatgccttggaagatagacacgtgacctgtgatgccaccaatggcatatggttttatgtatgggtctgtatgacatattgacataagggaaggaaagagaacccacatacttttgttagaaccatagatactatactttacaagctcttttacaccttgtgtttaagagaaattgtagtgcagtattgtgccaagctgtcagaagacgtagtatgcagtcagtttttgggacgtgggcaaactctagattcttactcattgccagcactcagggttatataaaatgtttgcagtgcgaattgtgtacctagccaaaattgcgccactgcactccagcctaggcagcagagtgagacggagtctcaaaaaaaaaaagagagaattgtgtacttgatcacattctggttgtttagacgtggatgtgtggcatgggtgtgtaaaggagccccttccaagaagatacctagcttaaatacattatagttcttatcagtattcttatagtctagactcaagaagaggtctgccatgggtgaacttgagcacaacagattccaacattgagggtgtggaaactcttcaagagaataagcagtttcttaccagaaacccctcagctaatactgaataaacaattgaagagtattttaaggaacaaagaagaaaggagtgagaagctgatgacctgaagttttcacatgggactaatttaggtagtgttaatctgcttgctcttattccatggttaaatattggtttatttgtctttaggttttgtacagtattagaatactgtgagggaaatgatctggacttctacctgaaacagcacaaattaatgtcggagaaagaggcccggtccattatcatgcagattgtgaatgctttaaagtacttaaatgaaataaaacctcccatcatacactatgacctcaaaccaggtatgtctaacttttagg

SEQ ID NO: 87609 - DNA, 2375 bp, Homo sapiens
ccttctggtgttgcaaaattgtaaactttgctttactcttctggtaggtgcatattgcgtctcattgactattctctaatgttctaatacaattcagatgactaaaacattaattatgatgaagaaattttttaaaagatggctattttgtgaatgaattttccataactgaattcaacactttcctgcaatgggagctgtaggcggtgctgtggtgctagctttggtttccttacatggtttctttgattcctcccccacaccccaagtgctgttctaaacagggtagtttagagatcctcactgaaagttcagatgaaagtttcccatcagttttgaccaagtgaacaagggtattttactttggccagttatttttatttccagagctcatcatagtggtggttttggcacattaagcaggtgattcttggaaaatagaagtttcagcagatgctgaggactctccctgagtatccagagtccagattgcttgattcccaggatttggatgtttgcttttgcaagagtttgagttcagttgtccccttcttatctgctattactttgggtttttctcttaaatcagtaagtctctgcttattcatgaaggtttttattttttaggtaatattcttttagtaaatggtacagcgtgtggagagataaaaattacagattttggtctttcgaagatcatggatgatgatagctacaattcagtggatggcatggagctaacatcacaaggtgctggtacttattggtaggtatccaggagctctgccaggttggctatagagatgtggctctgctatgctgaagtgttgataatgaattaattgctgtatgctatctgctaggcaaaaatgccataaaccaaagcagactttctccccaaatcattactgtcttttcaacagtttgactcttggtatttatattaatttgtcttaatttttctttcctttcttgaaaatccttaagaaagagagcttatatgtgtccaggtatttgaaatgtatgttttttgtacagagttggccttgcaagtcagtagagaacaaggttgctcatgtgtatataaagaatggccccaaaatctttccgtccaaatacaggtctctcttcatgggttaatgggataagggatttgtctcaagagttgcctgaggatgttggactgtagggagttatgaagatcaggatgaaacataactatagcgcatatgaaatctatacaggaaaaagtgactacaatttaccagaagtttatccatgtctgttagccatgatctaaaagtttttgaggcacatttcttcacatctcttgtcacctgtcttcccctagccacccgcacccaagctacctctgcctgccagttttatgcttctatttctgcctactattacctttggccattagaaccataaaagatacctgaaactcaggcctttaactctatggttgtaaaagtgtgttaataaagcttcctcttccattttgaggtggtcacacaagccacatattggtgtatataaagaatggcccccagttttttttagtccaaatacaagtctctcttcctggcttaatgggatgagggatttgcttcaagagttgcaagagaaggctctatagcaccaacggaggggcaacacatgttatttgtaccctagggaaggtggtcaaatcactttatctttggaactgaaaggtcctaggccttagcagagagtactgactgtctgggaatcagaggtagaggaggaagcagaggggcatggcgttcacaacacagcatcagccctgtgctcatcgtgaagcctgccaataacaccatggacacaatgccccggtttctgttgctccttactgcttgtggaaatggtacctgttgtaaaaagtcagtccctaaattaaaactttgaaattacagatttaaaatagaagctgcatttacaatgtttattcactgtggtggttattgtgggctagtgttcctgtcactaagtgatacaaaaatatctgctgctggaaattctagaaacaggtctatacctctgctatataaattcactggaatttggatttgagctttgtgtttgatctttttttttttaaggcacagtttttttgcatttaaaatagttactgctgtagttgcttacctacaaaaattcagtgattagaatttaagtaaaaattatgtgatgctagggattttgcttcaaagtagtctgttgggagaaatggtggagattggccacatgttgataattcttgaagctggatggtgcttacttagggggtcattttactgttctttctgctttagattatagttgagatttttaataatttaagacagggc

SEQ ID NO: 87610 - DNA, 1121 bp, Homo sapiens
ggaccgcattgatgtccagcagctggcctgtgatccctacttgttgcctcacatccgaaagtcagtctctacaagtagccctgctggagctgctattgcatcaacctctggggcgtccaataacagttcttctaattgagactgactccaaggccacaaactgttcaacacacacaaagtggacaaatggcgttcagcagcgggtttggaacatagcgaatccgaatggatctgatgaaacctgtaccaggtgcttttattttcttgcttttttcccatccatagagcatgacagcatcgattctcattgaggagaaaccttgggcagctccggccaggccttgtaggaaaaggccccgcccgaggttccagcgtcaacggccactgtgtgtggctgctctgagtgaggaaaaaattaaaaagaaaaactggttccatgtactgtgaacttgaaaacttgcagactcaggggggtccctgatgcagtgcttcagatgaagaatgtggacttgaaaatacagactgggctagtccagtgtctatatttaaacttgttcttttcttttaataaagtttaggtaacatctcctgaaaagcttgtagcacaaaggctcagctggggatggtgtttgacttcggaggaaaaaagttgctattgcccgttaaaggcactagagttagtgttttatccctaaataatttcaatttttaaaaacatgcagcttccctctccccttttttatttttgaaagaatacatttggtcataaagtgaaacccgtattagcaagtacgtggcaatgttcattccaatcagatgcagctttctcctccgtctggtctcctgtttgcaattgcttccctcatctcagtagggaaaaaattgagtgggagtactgagatgtgtgggtttttgccattggacaaagaatgaggttagaagactgcagcttggagtctctctaggttttcaactatttcttcacaatttgaacacttgacggttgtcccttttaatttatttgaagtgctatttttttaaataaaggttcatctgtccatgcagtcctcttggattctctgaatgtagtaactatgaagctatgccaaaggtaggcagaa

SEQ ID NO: 87611 - DNA, 1049 bp, Homo sapiens
tgaattttgtgggtgtgtggtggtgtgtgtctgtgtgtgcatgtacacacacactttgtctagctcactttaaaagattcatcaaatggaattttaaaaataatctgaaaagaaatagatatttcaggccgggcctggtggttcacgcctgtaatcccagcactttgggaggccgaggtgggtggatcacgaggtcgggagttcgagatcagtctggtcaacatggtgaaacgccatctctactaaaaatataaaaattagcctggcgtggtggcgtgtgcctctagtcccagctacccgggaggctgaggcaggagaatttctggaacccaggaggcggaggttgcagtgagccgagatggcaccactgcaatccagcctaggcaacagaatgagactctgtctcagaaaaaaaaaaaaaaaaaaaaggagaaatagatgtttcaaatatgaacattcttttggcaccaattttcttttttaatttggttgtttctgagatgtatgatcaactgaagatggagctgaaatgggagacgggtggccccaccgtgcccttgaaacagcagagcactcctcagtagagagggagggagccaagagcctgaacatgtggtcgccagcttggaatgttactgacatatgtggcgagggcttagccagaaatatttaaagatgtagtattccggcctgtgagttgtctgggcagggagggggagtcagaaagggtagagagctctcaaataactcatgactctagtgttcctttcacatgtgaacagtgtcactgatgacacattttctaggaccttcgtttgttttgtggacctgcctcagtctcctcagtatcaggcgatcttaagggaagatggagtgtttcaaattggagagaagttcatgggtaggtatcgtcctgtggaattctgaatgcaaggaagtcaaccccagaggccttggtacccccagctttctaaaactactttattacaatttatatgtatatacacatgcacatataaacgtgtgcatttatgtatgtgtgtatagta

SEQ ID NO: 87612 - DNA, 1048 bp, Homo sapiens
gattagctgtggcagttgtcctaggggtactttaggaagctcactttgtcctgcccagagaggaaccccatccaagtgctgttagaggacagaggggcagggtccctgccccaacctacattcccatggtggtgttttgagcatcagtgacaggagctgtgggtactatgttttaggaaaattaatctggctgttggaacaaggagcagaaagataggctggttgtttgtgattattatctaggcatgaaattcgttcattcatgcatgtgttcatttgttccttcagtatttaagcatcactgtgtgtcaggcagaactgtaggtgctggggttacagtggtggagaagacagaaaacaagagtgtcagatagcgagttctggttctggaagtggcagagtagcttgtgtcagtctaactctctggccaagaatgcttttagactaagggaaaattataaaatatggtgattatggtgatttgaaggcaatgaacagcaattaaaaccagacagaggtagagaggaaaaaatccttgaaagtaaaaagtaaacctggcacatttaaccagcttttccctgaacacactacctggtttgaggagctcatacagaaagtggcagttttaccggttagagcttggggccactagaaaggctaacattgagaggaaatgttaggaaagcaaggagccatagaaattccttctacagattctccttaaatccttggtgactcctgaactgtgcatttgcagggtagggttctaagcagcccagcaagaaacagcagctgggaggtagaggtttcagttgctatctggtgctgaggaaacagagtttaaaatttaagttccaccaagtttgaggggcttagtaatcacctaaggttttcttttgaaatcccagaagggcctcaccttatgattaaatccaaggttaagagccacatctgaagactaaaggcaaaactcaaacaaccccaccctagcaaagcttaaaaccaaacctccacaagagcaaggtaatccactggtaatttaactgcc

SEQ ID NO: 87613 - DNA, 1067 bp, Homo sapiens
gccccttcctgcccccgccttatccgcaccctatcctgactattcccttcctcccaccccatggccccccatgcccagggctctcggcggtactcctgggtctcagaggagccgctgaactacgtgggctggcaggacggggagccgcagcagccggggggctgtacctacgtagatgtggacggggcctggcgcaccaccagctgtgacaccaagctgcagggggctgtgtgtggggttagcagtggtgagtgcccacctgccagggcgggggcatgggcaagctgtcggtggccccggggagggtgctgagccacttcttaatcctgtacccccacagggccccctcctccccgaagaataagctaccatggcagctgtccccagggactggcagactccgcgtggattcccttccgggagcactgctattctttccacatggagctgctgctgggccacaaggaggcgcgacagcgctgccagagaggtgggtgaccaggccagagcccacacatggcgggcaggtggcacctcctctcgtgggcactcagacccatgagtacatccccacactgctctctacccataggcagcacttacacaagatgccctcgtgctctcacatgtggagaccatacatgacactatatgtgcatatgctgcccccccacacacttgcacatgtgcacacacacacacatgaatccacagactccacaccatcctctactcaggctgcagagaagagggctggagcagctctgggggactctgccccccccggagacccatccgccctgacgtgggccttctttgcatccagcgggtggggccgtcctgtctatcctggatgagatggagaatgtgtttgtctgggagcacctgcagagctatgagggccagagtcggggcgcctggctgggcatgaacttcaaccccaaaggtgggtgccctgtgtgtggggtggagaggtcaagcctcaggctgtaaggggctgccctccactttgccctgagccttgtcctggggcttgtcgggggacagggagtcggttctagaacaca

SEQ ID NO: 87614 - DNA, 1018 bp, Homo sapiens
actccaaggaacctcatggactccaaggaaaagctgagcgatcaggcctcaggaagagtgggaaccagcagctgtcactcttggggagggatgtggtagagaaaagagacagaaacacctagaagggtgtgcatgcatgggcaatgattagattctttgatacaggaagacaaagaggaaaatatagaagaggaatagaaggtggggaaagaagtacaataataggaatcaaagagaaatggaagagatgcataacctgaggagtcatgacatgtcatcacaatggcttcagcaagcagtcagcagctcactggtgctaggcatttgctgtccctgacatagaaccaacctgcataatacacagaggttgcaaataccaagcccttctgatttacctgaattggtcattctggtttacatggaattatggactattttcaaaaagacaaagttgtattggttgacaggatgtgcatggtctcaatgaagatcttgatgaaaaagtctgggtgactttttatacttaagctttaacagaaataattcataattgtattttgggggcttggatatggacatcagtttgtttcaccaggcttatttttacatttgtggtagacattcttcgtcccaagatatatgtcttaaactttaataaactcattctgaaattccacttcaatttttgtcagaaatgtttcttcaatatgcatgacttttggccagccgtggtggctcacacctgtaatcccagcactttgggaggccaaggcaggtggatcacttgagaccaggagttcaagaccagcctggccaatatggtgaaaccccatctctactaaaagcacacaaattagccaggtgtggtggcaggtgcctgtaatcccagctacttgggaggctgaggcatgagaatcacttgaacccaggaggcagaggtcacagtgagctgagattgcgccactgcaccccagcctgggcaacagagtgagactccatctaaaaaaaaaaaaaaaaa

SEQ ID NO: 87615 - DNA, 1016 bp, Homo sapiens
tataatagttattttcttctcttagccaaattgcttctgccattctttttcaacagaaacctttccttattgtgctgcgaattgcatatctcatgtaaccaaacacttccctttttatatacatttgttgatatgggaattcaatataatctactgcttatggctaaaacttattcagcatatatgcttacgtaatttaatatatttaataaattgtcatacactcagactatgctttgtatttgtattggttactggttggtagttcattttagcatacttcacttgtaaaacttaatttggtttgcaaattaggattttactaacattgttaaacattaatagattatttccctcttccatcatgaattcttgactgtcccacgctagctctgttttttcttcttttccccataactgcctttgctctttatttcttaagtgagtatgaattattttgaatggagagggaaggagaccctagaaaggagtatactaatccagtcatttcaaaggggactattagggtagttggtactgattgaatatatggtagaacaagtgtgcataaaagaaatgcatgaaaatcctctccttgtcatatttcttccttttacagtagaattaaaatgagatctgagacactctgattgggcacactagctgaatattgttggattgaacttacccagaatcaccaatgttagctgggatatttttgctgacagtacaatatgcagattttaattcagggagctagaacaagctgttgcagagggctgtttactcttctagtactagtctaatcaaggcaccaaatattataaaatagtttggaagctagttcaattatttggactttttttttctttctgaatgacttgagactcagcattgttatatttgcttaatgtgcctgtagtcatcaaatgctgtgattattttgagggaaaggcactctgtaaatatactatacaaataaatagtttagacttcgttgtaataccgtgagaata

SEQ ID NO: 87616 - DNA, 1056 bp, Homo sapiens
actcctccaggtgggcttgggcatgatgttctctatctattctccccttgcacttggtgtatatagtagttgccgcatttttttttttttttttacacggcgtctcactctgttgcctaggctagagtgtaatggcggccatcttgactcactgcaacttctgtctcctgggttcaagtgattctcctgcctcagcctcctgagtagctgggatcacaggcatgtgccaccatgcccagctaattttgttatatttttagcagagatggggttttgccatgttggccagcctggtcttgaacttctgacctcgaatgatcggcccgtctcagcctcccagagtgctgggattacgggcatgagccaccatacccggccgtaacatattttaaatatttaatatgactggttcatcactaatgtgtgagcttttaagcaggcactgtgacttttcatcttttcagcatcagtatagttagtacatagtaggtgctcattatctacttattgagtgaggattgttgaccgttatctcagttatgcctttgaaacctcatctcttattgtggaattagaggaaactttaggcaccaggaggtaggtttagagaaatatacacaccatctaaaatattactcagagtaagtcctggactgtaactaaaactaaccctaaagataaaccagattttgttcttttttatgtttgctggtggcaagaggaagatgagaagattctctgaactttagccaaatgattttctttgtacaatgcaagagttgccaaactatagcccatagaccaaatccagcccattgtctgtttttgtatgacctgcaaactaagaatggtttttacaattttaagcagttgaaaagatatcaaaggaggaatgatacttcatgacatatgaaaattaaaggagattcaaatttcattgtccataaagaaagttccattggaacttagccatattcacttatttacatattgggtattgggtgcagcagcagagttgactactagttgctgtcgagaccatacggcctgcaaagc

SEQ ID NO: 87617 - DNA, 1072 bp, Homo sapiens
tggctaggaagataagggcttgtcttacaaggttggttggttcagatttgcctcaactccccatctcgggtgataagaatatttcttttctccaggtacaggaaggacagcttttacattggagtttcatctccacttttcaggaagaaaaaggaaagtcagagtgcccttcttggatctgctggttttcaagtgcctttagttcaaaataatccttatgccaaagttacatgttttggggtagcatattctgccatctttcatatggtaactccatggctcaataactttctactgaaatgtcttttataaaactacttcatatgttctcaggccagtgttgttgttaaaagaaaaaaagggaaaaaggaaaacaattacttcatgtagtcagtaggatatatcagtgaaataatattgataaaaagatatatgataaagatataatactaattttatttatacaaaaaatggttttactattttacaggagcctatggtattgaagtatccttatgtatttgaagatttaaacttggaaaaaaatactttgttcatctcttcatacagttgattcagattcagcatacatttattaaatgtttattatgcaccatgttaagtactttaaccagagttatcctcatatattacacagcctacgttagcttgaaatgtgtataaaaatttgaaaattttgggattatttcctttttgttcactaaagattttatttttggactccatagttttgattaggaaagaacttggtaaataatatttataattattgtaaagctgcttagccagtagtctgtgccagaccaagagtgttacttggaacagaaatatctcttatccattttgtatccttggtctatagcataatgttttataatacatatttgttaaatggcataaattttctgagaaagtcataattattctggtcttatgttttgtgatttaaaaaaattagatataactagttttcaatcattttgaaataatttacaaaccctttagaacagtgctgttcagtacaactttctctgatgataggtatatttta

SEQ ID NO: 87618 - DNA, 1048 bp, Homo sapiens
cacttcgaagatcttaaatgacatggttcttgactgcaaagctgaggactgggccccaaactataggattttagtatcagaggcctgcctgggaaaccaaccagcagatcatcccagaagatagatttctatgattgttcttgaccaggggaattctcttctggaataggagtggatgggagatttgctcctatttaatttctttcctaaatgtataattttaatgacataaatcttttttgtacctgaaagaggtcaggtttttccaaactcaagtattagaaacatatttgtctacttttttgttgtcacctttcatcctaaccacagaaggcttggctggggaatgttctttgggagaaagagaatattgaagaaaaaatgatttttttcaaagtaaagcctggctatactatttgcttcaaaaatttacatcacacttcatgatcttagctctggtattattcatatactagtcactatagtcacttctttactcagaatattgtgttactttgctgttctactttgtttccattttaaaaaatggtcagaccattcagttttcctttctgttaagcttccagtggattcatgctctaaggatgaggtattattagatacttctttccttcctttctgtgttatttttccatccctgattatagggtgagcacttaatgtggaccaagtagagtattgggggacacagcttacttagaaataaaagagatagtctttgccagattatactgcctgtaataaataaaccagtattactaaaatatagtatgagaagtattgtgatgaaccttctacatggagtactaagggagttccaagggaaggactcaatctcagactggagggaaatggaacaattcttggaggaggtggtgactatcaccaagcctacatagcagttagccactttgagaaatggggaagaggatgtttcaggcacagagtacagcaagtgtaaagacgaagttgtgagaaaacttgacacattttgtgaactatatataggtagtttggtactgtggtg

SEQ ID NO: 87619 - DNA, 1067 bp, Homo sapiens
gtgccaccatatccaactaatttttttttttttttttttttgagacagagtctcgctctgtcgcccaggctggagtgtagtggtgcgaactcagctcactgctgcaagctctgcctcccgggttcacaccatactcctgcctcagcctcctgagtagctaggactacaggcgcccaccaccacgcccggctaatttttgtatttttagtagagatggggtttcaccatgttagccagggatggtctcgatctcctgaccccgtgatccgcccaccccagcctcccaaagtgctgggattacaggagtgagccaccacacccggccctccaactaatttttttaaaacatttttatagagatgaagtctcatgttgcctaggctgatctcaaacttgggctcaagcagtcctcccaccttggcctccccaagtgctgggattacaggtatgagctgtggctcccagtctgagttgctcttctgaaatgcactttatttggaaaatatatacgtcagtgatatgactaggttattttaatttacacaattagcaaaagaagatttttgttattttgtcattataccattcaatttctattccttcttccatttttgagactttgcctatctgtttatacaagtgcctttgcccaatgtttagaaagcctttaaatagggagaattaatatgttaagggataatgaaagggttaatcatttgtattaacagttatatatgtcattaataacaagattttgcttccgtcatctataacggatcaaataaatattcacattttaactattgctctgcaagtaaataaaataggaattttaaattttatgtatatttaataattgtgtacattataagttaatgcttctttatgactatcctcacacatgtatgtatagaaacaaaggattttatatatccattatctctgaaactataatttttattaacagtagcaaagaggccgggtgccatggctcacacctgtaattccagcactttgtgaggctgagatgggaagatcccttgaggccaggagttcaagactagcct

SEQ ID NO: 87620 - DNA, 1062 bp, Homo sapiens
aaaaacatggtctatcagaaaaaaaattgacaaattgacctcaccaaaatttgacatttttatatttcctaatataccagtaagaaaacaaaaagacaagcaacagactgaagtatttgcaaatacatgtctgatgtgacttgtatccagaatatacaacaagttcgtacaaatccaaagaaaataacccaatatgaaaatgtgctaaagtttgaatagatatttcactaaagaataaatgaatagataacaatacacaaaataagctcaacattagcagtcattaggaaaatgcaaattaaaacctcatgagatatcatttcacaccagctaaaggtaagacagtaacaaaggagatgtagagaaacaggaatccttgtacactgccggtgggaatgcaaaacagtacagctacttttagaaaaacatttttgcatttcttaaaaagttaaatataagcttaccataagattcagcaattctactcctaggtatctatctatccaagagaaatgaaaacatatgtctacccaaacacttgcaaacaaatgttcacagcagcactattcacaatagaccaaaattggaaacaatgtctatcaaatggtaaatgaatagacataatatggtacagtcatacagtggaatcctacttgaaataaaaaggaagaaactactgatatatatacgtcataaacctcaaaaacattatgctgagtgaaagaagccagatacaagagacgacataccatatgactccatttatgtgacatttccagaaaatacaaatatatagactctgtcaattagtggttgcctgggaactgggagagggaatgggattaatgttaaatagatgcagaaatctttctgaggtaatgaaaatgtcctaaagctgattcatggtgagggttacacaacttgctacatttactaaacattactgaattgtacacttgaaatgggtgaattttataatatataaaataagactcaatatacttgtttttaaaaaaatttttttaaaaatccacacacagactgctgctttagaaaaaaaaa

SEQ ID NO: 87621 - DNA, 1050 bp, Homo sapiens
ttgcttgtctttttgttttcttactggtatattaggaaatataaaaatgtcaaattttggtgaggtcaatttgtcaattttttttctgatagaccatgtttttcatgtcactttcctctttatctttttaatagaaaacatactgtttatatcatgtattataaaactgatttctttacgacattggggtttgttttaactcaagtattggaaaatacttcctgaaatacttaatattttttccctcttgtccctcctcttcccctactcatgttaaaaaaaaaatagaaacaattacatcatcctaaattgttacatctgtagactagaccttaattgttacatctgtagactagaccttaattgtgaatgatttttttatttaccacaattgtcttcccataatgttagtctttctggctagcagagtgctttagattcttaagcagtacttatcactcatccttaaaggaagggtaaaaggtaaatataccatcagagatcagatagctctgtcctggagaacaagattatatgctactggagtagtacatattgactgtgttgaacaaaatacttcatcagaaaattatttcttgtcagtgttgaacataatacaaacagacctactttggcctacagggcaagtcatatgtcagggaatagtttgtattaggttgttttttgtatctggaaaccatggtttcaggatgctcagaaagaggcagaaaaggaagctataaaccaaatgactcagttattttcaacacttagtagattgtagattgaaaatttttccagaacgtagagaaataaaattactttcacagggaattgccctgctaaatgtataatgtatgtaaatatttgataaaaccacaacctctggtagcttaaatgattacgtatctaaaccatttttaaattaaattttctcgtctcaggagggtctgctcttttcatttagctctagatacacatactttcctttcctttctaatgggtacatagaagtggttccctaaactggggagactccgatgctaaatc

SEQ ID NO: 87622 - DNA, 1054 bp, Homo sapiens
taatagatgttatactacatagaaaacaaaattatttgacagatttcagcagtgaaatttttgggaaacctttatattgagttctgttgatatgtggtagtacctatctgcttgtagtatctgaagatttaataaggtctttaacagatacattctggtgagcttgatgtttacaaataccagttttatctggaatgcaacaaagatcttttccattgcattgatcttcagccgaagcattcagtgaaacaacaaaagcacattcaaagattttcccaaagctcacctaaatctttaggaagggctctgactgaatattgaatttctaaaaatactaatttcatattccttgcaaatagtgtcttaacttattgtttacattaatacttaggctggagtttgtccattgatgaagatgctatgatgttagtatttcagttccttgaagtcatctttatttttcaagagctttccttttagcagtctaaacggttagaacatgccatccagctgggtacattgatccataaaaagcaaggtgtttacttagcagtgtaaagtatactaaaactagtaataactttaattcagaattttcagaatttagagtccctgaacaataatcctctctcaaaaagtaacatgttatcttaattattgtttacagatgaattgtatggcttaggatacgacttaaaacacattatcaagaaaggaaagcaaacttgggcagataaactttccttatgtttcttcagacctgcttggcaagcctttataatatgtgattattatatccacaatgttgtactttatttcagaaaaaatcagatttgttttcctggaataatttttaaaaacatgtcacatcatgctttctaattttatttaaaggaatgtacaaattacagtcatatttcagtttgacatatttttcttctgattatgattaaaatgaaactacccccaaaaaagtaatgaaatgattgaaaatcttttttagtctgcattaaggtatatctttccactttagaatagaggtgtatctttcata

SEQ ID NO: 87623 - DNA, 1744 bp, Homo sapiens
tgaaaattaaccttgactgtaatatatggacatggtatgaagagaagaagaggggcatttcaggtcaaagggacaacctgccctaaggcacaggaactggattggagcagtttgtcagggtactctgtgaagactgccttgtctgcctcagatagcacatggtggcagggtgtgaggcgtggacaggacagaattgagccatgttacagaaagccgtcagaacctggggaggagcttagcttagatttgatacagcagaaaactgcacctttggacgcgctagaagggaatgacgtaatgtggtcattgtaataaagaattggtctggcataatatccaaaacggagtgactgaggcaggaagtaagggaagccaggcaggaagcaaggagagtaaatgtagcaaaagtctgagctaggtgggagcagttggaaacgaacagaggtaactgatacaagagatctttctaaggaaaaattcataagacttgaagacagactgggattgcttggttaagtttacttcttaaatagcaggaactttcattttaattatactcaggatgtttgtgatataatgacaccctgatataataacaaaatacttcactcatctcctctactaatacataaaaattattttaataaaactctcttgattcccttcttcaatattcattcattcaacaaatatttactgagcctttactatgtaccccagactatgtactgatacagtgatggttcctgccttcatagagcttgcattctagttaagaagacaggaataagcaagaaaacaaaagaataaatattgttagattgtaatacgtgataagaacataaaataattagtatttatgataaattctccaagagaaacaaataagccctctggctaaaagaaaattatgggggccgggcatggtggctcacgcatgtaatcccagcactttgggaggccaaggtaagatcacttgaggccaggagttcaaaaccagcctaggcaacatagcaagaccccatttctacacaaagttttttaaaaatagtcacgtatggtgggacatgcctatagtcccagctacttgggaggctaaggcaggaggattgcttgagcccaggaatttgaggctgcagtgagctatgattgcctctccagcctgtgcaacagaacaagaccatgtctcttaaaaaaaaatgatgagcagtagggaaaccaacttgaaaagcttatcaggggaagccccgctaacatagtagcatttacgctgaaacaagaaactggaaggccagaagagctggggcatagactgagggggaagtgatgtgagatgcctgcaggggtaggtaggcagggtccaaatcatctagagccttgagcactatgggagggagttttgattttattctaaatgcaataaagaaccactggagggttttgcgtaggggagtgatatggtccttttatcatcagacaggcccagttccagcactggtcattccagcctcagtccgggtagcaataggagtagtcgataagaaggaccctttcttttctagaaaactaccattactttgttaattcttattttatgagctccttactcttctcaccctgctgccctttcctatgttagcaggtgcttatatcaattcatgtaagtttccttcccccgatgtaatctaaaaataattatcagctaacttgtctaagatattcagaccttcatcctacacatatt

SEQ ID NO: 87624 - DNA, 1094 bp, Homo sapiens
tctttttcctcccctcaccctgcagtaatagacccttctggtgtatcttagttaaatcctgtggctaatcggatagcgacagccatcttctgctgttatcattttggagcacaagattttaaaaagaaacaataaaaacaatccaagtcccttctgtgaattgtatgatgttcccaaaaggattttactataaatcctactagagctgttgtcaatatttaatacaaagaactggcaactatgtatataggaaaaagaaactaatgtagaattgcctaataaacgctttgagatcagttcccagagaaactttgctagctgatctgggaccttagatcctgggacatctcagaggattgaaagctgaggtccaaggcaaccagactaccactgaattaatagtatccttacaacagatgaaatcctcaggggctctcagaggagaaaatacggcttttatacagccatatcatgactatacaggctttgccttctcaacatcgcattttaactaggagttttgcagcaaccgactgatgcactgggacaagaggagcaggtacttccaacttcaaatcctgtataatccgttccctgatgattgaatagcatggctgctgagagatcatcttatttcacttaatggcagagagtaaaattgtaaacaggaccaggagttatcaaaaaaagctttcttagatttcatttcagttggaactcagccccctccccagcaatggctggcaccaaccttgttactaaagtactgaagtattgatctcagtgcttaaggctccctaggtcaatgagatggaaattcactaagaatttaatgctattggcaaagcccaagctggtctttcaaagcagctggctgcacttgttttccatttcaggcaggtctgattagcaggactctctccaggcatggtttgtctttgtggccttcagcctccacttcttgcacattgtttctccttctgttctccactttctctccttctctctaaagcatctttcagtagatcaaagaagaccaattcagtgcctctgaaatcacaccaggtaagccagtgcctgacatgtacatctct

SEQ ID NO: 87625 - DNA, 1029 bp, Homo sapiens
aacaacttcccgaagggcctggctggactgacaaaatggggcatttctccactattcccagagaggccagaaggaagatggaggccgaatgggttagggaatcattcggactcttccagaatgagtcttcctgtttccttccctataaatccaactaaaccgaaataccccagactcccacagacgccaccacagctctctgagatagtgaccatgttctcagctcttggtgatttctctggattcagaataactccagttcctgtgttcacattttgtcaagcagacagttcgcagcagccttagaggacctgaacgaggccatcaagctgtgtcccaacaaccgtgagatccagagacttctgctgagagtggaagaagagtgtagacagatgcagcagccacagcagccaccgccgccaccgcagcctcagcagcagttgccggaagaagcagaacctgagccacagcatgaagacatatactctgtacaggatatattcgaggaggagtacctggaacaggatgttgaaaatgtttccattggcctccagacagaggcccggcccagccaggggctcccggtcatccagagcccaccctcctctcccccgcatcgggactcagcctacatctccagctcacctcttggctctcatcaggtttttgacttccggtccagtagttctgtaggctctcccactagacagacctatcagtccacctcacctgccctttctccaactcatcagaactcacattacaggcctagcccaccacacacttccccggctcatcagggaggatcttaccgtttcagcccccctcctgtgggaggacagggcaaagaatacccaagccctcccccttcccctctccggagaggccctcagtatcgggccagccctccagctgaaagtatgagtgtctatagatcccagtctggttcacccgtgcgctatcagcaggaaacaagcgtcagtcagcttcctggcagacccaaatctccattatccaaaatggcccagc

SEQ ID NO: 87626 - DNA, 1029 bp, Homo sapiens
tggttagagggggctcaactcaatccctttggtccccagcgccagacaagagttaattctggaaaattcagtacttgaatgtacctgccttattgcataccaatttactggggggaaaaaaaaagttaagagatgccggctccagatctccacttcattcacaggtgattttggaaatcctgtaagttacacttcctgttctggttttgttttgttttttgtttcctttggctgattcctgctgagtgaggccagttcctcatcaggctcagggcaggtgccttttcaggcgtggcctcctttccatctagcacagcatctttgtctctgttctgtctcctccaaatccaagatgattttaattagtacagacatgtacagtctacaattaaagagtgatttgtactaatatgattttgattcttcctcctctttgctgtcctttcaagacacttgctggaaaaagctttaatgcacttagttttcctttaggttttctatgactcagatgtaaaggactttctctgtacagtatattatccaatgcatgtttgttctctctcctgatatattgaacaccacacagttgtgaagccgtgcagtggggatgccccacaccccacagaggcatctacccctgtgtataaggaaagacattttcctttgctgtacttgcttgagcagttttattgtctgtacatgtgagctgtgtgagatagatgtgaaaagttcaaatgaatgcattttcctgccccatgtatacagattgtcatctgtacaaggaactgtatgtatgaaagcaaatgtacttatttataaatggctaacacttggaaaaccatggtgttgtgatgcttttctccttccattacagcctcttcagggagctggcttttaagcttaccctcctgaggatgcagtgatgggggcaccctccctcaggaggaattgggcaggttagggctaaggccaaattcccgatgatttgcttggtctcttgtgggacattcagagccacccctttgtgca

SEQ ID NO: 87627 - DNA, 1040 bp, Homo sapiens
cgggggagggtggcggggccgccgtgggaggagccgcgccgcatctcaggcgcagtctctaggggctgtgcgcatccgtgggggggacatgcgcatctcaggggggctgctcgcatctgggggtgctgtgtgcatctcgggggggctgtgcccatctagcggggtggctgtgcgcatctggagggggctgtgcgcaacccggggggggtgttgcgcgcatctagcaggggcggctgtgcgcatttcggggggggctgtgcatatctggggggaccgtgcttatctccgggggcggctgtgcgcatcttgaggggtgtgtacatctcggggggcctgtgcgcatcttggggggctgtgtgcatccgcgggggctgtgcgcatctcggggtgctgtgcgctgctcctctgagctctgctctttcttgcagcgtttgcctcagcatggagggcggggccgcggcagccacccccacagcactgccttactacgtggccttctcccagctgctgggcctgaccttggtggccatgaccggcgcgtggctcgggctgtaccgaggcggcattgcctgggagagcgacctgcagttcaacgcgcaccccctctgcatggtcataggcctgatcttcctgcagggaaatggtgagtcccatgggccgctcctcttttcccgggcttgtgggggtccctgagaggcagtttgcaggggtcttgtcacccctgcggtctcttctggttggacaaatctaagattctagaaaagacagagacagaagctggttcagagcctggggagatggaatccaaacccaggctctgaggttggtgagtggcagctcctctccagcctggtccagcattttcacctcgtttccacacacagcatccaaggcgggcacttcttgcagcagagggaaaggaatgaggctccgagccaggccctgctgcaggggtggtttgaattgagggaaaaaaagtaatcatatgtgagagtttgtatgcgtgcgtgcgtgcgcgcgcatgtgtgttgttggtcttg

SEQ ID NO: 87628 - DNA, 1354 bp, Homo sapiens
agatggaaacgggcaggatcatgccatgcagttggcatttcactggcactcgggggcacttacgcaggggacagcatgatgttgggagctggctttgtccctggcatgtctgtcacgttgaagagggagaagctgcaggccctgacttgggtggggcagtgaggatgctcaggagggaagtgaggggaggggtgccagcatgcggcggcctgggcagccttctgtggaggagctgaggtgtcacctgggcccggaagaagggcagccctgctagctagtggggagggcatgagagaacttggcgacgatgggagagaaggtgacttgggacgagctgggtttgaagcgtctgtgggatgtccaggtagagatgagtagtgaaccgtcagaaatggggcttgaatttggggtggcggggacagaactgatacccgtgtaggtgacagataaggacagaggcaggagttccaaaaataggatttattgttggctggggcttctggaatcccgtattcccgtccaccctgggaatgtggattggagctatgtttctgggagatgatttgatggaatgtgtcagaagtctaaaacagaacctagcccttgtttcaggattccctgcagagaagtttgcagatgaccacatcctgttgtttatttggtggaaaactgaaatcgaaagctagctaaatgctgaacaatgggaactagttggctaaaaaatggccgtgcaatgcaagagtgtgaggttacgaaaatgatgatgtgggcgcgtatccattgacacaaacatccatgtgtgctacgccctcagttaaaaagcaggttagaaaatggaataaatgatcctgcttctataaaaggatgcatatgtgttttaggaagaaggtgtgtgaggatatagatcaaattctgatggcctgtcattttaccttttttgctgatccatattctactgcagtgcgtgtggattattagcacacacacacacccttttttttttaattaaaaaaaattttttttgagacagagtctcattctgtcacccaggctggaatgcagtggtgcgatcttggcccactgcaaactctgcctcctgagctcaagggattctagtgcctcagcctcccaagtagctgggattacaggtgtgagccaccatgcccggctaatttttatatttttagtagagatagggtttcaccatgttgtggctggtcttgaactcctggcctcaggtgatccactcgccttggcctccccaggtgctgggattataggtgtgagccatcgcacccggcccacacacacaccccccctttaatggtggagttgccaacagttgtccgatgtg

SEQ ID NO: 87629 - DNA, 1451 bp, Homo sapiens
cccggagacaccgcccagcccgccgcccggttgccatggcgacgccgtcgcgccacggcccgcagaaccggccaagcgacccgggcgcggcgcggggaggctgaagggacgctcgggtaggcaaggtaggaggccgggctgggggtgggagcggagcgcgcaggggtgcggggcgggggcggcccaggtgagccctgactgcgcagggagggacagcgcggggctcccgagtagcagccggcctcgcacctgccccttgcggccgcgcactggactgcggcgccgacccgcaccctgggcccgagggctgcagggctcgcccgccctctcggagccgagcctctcccggtccaggcggcccctgccctggcctgcccgggtgccgggtctctgctgaagttagaaccgagacccccgcttgctggtgaccccgagtttggatctttgctcctgcgccgcgttctagagcaaggtagggtgcaaatggaccaaccagcctttgccacggctgccctcttgaaatctgaaaccggagccaccgcctcttgccccgagcagggcccgggctgcaacgtggagccgcaggtccccgcctgtgtctcccgacgcccccagcttctgagcgcgagggtgggagtttcccgagtgggaaagccccatggcttcggtggcctcggtggccctgtggtgggtcaggccggtgccaactgcgctgagggcggagctgccgccaccttgacacctgggagatggcagggccaccctccctccctccctccctgccctgtccccgactgtatcacggagcgaggatcatccgtgtggatctggggtccccttcccagacttctcctttctggtcgtcctcctctcattcattccaccttggcagcctttgtggattttctgactccgtaaatgaagttacatctagggcgcctagattctgcccctttggtttaatagctaatgaaaaaaaaaaaaaaaaagctttgccacctcctctaggtgcctggatttctcccggtgaaatttgatggaggcaggaaaatacgaggcggtggcagccccacctccttgcatgagggagcctcctagagctggaggtggaaccaccctgcttgtcccactccttttctttcttgctttattgctttcttgctttccttactttccttccttcttttttttttgagatggagtcttgctctgttgccaggaggctggagtgcagagggcaatatcagctcactgcaacctccatcttccgggttcaagcgattctcctgttccagcctccctagtagctgggattacaggtgtgtgccacaacacgcagctaatttttgcatttttaggagagacggggtttcaccatgttggccaggctggtctcgaactcctaacctcaagtgatctgcccgccttggcatcccaaagtgctaggatta

SEQ ID NO: 87630 - DNA, 1070 bp, Homo sapiens
gtagggggtgggggacaggctctattgagaagggtcaggcctgtggaaccagctaggcccagctgagacttccctttccctcctgcagatgcagcccctcccctgagcatctcagatgcatctggcctctggcctgagctactgcaggaaatgcccccaaggcacagcccccaaagccctcaggaagacccagattgctggcctctgaagctgggctccaggctagagcagctccaggcccagatgaacaggtgtgtgtgctgtggtcagggctgggggctggtcatgggtagcccctcctagtggctcagacacatcacagggtgccaggtgggttttagaatggggcaggccatttagctgcaggtctccccatacctgtcattaagcacaattcccccaatgacttcccctagcaaactctggaacatgccaagggagcttctcgggggaggggcacaaccatgtgcagaaacaaattccataggtcctgggaaagggagtgtgtcctgtggatggcagggctatggtggcagagcgagggcttagaggcagaacagtccaggttcaaattctggctctgttccctaccagcaagagtgtgggcaagttactaaacagctctgaacctagtttgcccttttgtgaaatggggataattggaacatccacatcaaagcatcttggggactgaatcttgtatgcttggtgcctgctcactggtgttgttaagagtcaggggtgtaccagggggattctgggccggggctgtggatcccagtaaggaaatagcttcaggtaggccccaggccgccattccatctagcaggaacagcacgcaggctacaagattgacagctgccctcaggaactacttttgccagccctgaccctgactgtggggttctgtctggcaggctggagtcccgcgtgtcctcagacctcagccgcatcttgcagctcctccagaagcccatgccccagggccacgccagctacattctggaagcccctgcctccaatgacctggccttggttcctatagcctcggagacgacgagtccagggcc

SEQ ID NO: 87631 - DNA, 1965 bp, Homo sapiens
gcaaacggaaggagatctacaagtatgaagcgccctggacagtctacgcgatgaactggagtgtgcggcccgataagcgctttcgcttggcgctgggcagcttcgtggaggagtacaacaacaaggtgggccgggcaggggctcggaacccagctggcggggagcgggccccgggagcgccctttccgggccggagcccaggcctcagaaccctcttgcggactcgccctagggccacggagcggttcctctgtctggccctgtgctgaaggtttcgtactcgttgtctgtctcctttaatccaggcagcattcttgtgtagtcggcagtgtagtggggaaactgaggcacggttttgtgacttgcctgggtcaggcagctatttcggggtggaaacaggtcttaaaaccgggtttacgccccaaagatactccatttattcatcccgtgctctccactcctgccgcattgctttcgttggtgggcggggaagggaagagagagtgatagctgtgaaggaaaatgcaggcgcttctattggtggtcgtgcactcctggccacactagatttctattaagacgatctattgtacaagcttccccgccccctactcccaccccccccgggtactcatggatcctagcccttctgccagaattactgttgctcttgcttcctgatatccattctctctaaagcaatctctttggaaatcttggcctgtggcatgatcccgccgttgtttcctgaacacagaaggatgacagggccttatctcttggcttgtttcgtgctagtacagttgtgtgacctttagtagtaagtcttgctggacatacatcaatttgagaatcctttatagaagcacggtgtagtaggggagcttttaaactggcattgcaacaaactcatttttgaaagttgaataagtcagttggaagaattttctttcttccttttactcaaagttgtgaatgatagcgatcagagcaactgaaagctgtggctagtgatatttaaagccactactcctgctttatgccatgaacatcagatttaagaagagtaaaactggccgggcgcggtggctcacgcctgtaatcccaggactttgggaggccgaggcgggcggattacctgagctcaggagttcgcgaccagcctgggtaacacggtgaaaccccgtctctactaaaatacaaaaaaaaaaaaaaaaaaaaaaaaaaaaaaaaaaaaaaaagccgggcgtagcttagtgcgcctgtagtcccagctactcggaagtctgaggctggagaattgcttgaacctgggaggcggaggttgcagtgagccgagatggcgccactgcactccagcctgggcgacagagtgagactctgtctcagaaaaaaaaagaagaataaaactgttcagtgacaaggctgatgcaggggggaagaaaccaggtggtcctgtctggttattgactagctgtgagatgttgcacaggcctgttttattatctgtgacccacagtttgtacggaaggggttctggtttacatgtgagggtcttgtaaaaaagaaatttgaacatttcacagtttgtttacagtttttcaggagcacatttgtttctctagagtaggtcctctttggagtccactttgagaagctgatgaaagctatggattctcattgtccagacattacacatacatgaacaatttacaaacaaatccaaggaatatgcactgatctttaagtccacccattgcccgggcgagatagagctttctttcctctgttgcttctttcttccttatggcccatagtggacagcagaactggaaatgggattcacgattctgatgtggacaccgtgttaataaaattaagaccactagaactattgtttaaagatacacgtggaaaataaaaaagtatgtctttcaaagggcttaagtctttttacacaaatta

SEQ ID NO: 87632 - DNA, 1065 bp, Homo sapiens
tcgagggagaccctatctctacagacaattcaaaaattagctaggtgtggtgtctgtgtacctgtggtcccagctccttaagaggctgaaggatcgcctgagcaggaggatcgcctgagcctgggaggtcaaggctgcagtgagctgtgatcatgccaccgctctacagtttgggtgacagaatgagaccttgtctcaaaaaaaagttgcagaatacattttatgatgcaagtctatttaagcttttttctttctttctttcttttttaaacagatgaggtctcattatgttgcccaggctggtctcaaactactgggctcaagtgatactcccttctcagtctcccaaagtgctgggattacaggtgtgagccactgcacctagcacctatttatgcttttttaaaaaaagaaaaaaccacacacaaatacatggagaagtatttggaaagatgcacaccaaatagcatcagtaaggatttttgagggtcagtaagcagatgggaggctttactcttttactctgtattatatgcatattcagagagaacttatattttctttcatcattaaatttaaatggatatctgaacaaaaaaaaattgaacaacatgagagccaattgtaattcctctcaatatttggttggcaacttggagcagaagagccagtgtcagtttggctgaggctaaaacacacacttgtgcaaacacaatgtagtctttggaaagagaaactaggctgtgtgattagaacattcaggtgggccaggactgtctattgtaagtagtacaatcttgaaatgttgaagaaaacacaatcaattttggaaagagatgaatttctggtcagaaatattataaagcacacaacatgctaaactctagtcgtaggcaaagcttacattgttttgtaacagtacatgagattttatttggcgtccttcttttttttcccccctaagacaaggtctcactttgttgcccaggctggagtgcggtggcacaatcacagctcactacagccttgactttctgggttcgggtggtcctcccatctcagcct

SEQ ID NO: 87633 - DNA, 1068 bp, Homo sapiens
ccaggctggtcttgaactcctgacctcaggtgatccgcctgcctcagccttccaaagtgttgggattacaggtgtgagccaccatgcctggccaggaaagaattttttaacagcacatatcagcactactttatcagtcttctatataacacctcactgaagcataaatgtccatcaaacagggaagaaacgctctcattatattgaatgatcagagaatgatctttgtaaccactcaagtattttaagtggctgcaaatgacatgtttggtatccccttgtccactcctgatacctgacccagatgagaaggactcattagtgcagtggatagagcctggggacatctgggagatggagtcagggcctagatttgagttctggctctgccactcacttggctgaatagctgtgtgatttggaacaagtgccttaacatttctgaatctcgatttcctcatcgataaaatgggggcttaaaatagaaccgccatcacgggggtgctttgtaaactgtgacttgctcctgaaatgcagggatcatcatccgcattgcctcacttgtgaccttgcttgctggctttctttgtccctagcggatgaccaccaggctctcatctgggacatccagcaaatgccccgagccattgaggaccctatcctggcctacacagctgaaggagagatcaacaatgtgcagtgggcatcaactcagcccgactggatcgccatctgctacaacaactgcctggagatactcagagtgtagtgttggtggcgctgtgcccacgaggcaggggcttttgtatttcctgcctctgccccacccccaaagtaagaagaaacatgtttccagtggccagtatgtctttcattgctttgcacccactgttaccagaagctgctctaggagttcctggccagtcaccccatcgccctctgtggcagactcagtgctgtgtggcgcctcctcagcccagggctgagttttaagattttctctcctttcctcttctcctttggttcctcaattaaaaaatgtgtgtatatttgtttgtcaggcgttgt

SEQ ID NO: 87634 - DNA, 1078 bp, Homo sapiens
ggaattagcctgcaaggttaggacttgaagagggaaggtatttaataactgggcgaggatgggtgtggtggctcacacctgtaatcccagcattttgggaggctgaggtggccagatcccaaggtcagaagatcgagaccatcctggctaacatggtgaaaccccatctctactaaaaatacaaaaaaaaattagccgggggtggtggcgggtacctgtagtcctagctacttgggaggctgaggcaggagaatggcgtgaacctgggaggtggagcttgcagtgagccaagatcgtgccactgcactccagcctgggcgacagagcaagactccgtctcaaaaaataaaaaaaaaaaaaaaataggtgaaaattccttataaatccaggattggctctgagagaactggctaagattcaggaagaaacaaaaaattcagaatcctacaaggttttgatgacaattagggccaaaattttaggaggagatgtaggatgcaggagaaaattaaagtgttttctttatatcagaggaggaaatagtagaggtcagtgaaggtctggggtagggaaacattcagactgtccattgcatggctgtggagtgagactgcccttagcctgggtcagccttcctgggccataaattgggcatccgtgatgctaggtaactgtgggaacaaaatgacagcttagagcagccatgggtgatgtttggtggtaaaaaacctacaggcgtttggggtcccatgattgttccagaccatgactcttcctggttgtgggtttgttacagagcaggagaagcagaggttatgacagttatgcagactttccccctcctttttctcttttctcttccccttgcttttccactgtttcttcctgctgccacctgggccttgaattcctgggctgtgaagacatgtagcagctgcagggtttaccacacgtgggagggcagcccagtactgtccctctgccttccccactttgagaatatggcagcccctttcattcctggcttggggtaggggagaccattgaagtagaagcctcaaagcagacttttcccttt

SEQ ID NO: 87635 - DNA, 1078 bp, Homo sapiens
ccacctgcaccttctccccctctcacagtgtcactgctgctaatggtcaaagtcaaatgtgtggccacatgggatgggccaggtcctctcaggctactttctggatgtcatttttaaaatatggaaacatgcaggtgccttcccaaagaggcttggactggtatatccaacgagaaacaaataagctaaagaaagtttaaactcaagaagaaagatgttgacagtctatgtaacagctggaaagtttataggcacccacctttgggacaacccagtgattatgaacatgtgatatctactatttaaaagaaatgttctcaccttgggttgattgtggtataccatgtgttatgaaaattgttgagctgaagctttgaatcgatttagttgagtctgactcacttgctttggttcctgtgtattttactacccctcttgtcagtgaccttccttccccaccccacccagagtgaatttgtagcatgattgtataaacctctatgtagaaaatggagatttcttgctctgaaatgttaagctctaactgatccatttctgtgtcctttagcctagtatgtctgaacttccattcttgttatatatttaaactttccctctatattataggttttgtggcatccacggtcaggtgtagaggaagctgccccttgcagaactgtactgtaatatttttcttttataaatattttcacaggactgattgtacacagggcttgtaataaaattttaacactgtgctgtgaaacaactatggggaatctccattgaaggctacttcatgggcacctgaaagtggagtgttatagctatgactttctatttcttgtttcctaagtaaattaaacctaattttcaccctttcattctgtttcagcctcctgtataagaagtaccgtattttctgcccatcatactttgtaataaaacttgaacatgtatagattgactgaatttctttttgtgacgaattcagttcttcccattttgtcactttggtcatgttccatagacagtggcagtgccccagcccgagccgggcagtctactcatcaccttt

SEQ ID NO: 87636 - DNA, 1050 bp, Homo sapiens
tttagtagagaccaggtttggccatgttggccaggctggtctcgaactcctgaccttaggtgatccgtccatcttggcctcccaaagtgctgggattacaggcatgagccatggcgcccagcctctgtctttcaaaaaaaaaaaaagggacttactagggcctgctttgcctgggtccctatgcatcctgggattggtcagagtgaaccaatgagaagactgagctgctctcaagaagggctaccacaagctggttttgaaagcttcttggttctgagaacaaccagccctagatccttttcatctctgatgccaaatgatgtggcactgagaactgaagaggaaacgtgaacagaaagaagagtgagggctgaataagaagcctcgccagtgggaaatagggcccttggtaccttttgctcctaatagtcacatctgtgtttagaagggccaggaactcccacctcctgcgtcagagcctgtcaagcatgtcaggcctagagtggctttctgatccctgttatacacctatttataagttatctaagctaattctgagctcagagtaattttcctgaaggagcttcaggtaaataaggatgacaaagaactaaaaccaaatttactgtaaatgataacttcagcttctaagaaaagaattactgactccacactgatgtcaatagctggagagcaagggctacgaggaagaaaaccagtgaaataatccatggtcatgccacttgcccaaatatctgaattgcttatcattaaaaaagagcaaatttacgtttatatgtggcttcataatttgtaagatacgtttacatgttatttatttgattttcccaacaaacctataaaacactttggccaagtattttatgcacaaatgatctcataccaagcaggaaagaacaggtcttacactgatagaccttggtgtttataaaatagctctgttttggaaattaatttggaggaatcttatttataatctgagaaatctgtactaagggagtctgctcttaaagggaacatggctagtca

SEQ ID NO: 87637 - DNA, 1051 bp, Homo sapiens
ggcgggaccgagggcccgtgctccgcggggcagcctggtccgaacgagccggaccgcgagcccgagggcgggggagcaagagcgcagtgtggggcccgggctggaggctgccgcaggcccagctgctgttgtgtcttttccttgatttgcttttttttcctgcctgtgtcatttccttccctttgctcacacaggccggcctgtgagagttcccggggcttgctctccagccctgtgcgcgccccagcgcaggggggagggcgtgcggggctcggctaggaggcgattaaactggagctgtgatcaagcgcgcggttgacaaatgcgtgctgcacgcagattgctgggggtcaggagttggtcggatgctgccagttagaattcacatcctactttttgaaaaatcccgttgcaggggtttaatccattatttttttcttgcggtatccctgaaattatgtaacttttgaaagaaacatttgctacacaaaagaatttctctgaaatcacttcctttttgtcagtatttacaatttctactgtgaagatgtaatctaaggaaagcttttaatgtcttccgcacgtagcatttgagttgaattatattccatatcctttttggtagtttagcaaatgactactggactagactaagaaataacattttaaacgttctttacttctcctgcccagacaggtgttgtgatactgttgtcacaagttttgcaaaatatttggtattgccctaaataataataaaagggtaaacttcagtgagaggatcgtttgcaaaacgttccgttgcttctgtgaagtgccccatgtgaagagggagccttaatgtttgccttgccctatagcaaggtcaagtcctttttgtaggaggttaactgtacgctatgtcaaattcgccagatattgttttgtgacccatctctacaccctggctttgaatgaattgccttgttctagttcatgctgtccctcatacagtatgagaagggtttgttcatttgctgggcttactgtttccttctcatgctttccttca

SEQ ID NO: 87638 - DNA, 1047 bp, Homo sapiens
ccattaaaggccaggcatggtggcccacacctgtatgtaatcttagcactttgggaggccgaggcaggaggatcactggagtccaggagttggagaccagcctgggcaacatggggagaccccgtctctacaaaaaataaaaaaatcatccaggcatggtggtgcatgcctgtgttcccagctactcaggaggctgatgtgggaaggtcacttgagccccagagttggaggctgcagtgagctatgatcacgccactgcactccagcctgagtgacagagcaagaccttgtctcgaagaaaaaaaagaatccattaaaattcaaattgccatagtctgaccttttgggctgcatctgattatagttacagggtctgtcattttacctgggcagaactccctgagtattagttatacagtttgtgaaagagctttgctggtctgtatttaagtgtcttagtccatgtgctctctttcattgcagacgaacaggaggcattgaactcaatcatgaacgatctggtggccctccagatgaaccgacgtcaccggatgcctggatatgagaccatgaagaacaaagacacaggtcactcaaataggcaggtgtgtgtgaccctggcagagctaagtgagatttgttggggaggggttttcaaatgggaaatatacgaaaagccaaggagactacattaccagggttgaatgcttttgaccccttcctttcacagtctgttaaatgggaagtaatacataccaaccaggtatggttaaatggtaagtgatattgggaggccgaggcaggcggatcacctgaagtcagtagtttgagaccagcctggccaacatggtgaaaccctgtccctactaaaaaacacaaaattagccaggtgtggtggtccatgcctgtagtcccagctactcaggaagctgagacaggagaatcgcttgaacctggaaggcaaaggctgcagtgagccgagatagcaccactgcactccagcctgggcaagacagagtgaaactctgtctcaaaaaaaaaaaaaaa

SEQ ID NO: 87639 - DNA, 1012 bp, Homo sapiens
acagtatatagtcaggaaaaactaattaatttggtattagcttatgtaaaatataattaagaaggtaaatttattaattaaaatgtcacctagtatattctgaaggcaataatgagtgattttgttattactgtttacagttattttaccttattaaccttattgatagtgcctgttttattgagagttgtatgcttctttaggaaaacattgcctattttccttaacatttaaacttgtgtgtcattgacaatcttcttctcacctgtagtgccacttacctgtttcctgggtactttgttctgcagagaggagtgaatgatggggagctttcctacctagtgggtatccagtgctgtgtcagctagctatattgggcatgtttgatgaaaatttgtgtatgacattctcccttttggttctgtttgttatcagctaacctcctttcttctcatttgcaccttgtttaccaattcttcagaattggttcctagagatagtataaggccctaaaacttttcctgtctgtggtctgctagatagagccttccagagtatttcctgcctttaggaatcctagggaccccaagggaagaggagtccttttgtttcatgttaaaacagaaggattagtttaaaaagctgcttttgttgttgttaccttatagtactggaggtataaacagataagggcccattcttacactattttcatatgttattcagtctgactgtgtgagttctcccttgctataactcatttgtattcaaagccacttttcgaaggagcattttaccagaagtgagtcccctcccccttgcttgagcctaatgacctcactttccttcctgtcttcctatgtagtgtgtgcttgctaacattgctccagttagctgatctttctccagactggactattagcatgaatatcagttagtgggtgaaaaggggaagctttcttgaattggaaggcccaaaaggacgaggctgggaaaaggaggggcggaatgg

SEQ ID NO: 87640 - DNA, 1029 bp, Homo sapiens
aatgttgtcaaacttatgttgcacgaaggatacaaattattaacctcagtttttttgtttttaaagaaaaaacacaacagcagcagctcagcccttctgaacagccccacagtaacaacaagctcatgtgcaggggccagtgagaaaaagaaatttttggtaaggatccagattacctgttaaagccaaaatgtacttttaaatctgctactcatgctgcaacagcagaattcacttcccagacaagttgttttagtggatttgtaaaaagcattggttacccgtgacctgtgttcagtgcttctagtcaccatttctcacaacagtattattcataaacagcctctatcagtgctgtccaataaaccttctgtgatgacagaaatgttttatatctctgctgtccaatgtggttttgtagccactagctacatgtggctgttgagcaactaaggaactaaattttaaattttatatcattttaattaatttagacagccacatgtggctagtggctattgtattggacagcatgactttatgcactatgtaagggactgttgatttattgggcaagaaattatgtatatgcttggagatgtgtagatattcattggtatgttcattccttacacacgtcatgagtttctgtacattgtgataagctaataatgggaatcctacctaagatttctgttttaggaagaatgtgaagatgtggaactagaacagctgtttagaaattgaagctcaaagttttatgttaatatgggcaaaaggggaaataaaatgctaagatagcttttcctcttaatgaagtcaaggttatagaatggcctgtcctgggaagtgtagcagatgttttgcttctgaccaagagggatattcttcagcaaaattctgaaagcagaaaaagacaaagtctcagcaaatgcatttctaggaaagatagggtaagaggtagtgcggggaagatgttggggagaggtatttatagcctagtataatgaaaggagcctggtgatatta

SEQ ID NO: 87641 - DNA, 1006 bp, Homo sapiens
ctactcatgatggtcattttggaaaaggctgggaacagtgtataagatcctactttacccccagtggggtagctttgggagggttttgggaaatcaatgatagtggtaccagtggcagcagcagcaaaaaccaaatattgcatgtctattatgtgtcaggtattttacttacatttagttgttgtaagaactctgcaaggtatgtttaggcttactctacagatggaaaaactaagactcacagaggataagtaacttgcctgtggtcatatagctagaaagcatcagcagcaaaatttcttttttgtcttcagtcacatcagccaacaaggaaatgtatcctggtcaggaggtgatagagtgggagaaacttccagagccaattgtagaaatagggtgtgtatgaagctagaaacagcatgtcacagcatagcaactgagctgggcagccacctagggatcttaccctaagagctttgttgtccctgatgttagaactggaagttttaactcattggaaaggaatgcccatgcccatctgggaagagaagctggaccaggagccatcagggatgtatgcctaatgttgctaacgaactgcccaaggcttacttggcaatggcaggagtgacacattccagagaattctctaacctgtctatcattctttttggcagagtgacgtcagaatcaagttcgagcacaacggggagaggcggtaagtctgccttctgatgagtagctgtgttcatgtatgccaaagttctcagatagcattgagttcatggaagtcattcccctgtcctgatccctgtggggccactggctgggtaatagggtggattgggcataaagggaggaaagtttcacccttgtcttggcctactaattgaaccttgttcctatcttagcattggaagccatttcaactgctgatgttttactgttctgctctattctgctgctgtgaggtctgacattttattaggaagtgaggactctggcc

SEQ ID NO: 87642 - DNA, 1052 bp, Homo sapiens
aggatgtgcaggtttgttacatagttaaacatgtgccatggtggtttgctgcacagattaatccatcacctatatattaagcccagtatgcattagctattcttcctgatactctctcttccccaagtcccaacagccccagtgtgtattgttccccctccatgtgtctgtgtgttctcatcgttggaacatagtttttaaatctagtggcctcttctgtcattggcagaagagtctaagctgaagtggtagatgaatggttgggattgagcaatagttgtgggtactgttgtcaaacctgatagatgctcagagggtgaaaggtaacggtagagaagaggaaaaaaggaaacaatcgggaaaaggcaaattgagtgaaagaaaacagaatcctatgttgagaagaaaggaagaatatactcagaccattgctttttaaaccctacgttttaagtatacaattaaccaacctttctttctgtttcttttcagaattatagcgttcagccggcctgtgaaatatgaagatgtggagcacaaggtgacaacagtatttggacaacctcttgatctacattacatgaacaatgaggtgagaaggcagatggatggggcagggacaagaggggcagatgcctaccttttttctctctgtttaccagagcctttaaagtttgttcctctaatatcatctgcaggttttcattttctagacccccttttcttaattccaacaactgtgggatctctgttttttactacatgggagattactcagccatctcagccatctccattccccctactcattcagtgcagatagctctaatattccatggtggaatcaggtatggtaccagggctagggcttatactgtctcctttacattttgtaggagtatcttatttttttccccccagcacagccttaacaagaagcagagggtttagcaggggctagggaggtgtgaaaaaccagtgagtaggtcatctattacagtcataaatgcaggattcttctcttagagtttcttctgattggagcttatttg

SEQ ID NO: 87643 - DNA, 1487 bp, Homo sapiens
ttttcagggagtgattattgttgggaaaaagaagcaaattgagctacttttaaacatacatatataagctgggcatggtagcatgtacctatagtctcagctaacccggaggctgaggtgggaggatcccttgagcccaggagtttgagtccagcctgggcaacatagcaagactctgtatcaatcaatcagtcaataagataaatacatatatagcaaccagaattttgttggggagggaagttgccatcattcactctccatcctgacttcctcctctgcagaaataattttctgctactcttcctaaactctctggagaattttatgagagggtatttacagctctcttttctgttttgcagattattacaggaatgcctgttattcctccatgtctggatcatcacctgttaaactggggcactaggtctcagcgctcatacatcattgaagctataaaactacattgagcgaatagtggtttgctgagacaaatagaagagtgagatttgggggaaagctgggtagctcatgtattaaaagcatgaaggtggctgagcctgcagggagtccttaggaaaagggtgagaagaccttgataggcctgactgtgtaaagatgtagcttggcctttttcctcttcttttacagaacagttcctctccccactctggggtgtccagacaggtgcggatcaaggcttcccagtccgcaggggatataaatactatctaccagccccccgagcccagaagcaggcacctctctgtcagtgagtatttcaacccttttttctccccctctattttatctgcccacattttaaaaaagcaacaagtatttgttaattaaataatcatcaaatatttattaactattactctgtgtagagtaatcctttatgcctttattttatttagagaggaagggcaaagaaataactgggatggtatcctgactctcaaggaacttaaaatataatgatatagtagtgtgattaaattccttttaaacatccctgaaaaagtgattgcctcagacatctgcttgaagacttccagctgtgtttacactcacttttgaccattcttgtgaagaatagagacttgtaaagttaggaatcgggtctaagtttgaattttgaccttaaacctcttgcttatgattcctgagaagtctttatacttcagggaagatagtgaccaatgaaacttttgagagagtcaagctaagttgtctggaaggaaaggagactattgacatagtacagtcatttctctgtgtttgtaggggattggttccaggacccctgtggatgccaaggtctgtggatgctcaagtccctgaaataaaatagtgtagtatttgcatataacctacccacatcctccttcatagtttaaatcatctccgggttatttataatatgatgtaaatactatgtaaatagttcttatgctatatttttatttgtatttttttgc

SEQ ID NO: 87644 - DNA, 1904 bp, Homo sapiens
tggtatgactcctgacctcagatgaccacctgcctcggcctcccaaagtgttgggattacaggcgtgagccaccacgcctcaacctatcatgttgtcttatctttcttccatcatactacgtttttgttcattcattcaaaagataattactggctgggcatggtggcttatgcctataatcccagcactttaggaggccgagttgggtggattgcttgagcctcaggagtttgagactagcctgggcaacatggcaaaaccccgtctctacaaaaaatacaaaaattagccaagtgtggtggtgcaagcttgtagtcccaggtacttgggaagctgaggtgggaggatcacttgagcctgggaggcagaggtttcagtgagccatgaatgtgccatggtactccagcctgggcaacagatcaagaccctgtctcaaaaaaaaaaaaagtaattaccaaagtatctactatgtgccagaaatatgggaagcaaaaaagacacaggccctgtccctgtggcctttacaatccatggaaagacagacatttacttcttatgatgtgattaatgtataattacaaactgtgactgaaaggtgtgtggtgctgcaggtgggctataactaagaaatgggctgggcatggtggctcacgcctgtaaccccagcacttggtgaggccgaggtgagtggattgcttgaggccaggagtttgagaccagcctgaccaacacagtaaaaccccgtcactaataaaaatgcaaaaattagctgggcatgatggtgagtgcctctagtcccagctactcagggggctgaggcaggaggatcacttgaacctgagagatcgaggctgcagtgagtggagattgcaccactgtactccagcctgggtgacagagtgagtgagactctgtctcaaaaaaaaaaaaaaaaaaaaaagaaagaaagaaagaaatggtgggctataactaagggatgggacctgatcctgatcttggggccaggaaagccttaggcatgaatgggatttgggaattaggcaaaagggatgcaaggaagagggttccaggcaggggatgttacaagagcagagacttgatggcaagaggaagtgtggtatgtcagaaatggaaagaagtccagatagctggagagctgggagcaaggggaaggggagggcaggatgaagctggggagggaggcagagccttgtggaccctggttaagattctgatcattgcatggaaagtagtgaaaagctactttagagtttttaagtgaagaggagtgggtgatgttacatattcgtatttgtattttgaaaagattgatctggctacagtgtggataacagattggagggggcaagaatgcatgcaagggaactgcattaggctaatgcagtggtccaggtaaagaaaactgggcttggagtaggctgatgaagtggagagaggaaggagcaggtgaacttgtgacatttagaggtaaaactgacagaacatggcgttttggtggttctcaaagtgtgttctggggatcctggggagtcccttggatcctttgaccctgtgagttcaaaattattttcttttttttttttttgtgacggagtcttgctctgtcaccaggccgaagtgcagtggtgtgatctcggctcactgcaacctccgcctcccgggttcaaacgattctcttgcctcagcctcccaagtagctgggactacaggcatgcgccaccacacccagctaaattttgtatttttagtagagacggggtttcaccacgttggccaggatggtctcgatctcttgaccttgtgatccacctgcctcagcctcccaaagtgctgggattacaggagtgagccaccacgcctggccctcaaaattattttcata

SEQ ID NO: 87645 - DNA, 1378 bp, Homo sapiens
tgaattttcataattctgatactttgtttccctatgtaattttttaaaattaattaaaaaaatatttaaacagaaacaagatctcactatgttgcccaggctggtcttgaactcctgagtgcaagtgatccttccctctcggctcccaaagtgctaggattacaggcatgagccaccaagtctggcccctatgtaatgtttaatgttggagctcggataatgaatattctgaaattgaagaccccaccccaacttttgtgcagagaaaatgaaagggaggaccttcaggacattgattggagaaaaagggattccaaaggccttttgttgctgcatttgaccaggggccagagaaatattttattatatttagatatctattacctctgcattggaccaggaactgggacatttttgttctggtatcagctgtgcactaactagttttatgactttagacaagtctcctaacctttctaggcctgtagtgctcatctgtgaaatgaggcaatccttgtctttgtaaattataaattatggagtgtaaacagaagcattaaggtcccacccgaactcactggaaggctcagcagggtagtaccatctccagcgccaggctccagtgttaatgagccaagaacatgccaacaagaaaagcagagcctctgctttgctctcctgccagagctccttgggatgccagccaagcatttttctccctcctggaaacttgcctttcaaactaagggggaggatggtacctttctaactattcttcccattgcatggggagaaaaaggacactttcatgttttgacaaaaaggcccatttgctggcccttgccataaagcctgggtcactggggggaattggggctgggggtgtggcttcattgtttgacttgccttacagatgctggatcccctgagcagtgcagaaaattccttgtctggaagctgccaatccttggacaggtcagcagacaggtatgggactgtgggtggtttggagggtaatgcataggcatttttggaattgatgggttgaggaagaagagttagctctggaggcccagggttaaaacatcatgcttctaggaaaagccttctccttaatttccccaacaccacgagaatgttatgatggcataattaaatgaatgtaataatagctcataaaatagcagctcatttattaagtacttgctttgttgttctaagtgctttacatgttttgactttccatataatatatgccgctctcgtacttttggcctcactgctgtgatctgaactgagaaggagtggactgtcagtgttttagggggagaactgaattctcatccattgctttaccatcattttttattccaagtgt

SEQ ID NO: 87646 - DNA, 1043 bp, Homo sapiens
caaaaaaaaaaaaagtctggccctgtcttcctagctttatctttgagcatatacataggactgtgtgtgcctaatctgtaggggtgtctgtgaagacagaaacagcctagctgctcatcaagtggatctgctattatgctatttttattatatggtgtatttgctacctcacagcgttctgaggattaaatgagaaaaacctcactttagaaaataggtaagaaagcagcagcctatcaacgatgatgctgtggctgtttttattactgccctgggcaaaggattctcttggagctctttgcctgttacagaggtgggaagaaaggccaaggagggagagggctgtgcagccaggctggagttgggtcagatgggggagatttaccactcagggtgctgtcaaatttgggtcacagactagtgaagggagggtggagaaagcaggagctgggctcagaaaagggctatttcccgcaaaatctgcttcccccacctaatgctgtggcaggggttagaaagggagactgcctggacgccctgcttggttgctgtggaagtgtgcgggagtctgttttttctttttgttttctccagcccatccttccggaaatcacgaatgtcccgtgcccagagcttccctgacaacagacaggaatactcaggtgagttccacagagcctgggtgggtaatgcagggtgtctgggtggggcctcaggtggctctgcttcgacttttctgagtcagtagctctccttgggcttgctgctttgaggtctcaggtgccttggggacttgggggcttaagtggctcacattgacctacccagaagccagtgattcccctgtcttactcagatcgggaaactcagctttatgacaaaggggtcaaaggtggaacctacccccggcgctaccacgtgtctgtgcaccacaaggactacagtgatggtgagttcttcttcacctgctccctgctggctgcctcaagaaaggacaagttgccatggggagggtgggttcgtccatgcagtgcctgtatttt

SEQ ID NO: 87647 - DNA, 1020 bp, Homo sapiens
gctaataggaggtgagacaatgaaagcaagaggttggagtaatacaaggaggggaccatgagccacgaaatgcaggtggcctctagaacccaggaaaggcaaggaaacaggttctcccctcagagcctctgacaggaaccagccctgccgccaccttgactttagccctgtgagactgattttagacctctgaccttcagaactgtaagatgatacatttgtgttgttttcctgcctctaagtttgtggtcatttgttaagagcagctatgggtagctaatacagttattgtagagttctttctgtcaagtctaagtgattctctttttccttatttcaagaagtacccaggtgtgtggtgagtgtaggtccatgaagcccacgtggacagacatccaagctgaggtatccctcagcttggcctgtcctgcacctcagcttgctgtgagaaaggcgcctctttctgcagtggtgggcaggacagctgggagtccagggctggctgaggggtgacacggggttctctctttccaggagcctgggctgcactgtggtggagatgctgacagagaaaccaccgtgggcagagtatgaagctatggccgccatcttcaagattgccacccagcccaccaatcctcagctgccctcccacatctctgaacatggccgggacttcctgaggcgcatttttgtggaggctcgccagagaccttcagctgaggagctgctcacacaccactttgcacagctcatgtactgagctctcacggccacacagctgccggtcgccctttgctgcatggcagggggctgctgctgggctcagtgaagttgctgcttctcccaggcaaggctgtggaccatggagtggcagcccagccagcgtcggtctgtgccccttccgccactggggctcagagccggggtggggtggctgcagcctcaggactgggagcccccagcctgtcagatccaggagctccagtgtcctgagctcagcgtggaggggtaggggct

SEQ ID NO: 87648 - DNA, 1067 bp, Homo sapiens
cccatccccttgaggtctcagcccctttcccttgtagctcctcccctggagggggaatggcagcaggggttggggaaacagcatctccaagcagcttagagttggccatatttacctcagcctgggcgctggtcctttcttccggcccctcccctccaaaatgtgcctattgctagagctcctccctctcaacacccagtttccttgggagttgtcattaaaggaaaaaaaaaaaaaaaaaagccagtgcccagggatgggcatctccagggagctggggattagtgccaggcagccctgccagccatgcctacatccccatgggcacagaacaagccaaagccttcgttgtatgttgacgatgcacttttatgaatgtagtttctatcgctgtttttagccttttcacatcatgtaatgtgaggccttgtacttgttaatttatatctcagatcatatttgatggtttttatatatatcaattctagactgttacaggtgacggacgcctcaagagagagaagagaaaatgaaagcagctggttttgcagaagtgtgtgtcgcatgcgccagttgggcctggaccctcctgtgtccatccctgttcccccaggggctctatcagcccctgtaccccacactgccctctgaagacaacacaggctcctgcttccacctcggcccttgcccagggtggggcctggccctcatcttgaccaaagctgctgtgtggcagctcggcctctctacgaccccatcttggtggctgcacactcttcctggcccgcacccccatccccagtccctgttccccaagaggatacagagcacggtgctggctgactcaactgtgcgtcccaggttcagggtcttacagagctccaccccctggggtcttacctcactgggaatgtgttttgaaaatgaatttgaagacaagccaacaaaccctgcactccaaaaaagcaaaacagaccctaatttttttgtgccaaaaactgtggacatgctggctcagcatcctcaggaccaagttgttgcttaatttattgttttttaataactaa

SEQ ID NO: 87649 - DNA, 1045 bp, Homo sapiens
aggggcaactggaggaaaggggcagacacctctggactgacaatggtatcagccagatcaccccaggacccctctacttggagtcaagttctcttctgcttgaaaggcccaggctcgttgccaggcaccatacctggcccctgctaagcaaaaacctacctccaccccccacaactgaaagcactgccacaggacccctctgatataaatgatcccttttattgtaagtaatgcgcaacactggcctggctttgcactgcaagccctcggtcaagatatagtcaaataactatggctgcaggttccacagttccacaataaccatggctgcacgatccacaattcagacacagacatagagctggggtgggtggaaggggcaggagggtggcagagtgcggactgtccccagccctggcctctccatgcagagttggcccaggcagacacaccccatggaatgatgagaaagtgacggcacggccccttcccacagcaagcctggggctgccaggaactgcccttcagaacctttgggcccaggtcaccctgaagccccacaactttttatctggattagttattaaaaaacaataaattaagcaacaacttggtcctgaggatgctgagccagcatgtccacagtttttggcacaaaaaaattagggtctgttttgcttttttggagtgcagggtttgttggcttgtcttcaaattcattttcaaaacacattcccagtgaggtaagaccccagggggtggagctctgtaagaccctgaacctgggacgcacagttgagtcagccagcaccgtgctctgtatcctcttggggaacagggactggggatgggggtgcgggccaggaagagtgtgcagccaccaagatggggtcgtagagaggccgagctgccacacagcagctttggtcaagatgagggccaggccccaccctgggcaagggccgaggtggaagcaggagcctgtgttgtcttcagagggcagtgtggggtacaggggctgatagagcccctgggggaacaggga

SEQ ID NO: 87650 - DNA, 1064 bp, Homo sapiens
cttacttccaggtcaaagggctgggaagaagggagggagctagacagctggaaccagccagggaacgcggcagcttgcaccccaggcactgaagtgcagcgaggacaggcgccatcacccactggcagcctggccctcccgctctcaggcctcttcacaatggggtgcatatggtaagttggtgggtctgaaccaacccagaactgaggggtgaggtggagtttcagttccaaaaccactgtgggtgtgacagcatgaagccctcgctgtgaagaggagccctcccatttctcaatggtgtgtcagggaactgacacccacttctagctccctgcccccatcagggccgaggtagtcggggctggccctgtccccccatgcccgccccatggtgagtctgcacccttcctgtgacagatcccccagcaggccacacaatagagaatctggatctattgaaacatgtttaaaacggggttggtcacaacaggatgggcacaaatgggagcgggggaggggagtggggccgcaccagcccctgccagtgcctgaggctgcagcctggcgagtgcttttgcttctgcttctccacgctggtggttcgagatggtcccaagccccactggggcaggccctgccttgccctgcagaggcagggtggctccacttccccatctcctcccccatgggctgcaggggcatttatgatgcccaacaggtggcactgtcgcgctccttcctccctgtctccgtggctcagaaacaggttaagggtagaggtagatggggagacgtgggggccacacagtctccggtggcagtgagggagcttgggaccctgaggggggcatgctgactccttgctggagaaaaggcacctagataggggagctgggcttgggggcctcccagggggtcctggggtgaggtggggagggaggctgaacgaagcaggaagcagggtggtgggcagaccccaatcctggtttccaaaccctcaccggctgcgggagaaggaagaaggaaggagtcctggagcagagccctgccctggtcccctacgc

SEQ ID NO: 87651 - DNA, 1762 bp, Homo sapiens
ccacccagcctggcctccccttgggcatcttgctcccgtgtggcctgctgcagcgacagcccaggctgtggcactgcagggactgcctctcagacctcatcggatccacctgagcatggcagacggctgggcttcaaagcaggttcatctgactgctccttccctctagggtgaagactctacggtaaaaggaatttgatgccttggaaagggagagcggaaactgtgagccctgctttccagccatggcgaaagcgggtacttttgtgcaacccctctcctttcacgttggcctggctagggcggagctgccacgccagtgaccagcgtttctttgggaaaattggacttactccacttccaccttttccactcttcaaatgatcacatttgcatattgggaacagtgtatttgtgaagagactctcaggccttccagggaccaccccccccccccacccgctacagcccaggtcctggttctgtcctccccagatgctgctagagaaactgaacggcacagtgccctgcctgttggataccagcaccatccccgctgaggagctgaccatgagcccttcgcgctcagtggccaactctggcctgagtgacagcctgaccaccagcaccccccggccctccaacggtgactcgccctcccacccctaccaccgaaccttctccccccacttccaccactttgtggagcagtgccttcagcgcaacccggatgccaggtatccctgctggcctgggcctgggcttcgggagagcagagggtgctcaggagggtaaggccagggtgtgaagggacttacctcccaaaggttctgcaggggaatctggagctacacacaggagggatcagctcctgggtgtgtcagaggccagcctggggagctctggccactgcttcccatgagctgagggagagggagaggggacccgaggctgaggcataagtggcaggatttcgggaagctggggacacggcagtgatgctgcggtctctcctcccctttccctccaggcccagtgccagcaccctcctgaaccactctttcttcaagcaggtatcgtagccccttcgttctggttctggttctagttctggttctaacaactcacaatccctttagctttctctcccctccctttgaatgagagaaactaccccgcttccgaagcccctgaaagacactgctccttcctctcatggagttggctccgacagcccgtctgccaccaggccatggttccttgccccatggtgtcctgggacccagagcaacaggatctgtcacccacctctctcttctcccccagatcaagcgacgtgcctcagaggctttgcccgaattgcttcgtcctgtcacccccatcaccaattttgagggcagccagtctcaggaccacagtggaatctttggcctggtaacaaacctggaagagctggaggtggacgattgggagttctgagcctctgcaaactgtgcgcattctccagccagggatgcagaggccacccagaggcccttcctgagggccggccacattcccgccctcctgggcagattgggtagaaaggacattcttccaggaaagttgactgctgactgattgggaaagaaaatcctggagagacacttcactgctccaaggcttttgagacacaagggaatctcaacaaccagggatcaggagggtccaaagccgacattcccagtcctgtgagctcaggtgacctcctccgcagaagaga

SEQ ID NO: 87652 - DNA, 1042 bp, Homo sapiens
cttggcctcccaaagtgctgccactgcatccagctataactatgttttaatgaaaaacttcaaatctacataaaatagcatgactccatttacatatcaccagattaaaagcttatttagctctgtcatccaggctggagtgcaatggcacgatctcagctcactgcagcctccacctcccaggttcaagtgattatcttgcctcagcctcctgagtagctgggattacaggcacctgccaccatgcccggctaatttttgtatgtttagtagagacagggttttgcgatgttggccaggctggtctcgaactcctgacctcaggtgatccacccaccttggcctcccagagtgctgggactgttcagtgctcttgtatgctctagaacacctcttgccctacctcctacgaatgcttttaatctgtacttcttatctgtaggactcttgtaaagtgtacctaggggtactgtgttccgcatcccattcttcctttttcactcagggctgtagtttccagacacatctgtattgctagctgtgtacctttcatcttttcttctaattgtcaccttggttctgggaagagatctaacacttttactcatccatccttctggggacagacactcacactacccctaaccaacacacgtgtgaatggtgacatccaaacatgtcccctgatgggtctgcacgagggtttctttagggtgtacatccagaagtggcattgatggttctggttctgtgaccctgactggcagcaccgggcatcttccaccacctggacaggaggctccccgtccttgccacactgggactcgtccagcctcccaaccgctgccagtctcatgtgtataaggtgacatcttgtttttcatttgcttttctctgattgcgagatttgagtggctcttcctatgatgggtttgtcttggggtttcctcttttgtaaacttcatatctttggcccatttttcttgctttgctgtccatttcttgttgatttgcaagatttccctgttactaatctcctgtg

SEQ ID NO: 87653 - DNA, 1033 bp, Homo sapiens
tagctttgtcaccacaggagattagtaacagggaaatcttgcaaatcaacaagaaatggacagcaaagcaagaaaaatgggccaaagatatgaagtttacaaaagaggaaaccccaagacaaacccatcataggaagagccactcaaatctcgcaatcagagaaaagcaaatgaaaaacaagatgtcaccttatacacatgagactggcagcggttgggaggctggacgagtcccagtgtggcaaggacggggagcctcctgtccaggtggtggaagatgcccggtgctgccagtcagggtcacagaaccagaaccatcaatgccacttctggatgtacaccctaaagaaaccctcgtgcagacccatcaggggacatgtttggatgtcaccattcacacgtgtgttggttaggggtagtgtgagtgtctgtccccagaaggatggatgagtaaaagtgttagatctcttcccagaaccaaggtgacaattagaagaaaagatgaaaggtacacagctagcaatacagatgtgtctggaaactacagccctgagtgaaaaaggaagaatgggatgcggaacacagtacccctaggtacactttacaagagtcctacagataagaagtacagattaaaagcattcgtaggaggtagggcaagaggtgttctagagcatacaagagcactgaacagtcccagcactctgggaggccaaggtgggtggatcacctgaggtcaggagttcgagaccagcctggccaacatcgcaaaaccctgtctctactaaacatacaaaaattagccgggcatggtggcaggtgcctgtaatcccagctactcaggaggctgaggcaagataatcacttgaacctgggaggtggaggctgcagtgagctgagatcgtgccattgcactccagcctggatgacagagctaaataagcttttaatctggtgatatgtaaatggagtcatgctattttatgtagatttgaagtttttcattaaaacatagttatagctggatgcagtg

SEQ ID NO: 87654 - DNA, 1099 bp, Homo sapiens
caggagtttgagaccagcctgggcaacacagtgagaccttgtctctacaaataacaacaacaaaatattttttgttttcttatcttaaagaggaattctatacgttggcccttgaaattgagataagcttataacttcagaagtcttcagtcaacagtttgccttcatcatctctgagtcggtgtgctggcaccctttgttgttggcagtttccctatctggcagaggcaaagcagtgctgggtccctgcagaggcagcagggccttgtttttcctatgttggcaggcacctgcttaggctgttcccatgactctgagaacacccagaaagtgccaggtccccctattgtccatgctgccatctttgtgttgagcggcatccttcagtgccatttggttctgacttcagcttcatcattgcttccagggcgagctgcatgtctccaaactcttcaaccatcccaatatcgtgccatatcgagccacttttattgcagacaatgagctgtgggttgtcacatcattcatggcatacggtgagtgggaaagggttcttggtagaaaggggttattgggactctgttgtcagattgcctgtgttttcctcctccattacctttcactgcctccatgcaatccttttctgcaggttctgcaaaagatctcatctgtacacacttcatggatggcatgaatgagctggcgattgcttacatcctgcagggggtgctgaaggccctcgactacatccaccacatgggatatgtacacaggtgcgttcttaggcggcctttcccatgattacagtgggtagctatgcccctgagccttcaggtaaagtgaagtttgactgaagttaatgaagccagagtttaaaatcaaggatctggattcttgctgaagatctctttgctctgaaaagaaacagggcccagcgcgatggctcacgcctgtaatcacagcgcttgggaggccaaggcaggtggatcacaaggtcaggagtttgagaccagcctggccaacatagtgaaaccctgtctctactaaaaatacaaaaattagccgggtgtggtggcacatgcttgtagtcccagtagct

SEQ ID NO: 87655 - DNA, 1031 bp, Homo sapiens
ttgtaacagtgtataagtgctatgagatattatgagtataccactttctttacatattaaagcataatttatgttttttgatgcagtgcatataatttttatgaagttttcaatttaggatattacttcttttttgatttggaaaaaatagttataggtaagggcagaagatgctatagttccaattcacagtctgtatcatgcaacttatttctgaatgttacttaatcttttttctaatgtttatgcatataagaacaatttatattagaaagagtaaacttcactgttaattaagaggaaaaaaggaatctctccatagcctgaactctgcccagtggaaagaatgcccccaagccaaagtgtaacaccagtccttaagggaaatacaatcttgattccattgcttttaaatatgagctccttgtctgcttcaacgtagcctaattcaggtgaaacgaaaccactgatcagaatgacagaaatctaatactcgtttgaaataggccagtaaagtgagccatagattgatcctgctagtttggtcttactagtttggcccttgtgaacttggcagaaaatgtaagcagccatgtctttagaacccctagtggataaagaatatgcaacttgttgtgtgccattttacaaactaacagggtcttgtgaataactactgtttcatctctgttttctgtgttatgaattccagtaatagttttcaaattgacatcagtgatccaaggcatctgtaatgtagaacgagtaagatggaaccaatatagggaaggcaaaaacagtcttcattattacagccagtactatctatttctcatctgtcaaatttaagaattattcatcaaataggcaaagaggagtggagaaaggaatcttgtttttagttcaagattctgttaaaaacttttccatagaaatgattcctaactgtactgcatgattctgttttcatagttgggattttgtttgtctgtctaaaggctgatagctaatttgttgcggcttggaagaaa

SEQ ID NO: 87656 - DNA, 2644 bp, Homo sapiens
aggtatggtgtctgtgctaataagaaatttgcaatgaataacctgatggaacaagattcttaaaatttattgaactgaagtagaatgtatcttctggcagttatacatttatgatataatgccatcatgaatggtatggtgaacatcaggctaagtgttccctgggtacagaaaaaaatcaaaccagaataacaaaggctggttaattatagtagtttctttcaaaactgagattttagtttacctttgcttcatttgaagttgatttaatttttattcactaatgtagatattggcaattatttttataactatcttctagaatgttatggtgcaagcctaagtttttgaataatactataggcagtattctaatttggatttttttttaacatatgtttcaagcttaatttgaattctctcgtccccactccctttctctatttattaccccttctttctctaggaggctgcattgaggcgtgagcaaaagaagttggaaaagaagcaaatgaaaatgaaacaaatcaaagtgaaagccatgtaaagccatcccagagatttgagttctgatgccacctgtaagctctgaattcacaggaaacatgaaaaacgccagtccatttctcaaccttaaatttcagacagtcttgggcaactgagaaatccttatttcatcatctactctgtttggggtttggggttttacagagattgaagatacctggaaagggctctgtttcaagaatttttttttccagataatcaaattattttgattattttataaaaggaatgatctatgaaatctgtgtaggttttaaatattttaaaaattataatacaaatcatcagtgcttttagtacttcagtgtttaaagaaataccgtgaaatttataggtagataaccagattgttgctttttgtttaaaccaagcagttgaaatggctataaagactgactctaaaccaagattctgcaaataatgattggaattgcacaataaacattgcttgatgttttcttgtatgtctacattaaacttgagaaaaagtaaaaattagaacactgtatgtagtaatgaaatttcagggacccagaacataatgtagtatatgtttttaggtgggagatgctgataacaaaattaataggaagtctgtaggcattaggatactgacatgtacatggaaaattctagggacaggagcatcattttttccttacctgataccacgaaccagtgacaacgtgaatgctgtattttaagtggttgtatgtttattttcttgagtaacaaatgcatgaaaaattaatgcttcacctaggtaagatcattggtctgtgtgaaatcacaaatgttttttccttcttggttgctgcagcctggtggatgttcatggagaagctctgttctctatattatggctgtgtgccgttgcttctccctctgcttttatcttttccacagttgaggctgggtatgttctttcaaagaaatggccatgaatatgtgtaagtatacttttgaaaatgagctttcctaaactattgagagttctttccacctcttgcggaaccaactcttggaggagaggcccatgtatctgcacgagcacttagcttgttcagatctctgcattttataaatgcttcttaccaagaaagcatttttaggtcattgcttgtaccaggtaatttttgccggggatgggtaagggttgggttttctggtgggagtggggtggtgggtattttttgttgatgctttagtgcaggcctgttctgaggcaataacaagttgctgtgaaaacagcatgtgctgctgcctttgtaactgcatggaaacttttcacatgggtttttctccaagttaatacagaaatatgtaaactgagagatgcaaatgtaatatttttaacagttcatgaagttgttattaaaataactaacataaaacttaattactttaatattatataattatagtagtggccttgttttacaaacctttaaattacattttagaaatcaaagttgatagtcttagttatcttttgagtaagaaaagctttcctaaagtcccatacatttggaccatggcagctaattttgtaacttaagcattcatatgaactacctatggacatctattaaagtgattgacaaaatctcagagtgccgccttgactttgtggagttatcctacaagagtataagctcagaggaaaattctttctgttcgataaaagtcagcactgaaatgcttttccttcaaaagagttcatctgaatattccttttgttattaccattcaatcattttaaaaacattttatatttttagagccccatatgttatttatgggctcctccctgcattccacctcttaagactccattaactctcctgtgaatgcgaggacaaagagaggaggatgttgtttagtgtcacaaactggaaaaccactaagtctccaatctcatttgcattgcctggatgtttagcaatgccaaaataagcactggactgtaagacaaagacctggcttttagtgccagcagaactaattactaatcctttgactttcggcaagttattaacctaatgtgaagtgaggatagtaattatttgccctgcct

SEQ ID NO: 87657 - DNA, 1826 bp, Homo sapiens
gacagaactaaattatatatgctgtagtagattatccctaaatttactctgagcctaactcaaaaataagataataagatgccttgttataggaagatagaataggagttggaaataaaacataaaaatgcatcaaaataagcaaaaatgtatctaaaatatgggcctcatacttaaatataggctcatttctggctccccaggtgagatggaatatacccttgcctggagggaacatcactggaggtgttcaaatataggataaagatcacttgagaatgcatccatcagatagacgagtggaccagatgacctgtaaagctccttcattatatttgacttgggtatgccaagccaaatactgtgctgattatgtgcaggtatctgttcatctaagtgtattgggtgacttgtgtacatggaaaacatctttcttgtattccttcttaattgccttttcttttatgacagggaaggtcagcctttaaagctacctgacactaagaggacactgttgtttacatttaatggtaagtattctgggtcctttctgggttcttagtcttctctgagatgaccttaaggagagtattgtttcctcctaaatgatagctttaaaactacgtcaaaactataagcctgtgcttgcttactgatttccagatttcttcaagaagaaattacctattatatattttaatttatattttctgctgcattttaactgcctaacaaacttagagaaatgagtctcttaagattaaaaaaaaaaaagagttgggtgacctggaaatattaatgctaccattaactcagtaggaaaaatggctttgttttccagtgcctggctcaggtaacacttacccaaaggatatggaggcactgctacccctgatgaacatggtgatttattctattgataaagccaaaaagttccgactcaacagagaagtaagacccaatgcctgtattatataaattggcacctttttttgtttcttctcaagggggagggcagctatcaatgatttcagtgactgaatttttgctagttgatttagaagtgccaaatgggagtagttttatgaaagaatgctaaacgggattttgttgctgttgactagaaatggatttcttatgaaatactttgtttcttggggaagggcaaacaaaaagcagataagaaccgtgcccgagtagaagagaacttcttgaaactgacacatgtgcaaagacaggaagcagcacagtctcggcgggaggagaaaaaaagagcagagaaggagcgaatcatgaatgaggaagatcctgagaaacagcgcaggctggaggttagacaaacttatcactggggtaaaactacgatttgtaaggatgactgcttgtgttctgttggttgttaaggtaatctttgtaggctaaaagtttagcattttctcaacatttgggacattgtatcaattgataacactataaagaagaataaataatccttcctgttcaagccgtgccacactgagtctgtgaacgtgaaaaattatcagtattatcctgttcccccagcacaatttcattttgaaaattccattatcagttttcgagccaaacactttggtagaaagaagttagaaattttaatagaaggcagcacatgcgccctattatctaaataaacttgctatgtaaaatttaaaatctgattatagaattagagatttccaatatttttgtttgtatttttgttttctgttttttacctaactagaatctcaaactcaaaagctttttgggtatagtatgttatatttgaaagctcggtatgatct

SEQ ID NO: 87658 - DNA, 1073 bp, Homo sapiens
tcccttttaaggacttgcttgattaagttggatacacccaagataatgtcccttttggttaattcacagtcagctgattagggaccttctgccataaaacagcctgattatgggggtaatattccatcatatttgcaaatcccaatcacttaaagggagagtatatgcaccagcggggagggaatcttaagggtcatttagaaatctgcctatcacagaacctaacaggtgaattttgttgttttttacatttttttaaaagcaaataaaagtaaccatgaatgatgaagacatggatacctacgtatttgctgttggcacacggaaagccttggtgcgactacagaaagagatgcaggatttggtatgtcaggttgctccaactcaaatatacgtagaactgtgtctccttagcacacacatattcagcttcattgcataataaaaggtcatatcttactttcaattacttcttcctctagagtgagttttgtagtgataaacctaagtctggagcaaagtatggactgccggactctttggccatcctgtcagagatgggagaagtcacagacggaatgatggatacaaaggtaaatgcgacagaagacatacatttgccaggccttggcatttacaggacactctccctaaaagtctcattgtacaagttcatcattttatggcaatgtattagttttacattcctttcccacacaaatattaaaataccttctttaagcaataaattagcttgtcaaaaggacaatttgattagtcaagaagttctctaaatcaagagcaaattgttcctgggattgctaatgactttcaggtttttttttgaaaaaggaatatagcttctaatctttttcgtcatgtcatttagtcttttttttttttttttttgagctccagtttgtgtgggagaagagggatgtgtagagagccctcctcctttgtttttaaaaagatggggtcttgagatgttgcccaggctggagtgcagtggctattcatgtgtgtgatagatctcactgcagcatcaaaaacttctgggctcaagtgttcct

SEQ ID NO: 87659 - DNA, 1154 bp, Homo sapiens
atggtgaaaccccatctctactaaaaatacaaaaattagccaggcgtggtggcacatgcctgtaatcccagctactcgggaggctgaggcaggagaatcgcttgaacccaggaggcagaggttgcagtgagccaagatcacaccattgtgctccaacctgggcgacaagagcaaaactccgtctcaaaaaaaaagaaattaaataaatgacttgatgacttgttgaagattttacagatatgtagtgccaggatccagactagaacccaagcctcttgaccttacttcattgttctttatataatgtggtctgaatctaatagtaccaaataagagaaaagcaggagaggtttatagatttttactgtttataaaatctgatcagtatgtatagaatggcaatccattttggggttctctttttttttaagctttttttctcaaggtgcaatgaaagccttccacactttctgtgttgtccttctggtgtttgggagtgtctctgaagccaagtttgatgattttgaggatgaggaggacatagtagagtatgatgataatgacttcgctgaatttgaggatgtcatggaagactctgttactgaatctcctcaacgggtcataatcactgaagatgatgaagatgagaccactgtggagttggaagggcaggatgaaaaccaagaaggagattttgaagatgcagatacccaggtgaggctctttttattaatttattggaaaaatttgtaactagcacctttcccaaacattaaaattaatcctcaggctcaagagacctttactgtctggagtcttcattttcattcactaggtagagctcttctaaatgttctgtggtaagtttccaccttttacattaacagaatgaattgtgttcttctattgaaaccctgactggaagaggggttagagaatagatactgtttgtgggtgagaattgtattatttagaactttgcaattggctgggcacggtggctcatgcctgtaatcccagcactttgggaggccaaggcaggcagatcacccaaggtcaggagtttgagaccagcctggccaacatggtgaaaccctgtctctactaaaaatacaaaattagctgggcgtggtggtgcgtgcctgtcatgtcag

SEQ ID NO: 87660 - DNA, 1032 bp, Homo sapiens
cgcctgaccttaaagctccagaacgcctcacaggctcctcagatactctgacgggaaactgcagttgggtggacagtgttcatgacccatctagaaagtgggtctgcgaatgaagaaaaagtggcgtcaaggggctagccaaaaatcccaagagaaaacgggttggacagaaaccatatttacatgaacatgcctatagtttaaactgttgcatatactactagagcgacactcttgcctctggccacgtggtcccacacagcatggccacctttagcttccggagcaccggttccgtgtgacgtcaacttgacggaatcctaggtaggaggattgggataggcgagggcagttccggcccaggggcggggattatgtaattttcccaaaagccccacctcgcctcagccgggcgggagagagggaggtctcgcgctttccccggggttgcgtcccgccccgcaggctgcgcgcaggcgctgacgagccgctcgcattctacgtaacggacggcggaggctacgtgaagagaggcgcggcgtgactgagctacggttctggctgcgtcctagaggcatccggggcagtaaaaccgctgcgatcgcggaggcggcggccaggccgagaggcaggccgggcaggggtgtcggacgcagggcgctgggccgggtttcggcttcggccacaggtaaggagcgggccaggacgcgctcgtcggcgtggccgggccaggccgagcggtgactccgagttgcttggcctgtagcccggtccggttgagataattgtaatggtttgggggaactttcccacggagctgtgagcaaatgatagccaaaagggcagagttagaggaaatgtacagtgtgtgccggaggatgacattaggatgtattgattctcttgggtggggagaaactaggcaaaggggtttaatagaagcaaaaacctctgtggccagtctcttctggaggtttctaaaatgaaacgtgtttgtatccaacacatataaagagacagaggaaagtctgc

SEQ ID NO: 87661 - DNA, 1046 bp, Homo sapiens
ttggggatatcatattcatgtctttaggagttggtatttgagatatgctttgaaggataggactttggtaggtactcacagtttataggaaagagatttgatgtgaaggggatccagttagagggaagaggattcactagagtgcttgttttcctggaaaactgagtacgtgtggagagaccctgggaaatatgaatggtaaagtagtttgatgccacaatggagggtctcattccagcatgattaactgtggagagctatggaattgaggagagtgacataatcagaaatgtgtgttctggaagaacctggaaagggttttcgataagcatctgaatactgacctcccttctgtgagactttttctggttccacggtattaacacacactatgctactctaccaaaggaggtaaaacttgcttttctcttttcactgtgtgtctcactattacttcatcattttatgctttactaaacagaatcacttctcatagactatggaagatttgctggttttagatgaagcatctggatgtacatccacattacttttccaataaaacagacattcttgggacagtagtcaggggaggattacctgtcaaatgtcattcatctcagagaggccttgcctgacttaagtctgcaatagcttgcctcttaccctcttgcttgcttttcatagcacttttgctacctggaattacatgatttagtttttctttctcctgggccagactgtgaactctgagtatggctgcatctgattccattactgtatccttagcaccttagagcagttactggcacaaaataggcactcagtatattttgacttagtgatcactctagtagtgctgtgagagcttgataataaagttttttttttttttaagacagcatctcgctctgttatccaggctggagtgcagtggcacgatctcggctcactgcagcctccgtgtcctgggttcaagagattctcctgcctcagcctcctaagtagctggaactatgggtgcgcgccatcacgcctggctaatt

SEQ ID NO: 87662 - DNA, 1038 bp, Homo sapiens
gctaaattcttttgcttggccttttttctttttggagggaggaatggagcttcacccttgttgcccaggctggaatgcaatggctcagtctcagctcaccacaacctctgcctcccgggtcccgggttcaagcgattctcctgcctcagcttcccgagtagctgagattacaggcatgtgccaccatgcttggctaattttgtatttttagtagagacagggtttctccatattggtcaggctgccctcgaactcctgacctcaggtgatctgcccgccttggcctcccaaggtgctgggattacgggcgtgagccaccgcacccggcccagatgtcaaattttatagaaagtataaacttttctagtgcttgaactagatgaagatttatttttagccagtgttctgaaaaaggatttatgtaggcttaaacaatatgttctaccacttttggtgacctgtttcttatgttacattgcttatgtcatcttcagtttatagtcttaaatatatcttatagctggttcagtcctccgaaaagtaggttgtttgtatgcattgcttctctttaaaacaatttctcttcatcaggaacatttggtttgatagaacacccgatcatgccacagtatatatagtggcatttttaaaaatctgagattgccagaaaaactcacggtgctttatagtgagaaaaagttgtgcagaatgtgtataaagccttgggaaaaatcatttaactcttctgaccttgattttcaaatgtataatgcaaatgattaattttgatcagtgatcatcaatttgcagtatataaaaattgcctaggccgggcgcggtggatcacctgaggtcacgagctcgagaccagcctgaccaacatggagaaaccccgtctctactaaaaatacaaaattagctggatgtggtggctcatacctgtaatcccagcttactcaggaggctgaggcaggagaatcgcttgaacctgggaggaggaggttgtggtgagccaagatggtgccattgcactccagc

SEQ ID NO: 87663 - DNA, 1050 bp, Homo sapiens
attaaaaatgtctccagacattgccagatgttgcctaggggcaaaattgtcccagattgagagcaacctttccagagtcagatgtatgtggtcttaagctatactttgaggaaggcctatctgcctgaattgaaagcactttatatctgtaattttatcattaacttaaagcaacttaaggttatgtatttgtgaagcaagcatttttgttcatttttccatgtgtggcacattattacagataaaattgtgcagtccatatacagccaatttatacagcatttagttatttctctttgaaaaataattgtcaaaatgcaatttgatggcatcaaaatgcacttgtcaaatacatagctaaagctattatggcacttgttccaatctaaaaattgtttctttcagtgtttttagttgatgtcattctatacagccttttgtttcattaggatcaggcagctagagacatgaagaggcttgaagaaaaggacaaggaaagaaaaaacgtaaagtaagttgttttcttctccctcacaaaggttacgtgaaaactgctgaagtattgcaaagtctattcccccaaagtttatagagaaaaaatattgacgtacacttgtgtactttacttgaagttattcctgtatcttgaatactttaagaatagagatggcaacagtctttgcatttgcaataattaaaaagcattcagtttggtagaatagtatttggtctttgactataaatagttgtttagtaaacacaaggaatgaattatagtagagtttaggggagcataattattaaagtttaggctcattgttctgagtttgtcgcataattaatataaaataggtttatgcctatatggttgattatgagaagtaatggcaactgtatcatgaaaactatgtatagttgaacctttgaacaacacaggtttgaactgcgtgagtccactcatggggatttttttcaaccaacacaggtggaaaaataatattcacagtataaaaacctgtgtataaggagggctgtaataatacctaattt

SEQ ID NO: 87664 - DNA, 1214 bp, Homo sapiens
acatatatataatggggtggatagtttatagtgtgctcattgctgctttgttattattagtgttgagagttcctgtgctgtgtggaattcaacactaatctgctgtaagtatggagctgggtatgtggaacatttgcagggaagtttgtttctccgcttgtttttccaggggtattcgagatgacattgaagaggaagatgaccaagtgagttcctatgcagtatttctatcttttatttttatccacaaagtctatactggggacaagctagagcttgccttcactcaaaatggccattcctgacattcagcagggaatgtcatttgatttgctccttttgtacctgtgtgaccaattggtaatacatagattcacatggctttcccccatattgaagatggaatttttgatcaactgtgacatccaaagcaaatacgagctttattcagcttgcttctttttaaatccaaaattaatgtttattctgataaatcaagtggtagagtagtgtgggatctattgatggcctctggtaacatctaacctctgtctcttagtaagtgtcctgtttgtggttcttgtatttcaagctggaacattaattactgtccattagtctcttttcccccattgttcagttgtggagtgatgagaatcagagtgagtggtagccgtttccaggtttgtgacctttctaattagcgttaacttccaaacttggattgttaaagccacagcatgtgttctatggctctgggcagggttgatagacaccccactccaggaaggctgtggaacagacagatttgtaagtcttctattaaacaagttgcaacatttaatagtactaactgtttaattcatttcttctgattgttcttctgaatattgctattattaaaggaatcattgctagtaaggatcttgccttacttggtaggtatgttaactgtgcaattatctggtacactatgtgcgctaattacaggagcagaaacattctcaattgtacttgggtgtgattatgttcttgtgctttcctgcaggaagcttattttcgatacatggcagaaaacccaactgctggtgtggttcaggaggaagaggaagacaatctagaatatgatagtgacggaaatccaattgcacctaccaaaaaaatcattgatcctcttccccccattgatcattcagaggtatggtgtttcttgc

SEQ ID NO: 87665 - DNA, 1703 bp, Homo sapiens
tcagtcagttttatatgttctgtgctggatgggctagtgatgaagggtgggagtccccatctaaaggaagaggaaacaaaaggaatagatgttaacagatgatatcttagaatattttgaaatgaagataaacttgtctgtcaaattacatatagtatgctttattttaaaaattagaataaactaataccttttaaaaatatgcatgtactaatttcagaatggtttaaactgcctaccagaaagttttgggctgcacattggctacattggtttaaggtgctgatagatggtaaatgaaacacacagaaaaaatatgctatgctatctactctaatatagacaactttctcgcctgtgtgcaccttatcagttgctacacgatgtttaaactcctgttttccaggaggggtgtgtatttgtgtgtgtacacttgtctgttttccaagaggttactcatctccccagtgacccaagaaaaattttaagtaaaacccctgaaatcctgattggaaatatcaacatcaccagagaagcattgaaaggttaccactttgggggacaaaatggagattataagccccattcttcacctaggtgcagtttgaacagggcttgacagtggctggaccatcactaagtgagactttaattcatcaagcataactgaaaatggaggcagtagattatatcttggtagccagcatgtgtagacttgtcttatttggagcccacttggaattttcatttcaagagtaagatacattaatttttttctaccatctggttaatacttaatgcaaaatggcaaaagaacagttatggcttcccaattcattgaacaattttttttccgttttatttgttatgagaaaattaattttgagttaagaaatttttaatcatttaaaattgtatgacaattatcttgggaatatttatcatggagtttttaatatgaggtttatatttgttaccatttgaggtttttccttttcattgtatgattttggcttacagacttgtatttttacttcatactccagctaaaatgctagatccaggtaagtattgttgaacttcaaatgctgttaatgttgaagtacaagtcattctggggagttgtctctatctctaggtctctggtgctgcacctcctagaccaggaagtagctttgctcattttgggtttgacgaacaacttatgcaccagattcggaaatctgaatacacacagcccactccaatacagtgccaggtaagtaaaacataatgaaagaaaaataaagtagggtagtctttcatgactatattaatttaaaaacaaatcacagcagtaaaacagtgtttagtgtagaaccttgttgataaggatagaggtatttatcactcttaagaagtcactaaatggctgacaaatattcttttgtatctgatacgtatgttgaaaatatgatatgaagaaaataatttattaggcctaaacctaaccaaaaaggttcgtatatagacaaatttagcactgtcaatgactagaattccttcgttcgtcacttgaaaattctcattcattactgaaagttttagcttctttttcccatttatatatgggatttatttattcttatgcagaacattctcattttctgtatatgaatgagatagtctgtaccttcttaaggggggaaaatttttaaaatttt

SEQ ID NO: 87666 - DNA, 1088 bp, Homo sapiens
aaaaactgcttctggccactttcccacagaatttaaatcacagtgtaaatgaagatgccgattgagttttcaaaatttctgttcctttgagctaagtagtgcataaggtatgtggctgttggaccagtatctattacagtctgagactagagaattagcacttttgccaggagtgcaactgcttagaaagtccctgtgaatgcctttaattatacttactgttcattttgttgatcttatagggtcgactgatagatcatgtgaaaaagaaagctaccaatcttcaaagagtctcttaccttgtgtttgatgaagcagatcgaatgtttgacatgggatttggtatgccttgaataccagtttcttctgtccccatcctcatgatactagttttttttccatgtctttctagactgttttttcagcatgagagaagctaaaaatactcctggatggggttagactatagaaatatagctaagatgaacatttttaggagttttctctggaaaagtatgttaggttttattgggttgaggaaatttcaaagtgcctttgtatataaggggaatattttctctgtcttcatttttatccatatgcctttgatcatagaggttaaggtctgtgttcttgggtagatgaatgtcagatcattcgaggccctttgctttcctatcctcgtagctgtctttactgattggaacactgctagacctagcccagttggatggagggaaaatttttcacttttatgctgaatgatatgtttaggagcttcttttttcttgagacagagttttgcttttgttgcccaggctgcagtgcagcggtgcgatctcactgcaacttcctccttccagtttcaagcgattcttctgcctcagcctcctgagtagttggggtgataggcacctaccccacagcctggctatttttttttttttttttttttggtatttttagtagagatagctgtgttgaccaggctgcgaactcctgacctcaagtgatccgcctgcttcggcctccgaaagtgctaggattacaggcatgagccactgtgcctggcctggggtttctaattt

SEQ ID NO: 87667 - DNA, 1029 bp, Homo sapiens
ttgggaggtggaggcgggcggatcacctgaggtcaggagatcgagaccatcctggccaacatagtgaaaccccgtctctactaaaaatacaaaaattagctgggtgtggtggcgcgtgcctataatcccagctacttggaaagctgaggcaggagaattgcttgaaccagggagtcggaggttgcagtgagccgagatcatggcactgcactcccgtctggcaacagagcaagactccgtctctaaaaaataaaagtcccttacactagaaggcctaacatcatagaatctgtggtggtgacttaacatgcctgtatctcagctcaccaaacccatgcgctttgcctagataaaggaaatgtggcttattagcactagcatttctggttactttgatcttctgactacagatgaagaataaaagaatttggttgctttttatttcagcccgtggtctggacattccttcaattaagactgtcattaactatgatgtggcacgagacattgatacccacacgcataggattggccgcacaggaagagcgggtgagaaaggtgtggcctataccctactcactcccaaggacagcaattttgctggtgacctggtccggaacttggaaggagccaatcaacacgtttctaaggaactcctagatctggcaatgcaggtgaggggctgggcacactttcaattgctcctggttataagaccaagacattttagcagtcctggaacagataacataaaaacttgacaagaaagttgggtggctaggaggatgtggggcttatgaggtacagataggaattgtgagatactaaaattcatctagtcttatctggtcttcttctttcaacagcatctgttttgaaaagctattcctttgtgctaaaatctgtcgctgtaatttctaccccatagcacacttaggagtaaatttaatctcaaagatggttactattctccttactgctcttcccccacaaaatttttcttctgggaggctaaaaatgtgtgatgcc

SEQ ID NO: 87668 - DNA, 2069 bp, Homo sapiens
cagccagtttaagtaatcagaaggctggaagttctgctgctggggcaagtgggtggactagtgcagggagcttgaattctgttccaactaactcagcacaacagggccataacagtcctgacagccccgtcaccagtgccgccaagggcatcccaggctttggcaatactggcaacatcagtggtgcccctgtgacctacccgtctgccggagcccaaggagtcaacaacacagcttcagggaataacagccgagaagggactgggggcagcaacgggaaaagagagagatatactgagaaccggggcagcagccgtcacagtcacggagagactggcaatcggcatagcgatagtccacgtcacggagatggtggtcgccatggagatggataccgccatccagaaagcagcagccgtcatactgatggccatcggcacggggagaacagacatggaggaagcgcaggccggcatggggagaaccggggtgcaaatgatggtcggaatggggaaagcaggaaagaagcttttaatcgtgagagcaagatggagcccaagatggaacccaaagtggacagcagcaagatggacaaggtggacagcaagacagataagacagctgacggctttgctgtcccagagccgcctaaacgcaagaaaagtcgatgggacagttagaggggatgtgctaaagcgtgaaatcagttgtccttaatttttagaaagattttggtaactaggtgtctcagggctgggttggggtccaaagtgtaaggaccccctgcccttagtggagagctggagcttggagacattaccccttcatcagaaggaattttcggatgttttcttgggaagctgttttggtccttggaagcagtgagagctgggaagcttcttttggctctaggtgagttgtcatgtgggtaagttgaggttatcttgggataaagggtcttctagggcacaaaactcactctaggtttatattgtatgtagcttatattttttactaaggtgtcaccttataagcatctataaattgacttctttttcttagttgtatggccaggcagtccccattttaggagttggcttctgcaaattcaatccattgagctaactgttggggagcaatttggtagttgtagacatttgcagggaagggagatgtctgattctaaatgggagttgatgctcaggtccccagccaggtttgcatccagccctgagacatgtaggaaacacctttcagacccaggctctgaagattcccagaagccacaaggattgaagggaaaaggtgatcctggtaactgttccaggattgctccaggtttgagatggtattgctaaatttaaaattaaacaagaaacccaacaacagcttttaaagtgtcttctatctcattgtattttttttaacttgccccaatgatagaaaagtcttttgctgaaatgattttgatgatttttgtttatcgtttataaaaaggaaaagaaatatacaaactttgacttttgtgactttgtgaaggtttctttaagatgtgcattcctttctgcttgctctctagtaaatgttttactaccgggacctgtggatcgtttgtcatttctgtctatgaattggtacatattaagaatagtgccgcacacagtgtagggacagatagggaagtgcttattaaaactgtcagaaaagacaactcttccattatcctggttttattcaggaataggatgggggtggggagggcttaagtggcccacacgtccaggtgtagactgactacattgagtatcgctccaacaccgaacttccctttaacggtttaaaaaaagggtcatgagtgtcaacacagttcagcagtgttttcatgggagaccttcaggcaggcaggaggacatcctcctctctgctcaggaccaccacgggagttctaggcactccacctcactgttcttcagacagctgtgatgtgagcaggggctaggccggtaatcaagggggccagactgagccatgccacacccttcctcctagtccccatgctctcctgggag

SEQ ID NO: 87669 - DNA, 1474 bp, Homo sapiens
caaccaccacgcccagctaatttttgtatttttagtagagatggggtttcaccatgttggccaggctggtcaaactcctgacctcaggtgatctgcccacctcagcctcccaaagtgcagggattacaggcgtgagccaccgtgcccagtctggtaatttctttagaaagcctggaatgttggatattagacagatgtcctttccactcaggtacacatttaatgaggatgagggggagcttccggagtggtttgtgcaagaggaaaagcagcaccggatacgacagttgcctgttggtaagaaggaggtggagcattaccggaaacgctggcgggaaatcaatgcacgtcccatcaagaaggtggctgaggctaaggctagaaagaaaaggagggtaagtgatggggcctccagagattgggtggggtgggggtggggggatggggaagaggtcacctgacaggttcctttgcagatgctgaagaggctggagcagaccaggaagaaggcagaagccgtggtgaacacagtggacatctcagaacgagagaaagtggcacagctgcgaaggtaatgggaggacaccacaaaggtacacagggctaaaagtgcagcagaaagcaagcctctaacctcttctcttcccccctgtagtctctacaagaaggctgggcttggcaaggagaaacgccatgtcacctacgttgtagccaaaaaaggtgtgggccgcaaagtgcgccggccagctggagtcagaggtcatttcaaggtggtggactcaaggatgaagaaggaccaaagagcacagcaacgtaaggaacaaaagaaaaaacacaaacggaagtaagcagagctgccaggctcccaggagagcatggggactaggaggaagggtgtggcatggctcagtctggcccccttgattaccggcctagcccctgctcacatcacagctgtctgaagaacagtgaggtggagtgcctagaactcccgtggtggtcctgagcagagaggaggatgtcctcctgcctgcctgaaggtctcccatgaaaacactgctgaactgtgttgacactcatgaccctttttttaaaccgttaaagggaagttcggtgttggagcgatactcaatgtagtcagtctacacctggacgtgtgggccacttaagccctccccacccccatcctattcctgaataaaaccaggataatggaagagttgtcttttctgacagttttaataagcacttccctatctgtccctacactgtgtgcggcactattcttaatatgtaccaattcatagacagaaatgacaaacgatccacaggtcccggtagtaaaacatttactagagagcaagcagaaaggaatgcacatcttaaagaaaccttcacaaagtcacaaaagtcaaagtttgtatatttcttttcctttttataaacgataaacaaaaatcatcaaaatcatttc

SEQ ID NO: 87670 - DNA, 1419 bp, Homo sapiens
cagtggaaacaaactgtgtagacggtattctcaggagatgattgagatgctgtctgagaataatttttaaaggaaaaccagtgttgtagaatatgttaagatttggtgctatgtgggctgtaggtaccttccttaagacctatttgtgataccactgagacaagacagctgagtgggatagatcagtaacccagcctagaacgggatgttgtaaacaggccattcactaccctggatctgagctttcccatctgtgaaaggataatggatttgccagtgttctttctagtgttgctgagcatagactgaggtgagggacacagaaaaaaaaacagtatatttccttttaaatagtttacctttgtttctgttacacttcagttattagaggaagtaacacaaggggatatgagtgcagcagacacatttctgtccgatctgccaagggatgatatctatgtgtcagatgttgaggacgacggtgatgacacatctctggatagtgacctggatccagaggagctggcaggagtcaggggacatcagggtctaagggaccaaaagcggtaaggggcacgtgtgcaccaaagggaatgctgccactctgaggaagtgttagggtgggtactaccagagcctgagtagggcagcaagggctccaggcaatctgggtctctgagccccctactttcctttgggtctacagtatgcgacttactgaagtgcaagatgataaagaggaggaggaggaggagaatccactgctggtaccactggaggaaaaggcagtactgcaggaagaacaagccaacctgtggttctcaaaggtaaggagaggccgggggcaagactgcggggagatgagtcttccttgggagaagggcagctgatgttctcctatcacagggcagctttgctgggatcgaggacgatgccgatgaggccctggagatcagtcaggcccagctgttatttgagaaccggcggaagggacggcagcagcagcagaagcagcagctgccacagacacccccttcctgtttgaagactgagataatgtctcccctgtaccaagatgaagcccctaagggaacagaggcttcttcggggacagaagctgccactggccttgaaggggaagaaaaggatggcatctcagacagtgatagcagtactagcagtgaggaagaagagaggtgagtagttgcagctgagagaagggatggaaaggaagcggtggcttgaaccatttctctaaattgggggttcttaatcttggctgcacatggggagggttaaaaatactgtactgacgatcctgatttaactggtctggggtacagcctgcatggcaggatttttgcaaattccgtgggagtgcggtctgagtagtacagagtggtggaatcactcagagtc

SEQ ID NO: 87671 - DNA, 4102 bp, Homo sapiens
cagagaagaattccgggtcaatgggcggggtgtgcggcgagaccacactaagggaaccatgatgggaggggcggctactcgagttcaggggctttggaaggggatgaggaaggagtagaactcctcctcagtgttgcctcattgaaactctgtttatagttcttgtgatatgccttcctagtctcaactttcaacttacaaaacccaaggacagagtattgagaacaatctagggccacactcaaaatggcggaaaacctcgagccagggacgcaggggacgcaagcggaagcggaagtagttagctgcatacttgtgcggttccaagtgtggagaaagcggctctgggtctaggtagtgtgcggagaggggcgcggggtggaattgctgcgggaagtgggaaactggaagtgggaaactggaagtggaatctggtgctccggaaagagacgttcccaacttctactttctccccagattgagggatactccccctttccaccatgggcaagaagggcaaagttggcaagagccgacgagacaagttttatcacttggcgaaggagacgggtgagtccggattcgctcagtctgcgagcgagcgagcgatctctgcccggttcgcctgctctttgcgaccattatgtacctctcctgcagaaggggtggtcggttgcgaggccggagaaatcctactagtgaagcagtttgcgcacttggttgttttgtccaggttaccgttcccgatctgctttcaagctgatccagctcaatcgccgctttcagttcctgcagaaagcccgagccttgctggacctgtgtgctgcgccagggggatggttcgtaacactcgccacaggttgctcctggtggccgctttctgggttctgagctgggatggcttccagtttcactgcgggaggggaacccgaatcccggtcctcttgggggccgtttcctttcttgattgcagagaaagggcttggaatacgtgcctatgatatgctttggccagtacacgtaacaccagggatgagagatcagttgccaagagggggaaaaggatggctctaggtttttaaatttctgttccttttataggctgcaggtagctgccaagtttatgcctgtatccagccttattgtgggtgagtaacggacagctctccttggtgttttaaggggtgggtgtataaggtattttgtcctgtatttctctcctccctgcttgaagcaaccttttagaatactctgacctgatttcttccaggagtggacctggttccaatcaagcctctccccaatgtggtgactctccagcaggacatcacaacagaacgttgtaggcaggtaataggagtctctctcttccttccccctttatacggaaacatctacatccctgaaatcctctaaaggcaagtttttcctttttaccgtgctttgagcacgttcttgcctgacatctgtacgacaagacctatggcattcgtagtgtccactccaggctttatttagagtcagggataaaggtgtttggaattgggagaagggcagagatctttagtgaagtcttctcctgtgaattcagtgtcagactgtaatctccatgaaggtagagacatactgtttttgtttactattgtatctcctgtgcctggtactgcatttggcccatgatgggcactcagcaaatgactagatggacaaatggctgaaccagggccattccagtgtttctgtttccatagttccttttcttctctttaggccctgaggaaggagctgaagacctggaaggttgatgttgtgctcaatgatggggcccccaacgttggggctagctgggtccatgatgcttactcacaaggtacagggagtgtggtgcttggagatcaggtgatggtggaggtgggcgcatgccctcctgggctgcagagtgcgtcaactaattgtctctatcctacagcccatttgacactgatggctctacgtttggcttgtgactttttggcccgtggtggcagcttcatcacaaaggttttccgttctcgtgactatcagcctctgctatggatctttcagcagctgttccgccgtgtccaggccaccaagccccaagcctctcgccatgaatctgcagagatctttgtagtctgccaaggtgggcatcatttcctttctcttgatccaggctcccaactcccaaagcacactttttaatatatcctgtcatttttaggattcctggcccctgacaaggttgacagtaaattctttgaccccaaatttgcctttaaggaggttgaagttcaggctaagaccgttactgaattggttactaagaagaagccaaaggtgtgttttggggaatggggtcactcttgggtcctggaactctagggaggttgggcctggtgggtcctacaggtaccttagaagggcctgaccaagcttctctcttttccttcctaaggctgaaggctatgctgagggtgacctcactctctatcaccgtacctcagtcactgacttcctccgagctgccaaccctgttgacttcctctccaaggccagcgaagtgagtctccagccttgagggacatgaggtagccccagaaacatggcctgaggatctcccctgacacctttccatcctcccaaacagatcatggtagatgatgaagagttggcacagcatccagctaccactgaggacatacgggtgtgctgtcaggacatcagagtgttggggcgcaaggagctcaggtatggagtggggtaggcacgggggccaggagccctggaggcagggaaaggccatgatgttggacctctgggaagaggatattgctgtgctaaaggtttgggatgggggcctgagccttttgatttatgtagccgaagcccgaaaggtgggtagtgagcctaaaacagaagggggcggggacaaagagggagatggcaagatcagtaatagtatctctggggcaggtcgctactaaactggagaacaaaacttcggcgatatgtggccaagaagctgaaagaacaagcaaaggcactggacatcaggtgaggagagaacgcagcgaggcaggtgtggactgggtgtccaggggaaaagtctgggaaaataacccaactcttgggactgttttgccagcctcagctctggagaggaagatgaaggtgatgaggaggactcaacagctggaaccacaaagcagccctctaaggaggaggaggaagaggaggaggaggaacaactgaaccagaccttggcagaaatgaaggcccaggaggtggcggaattgaagaggtgaaaggagctggggtagagcttggagttccccaacgcagggactgtgtgaagatgggagaagaaaatgcaaggcatggatagaaactttggagctgggccggttttactccctcaatccaccccctcaggaagaaaaagaagctgttgcgtgagcagagaaagcagcgggagcgtgtggagctgaagatggatctgcctggggtttccattgcagacgagggggagactggcatgttctccttgagcaccatccggggtcaccaggtgaggcggcattgggggtgcaggtttaggagacagaaggatctgtttgggtgtttggaggtggggggtgttgaatgtctttttaggttgccgaacgataggctgtggttgctgtcttcaccacagggtgccttggtgagtataaggccacaaagaaacataaaccaaaaaggatgagttaggtagatagatgagtgtgatagatttattttttttttttttgagacggagtcttgctctgttgcccaggctggagtgcagtggcacgatctcggcccactgcaagctccaccttccaggttcacaccattctcctgcctcagcctcccgagtagctgggacaacaggcgcctaccaccacgcctggctaattttttgtatttttagtagagacggggtttcaccgtgttagccaggatggtctcgacctcctgacctcgtgatctgcccacctcggcctcccaaagtgctgggattacaggcgtgagccaccgcgcccggctgatagattta

SEQ ID NO: 87672 - DNA, 1025 bp, Homo sapiens
gtgagtcagggcaaggctgggagaggaagacgcggtagaagcggagtgagtgagggaagcgatgggcgcgggaatggccggcccacgggtcgcaggagacgggacgccagtcctttggctccgttccgctggctccttcgtcagtactgacacctcgggcttgtagagcacttcacgcagtgcaaagcgccccccgtctatatcatatcgcctctcggtcctcctaaaagtcgtatgaggtaggcggcgttcccattcttttattttagtcctgggaaaatggagggttccaagggagggagggattagaacccagatcctgagcctccgaagtccaaactttttctactacgcaaagctacctggtgtcaagccttattcaaagtgccctgcaagtggctttaccccctcggatgtttaacctgtcgtttaagactcactctgtgtcttcagatggagctggaggaggggaaggcaggcagcggactccgccaatattatctgtccaagattgaagaactccaggtgaggacggactccagagggagctaggaagggtgatgatgggggatggaaacggacttccacaaatccatctaattcctttgggagtgcagtggaagaagctgctgcttctcctttcttgtttgtttcttagctagtagggtgtatgtatcagaagtaagcaatctcttgttctcctccagtcccatctctttgagggtcttagtgttcacagtttgttacacatcttcgagtcaaatcttaatagtaaaggtacctctagccaaaggtcaacccttttggaagaagcccgaatgaaaaggattcttataaaagggaaacataagctcaggagttgaaatttatcaccaagaggttgggtgagggtgaagtgagaatgtgaggaagggcatcattgagggatctggacaatgctaattccatagagactgaatgaaagaaattgggcaacccagagccctagcctaaagcgctaaaccatagaaaaaggaccgtttatg

SEQ ID NO: 87673 - DNA, 1966 bp, Homo sapiens
tagtttaccatttttgaatgctttttcatgtgtttttattcgttcaccttagtagtcttgaagcagggtagctgatgctatacccatgtgccgtttggtaacagatctagatttttaaaaatagattgtcttacctttactttgcttttgattgacagcggctgggctagaactcaggtttctcacctaacaatctttccaccaggtgttgttgccttcctgcaagaaatttggtgttacatgagccagctgtaacttttctccattagattctgttactcctggaccagtattggacaagcagccttctttgatggctgctgtaaggtccagagggactcttgaaggacagggcagggtcattaggatcatactggagaatctgaaacaacatgcaggtgccctgtgcccttccctcagctcattcagacctgtgaggtcttggccaagatcctacctcctcctgtctcctgcccttgaataatggaatttgtctcttgtctgccacagctgattgtgaatgataagagccaaaacctccggaggctgcaggcacagaggaacgaactaaatgctaaaggtgagtggagaaagatgggaagccgcatgtgggcagtttgtctgaggtctgtccttatctccctgcactgtgtcttcacagcagtgcttactgttttctccctgtcatcatctagtagtttcacatgcatctctttttcctgagccctattgtagcctccttaaatacatgaattttgacctttggccttcctttaataagagtgatgcttagctcatgcacgtagaattgggtcctggagactccaaaggagtagctaggtgaccactgtgtctgtttgccatctagttcgcctattgcgggaggagctacagctgctgcaggagcagggctcctatgtgggggaagtagtccgggccatggataagaagaaagtgttggtcaaggtaaaagcagcatgaccccagggaccagctcggtctccactgcattcccacccctttgtgtgtagcctcgggagacagggttctgtgttctgtcaaggtattgtgggattctcataggtcttcctgggtaggattagtgatttggtggctgtcaaggaaggtcatgagcccttgtttctttaggtacatcctgaaggtaaatttgttgtagacgtggacaaaaacattgacatcaatgatgtgagtgtagcaggtgaggtggtggtggtggtggggtcagctcttactgtaccacttctgaaactcgcccccttcacccaggtgacacccaattgccgggtggctctaaggaatgacagctacactctgcacaagatcctgcccaacaaggtagacccattagtgtcactgatgatggtggagaaagtaccagattcaacttatgagatgattggtggactggacaaacagatcaaggagatcaaagaagtgatcgagctgcctgttaagcatcctgagctcttcgaagcactgggcattgctcagcccaaggtgaggagcagggcttctctgagagggccaagctgtacttactcctcctgccccagccagccctactgcaggggttggggaggcaccgggataggctgcatcttgcttgggctggccctccccctgaaaagagtggctggggaagtgttcctagggcggtgaggtggtttggatagaagggaccttgatgttccttttttttttttgtatccctaacatctagcaagggacccagcactcggtaaatgttcactgaatgaaatgaggggtgtagctttctgccctgagtcctgctgttcccctgtagggagtgctgctgtatggacctccaggcactgggaagacactgttggcccgggctgtggctcatcatacggactgtacctttattcgtgtctctggctctgaactggtacagaaattcataggggaaggtaaccatggctag

SEQ ID NO: 87674 - DNA, 1047 bp, Homo sapiens
tccctaacaccagctcggcctccacacaggggcaagaatggtgagggagctgtttgtcatggcacgggaacatgctccatctatcatcttcatggacgaaatcgactccatcggctcctcgcggctggaggggggttctggaggggacagtgaagtgcagcgcacgatgctggagttgctcaaccagctcgacggctttgaggccaccaagaacatcaaggtaaggtggtagcatccttgggatgggcccagggaaggcctgggtgccacgcaggctgaggaagaggtttagctgatccccacttgctttctctgctcaggttatcatggctactaataggattgatatcctggactcggcactgcttcgcccagggcgcattgacagaaaaattgaattcccaccccccaatgaggaggtttgtgatggacactgtgcaaagtggctctggctgtgggggtggggtgtggggctcaggcttttccttgccatctccaggcccggctggacattttgaagattcattctcggaagatgaacctgacccgggggatcaacctgagaaaaattgctgagctcatgccaggagcatcaggggctgaagtgaaggtaattggagtacccactgaaaacagggcagaggcaggaagctctgggctcaagggccacagatgaggggcacagcagtggggcctcaatttccttttcctgttcagggcgtgtgcacagaagctggcatgtatgccctgcgagaacggcgagtccatgtcactcaggaggactttgagatggcagtagccaaggtataggcctccatctttgtgcctttgccagtggtggctctggggcagtgggctagggcatgtgtgtgttcgtaacttaatgttcattctctctcccacccctaggtcatgcagaaggacagtgagaaaaacatgtccatcaagaaattatggaagtgagtggacagcctttgtgtgtatctctccaataaagctctgtgggccaagtcctctaggactccagtctgttaatgagggctgtgc

SEQ ID NO: 87675 - DNA, 1028 bp, Homo sapiens
agttttagcaccgacccccaggacttcatccaggaatggctccgttcccagcgccgagacctcaaggtgtagtcctctttcccgaggggactcctatgtaaagctctgggtgatttttacccacagcagttcccagggtggattagcccaggggtggggattatgctatggctttcctcctggctctttgcagatcatcactgatgtgattggaaatcctgaggaggagagacgagctgctttctaccaccagccctgggcccaggaagcagtaggcaggcacatctttgccaaggtgaggctctgccctgttttccctcctttggccgtgagtagcaaaggcctgagccacttggtttctcccttctccaggtgcagcagcgaaggcaggaactggaacaggtgctgggaattcgcctgacctaactgctcagggatctttcttcccagccctggagcctggagggagaccaccctctgggtccttgctggggccgcagacacgtaggctggggtgaggagtgtctgctgtcaccctctactctccagctttagtcttataaatgtagtgataggattccttgttgcttggtccccaaagccttatactttttgcattggctttaattgggttcagcagatgcctcctctgcccccctgcaggcaggcccaagtaggactgctggaggctgtgctttgacattgtaagacatttccgaaccaaaggctgctgggtttgcatgtttacagactccccctggggcgagggtcagagctggctctggggagctgggctaggaagaggaggtgcagcccagactcttcctagcctttctaaaccaaagttctttgccattcctacaagcccagccttgctgctggttttttcctttcctttgggtatttgcactattttgggagcaagttttctatgtgggagccactttttttgtacaggggtaagttgggggttttcagggagcctgttaggtgcctccttcttttctttcctcaatctatgcaagcgg

SEQ ID NO: 87676 - DNA, 1661 bp, Homo sapiens
caacatgttgaaataccatctttacaaaaacacaaaaaattagctgggcatggtggtgcgcacctgtagtcccagctacatgggagactgaggcaagagaatcgcttgaacctgggagtcagaggttgcaagtgagctgagatcgcgccactgcactccagcctgggtgacagagtgagaccatgtctaaaaaaaaaaaaggctgggactgggacttactacttctgattcccagtacctgacaaggtgcctggctggctcatggtgctcagtactgattgttgaatggttcatatgagaagatgcggtagcactgtgtcccagcatcttggtccacctccagttgtgattgcctttctctctttagcaaaagcgaaagcttcggatctacatttccaatacgttcagtcccagcaaggcggaaggcgatagtgcaggaactgcagggacccctgggggaaccccagcaggggacaaggtggcttcctgggaactccgagtggaaggaaaactgctggatgatgtgagttggggagggaggttctggagggaaggaggcctgtgtgggtttaagactgagaccaaggagtttgatactagcctgagcagcagagccagaccccatctctacaaaaaatttaaaaattagctgggtgcggtggcatgcacctgtagtcccagctactcataaggctgatgcaggaggatggcttgagcccaggaggtcgagcttcagtgagttatgatcacaccactgcacttcagcctgggtgacagagtgagattgtgtctcagaaaaaaaaagactgggccagacacttgggcgctcccagagaagtcctgccatagggaggggggcgctgctccaagcccgttggaggttgatttgtgtggttattacagtgttcctgcagatggcagtcgagtgtctcgaggaagtccctcgtgggctgcaagagggcaccatttccctgcctccagtctgcccagagtcctgcttccatccttcagggcccaggaatcttcagtatccggagctccagggctgaaatggggcttctctttcttgggatttagcatagcttgagatttgagagctcagcagcaccatctcacacccctttccatccccagcctagcaaacagaagaggaagttttcttcattctttaagagcctcgtcattgagctggacaaggagctgtacgggcctgacaatcacctggtggaggtgagagtgggcctggggcaaaagcaggctgatgtgcaggtttggcagggaaatggcctcagggcccttgggaggccctgtgttcacgcccacccccttggtgataagccatgcttccctccctgccagtggcaccggatgcccaccacccaggagacagatggcttccaagtaaaacggcctggagacctcaacgtcaagtgcaccctcctgctcatgctggatcatcaggtgacagagaccctggggtcatttctgggcccacagggacccctcaggaggggagctggttcctagaaacccttcctgtccctgccctattttcccactgttctactataagaacccgttctgactcccctccatccaactccagcctccccagtacaaattggacccccgattggcaaggctgctgggagtgcacacgc

SEQ ID NO: 87677 - DNA, 1030 bp, Homo sapiens
gacttcctgttaccggagcacctgcccaggagggatgggtggtgctgcaggttttgtgaacactgcagcagggagcttcctggggaccacagggccctcgctcacctctgcaggacccactgcttcagttcttccctgtctttgtctcaggcactaggaaaaactagtctgggatgtctgggcctgggcttacagctgtagccacacttagtttttttctataatctcaggccagagaaagaacaatctttaaggcagagaaagaggctgtcttttgcctttcaacagctctgattaatctcttcctgatgcagagagactttggcaggactcccaaagccccagagccccccactttgaactttttattctcccaaacacttccgtcccaccctgctcctcctctccccatcctcacgtctgtgggtcatgtttctttccatctccgcatctggtcaagaatctgaccctctgtgttgggaacatgggtttagtgcgggatgaagaggttggggaagaatctcatctccatgatgctggggtgggggagggtcctttgatttggtacaagtctccaccctgccgggcttggttggctggttgtgctcgttgcataatctgggccctggggccagccctgtgaagctgccagggacagtgtgtgcaaggcagagctgccaaacaggccttgcaggcagcagccatggggaggcgggtgggggtggaggtgactcccagatgggctccacagaaatgtcagggagcaaggcctcaggtgggaaatccttctgcaggcatctaaagaagctatttctgtctcccactttcctgctgctcagcctgggcctctatccttgcctcccaggataatcttagcccccttctccagcttgggattgccagggctacacggagccagagccagtcctggctgccaggtggtgcctggaccactggcagagtccaggtgctagctgctctctttcccacaggccacccaggagccatagcttcccttctggggtcttct

SEQ ID NO: 87678 - DNA, 1084 bp, Homo sapiens
tttcaccatgttggccaggctggtctcgaacttctgacctcaggggatccgcccgcctcagcctcccaaagcgctgggattacaggcgtgagccacagctaccgactctgagttgagtctttaacgccgaagatgcagaaaggagacttgacaaaactattttcggggagtgtggccgcggaattcggtgagggtgctataccgggagagagtagtagcaacggctcattcactgtgaagcccctaagtgaccttagacctctgaccccgcgcctcactcggcgcttccgcgcgcagcttccgctcccgcccctccgacgaaaggctgggccaaaggtgggggggtggggctctgaggtcggcagttaggggcggtgcccgctgggggcgggtctcgcgaggggcaggattcgaggaggcactcgagcattgggcaccaggtagaggcggggcctagtgctgggctgggttgggcggggcagggagttcgtagccgcctctgggtaactcgactcgggcggccaaacctccggaggccggggacggaaggcgggcccgcagcagatcctggatccggaatctcccgggcaggagcggaatctgtcccgaaccgggtctgtgaggaactcgcgaacttggattaggaaatcccggagcccggatcgacaaatcccggaacccggaattaagatcgccaagtcccggatcgcggagcacagagcacggagtggactcgacgcggagcccggagtccggatcgcggcaccgcgggacgggacggagcgatgtcgggccgaggcgcgggcgggttcccgctgcccccgctaagccctggcggcggcgccgtggctgcggccctgggagcgccgcctccccccgcgggacccggcatgctgcccggaccggcgctccggggaccgggtccggcaggaggcgtggggggccccggggccgccgccttccgccccatgggccccgcgggccccgcggcgcagtaccaggtgagcaaggaggacgcgagcggacgggggcgagaggcgctgcgagggcgcccgggccggcggctgaaggggcctcgagtgag

SEQ ID NO: 87679 - DNA, 1073 bp, Homo sapiens
agccacaaagaacgtgactgcagtgagcctcccactggagcagccttaaccaacactttggccaaagcccccccacctcccctgtgtactgtgtgtgtgtttggtggatacagtattccttttcagtgtccctaaagctgtgatggggagtccccacttacctagaaagcattaccagtcacctactctgcattctcagatgtaaaccttgtgtagtgttctttttgcaatgacctatttatttaacctatttatatttatttaatttttactctgaaatgtatccagttacaattgtacttgcttaaagcacatcagatttgttttggacaacacccttgaccattttaaaactggaaaagtgatactgtatccttccatgggatggatgctttacagtagtcttattattaaagggtgattaatttggtcggggtaaaatgttaatttttaggtgatttttaagaattctgtgccattatgtcttctgtgtggatggttaattgtttaattagtacgtgttaattgtgtgatacagtcttctttgtggaacccaaaatcctctttttagctttatattttataaactgccagattgtacaacttttatgtgcatttttaaagcttgaagacatgagggtcattatctaagttaaacagcctatttttgtgcctcctgtacagttttataattctgctgatggcggcatcttatgtcgagccaaccacaataaaggtagttttagattttggagtcagtctcattttcttaaagattcaaataccattctcagataggctgtgctcactgtccttctgggtggccggggctggattatgaggcctttgcagctggctcggctggtgggggatgggtgtcctcatgtccacagcagggtccggggactggaacaccctccatggtggctgtgtgtcagaaaagcttctttgaaaccttgcaggaagttcccaaaagtactgatttgggctgaattccaggaaggtggccagctgggacagtcatgccacgtggtgagaattgggcttcaaagcagagtttggggcatgtgtac

SEQ ID NO: 87680 - DNA, 1695 bp, Homo sapiens
gtcctgaggactgtgtgccgtgaccttgctgtcatgtcttttgcagtatgtggagcagaaggactttgcgcatctcggcctggagcccatcaccttgctgcagcagaccacctcgggcctggcccacctccactccctcaacatcggtgagaggctgcactttaccaggccagcggcccgggtggggagaatcagtggcccaggtggggctaaccagtagctcgggtgggccttgcttctgttcaagctcttggctatatcaccagtagcaaagatgagtggtgtaagaatttgaggaggaatccgacatagttgaaaatcagaacatttggaggtggcggcaggcatattgggagtctgacgaggacacattccccattggaggaggcctggggttgctcctggtaagcattggactaatctggagttctctgttagttcacagagacctaaagccacacaacatcctcatatccatgcccaatgcacacggcaagatcaaggccatgatctccgactttggcctctgcaagaagctggcagtgggcagacacagtttcagccgccgatctggggtgcctggcacagaaggctggatcgctccagagatgctgagcgaagactgtaaggagaaccctgtgagtaataggctatggccctttgaaaactacagaaccagcccattgtatcttcaggagtagaacctttaaattccaggtttgggggctggtgcccgtgtagctggagaatggcattcctttcaccaagagcttctgtgtgaacattctgtgtcatctcatgttcagctgattaaaggggcaaatgtgggcaattatctattttttttccctattcttccaatcacttgttttttttttttgtttggttggttggctgtttttttgttttttttgtgtgacagagtcttactgtcacccaggctggagtgtagtggcatgatctcagctcactgcaatctccacctcccaggttcaagcgattctcctgcttcagcctcctgagtagctaggattacaggtacctgccaccacacccagctaaatcaatcactttttaacccctttttaattttggtaaactgggaagtcagggcttgcttagcgtgagcaaacttcaagttttcattatttttaaaattttgtttttgttttctcaacttattttgataatttttagacatagagaaaattaaaagaaaaaaattttttagaagtgcgatctcgctattttgcccaggctggtcttgaactcctgggctcaggcttagcctcccaaagtgctgggattgcagacatgagccacagcatctggctgaaagaatgttaacatgaatacctgtgtatctccacctagattcaacatttgttaatacttttgccacatttgctttatctttacctattactgaaccatttgaatataagtagcaggcatcctggcccttcatccctgaagacctcagcacgtgtctcctaaggaatacattgtgtttccaaccacaataccattatcccacctcaacagttaatactgtttctatccatcatctcatattcaatccatattcaaatttccccaattagtccccaaatgtcttttatagagttggtattttgctacctactgggttttgatacctactgggttttatataccaggatggaatcaggtgtc

SEQ ID NO: 87681 - DNA, 1042 bp, Homo sapiens
gacactagcctcccagaaaaggacaattttgttcctaaatcttagtgtttttcagctaagagctgatttataagccttgctcaaagatgattttgaatagttatctgtatttttaaagaataaggataatagatgaagacctttcctcccttaaaaactgccattagaacttctgctggggagaagaaccaaaaaaagaaaaaagaagctgcctgtgagatcagcttgtgtgaaaaaggcagtgtggccatccctttacttcctagttggaaatgagcaagttctgtagcagaacaggccatgggtgggatgaaatatgtgaggggcatggtccttcagcaggttgctcagagcatcgagatgctgttacctgagagctcaggaagctaatgacccgcccaggaatgggaatgacagactctttatggcactccccactggcacgtctgcacctgatagtttcacttttcacctcactcagtcctatgaggtcattattattgatcccttgtccacaaaagaaggaagtagaccctgagaagctaagtaactttccccacgggtacccagctagtagacggcatttctaggactccaccccatggtggagagaagaagagacgactccctggtgggttggtggctcacagaagtcccttcagtccacctcctgcacatgggtagggatgatcacagatcgctgctacttcagataatgacagaatgaatccttcagagtatttgagaggcatgtggcctcggggaaggcagtgggatgaaaggcggaagcaggacctcagccaggctcaccatgtgtcagccccactgccacctcctggctatgtgtatgcagatgtactctgcatacctagaatactagagcttcctcacctgcccctctggattactgagtgtctgtgcgctagcctctagccaacacacagacacggtgggtggcgaacctggggcttgctctcacccaccactggctcagccatgctacctgtgcttcctgtttggtttcacctttgcaacaactctc

SEQ ID NO: 87682 - DNA, 1004 bp, Homo sapiens
attcaggcctggcagcttcagcagccctgccatggagggcccagggacagagatgcacctgggctacatgagtagggtcagaagaagaagagaatggctgactgatgccgagaccaaaagcacaacaaactcagttgagagatttagattttatccagagacaaaggaaattgtagactttcaagattccagggcacagtatctgtttaccatcatctacggaagtagccaggttggagaaatacattgattcctaaaacagcaatcttaaacagcattgtcctataatcttattaaagtcctgcatattcattattgaacacttagaaaataaacacatacagaagaaaataagacagtgcccttaatttaacacccagaggtagccacgtgtcaaatctttgtatttaaccatctggtcttggataacggtctttgaaaaagtatgttttaaaatactctcaggtgcatctgtatggtgatgagacatacagatgtccctggccacatgcccaggtgcttcctatatactctgcaggctacaaacccccaaaaatgtgggaggcactgtgggagaggcatgaataagaggggtacacctggaggggagagaagaacattctaggcagccatctggggggaggggtgaaatggcgtgagcgtgtgggaggtttagcatgtgggaaattcagcatgtgccagggaggctgtgttagttttgttgggcaaatgataacggcatacctagaatactagatatttgaaagtgagtcaatgcatttttctaaatgcctgttccgtgaagtcttagagattctgaggaactctagggaagctccatttttatctgatttaattttgggcttctaaattttctttaacaaacgcttctgatgcttcttaaaaactttgaagaaatagtggactactggaataaattataattttgggattgcactgacagtttacaggcaacacgagaaaactgctttattgctttctag

SEQ ID NO: 87683 - DNA, 1050 bp, Homo sapiens
ctgaagtgggcagaccacaagtggagaaatcctgctcccaagcaaagcatgtctcagagctccttggtacacaagagaaactagtggtggctcaaaacaaaagtaggtttcccttaaagaatgatattatgttgtagatagagaactgacctaaagatgggaactcaaagaggaattttccagatcaagaaatgtacacagcttagactagttcctgtttgttgtcatcttggcatgtatgtcatgaaatctttgataggtttaggggaacaatggaaagatcataaggtgaaagagacgtgagtcagagtgagatctgctcatagccagagaacagaaaggaaagtcagccaggctactggcagcctaatctgaaacagtgacctggctctttggggcagtatgtggactcatttttagagctgaatggattatcaagccctatcaaatcccagttccctattctagtcagctttgtatctcttacagcaatttgcacacaatagatgctcaataaatgtgtaatgaatgctcagtagccatgcgatagttgtgtagtgaacagcaaatgaacgtggagcaagctatggccccatccatctagcaggtgtgtcctactgctttctcgcaagtaatgtaccactttccccgatggaagctcacatttagataatagtaggactggaactccacctgagcaatttaaataccaagatgggaattcggcggccatagaagagtgatgttacaggaaaaagcattgaaaggagaactccttgaacttttaatgaagcctcatcatacttcacctgtggatcgggcccatgcagccccacgagccttgcgtctggtgcctcccaaatgtcctgatccctgtcatgcaaggatacttcttcactcctcagtaggagacttggaatactgtattctgccatgaagtaataagggtcctgctttgatggaattttctggtaactgccactcattttctctaactcacagtcctgctgagagtttgcattgtggacccctcagtgggtagcacctgtt

SEQ ID NO: 87684 - DNA, 1046 bp, Homo sapiens
tcccttttttcctctttctcttgtttttgctgccatcactaatggccagggattgaactagaggccctgtcccaagagagataagttgagatgacacttcttgagttggcagtgagtgtgacaaacgaaggcggaagtgagaagagctgtgttcctggcaagtgtgccaagtcattagagcaggagggagttttcttgaaccccatctgcccttcctgtgccccatccctcactgttctgccacctcccagccccagtaggggcagagcagggcaggaggtcagtcgggtgctggagcacccaggggccggtgcagtttcttctctctgttctcttcctgtcgtgcttgctggtgacaggtactaggggagaaagaggtcagggctggggctctggaaaagagatgtggggcagctgggagcatgtggggaccaggaaacagcaggatctgccaggcagtgcggtgtaggtggggatgtgtgtaaccaggtattatggggggaaaccaggtatccttgagccctgctcgcttcctttatagattgtcaaggtccatttcttttttcatcctgtttccttgtagccatttttattttatttttaccaaataacgggtaaaggagatgacaaaataataatacgtttttattaacagaagtagttggaggagcatgtatgaataggcccatggtgagaaaaaaatagctaatgagaagaggtcattgcaattacaaggctgctcagcattatgtgccagttaaggggctcacagactgcccaccagtgattaagaagtggaattaaggaaatgtgtatatatgagaatacagaaaatatgggggcagggagtcttcatggttaacttgtaaaatgagatccctttaaaatggaaaggttgtccaagtaaggaaactgcgaaaacagcaaagtataaggaatctattaagtgtaaggatcccacaattcgaaagcctcttctgaggacctccaaagctcgtcatcttaaaatatggcactgagactatggcagtgtctcctgttgacga

SEQ ID NO: 87685 - DNA, 1161 bp, Homo sapiens
ttgcttacacttctgtgagccatgagtccaagggcatagcgagggtgggtcgtctctgcttccacatgctgtcagccagtttcactcatgtgtctgggccttcagttctcctcacattgcctttctctatcgacatggatagtctggactttttggcctacagtttagggaggatttgtttgttataattagataaggaccacacctcagtaggtactatggcccctccgtggtaatgggctggctggtctgtgttctttagaatacaccatcaccatgtacgacaccaaaacccgagagctccggtggaatgccacctactttgactatgcggcctcactgcctgaggacgacgtggactacagtaagtgctctctgctggatttcacaagcttgggccagtacttttgacctatgtggaaacagtggctccagaaagtaggattttcttttaagatactctttgtcaccaggttctttctttccatggacttttcatgggcttatcataaatacttcccacagtcaatgtgcaggggccttggtgaagtctgaagggaaaccgaagtaaaatggtgacaagcttagccagagaggaaggaggacatccctcgttgagtctttctatgtcacagaaggaatttactgcaagcccatggaaagtagaagtaaaatcagcataggacattaacaaccctgtcaagaaggccactctgcaaatgtgactcatccctagttatttctgcagttaacattcacccaactcaaatgaaaactaaaaaccaatttgccaccttaacattggtatcaaagttggactctgctttttcttgtcaaggacctagaatattttcgtttttctctgaggactcctttgtgaatctgatgggacagtgtcagtggttcaggtctgactttcagggtgtttttttgttgtttttttttttgaggcaagttctccctctgttccccaggatgtgtgcaggagtgcagtcagggctcactgcagcctgaaactcctaggctcaagcgatcttcccacctcagcctactgagtagctgggaccacaggcacgtaccgccactcccccacctacctggctaatttttttttttttttttttttgtagagacgggggtctcactatgttgcccaggctg

SEQ ID NO: 87686 - DNA, 1042 bp, Homo sapiens
agttgggtggatcacgaagtcaggagatggagaccatcctgactaacacggtgaaaccctgtctctactaaaaaaaaaaaaaaaaaaaaatttgctgggtgtggtggcacgcacctgtagtcccagctactcaggaggctgaggcaggagaatcgcttgaacctgggaggtggaggttgcagtgagccgagatcactccactgcactccagcctgggcggcagagcgagactccatcccaaaaaaaataaaaaaagagccaggcatagtggcacatgcctgtagtctcaactatggggaggctgaggcaaaaggatgacttgagtccaggagtttgaggctgcagtgagccgtgaccacacctctgtactcctccttgggcgacagagcaagactctgtctcaaaaaaaaaaaaaaaaaaatttcaaaggctctgtgaccttctccagcatctcaatattcttcttctaagagtctccaaaacaggagacttttccaataagttaggaagataaaaatgaccaccagagatcatgctttacaaaatggaaatacacgcatcacagtgactgtgttgaccttcacattggaggcccttgctacagactctccattcctaggatgctgttgggtatataccattgatacatatgctttgggttttcttaatatatagtgttatttactgtgctgtctgcctgtcataatcagctgaccaagattagggggtatggcccgaggccagggaattacttactggctgggaacagaggccgagacaactttgacatccttagcatcaggttgcaaccaactccactgaccagtcccaggtactagttaattatagtcataaacagtaactgtggatccttctcacatggtggctggttattagggaggttgagaaatgtgaatgatggttattagggagatgaacccctgggcacatttctgtatttctatagatcccagtccacgggaaaaggattgcccttcacaggcaagacttttcatatttaaagccactcatcaaagcaata

SEQ ID NO: 87687 - DNA, 1248 bp, Homo sapiens
cttcaagggaagctactgacggagggaccttgatctgtccccttggcgggttctctctgatgtcaagctgttagagtctgcttttattgcctccagttaaacaaaaaatatctcttgaaaactaaaagcagatttgttctacctgtttatgtaccatgccatcctatcaaatattaatggctggagttctatatacaattgatgtagaaattgaaaagtggacttactgggtccttttcacatattttgccttcatccagagtgctttgaccaaatgataatttgtcttctatggttttgtatgatttttcctttcaggccgcttttctccactcaaggatagtgtataccaccataggggtattttatttatctgtggttgaagtgagagagagtagtgggtggaattgtcttatatactcacttatacacctacacacaaccaccctccactctctattcctccatcatgggtttgcgtggctttggtatgttgttccatgccctgggctgtaatttatctttgatatttattatttaatctctaggcctgcctttctcccagatcctaatgatggcagcctgtatacgcttggaagcaagaataatgaaggcctgacggtgagtatatttagctgctttttgtactccaggggttctagaccagcggtccttaagtgtgtctgcacagtgtcttactgtgtctcccacctggagcttttaaaaacaacccctggggattctgattcaggtggtctagagaggagcctgggcatcagtcttttcagagagcttcctaaatgagcttttaaatgtggtgccagagttcagaaacacggatgcagaccagcaggttctcatggcccagcccatacactggaggatataatgttaagaacagggtttgctctaactggtgaccctcaccttaggagggagggatatagtttgaaatgctgtctccacctgccccaccttccgatgactccttaagggagtcatgtgatattctaccctcatttccatttgagaatctaaaccagtggttttcagccttaattatacattgtaataacctggaattcgaaaaaacagcattaggacctagaacatagggcccaatcccagaaggtcccgatttaattgatctaagtcatcaggactttttaaaagctccccagataagagaatttagaaacaggcccacacatatggtcatctgatatgtgacaaaggtgacactgcagt

SEQ ID NO: 87688 - DNA, 1021 bp, Homo sapiens
gaagtaggaaagaaactgcgctagtttgaatatttgaccctccaaacctcatgttgaaatttgattcccagtgatggaggtggagcctaatgggaagtgtttgggtcttgggggtggatccctcatgaatggcttggcgctgtcctcattgtagtgagtgaatcctcaccctattaattcctgtgagagatggttcttaaaaagagcctggcaccttctcccctctcgctgcttctctcgccctgtgagctctgtacactccggttcccctttgccttctgccactagtggaagcagccagaagccctcatcagaggcaaatgctaatgccatgcttcttgtacagcctgcagaaacgtgagccaaataaacctcttttctttataaattacccagcctcaggtattcctttataggaacacaaacagactaagacaggaaatgacacttaattactccattcagcaaatacgttggttaccacctgtgtgtcaggtattgttttagatccttgggaagatgcagacaacaaaaaataaatcccaaccctccgtggccagagttgggcattaagtaagcaataaaatatacagaactacagaggtggtaagtgacatggagaaaaattaagcagggaagaagggttggaaatcctgggcagtaggaggtgatcatggaagaccgctctgaggtggcaacagttgatcaaagacctaggcagaggaacagccagtgcaaaggtcctgaggcatgggcaggcctggcagtgcttgttgaatacttggaggccggcatggctggaatggagtgtgtgggaaatagtgggagattgttaaagggtgacaggttgaaagggagggactgcttgggatttatgaaccactgtgtaaacactggccttcactgagtgagatggggaaccaccaaaggattttgagtcacagagaagcttaatctgatttatgcctttaaaaggatcactcttctcagtgtcaaggcattgacttatagtcttgacaaa

SEQ ID NO: 87689 - DNA, 1414 bp, Homo sapiens
acgaaatgcaaactgagaatgttgccatcatgttttgttttagattagcttgctttggcctgatggagttgagaggactttctttagtatttccagggctggtgtagggcttcttgagctcaccttaaaatactagttaatgctgatatttaacactcaaatccccatcaaattacaggttattctatagcaaccctgctctattcttttctgtctcctttccaataatagtaggcatgaagagctgggtcaaattagaaccattctttactaatcatgaaaatctgctaaatatgcaatatgactactctcctagccagctgggcccagactccggagatgtcccttgagtggacatttagataaatgataaagctatccagatactactccaggttctgagtatacagcaggtgaacaaaacaggacataatactggagatttcttaggagggaagagtcagaacaaagttatttgaaatttgaagacaattttattctcacgtgagtgtctctttctaaacatgtgcctcttgccacagttcctccctgtgctgacagaatcacggccaagcagtatagaaactagagaaaatagaatgatgctgtgctacttcccccttgatgcccagtggtcaccaagccctgtcatgcagactgggaaggaccctgcaaacctgactcctctctggccccattgctggtgccttagccaggctcttggcacttatttcctaggtgaatgcagcagcctcctgaccaccatccatgccccccgcaccttagccctctcgttcactcatcacactgccctcagatacacccccaaaaagaccaattggacctagctgtacccctgcctgctgaaatgctcttggtgttgtctatagtggtggcgttgtgcctgcatcagtgtgtgtggtgtgttacctgtgaatgatgaggaaaggataaatagggagcgtgagcatcatccatgatgggttggccgtttcaacaactggcccttcaccactgctagtttgagaagtgctgctccacagggtcaagtctaagctccttagtgcatgtgcaaggccattcgtggtctctcaccgccgcccccccgccccaactccctgggctccctcccctgcccagcaggtgccctacttgcagccatgtaactccttaccaggccttggagacctctggcctttgctcatgctccctctctaccagcagcctgcaatgttagacaagctcctgttcatctgtgaagaccccatttacctccctggcttctcaagcagggtgagcccattttttctctgggttctggaggtgcttttctgaaccctctgttgtggcacttctggcttgtgttgtaaatttttgttctcatttgcttcctagtggatttctacctccttac

SEQ ID NO: 87690 - DNA, 1004 bp, Homo sapiens
atacaaagattaaagatggtaatgtgcagataccctgagttttcagtttaatcttgtggttataactgaagatttcaacatttttctaaattgttaaatatagataaatgataaaggtatccagatgctactctaggtcctgaggatacagcaagtgaacaaaacaggcaaacccttttatcataaagctttcattctagtgggaaaacaggaaatcagttacttagtagtgacgagaggtttgaagaaaaaatgaagtggggacatggaatgggcagtaccaggttggggtgggagtctgcagttttaaacagggagggctccacggagaaggtgtcatttgagcaagagctcaaggaggcaagggagtcttgtagacagccggcatagcgggtcaaaggtggagtgtccttaaaaaaaaaaaaaaaaagaaaggatgggagtgtccctggcacggtagaggaggagcacagagttgatgtggcgggaggagatcagctcagagagagatgggccagtcatacagggcaggagggacccagcgcttcctttacttcacatgtactataaagttgcttactgaaacaaaatttatagtcagtaaactacgtatacacagtttcaaaaagaaataaacatattaccgaactggtaatctaaaacaaataataggaaagtatttttttaatcacatagatatagcatgtaaatgctcggacacacgctgacactccccccaggaacaaatgctgtgcctgttgatgcagatggagacaagtgcaggatagtttaccaccatagccacggcaactggatttccaggacggtgaactgttcttggtagtgtttcaaacaaaagaagtacagccttacctgccttacacagtagttacgttccaagaaaattctgtatattatgaaaaagtacatttgtgcttatgtgtaaaacaggctatagcctcggataattagtaaagggttttggcccatgagaatgtctggca

SEQ ID NO: 87691 - DNA, 1848 bp, Homo sapiens
gtgggtattggcattcttttttatcataacgtcttatgagatgcccaggttttagagaatagaataggcccaagagaaggaagtcagaaagctgagcatactttgcccctctgtttcagtggaggttgcccatggattatttcagaattcttgtccttgtaatgttaggtcatgagcctgcctgtctgcaggcaggatcactgcttagagtgaggtgacctgggttctagtcctgactgagtgggaatttaggctctccaccttccatttcttcatctgtaaaatggagggttttagtaggataaccttgggagtggggggtctgtgattgtacatgcccaaggtgaagaatcatatcaacattaagagtcttctacatctcgttgcagatttttggaagtaccagcacagtgacgcttcctgaaaccttgttgtttgtgtcaacgctggatggaagtttgcatgctgtcagcaagaggacaggctcaatcaaatggactttaaaagaaggtaatttggatttggtccttgggcgacatggacatttgcttaactggttccacagaaacatattctggagaaagagaaaacattactcattatctaataaaataaataagaaataaagaagaatgggatcaagagaggaaaaggcattctgctcaaaggacgtttatagctttgctgtggttatccactaagtgcatcagttaaagaagcacgttttatcttcttttttgcttctgtttagacttcatgttaaaatggctctaggcttttctattaatagctctagctagttggtctttatgaagacatgctgcactaaatttgttctcatgattagaatcttgtaatcataattacaagaaggtatcttctcaacacctcaaattactcatttgtttttatagaggctgaaataatagagggctgtaagatttgacattcatccaagttaaccactttattgggttgttatggtgaggggaataaagactgagcttctttcttacttaacataccatgcgtccatgttatgatctgatcttcctggtggtaactagcagagtcaagccctacagctgggaaattgtatttgatttccaaagtaatctttccagataaagccatgcaaatcccaggatttgggactttcagagtcatctatattatttaatctgtctagtaataaatctcatttggcccgaggttcgggtctgaacagcatcgttctctttcgtcactactctgtgactcattactttcacgagcacagccaatgtttttccttccttaataaagtgttccaaaacagtatgctagatggaaaaatattggcatatgtcagaaggtcacacattgtcttgtgaattcagcagcaaacctcgttaccatccatagatgatggcagctgggttaccacaagccatcctgccccacctgcatgggccctgcttggatcagcaggaactttaagcagcccaaagaccagctctctcaggagtgtgtggccacaggaagactgtagagtgttttattacaggttccaagaacatcatctgtactgtatctccatcacatttaagccttttaatgtttttaaaatgaaacagagtccttcaaacttcaggatttcctattttgtccagagatgaaaatcaacaaatcacacaagaattgagagaaacactttggctgtggaatgttagggcatgtctttcagtttcattgttcccaggcagggcatcttcaccctgagccacttcattctgctttgcttttccctgcacataatgctttaagttggttttttccaagtcttcatttctgcaagtaatgtcatct

SEQ ID NO: 87692 - DNA, 1371 bp, Homo sapiens
gagcccaagggcaagaacttagctgggcctgaggagctgtggaagccagggtgggctctcccagtcctttcagtcatgtttcttctcaggctgctttctgtttctgtgtctttctcattcagctttttccatgtggcagaaaacacattcacagagctctctgaagttttatttccattttatttatttatttatttatttattgagacagagtctcactctgtcacccaggctagagtgcagtggtgtgaccttggctcagtgtaacctccctgcaaactctacctcccaggttcaagcaattctcctgcctcagccttctgaatagctgggaatacaggcacatgccaccatgcctggctaatttttgtgtgtttagtagagatgggttttcaccatgttggccaggctggtctcgaactcctgacctcaagtgatccgcctgccttggcctcccaaaatgttgggattacaggtgtgagccaccacgcctggccttatttccactttagccacccagagtttaactcactttcttgtgtggcctcccaagacctgttgtacagagtggttattcctgtggtaactttggggggtggaggagggctcagcagggatttccacttcttggccccaggtatgcataatttgccctttcatttattcatcctccaaactgtcacacctaacataatccagccatcccacaccaagctgcacacccattccccctcctcagtggcagacagccccaattcacttagcccctgtttactcatgaactcccagtggccttgtcatagggccacagttctccaggcccaggtacctgtggttcaggtggcttgtcaccatctggaccctctgggctgaaataattctaaccactcccaaacagtgacctttgcatccccggctagggcagataccacccttgaggcttatgttttcctggccgatttatactctgatattaatttcctagttccagaggtagaattaaaagcactcttcttcctcagacttcaggctttgcacagagtagactcggtaggtggcaacacagcttactgtcctttctcccattccagggagtgggcccaggccctggccctgggcaaagcgaagaggtgggatgtgcaaagttctagcagctgtttcactccctccgttggtgggtctccaccacagaaaaggaatacgggaccccagagtatttgtcctgccacctcaggctgccccagagagagcctgtggggccttccctttgaaggattaactaggcatcctggctcttaccgagagtagccgggccttctgggatcaggctcccatgcacaaataaccccaatccttttacatttaatgctc

SEQ ID NO: 87693 - DNA, 2027 bp, Homo sapiens
taatagtaggtttaactgcatatgagtagacatactcaaatggataaaatttgactttttgtaaggccaatggtgcacatacaaatttatagtctgtcaggcctgtattagtttagtttgtttaggatgtttctccattaaagtaaattagcctgatacgtttcttggttgttactagatatcagttgatgctgtttccctttagcaaagacaacaaaatagagtagtgacacctgcattctaaagctcagccactaaatgagcatgtaaccttgggtttcagttttcctaaagtgtgggatttggcttagctccccaggtatcctgagggaccttagggatttgataccaccctaagaaaaagggcttgttttcctaaccacgtcagggaaaacgatttcatgtagcaccattcatgtccagatatgtttcttcttccaatgatggcaatgtaagttgatggcagagcaaccatgaacataaacagaactgcaaatggttgaactcagacactcagcccaggccccaaaaccagtttggggggaactgtattcacctattatgaaattagcatacctttgcattcaggaatacagtggatttatgaggtacttttttttttttttaatcagatctattaaaggaggacagtagcctaaactgaagaagagtcctaactgtcttgggtggtggttaattacaccatacggcagacttgccacaaacactgaaagtttaactctctcagctgcttagtttggaaaccacacagtgctgttcagttaggccttggccttttctgcatcccagctagacacttgactcccatccaaagcaaatgtcatggttgcctttattgacttaatatcaggaaacataacagccgatagactggttagaaggaactgtatggttgatggattattgctgacctacacacaggtaaacgaagtataacagaatttggaatgatttactggtggactgaaatctttaaaacagtaagacttttgtttgtgtctatggctgatgttttaattcagttctgaatgttcttccacagacaggagactaaaagtagtgaaatatttgttactcactgttcaggtggctgtatagaaatctccatatttgggtataagtactttgctgcagtatgtgtaaatgagatgagggtcagggaacagggtttgatttgaataaaaatctgttttgtaggccagccgctcaagcctgtaatcccagcactttgagaggtgaggcgggaagattgcttgagcccaggagttcaacaccagcctgggcaacatagtaggaccccatctctacaaaaaatgaaataaaaagccaggcatagtggtgcatgcttgtagtcgcagctactcgggaggctgaggtgggagaatcgcttgagcccaggaggtcgaggctgcagtgagccatgatttgtgctgctgtactccagcctgggtgacagagcaagaccctgtctcaaagaaacaaaacaaaacaaattttttttgtatctgtcttaattaagtctttacttaacataacttcaaagatagtcctttgtgagcggagagttgagcccctcctgatcattgtgaggcttttactctgagggcttgctttaatcattgagagagttttatgtcatggacctttgcacttactgggcactgatttcagtgttctactgctttggtgaatttttgatgtctttttggccatgatcggacagtctcctactatgtgatgaaatggtattagaaagcggtactctgctggctgcctttataaagcagagaatcacaaatgcccaggctttgagtttatagtctgagacagataatattgctgcaagtagaagaattgtagacacagatgtccttgttttgaatatcctttagtgcctttcaagggtctgtgttatagaataccattttgaggtacttcttcctgttgttttgatgttactgcacaggttgagtgagagagagcttgtgtgtgtgtataagaaaccc

SEQ ID NO: 87694 - DNA, 1055 bp, Homo sapiens
gaaccttaaagtgagtcagattattactaatttctaatgttgcaatattttgagataagcggagacacttagatgttgcaagaccaggattggaaatgactatgttcaaaggcattaggacttctaaactctgtcaaattgttatgcggattttgggcatgttttgattggttggggctagaagaagctgcagcaaagcctgaggagagatgagggtctggtaagtcatggatcatcatgcttcagagctgcagccaccatccacctcaggcttcttactttcttggaaacccatgcctggaaaaatctaatgacttgcccagagctcaaaccagaccatgcatctgtgtgcccacctcatcttctgtcagcttcattcaccccaaaagcatctatatgttccagactcatgaggatacctgaggaactttggttttgtttttaaaccaaagagttttgagaggataaaataacaggttttgaagctatatggacacaggctagggcaaggagtgagaagacagctgagcagggtagggtgggaccagactcttggaactgctctgggcaggacctggatatgctgccaagtcagctttcgggaagttcggccatggaacttgccgtctttttttctgcattacacgactctcctgctagacggcaaaccccttgaagccaggagttttacaggccttggggcggcattgccttgtgtgtaacaggacccttctttctgcatatatgtaggataagagtccagcttaggggcagggttggagtaagtgaactagcacacaggagttgaaatagaagagtcagccaacaggaagaagtatgaggcagggagtgcctggaagagattggcaaatcctgaagtccttgccagcctacttgagtaatgtgagaccatgagccaatgacttaccttgtcctgtaagtttagtatccccaagatttctgcctcttgtaatgaaaatagtcctggcactgactgcaggtactgtggagatggggcgcctggaagattaaaaagacgggaaggtgcaggttta

SEQ ID NO: 87695 - DNA, 1081 bp, Homo sapiens
tgtctcaaaaagaaaaacaaaaaacaaaaaacattgagcttctgtgcccagccgtgggttggggactggggttataactgatcagggttgatgtggtaataagccgagctttgcctgccagtcatcttgctgtggccatagggatcataaagaaaggggtattttcattttttcaattattttatgtttggtgctttctgtatgataacaggggaagatatttttttttgaggcattatctcaaagtaatcatattcattgtagaaaagttagaaaggatagataagcctaaattaaaaaataaaaaacaagccttctattatcttattttccaaacattacctctatgaagattttaaacaattttattgagatataattcacctatcatcacaattcacccatttaaagtgtacaattcggtgggttttagtatattgacagaattctgcagtcatcaccacagtccattttagaacattttcatcatcccagaaataaacttcatacctattagctgttacacaccgtttccccccaaacctcctagtccttggcaaccacaaatctactttctgtctataaatttgcctattctggacctcttatataaatggaatcatacattatgtggtcttttgtaactggcctctttaacttagcatcatgttctcaaggttcatccatgttgtataataacatgtgtcagtactttgttcctttttattgctgaataatattccattatatgaatataccacattttatttatccattgtattagtccattttcatgctgctgataaagacatacccgagactgggcaatttacaaaagaagtaggtttaatggacttacagttccacgtggctggggaggcctcacaatcatgaaaaaaggtaaggaggagcaagtcacatcttacgttgatggcagcagggaaagagagagcttgtgcagggagcttcccatttttaataccatcaaatctcgtgagacttattcactatcacaagaacagcacgggaaagacccatccccatgattcagttgtctcccacggggtccctccaacagcac

SEQ ID NO: 87696 - DNA, 1048 bp, Homo sapiens
taataaatgtaaattctctttatgctccaaagatgctttttactctaagccatcattttttgaatgttatactatgcctctgcaagaaatagtttttgatatttctttttgattgatgtagtaactattgcattggaggcaatactgtgattttctttcagtgtgtgtcttattgagccagacattgactcattatgagttgagactttaggctaccagatccaaaacgcaataacattggtattattaagcacttgaggctgtcttttgttaatccagaatgtgcttatttagtcagtgagtttttcctttcttcctagacctatatcttgctcctagagttggttagggttacatcatcactgtcagcagtcctcattttatggttatttaggtgccacatctctcaattaccaaagagatcagtacaatgtgaggcaaagtacctttttttttaaaagctataagatatcagatttctttcatttagccaatattttggttttagagggaggtttttaaaaagtcaccgagaactgaggatcatgtgtgtatagaaacactgtaatctgatagatgagtcttaactagcaatgtctttgcttatcatttattctgacagtgatcacctgcattaattatcctaataggcgatatcaagtgtttatactgaggccataagtagaatgttcattgagtttgttatcagggctgctgatcatgaaattaaactgtagttgtgcacatgtgtattgtttcattaacttgcctgcctattcagccttctgcagtaatgtagcttctcagagcacaggagaaaaatgtatctgagagttattcgagagagagttcaacaatagcccatatttccgaacataaatctagtgagccgcattaaagtttcttcatgtctggatggaatagtgtcacttgcataggtctgagggtttcattatttgcctgccccagatttggactccgtttttcaggtgaaagaatccttggataactgtttcattttcataggaaacctctttggtttcgggat

SEQ ID NO: 87697 - DNA, 1474 bp, Homo sapiens
ctgaatctcagaaaggttaactgagcaaggtcacagagcgaacgcatcacaaagtcaggatgtggtgcagatcggtccattttcaatacaagctctttctaccacgacaggttattttgcacttggggacagtttttaactttccattctcaactcctatcctagctcctggcacagaacatgtcatccaagttaggcatcatcgtcgcctgctcttggtgaagttttcttttgcgtactgcggagagatgcgctcattaccagctggcggtggagtcgctgaaacgcaaatggatttgagactgagcgactcccatctctatggttggtatgtgacccatctatcctctggaggactcagcaaggactaccagtcaccagacaactttacgcgcacgtggtcgcaaggtgaacttgctattggttaatggcagtaaagcccgcccatcagcgctggtctgctcctttaaaagaacgccatcgacgctcccctgtctttcagcgcctgcaggttccgggaggtcaggttgtattcctggcgggtcgtctggctgggtgggccccggaggtcgtggctcgggagcagggaggcgtaggggggccggcctgctgtgatgacattccaattaaagcacgtgttagactgctgacgcgggtgatgcgaactggagtctgagcctgcccgagcggagctgggagggggctggcgggcgggcgcgcgcacacccgctgatctatcactctcgttcttgtagctcccagccgaggacgtcggatgtcatcgtccttgctgctttgccaccccattcccgtcaataaagtggtttgaacccaaccctggtgtcggtgtgtgtcgttggcgacgcgctgtctttgagcccccgccgagcttcctcgtggcgccgggggtcaatctgcagcgctagagcatgtgcttgcgcataactggggccgcctggcctcccgcgggcggcctttttaaccgcgagcgacaagaagtaacctgactgtccggctgctaggctgggcaattttccagctgttttgccacgacaggcctcaatccgtaataccaaggctggaatggcgtgttaggggggcggtggctgacggggatacgcggactcttgatgcgtaaggagtgcccctctgctcccatacgttccccagcccagccttccctgagtgtatcgcgcgcgctgtgccttcgccgtgagttcgacataagtcccaggctgtcgcgtctgccatcagacgcgcagatttagttgaaggcagcgtggaatggcgtctgcagggctgttgtgtacttgacataaacagattcggtgtggaactgcattgagttaactcctgactaaagggtaatcgacctgtttacaaataaccatgcaggagtactgacaagcatgggactaaagctttgggcaggttaatctgtcactcctaaacagttcaaaattatagggcggtt

SEQ ID NO: 87698 - DNA, 1070 bp, Homo sapiens
tgcacgtatgcgttcactacatggacattcgatgaatgaaggtgtcccgaattaacattatactagacaatgaagggtgtaaactgcagcccaggagcaccactgccctaccccctcagttacgaactttcactggattctttaaatgtgggctgaagataatggcacatagtttgaaggatgtagtgaggatggctttgtagccttaggactgggcagtgatcaacgcagtaaatgaaagctgcgattgccaggtgagggccccggtgctctgtactcattttattgtgcccctatctgaacaggattccgtagaaatgacttagatgcttatctagtatttgacattgagatatttattttgtgaaacaatgcaagcgattttaaatccccacatactatttgattaagtgcaacatggtacagtcatgtgtaatctctttacacgatagtgcatctagtccttagcctttagttattgcacaacaattataaagaccagtgaccaggacacgtggactctgacaggcagatcggcctacacaacgaaaaatcagaacagtacaccaactggaatggtcaaacaatttaagtcaaatgttttaatggtgcaattaaaataagggttcaaacatgttttcaatatattaatttctttaaagtcatgttcaggcaaggtgctgtttaaaaaaccactattagctttgtccacacatgtaagttatcaaaagttacccaaggtaattttgacgttgaatgcagctttaaacaataaaaaaatggtattaggtttacttctcgaagcaaagagagcccccaaccttgtaaactaaacattctgacacaaatgcacaaaattaagttggcaacattaattttgagatgtagtgtgatgctgagcaaacttttggtcttgactcttgaaataattaaagagagcagttctccgttttggccttcaggaagggaaatctgcccatggaactctcccaatcagattaacaaactgtttcgattcccatataaacctggaggacacaggaaacgccagatggaaaaactggctctgg

SEQ ID NO: 87699 - DNA, 2255 bp, Homo sapiens
gggattacaggcgtgaaccatcgcacctggccattagcttacattttatcgctaggatttattaataaaaggataattcacatggaatatgtgttctagacatagtaactgggaactactgtgaacagcttaagccaattctcttaaattgttggatatatatcagtgcatatgggcaaccttattatatgtatacaaaatcaaaggccacttctgcctccgagctgatatattagaggattctcgtatccatgcgctggtatgattcctcaactctttctaaagtatgtatggtgggagaattagtttggaatgcatagcaagtttttatatgtacttttaaaaatcagtctaagccctaaaattatcagaacaaaggagggtgacagcctggcaaggcattcttccacatagctgttctttaatatcttcctacagaaagtttttgtcatgccaaacatggatgatgtttatatcactataatgcactcagccatggaccctcgctctacttcctgcctcctgaaagacccacctgtggaggctgctgatcagccatgatgggtgatgtcagatgttccccatattgtgacatcgagctggatgtgtggggttcttggccgccatctgtactgtagcactggcctctgtgccacagctactgtttcttaaaggactgcttctgccctctgcctgccagtgcccattccactgtgaggtgtcattccctgcatctagtgacaactgtctggattgcctgctgcaaagctttgatttggcaaaggagaccatggaagaatcatggtggatccagaagttatacgtgacccacaccatggcttttaaaagtctacccatgtttgtggcagcaaatgagcacagtaagagcaaagctgaacaacttgcctcctctactcctccaaagcttttcttcaggcagccggtgcacagtggactttttcacttctatactttgtatgcggccttccacacttccagagaatgtcagtgtgcaatgtgtctggagggtggggagaggaattctgtgagccttttcatttcggtgacagaagagatgggcagagcaacttattttccacattaaattgtgcatttgggaagcaagtagccatagtacacacacaacacgctatcagcttgggtaaggacagtgggatttatgtgaacatcaggcaaagccatgagatcaaaccatcccaagcctttcaccaatgaggtacaaccacctgggggctagctaatcttgaatgttttcctgagacaggagcgtatgtgaaaacatcaaacactgcacatgacaggatgggtcctctcatacagatgggatggggttagaaagccagagccagtttttccatctggcgtttcctgtgtcctccaggtttatatgggaatcgaaacagtttgttaatctgattgggagagttccatgggcagatttcccttcctgaaggccaaaacggagaactgctctctttaattatttcaagagtcaagaccaaaagtttgctcagcatcacactacatctcaaaattaatgttgccaacttaattttgtgcatttgtgtcagaatgtttagtttacaaggttgggggctctctttgcttcgagaagtaaacctaataccatttttttattgtttaaagctgcattcaacgtcaaaattaccttgggtaacttttgataacttacatgtgtggacaaagctaatagtggttttttaaacagcaccttgcctgaacatgactttaaagaaattaatatattgaaaacatgtttgaacccttattttaattgcaccattaaaacatttgacttaaattgtttgaccattccagttggtgtactgttctgatttttcgttgtgtaggccgatctgcctgtcagagtccacgtgtcctggtcactggtctttataattgttgtgcaataactaaaggctaaggactagatgcactatcgtgtaaagagattacacatgactgtaccatgttgcacttaatcaaatagtatgtggggatttaaaatcgcttgcattgtttcacaaaataaatatctcaatgtcaaatactagataagcatctaagtcatttctacggaatcctgttcagataggggcacaataaaatgagtacagagcaccggggccctcacctggcaatcgcagctttcatttactgcgttgatcactgcccagtcctaaggctacaaagccatcctcactacatccttc

SEQ ID NO: 87700 - DNA, 1037 bp, Homo sapiens
cagggatgctgctgaacaccctgcaatgcacaggatgccccccgccccaacacagaatcaccacatccaaaacatcgagtggtgctctaaagtaaggggaacgaagagccacaggtttttgtctgtgaaaagagcaaagtttgtgctaaccgccctttgtgttccacatttgaaggtacgttggaggtcatcgaacaagtaagattatgaggtttgttgataaaattaccaagtcaaaatatttccaaaaagcaacagagacagagtttattaaaaagaagatcgaagaagtctccaacacacccctgctgctcactgttgaagtacaagaatgtagaggaaccttggcggtcaacattccaccacccccgactgaccgagtatggtgcgtagagggccctcagggacaataagtgattcctcctattgcatggccacagaaatcccagcctgcttaaccttgaggttatggaaagtaccttctcccgggcagaagcacttccaaacaattttcatgggaccttaatattagttgcaaatctgatggtactttcttctgtgagtggtgaattcacattcaagaattcatgttcacatggtaggaaaagttaaagtcaatacatgaagtttatgagataagctgtttctattattggtcttcctcctctgtaaagccaactgttctgccagtaataacagctgtcatttgtagatagcgcctttattctctgcctggccctggttgtaattgcattacctgattagtcctcatagcatcctgttgaggtagatgccattgttatccctactttaaagatggggatcacacatccaacagagtctgggaagttagggagacttccctgagttaggcctcaatgctgaggagtcaggagcatgtgcatttggtgtctgaggactggattctcagccccagctgcatgttaaaatcacctggggacttgctaaaaatatagctatgcctggcccatccccccggatttcaggggtcgggggtgatgaagccagggttgaga

SEQ ID NO: 87701 - DNA, 1044 bp, Homo sapiens
tggaactgagtatctgccctggagagctgagtgagggacactgctgtcccatgaggctttcccttacttcagtcaaaggaatggtctttagacatgtatttttccggaaaatttcctgggttctcatgtcagttgcttcctagagtctcctgagactttttgtgtgtgtgtgtgtatgtggttgttggctttttctgtgaccctcaggagatagggcaggtgtggagtgaaatacgtaatttcactggaaaggagtcatgagtcaaaactcacttggagggttactaagccagaaagcatcagagttgctgaattaagccagagccaagggacttgcctcaacatcccatcatcagtgagaagtggccatgtcaccagtataagctgtcacctcactcttgcaaccatccgctctttctgttcatcctcccgtgtggctccgctgcactgctggttgaaatcactgcattttatgtgcgcatcacactcccacctcctgtccttctgacgcatgctcaaaagcaacctcttctgggtccaaggcctctgtggtcctgtcagaggccttggtgctgaagagtgtcctgagcatctgcgctgatccaaggattcttggattgggcctcttctggtttgggtgggttggagagaatgacgagatgtagttaacagttacatcccgaccctgttgtggttgagtgtgtgtgcatgggtgtgtgtgttctctttctaagcagagcttgggtgagggcaggcagtggtggtgactctctctctgtccagttgcaggccccgggcattctgtctggcggacagcgatgaggaatcctccagcgctggctcctccgaggaagacgatgccccagagcccagcgggggagacaaacagctcctcccaggggctgaagggtgagtggatcagtgcttctgtgcctctgagtctccagggatcaggacagcaagttgggagtgaaccttgtttcccttccttcctctgtgatcttccttcctctttaatgttgagtagatggtttttttattaat

SEQ ID NO: 87702 - DNA, 1080 bp, Homo sapiens
gagaaaaaggcccagaaaaatggacccttaccccttttttcagaaaggaccctttcgggaacctgagagcactgggtccttctttctgcaaatgcttccacatgcaccatttggctcacagtttctaggagcattgtgaatctctgaaagcccatccgtggttaagaacctaatcccagaagtgattccagaatccacttcacttcctcagtcatgaggtttacggaatcaccacgcggcttagtagcagaggagggacaggggtcagcatacttattagctgtttgaagcgtgtgacctttggaactgacatcttccttaatattaaacctccaaagcacggaacatctgaagaattggccagcagcagccctttcctgcaggctctccctgcagcccatggccacctgtccagggcttcactccacatcagggtctgctccctggtgtcctgcctggcagggcctcggcttcatctcactgcttttctcagtccctgttcaagtgtgcaaatgattgtgcttttgcggagtctctgaggagatgctgcttaacctgtgagatgtcctccttactggtaggaagtttgttcacctttagttagcaccctgagggttagactgagattttaacctgtgtagctttgccctagcaaagtctcttccctttgaaatatgtgtctgctgtattttcatgggcatttttcctttagtcttttcccaaatagtccttttgtcgcacactgcaggtaacataacatacaacattcagatgggattgagatagtaacctgagcagcctctgctttaggaactgccctgcagagggccagaatgagttagttaaagggagcgctctgccttttgggtggcctttaaatggaaagtggcatggaagtgaagtgtttcctataaggcacttggcctcttcctgctccaccactgcagtctgggccctttgtacaagtccccaagtcagaaggtggccccatctgacctcttttgggttactagttcacatctaccccaaactacccatctgcccccaggcccctggtgttctgggcactgagtgcctgca

SEQ ID NO: 87703 - DNA, 1023 bp, Homo sapiens
tcaaatgccactcctcagggaagccatccctgacctcctcagccaaaacagccacccccgtgttccctctgcccattacctgcttgatgttctttgcagcactaatcactctctggaagtatattgtctatgtatttacctgtttctgcctttctattataaaccccgtgagagccaggccctggcctgacctcttcatggctctgtctggagtacgaagcctagtacatgatgtgtgcacattacgttttcgttacataaatgatatgtccccaaaaccttggccaccatcctctccggaagcatgttgacttgcaacagcatgttttgtaggttgctcatgggtctcactcattgtttgcttgtttcctctagctcccctactttatgaatgagctcactctgacggaacttgacatgggcgtggctgtgccaaaaatcctccaggccttcaagccttacgttgatcaccaaggtaactcctaactgaccattctatgagtgttaaaatatatcctttgctgcagattcagtaccatgatggctttgtgtttggagggtgttgaggactttttaaatcatctgtttcatgttgagtgtctttctgttcttaccagtcatggccttaaaactgatttggggccgggcatggtggcttacgcctgtaatcccagcattttgggaggccaaggcaggcggatcacctgaggtcaggaattcgaggccagcctggccaacatggcaaaacaccgtctctactaaaaaagtacaaaaattagtcgggcgtggtggcgggtgcctgtaatcccagctactcaggaggctgaggcaggagaatcgcttgaacccaggagacggaggttgcagtgagccaagatcgtgccactggactccagcctggatgacaagagcgagactctgtctcacaaaaaaaaaaaaaaaaaaaaaaaaagatttggaatagatccaagctcccatcctaagtcttttagtctcttggttattatagggcctcctccagcc

SEQ ID NO: 87704 - DNA, 1896 bp, Homo sapiens
gtgctgggattacaggcgtgagccactgtgcccgacctctttttacatttttaaatgtgactactagaaaatttaaaattgtttatgtggctcagattgtattcctactggaaatataaaggtctactggtctaggcactgaagctcagaatcaggtaacccacgggggtatatggggccaccaggaaacaccaccttaggtacttaggggccccccagagcaccttcaaaagaggcatgttattcatggacttaaataaagcatttgattatttttaacgagttcaatttttggaaatcctgccaaaagttccactcagcacacaacaaacataatggtaagagtcagagatgtgggaaaaccttcagtgcactcactggtactaaagcaaggctcacacaccactaatgtcttcgtacatctgtaagtctgggttgcctttgaaagctatgaattgagatatttatggtaagtttaagccaccaaaagtgtgattaaactagtagcaaggtaaattggtgagcactgtgctgttcttcaaaaccatctctgaatcagtgactacataggtggtcagccgtgaaggtaggactggtctgattctctgaggccaggtacatctatcagtaccaagaagttagaagtcttcctgctcgacgacctgccctgtcctctccctcagggatgctgtcaccaaaatcatagatttctctagcaacacggattgtgcttctcagacttgaatgtttgacgggatcttaagatgcaggttctgactcgaggtcatgggtggggctgagattctgcatttccagccagcagtgcccaggctgcaggtcaggaaaggcctcccggaggaataagaatctggagacagcaggaaagccacatggtcatttggcagaattccagtatggtctctgcacaggaaggtccttgactttatcaggggctattgtccatgagacccacagtgcagtgacgactcctgtgctttgtcccactcaggggaagggtgaggtgatgtgaagaggctgttctgtgggcaatgagcaccagccaggcctcgtagggggttcctttcctcctctacatggagtgtggctcagtcacaatgggatcagtttggtttgaagtgttggtatcatgctgccctgtttatttcatctttttttctcttttttactattaactaaactgtaatctttatttggatttcactggtttttctactaatgtcctttttctcttccaggatccaatccaggatattaaatgtaatattagtttacatctattttttaatgtttttgatgtagcttttatcctagcaattaaaaaaatgctaaacatgaaaacggtataaggataataaaagttacaaaaatgtatttttatagttatgcagtgtaaaatattaaagtgctggaaattatctggctaaaatttaaattaagaaatggcttgcgtgaccctttgtgaggctctggggaattatggttctgatggttggagcctcttaagaagaaaatggtttgatttgattttttgatttctttctttctttctttcttttttttttttttgagacagagtcttgctctgttgcccaagctggagtgcagtggtatgatcttggctcactgcaacctccgcctcccaggttgaagcgattatcctgccttcagcctcccccagtagctaggactacaggtacaggccaccatgccaggctaatgttttgtatttttagtagagatggggtttcatcatgtcggccaggctggtctcgaactcctgacctgaagtgattcatctgtctcggcctcccaaagtgccgagattataggcgtgagccaccgcgcccagcctggtttgattttaaccactttacg

SEQ ID NO: 87705 - DNA, 1048 bp, Homo sapiens
atgtattccacaaagctattgtttctctgttcttacagttcatctgaatgatctttagatttctccaatgtgagagaagtacttaaaatagtttttatataagtttattcttaacttgagtttgatactcaaggttgactttagcttcccatctagattttagctatctttttttttcttccaacttaagtttggtccaaggtcattaaattcagttgatagccaaacatagttgatgataagcagctaaacattattattgtgctactgccacctgaaaattacggatatttataactctcgcaaaattattaaatgcctactttgtggaatgattttgaagaataacaagacacttctgaaaattccagtttctgtagtcatgttatgaacaagtgttgaaagttatttcatattcatcattttagtcaaaaagtctataaggtttgcactttgtgctatgcataatattaatgcatagtgtagccaatctttaatatataaatcatcatttttctttctctgtagatttatcttgtacctaaaactttggctcgaaagcgaatctggaataaaaagtaccccatttgtatcgagcttggtcagcaagatgactttatgtctaaagctcagactgataaggagacttcagaagagaagccgccagctgagggaagtgaggaccctaagaagccaccccgccctcaggagggaacaagatctagccagcgagatcagatactctatctctttgggagaactggccgagaaaaagaggaatggtttaggagatttattctggcatctaagctaaagtcggaaatcaagaagtcatcgggtgtctctggaggtaaaccaggtaatgatgtttgtgctaaatgcttatgcatttttaaagggccactagggagaatagagaaagaatgccaggtaggaaggaaggaaggaaggaagcccaccctgaactgatggttgtctgccacctaatgtgcattctcatgactcatttaccatctaggctgatcactgcagccgtctgtcccaaatc

SEQ ID NO: 87706 - DNA, 1678 bp, Homo sapiens
cacaagtattaagtacagtgccattggctgtgtccccagggtcgtcttcgtcggggcccttagctagctctcccagtgtgtcatccctttctgagcagaaaaccagttcttcctccccattgtcctctccttctaagtctcccatcctctcatccagtgcctcaacctccaccctttccagtgcaaaacccttcatgagccttgtgaagtccctgtcgaccgaggtggagccaaaagaatccccacaccccgcaaggcacaggcacttgatgaagacattagtcaagtctctgtccacggacacttcccggcaggagtcggatacagtgtcctataagccacctgattccaaactgaacttacacctgttcaagcagttcacacagccccgaaacacaggtggagattccaaaactgcaccttcttccccactgacttctccctctgatactcgttccttttttaaagtgcccgaaatggaggctaaaattgaagatactaaacgacgcctttcagaagtcatctatgagccttttcagctccttagtaaaattataggggaagaaagtggcagccataggcccaaagccttatcttcaagtgcttcagaactctccaatctgtccagcttgaatgggcacttggaaagcaataacaactacagcatcaaggaggaggagtgtgattctgagggggatggctacggaagtgattccaacatccccagaagtgaccacccaaagtccactggtgagcccacaagagagatagaactgaaaagttcccaggggagcagtctgaaggatttaggcctgaagacaagttctctagttctggagaaatgttctttgtctgccttagtgagcaaagaagatgaagagttttgtgaactgtacactgaggacttcgatttggaaacggagggggagagtaaagttgataagctctcagatattcctctcaagccagaggtgctcgcggaagatggtgtggtccttgacagtgaggacgaggtggactcggccgtgcagcacccggaattgccagtgaagacgttgggcttctttataatgtgtgtctatgtgtacctcatcctccccctcccccactatgtgagtggactctttctgggaattggccttggattcatgactgcagtttgcgtgatttggttttttacaccaccaagtgctcataaatatcacaagttacacaaaaatctgcgacactggaacacaagatctctggatatcaaagaacctgaaatactgaaggtaagcctctccccgggagctggctagtacacacacttctcacatacagccgtattttagatctgacttgttttttggttagctgttaaagatttttgcacaggccgtgttttttaagagcttggggccacttcattctccaggcacccagtcaactcatctggtaaacctcattctaacccaagctttgcagattcacaaagtagtttctgaaagatctctgtgactctagagaatagtgtttacatcagttcctgttctggtctgtctctaaacttacttggaatgtgctacttgctgagcatttttaatggctgagtctgttagggttcactattcttgagaccttgaagaagggttaaatactcccggaattgcaagaggagggaaggaagaagagaagg

SEQ ID NO: 87707 - DNA, 1048 bp, Homo sapiens
aggaggaggtcagggatctggctcttaaagggtgttggagaaaggtctcctttccatattgcttctgaggacttcttagaccattggcagcacacgtcctcacatgaaggtgggcgtatgatctgggagactctgcttaagaaaccggatctctttattgatagagccatctcatgagcaagtaatgcaagctgttggtaattacagaaaacctactgtggaatttcatctaaaattaatgaagagtcagcactgtggattttaaatacagaggcagtaatggctttagctctcagctgtctgcgggctttcctttgctctctgttgtgctgggggctcccttccgtcttgtccagttggttcgtatccctatgacacagacccattttaatggaacaccaccaaaatatgcagtatattccaaagtcaaaggtttaggatcagaaaagtgaaaaaggttcatcgtattaaaaagaaaacaaacgtggagaataaaaactgggcagtgaaatctagctagatgaccataatatgtctgcttttcttgactttattattattactttttaagggcattgttcaatcctcgattttgtatctatggcagcaggtgaaggtctctagatgagcgttcacatacacgatgacaaatggttaaggaattttgaggctaaaatctttactgcttagatgtcatgtactttataggcatagcatttctagatttaataggaaggatctctgctctgtatgtgcttttatgtgacttgcaaaggaactattccatttaaatagatttcaattaggataatgggtttgagacatttcacaatggtatattttctagactcttaagatagaattgtcaaattatagcaaatagagttagaaattattttgcaattttctcagcagattgtaatttctcctgccatacatgtagtcattgtaaaaataatagtgtaagggtaccttttataaaactgattattttccaaatagactggtaccttttggtttagaaaaaaaatgatggaagaagattgta

SEQ ID NO: 87708 - DNA, 1013 bp, Homo sapiens
caagtagctggcacctgccaccacgcccagctaatttttgtaattttagtagagatggggtttcaccatgttggtcaggctggtcacgaactcctgacctcaggtgatctgcccacctcagcctcccaaagtgctgggattacagaattacaggcatgagccaccacgcccagctgccgccttctttatttttctgtatcctgaataatctgttccccgtcattggcttttctgttaggtctggtgattcttatctgcagcaagaaaagggggtccctcacgtagacacagcaccaggaggctggtcctcccagctctgtgactctggaaggtggatcctgcccttccttggaaggccttagggcctcagcttaccccttttagcccagaagtccagccttctcctcgtgcagcctccagctgttctagaacacacatctgctgttgcctgttactgactccttcctttcctcatgaacatcatgtgtgtcctgtgatggtgggctctgctcatgaaagtatgattgttttatatacctttttttaaagacagaagttgctgctttcagaaagaccattcttctagggggcagcccaatatttaagacaatgctggtaggctggacgtggtgggtcacgcctgtaatcccagcactttgggaggccaaggtgggcagatcacgaggtcatgagtttgataccagactggccaatatggtgaaaccccgtctctactaaaaaatgcaaaaattagccagctgtggtggcgcacacctgtaataacagctactcaggaggctgaggcaggagaattgctggaacctgggaggcagaggttgcagtgagctgagatcatgccactgcactccagcctgggcaacagagcgagactctgtcaaaaaaaggacaacactggtgacaaatatgcatgattgcagcagatccctgttagcagaaatttagagtcaagaatggtcatcttctgcctttggccatttaagcttcttcctttc

SEQ ID NO: 87709 - DNA, 1082 bp, Homo sapiens
aacatagggagacctccccatctttaaattctttacaaaaaatttaaaaattaggcatggtggtgtgcacctgtagtcctactcagggtgctgaggtgggaggattgcttgagcctgggaggtccaggctgcagtgagccatcattgtgccactgcactccagcctgggtgacacctcaaaaacagacaaaaacaacttggatttattggagaggttaagtagtttttagagaataacccaggaagggaaatggggggaaagagttcacagggatctatcatgaaaactgtacagagggtttggagcatcctacaaaaacatgttctgagaaaccatgttccatgcccttgtcccagacttgaaaggcatttgcccatcatgttggaaggatgggatttgaggctgatcctcttgtctggatgggttttctgcacccagcctcaggagacactgacatgaggctccattttgagaccttaaggttggagtattccatatacagcccacagccaggggtgcagtagtcttcctctcttcctagagggtagggattctgccctgctcatatttgcacctttctcctccctctgacctccctcactgccatcagcaaactagagtactttgcctgtcgggggtgtttgccaagtgtttctgagtagaccctggtactacctggtggacactaaagagggctctaggcagtaataagagggaattctggttgtaccttgtgcaggggaggcttcctgctgttgctggattccctgttggaaagaagctgggcagttgtgtttagaactgaccctgcagatggggaggcttcccccttctctctcttcctgagggctacttccagatgagtgggggagcctgccagtgctcatcaggtccacctgacatgtcaaaaggaaaaaggagaaacctgggtcttccccgggaactttgaagttacgaataggaaatcgaaggacttgatgccgagataatgttcttttggaaggaagggactggttccccagaccagcacctctggtaaccagagagaagatgttttgtgaagactagagtgatgcgtttt

SEQ ID NO: 87710 - DNA, 1081 bp, Homo sapiens
ttaagttcaatttatagtattcacttgtagcatgaaacaggacacaagttaatatgtcgaaagtttctatatgttgaatttcatttttattttttaaaggggaaattcacatcaaacatgcaaacaaccctgtagcagtgcctctgtgcatcatggtacaacagaccattaaacatttgaaaggtggttagtgcaactgagaattggaagctttaattttaattaagctgaaaccgaagctttaattttaatttaaatagttccatgtgcccatattggacagtatagctccagggtttattaaaccaccattcctggtgataggatagagcccagcacaaactaatctgggcaacaaatcaaagggcacaagtcgcatgtaggttccaaactcagtacattttagagaaaaggagtttgattatgtagtagaaggaagaactgcctggtgggactcatgatcttcctttaagagcaaggctcaaagacctggggagttttgatttgatgctatgatgtctcctggggctcagaatattatgaaatgaggagtgaatctctgagtgaaaagaactcaagctgcttgttgcattgcggaatgtctctaagaggtagagaggcgtctgttaagtggcttgtatgaaggtttcagaaggtaagatgagccccagctttgggagttgtgtttgctgccaggagggtttagaggctgcctctaggcaacacccaggggctcaaagaagacagacgcagagagcatgagctgctggtcacctctctatccccagagcatcgtagatgcttgataaatgtgttaaaaatggatgacagtttcaggaatagatttaggagtaaataagagatgggcttgaaatttttctagaaattctgaaaaataggtgccgagggaagtgcagtgccagtgagctgcagagtttgttcagcctgtgctttctgccagaggtaattgacatttctcctcactacgaatgcaagctcgacctccctcctttcgcccttatctagtcctgcaccaaatactgctgatttttatcttataaacgactcttggatggttctt

SEQ ID NO: 87711 - DNA, 1066 bp, Homo sapiens
cttttttggcacataaaataacagtgtgtcttatagtcaatggtcttagatgaactagggtagtatattatttataggtagttgtaagaattaaatgagatcacttatgtccctggttctagtgagcacccaataacaggtcatgctgtccactgacaggatgaatggttaactgggaaaagctgggaagcatctcgtaagatttgccactcaacgcctaggcaataatccatggtttgtggctggaggaacattttccaatttgcctagagcactatcctttggctgactcttgtccctgtgagaaacattaacttcaggagctaacgagccatggacagacagctccctttgtcttcctattcattaaggtctttgtcaactttaaatcccaagtttaaagtaaatattgtaataagaagactggaagcccatgctgttgtgaatattcttacatgtgagttttaaagcaactcataggttatacaagattttgtgttgctcctttccaaactctttataatgcgtaattacactgcgtgaaatgtccatgaagcaccattaatgagagggatgctaggaggtcatgaaagttcagaagcccttgactggcattggtggggtggagagaacactagacttggagtcagaaggctacagtcctgacagtttcacctgtcatccctgcttcaccattagaaacatatttcccaatggctgcgtggatcacccaaaattgcactgggcagcaaggcaggataccagctgcgcgtcacttcactaatttggacttttaaaagtctctcttccaggacagggcgcggtggctcatgcctgtaatcccagcactttgggaggcggatcacctgaggtcaggagttcaagaccagcctgaccaacatggtgaaaacctggctctattaaaaatacaaaaattagccaggcgtggtggcacatgcctgtagtcccagctacttgggactgaatcaggagaatcgcttgaacctgggaggtagaggttgcagtgagccgagatcgcaccactgcactccagcctgggtgacag

SEQ ID NO: 87712 - DNA, 1026 bp, Homo sapiens
cccagggggatacccctggttctccgcgcctcagtcaccccacctcaacccccagccctcgtctcaagggcacttgttgctgctagactgcaggaagaggaaattaagaagtgcaaagagctggggacagtgtgcagccccgttgggagagtgaagcttttgtccccctcacctggggctcttccaggtaaccctccccaccactcctctccctagctccaagggcggtggcccctttaacagacctgacaaatcgctcccccatttccgcggcctcacctcggcgcgcggtagaactggattggttgggcctggcgtgccgtttgctccgcccccgcgccctctggttggcggcggcggccgcgggcgcggggcgggtccgccggcggggcggggcggcgtgtgcccgggggcgggcgggcggcagggcagcaggaccgcggccggtgccccagccgaagccggagtcgcgcggccgggagcacgggcgccggcatagtacaatgaggcagccagcggatcttgggtgagcagtctcagggccaggcgggggcggtggagggagcgccccgcggataaggcccgggctgggcgcggatcgaccccgcgggcttcaaagtaccggtcgggtccggcggcccttggcgtggcggggctcggccccccaccccgctgtcatggttcaggtattgaaggggacgcccacccgcgacacccccgggcaatcccttccttcggggccccgccggatggctcgggctcgactccggcgggaggagctgccggccccgtcccctcagcctgcggtccccggccccgggcagggaggcaccgtcacgcgcaaactagaggaaaacggcttgcaattttatgaatggggccccgggttcctgccgcccccctcaccggcgacgcgaaatgcttgaaagtcgagaaccgcagttacttttactcgaatctgtcagaggttgtatgcgccccggtggtttttctccaactcctggagaacgcgggtggcggtggggt

SEQ ID NO: 87713 - DNA, 1054 bp, Homo sapiens
aactaaagtttataaacttctcttttaaaatttagttgtatttattttagagacgaagtcttactttgttgcccaggctggagtgcagtagctgttcatatgtgtgatcatagcacactacagcctcaaactcctgggctcaaacaatcgtcttgagtagctgggactacaagcgcatgtcaaagcacctggcctgaagtttatatgtttcttgcatatcttgaagaattttatattcccagggttgttcttggttttgtttgttttttggtttttttgttttgttttgttctttgtttgtttgtttgtttttgaaagccaatgcctggaatattttttacttttctctctttttagggaaaaaagcctccaaaagccttcaaagttgttttctatgtatatttgaccctcggtggattatttttccaaggatttattggactcattaggaaaaagtccccagttgctgccttacttcctcccaatcctaggatatgctcattttcctggaacctcttggcacaggagggtctggcatggtgccgggtgctgttccatcagtttctggtacaccaacacaccctcctcagggactggattgtttgggccagaatttgcagcatgaggaaatctcccagtctcctcccaagacttctacagagtctgggactggattctaggaaaggaaaaagagtggatttcagtgcctttcaacgacagaccctaaagcggaacctaacaccgtctctagaagcccatcacaccgccagccgttgattaaaagtgtgtatccctgggccaagacgagctcagtttgcagatggtgtctctggcagggttagtttaagatgaaaaagatagcaaattttaaaagttcttttcggctgggcacggcgcctcacgcctataatccagcactttgggaggctaaggcgggcagatcatttgaagtcaggagttcgagaccagcctgaccaacatagtgaaaccctgtctttactaaaaataaaaaataaaataaataaaaaaaattagctggggtgtggttgcgcac

SEQ ID NO: 87714 - DNA, 2205 bp, Homo sapiens
agacgttcctgacaatgtcttgagtgggtgggagagaggctgcagtcattgtgctgtggaatttcagaggtgagaaccacacctaaccaaaattactttccctgtttgcctcagtgacacagctgcaggaaccctggtgggtgttgtattaagtaaatttgacctttattctttgcagatctgtgaaatgttgtcttctgaggggccacgtgtatctgtagtgctgaggactccttgggcctctgaagtcacagagagaaccctgcagggtgggggaccagtgtgtgacagccctgctttgcattttctttgagaagtgctgtcattttgcatttctctccaccagggcaatcttcaatcttgagaggtgtgatcataacttgccttgtttcttgtcgctacagagaacggaaggctcccttgatggaacttagacagcaaggccagatgcacatccctggaaggacatccatgttccgagaagaacagataatccctgtatttcaagacctctgtgcacttatttatgaacctgccctgctcccacagaacacagcaattcctcaggctaagctgccggttcttaaatccatcctgctaagttaatgttgggtagaaagagatacagaggggctgttgaatttcccacataccctccttccaccaagttggaacatccttggaaattggaagagcacaagaggagatccagggcaaggccattgggatattctgaaacttgaatattttgttttgtgcagagataaagaccttttccatgcaccctcatacacagaaaccaattttcttttttatactcaatcatttctagcgcatggcctggttagaggctggttttttctcttttcctttggtccttcaaaggcttgtagttttggctagtccttgttctttggaaatacacagtgctgaccagacagcctccccctgtcccctctatgacctcgccctccacaaatgggaaaaccagactacttgggagcaccgcctgtgaaataccaacctgaagacaccgttcattcaggcaacgcacaaaacagaaaatgaaggtggaacaagcacagatgttcttcaactgtttttgtctacactctttctcttttcctctaccatgctgaaggctgaaagacaggaagatggtgccatcagcaaatattattcttaattgaaaacttgaaatgtgtatgtttcttactaatttttaaaaatgtattccttgccagggcaggcaaggtggctcacgcctgtaatcccagcacttcaggaggctgaggtgggcggatcacctgaggtcaggagtttgagaccagcctgatgaaaccctgtctctactaaaaatacaagaattagccgggcgtggtggcgcatgcctgtagtatcagctactcaagaggctgaggtgagattatcgcttgaacccaggaaacggaggttgtagtgagcggagatcgcgccactgcactccagcctgagtgacagagtgagaatccatctcaaaaaaaacaaaaaacaaaattgcttgctaaagaagtggtctcctgaggtcttaagacattcctgacagtgtcttgagtgggtgggagagaggctgctgtcattgcgctgtggaatttcacagatgagaaccacgcctagccaaaatcacttttcctgtttgcctcagtgacacagctgcagggaccctcgtggatgttgtattaaataaatttgacctttgctctttgcagatctgtgaaatgttgtcttctgaggggccacatgcatctatagtgctgaggactccttgggcctctgaagtcacagagagaaccgagcaggtctatgtttttgttttgttgttttgagacggagattcgctcttgttgcccgggctggactgcagcggcgcaacctctgctcactgcaacctccgcctcctgggttcaagcagttctcctgtctcagcctcccgagtagctgggattacaggcacatgtcaccacgcctggctaatttttgtatttttagtagagatggggtttcaccacgttggccaggctgatctcgaatgcctgacctttggtgatctgcccgccttgtcctcatgtgtgctccacaggcctttgggttgggattgcaggcgtgagccaccatgcccagcctagactcttttgacaatatgatgaaagctgttggttcctttcc

SEQ ID NO: 87715 - DNA, 1035 bp, Homo sapiens
tttctagttggggcacctcggccctgcatcctgttccccaagggtccttggacccagcagggctgaaacaaaatggagacactatcccagctcaccctcaggaagccagccaggctggctgtggaggtcccaagaccctgggtcatcctccatctccagcttctgccttgctgagttccacctgcagcagagtgtcctgtgcacatggagggtccagaatagtggacttaggtgctgcctgctcttcagggcccactgttgcccagggcccccctctactctggtatctcccagcaggccctgctctttttccctccaagggctccttccatttgtcaaaatccaatctttaggctgactccagagttgcttctgtgaatcccccactgcccagcccagagccctctcagtgcctctgaaccccttctgcagtttgttgagacctcttataccttctacttcatagtggtgttgtttatcaataattgatacaatataaaattcttggggacagcttcttgcatccccagcatagagaacagtgtgggtcagataagggtccaggcactgataggtggataggtgacacaaataccatttgaagctgttaaagagcactacaggatggcagaaggaatccaggaatccttttgtgggtgtttttttgctttttttgtttgtttgtgtgttttttgagatgaagtctcactctatcacccaggctggagtgcaggggtgctatttcagctcactgcaacctccatctcccagactcaagtgatcctcccacctcagcctcctgagtagctgggactacaggtgcacaccaccatgtatgcctaattctttgcatttttgatagagatggggcttcgccatgttgcccaggctgttctggaactcctaaactcaggggatccacccaccttggcctcccaaagtgctgggattacagggatgagctaccatgcccagccaggaatccttttttttaattgtcataaaatatacataatattaaatttaccattttct

SEQ ID NO: 87716 - DNA, 1034 bp, Homo sapiens
tatccccatgaaaaaatggatgctacctccaattcaactttggtgatgattgctctgttaccaaaaaaacaagaactgcaagtgtgcatggagtaagtgttccatccgtatttgagtttttcacattttgtcttcagattgctttagaaaatgcctacttgaggttctttcgctgttgggaaagaggttccagagcccttaggggactaggagggtccaggaatcacggggtcctttgggtccttgcaggtcagatttgcattgggggtgctgtcctcaacctcactcaatgcatggaagttgacacaatggctcaacattagcgttgggctgattcatcatttggctgttgacaccagcctctggcccagccaggacagaaaaagggcccctgaggaacttctggctctgttccctctatgggggaggggcagtggacttgtgataagacagggtgttagggtgaggtggacttggggaaacaggatatttctaaattagagaaacagaaggattgtgacccccgctgtgacagacaggccctgagcctgcccgaggtccaggaggaactgtatgtgagcttggggctgggtctatactgaggccccttggcgtacttttctcgataagactgaggacttatggccctcccaccattccctccaccaccttcgagaacagcaaccatccccaatgcccacatctcctcttggggtctcccccaggcagcaggtgaggtccccatgacttctctgtcttcaagtcagggtccacagtcagctgtttggggatctgccccagcatgtgggccactgaccattgggtggggtcctggtcctttccagaagggcaagccatacccgtcacttgcctctcataggaaacaccatctctaatgaatgcaggcagggatcacccaccacctatgcagagcttcctgctctcattggcttttctcagcctcactgtcctcttgctgacatccggttgggaccatttgcgcaactgcagactggcagggccaggcaaacaca

SEQ ID NO: 87717 - DNA, 1055 bp, Homo sapiens
ccatgagtccatctaacttcagcagcagtgactgtcaggatgaagaaggccggaaaggaaacaaactttactacaattttccctggggaaaggagttaatagaaaccctgtggaacctaggagatcacgaacttttacacatgtatcctggcaatgtgtctaaattacatgtatgttttacctggagctcctatgtattttttacccagattctctataatcatttccgaaccatttgagaataaggtgcaaacgtggtgtcttaacacttcattgtgtatttttcagatgcagagacactcacctacataactacaatccagtcatcaaaatcaggaaattaacagtaatccactattgccacagagccctacaaattgaactgattatctcaataatggcatttataggtccaagatcttgtctttcatgtagttgtcatatgcctttacactccttcaaatgaacaattcctcttgtcttgcgtgaccttgacatttttgaagagtacagtctagttaatctgtagaatatgccttggctgggatctgtctgctgtttccacgtgatttatgtatttttgtcgggagtactacagaagtggtagtactgagaagctctcttctcagtgtgtcatatgaggagtgttactggtgatgttaacttttatcatttagttaagatggtttctactagatttctccagtgtaaagctaataaatagtttgtatttattaattaacggccaggcgcagtggctcacgcctgtaatcccagcactttgtgaggccgaagtgggaggatcatgaggtcaagagattgagaccatcctggccaatgtggtgaaaccccatctctactaaaaatacaaaaattagctggatgtggtggcttgcccttatagtctcagctacttgggaggctgaggcaggagaatcgcttgaacccgggaggtggaggttgcgatgagccaagatcgtgccactgcactgcagcctggcgacagaacgagactctgtctcaaaaaaaaaaaacaaaaaaattaactagtaatt

SEQ ID NO: 87718 - DNA, 8422 bp, Homo sapiens
tctctagtagtgcagcttcggctggtgtcatcggtgtccttcctccgctgccgcccccgcaaggcttcgccgtcatcgaggccatttccagcgacttgtcgcacgcttttctatatacttcgttccccgccaaccgcaaccattgacgccatgtcgggttattcgagtgaccgagaccgcggccgggaccgagggtgagtttgggagccgagctgtcaggcctggcgggtggggggatgggagggcgggtcagggtggcggccggcgggggctttgcggcttggacttggcctttccgggctatcttgggacttcctttcccgaaggcttgcgccattttgatattcacgtcacagtgattggaagagatttgacggtgtagtgtcttcaagcttgctttttgtgtggggattggggagctgtcggggcggctgccatttggtagctgttgagggagttgagagggagcgtattgtgcggatgaaagcgggacgcttcgaggcagacgaaggaacatctgttaggtgcggcgtttcgggaggtgtttttggggtggccgggcattctgtgggagcgaggggaccacttccaaagccctggtgctgttggggtaggagggcggccggcatcagccatgtggctgagtcgcgagtacaaaatgccggcctcggacatggcggcggcgcctttgttaccccgcccggcggaggagctcaaaatggcagcgtcgagaaaatgtggcgcagagagaaatgcgagacaaagggggaagcgccgccccagcgggaacgccgcccggccgactccgcccgggccgggactcctcccccggtagtcgccggctcctccttttcttttttcctgcgttatataattttgattcgttgatccggagctctaccgcggcgttcccccagctgggtttgctagcagaagtgtttctgagaaaacccttgttctgttatcgctgactgtactgtttaggttcttaccactaaagctgtttggttccaaaacggccatatgagtaacatcgtcgtgatgctcttcggttcatgtagccttgttattgctgatagtgaattgctaggctggtggggaagattacagtaaccacaagaagtggtgtgtgccagaatcccaaattctggcatgtgggtgacaagtttccgacatgataaatccccggcttccgacatgataaatcccaggctgtttacatgacctaagtaatgtgtacttgggactacgggaaatgttaactgtggctgttgagagagagagagattttcacgaaggacagtgctaggtttacctctcgaagtctgttttcagtggtttttagcttgtgccaatggatgacaaatctatacagaaacctgggtatagccatttgaaaatgtgaataacgttttttttcattccaggtttggtgcacctcgatttggaggaagtagggcagggcccttatctggaaagaagtttggaaaccctggggagaaattagttaaaaagaagtggaatcttgatgagctgcctaaatttgagaagaatttttatcaagagcaccctgatttggctaggcgcacagcagtgagtaaattcatgtggcttcatcaggctgtaactcgatcgtggattctagtaaatgaaattctgacaggtgttttgcaaataactcaattttggtagagttacatgttctgacttcataattgggaaaggtgtgactcacttttggatataggtggctttgggatttttacttaaattaggttgagtataacaataaattttttttttcataatagggtgttcataggtgggtccagattaaaatgaaggctactttaaactagttactaaattatgaagttaggggcttatcaattacgtatttagctaggggtggttgtcatgaattttaagactgttataatttgttttgcagcaagaggtggaaacatacagaagaagcaaggaaattacagttagaggtcacaactgcccgaagccagttctaaatttttatgaagccaatttccctggtaagtgctacttttcagttctacctacccgtgtttttgtttccacctaccccctctttttcttggcatcactaatttttactaaatatctgttactaattatagcaaatgtcatggatgttattgcaagacagaatttcactgaacccactgctattcaagctcagggatggccagttgctctaagtggattggatatggttggagtggcacagactggatctgggaaaacattgtctgtaagtttgggagaactcttgagttgatctgatatatgcaagaaaatgtaatggtaatttaaaaacgagtattttaatgtgatttctgtttgtccccactttcaccctaaatagtatttgcttcctgccattgtccacatcaatcatcagccattcctagagagaggcgatgggcctattgtaagtatatatttttaactttttattagaagcataatgtgtagattttagactacatagctaaagatgtaatcatttgtggtggttttatatagaggttagctcaccctattcagctggagctgttttgggtattggacaacacatgaagaaaggatctgctagtataataagttagcagtttaaaactagtatccaggtttgtgctgaaagctgtttctctttccttagtgtttggtgctggcaccaactcgggaactggcccaacaggtgcagcaagtagctgctgaatattgtagagcatgtcgcttgaagtctacttgtatctacggtggtgctcctaagggaccacaaatacgtgatttggagagaggtatgtaatgaaaagggttttatttgtcattggtgctaaatatcctaggtattgtagttacacttacgtatttaattaaaggtgtggaaatctgtattgcaacacctggaagactgattgactttttagagtgtggaaaaaccaatctgagaagaacaacctaccttgtccttgatgaagcagatagaatgcttgatatgggctttgaaccccaaataaggaagattgtggatcaaataagagtaagtgtcctttgaaatatgtgatcaaactgaattgtgttttcactcttaagagtctgatactaatttttccccccaaaatccattagcctgataggcaaactctaatgtggagtgcgacttggccaaaagaagtaagacagcttgctgaagatttcctgaaagactatattcatataaacattggtgcacttgaactgagtgcaaaccacaacattcttcagattgtggatgtgtgtcatgacgtagaaaaggatgaaaagtaagttttattaactctgttatatttgcttcctaacaactttgctgtaaaattgagggatcattgtttggtgagttgttttaggttatttcagttggtgtgatttcatttagttagcctactaatcctgaaaatttcttgaatccttcaaataatggctgtcaccatttatagctttcctatagaaggaattcatgtgtcccctggttgacttaaggaccaagggtcgaactgctcgataagtggattagcaggcgtttcctctttgacttccagccatgtaaattgaacttaatgttttgctgaccataaatgtgtggccctagcaatggtcttttaaaactcaggatttttcctttctctctcctattattagacttattcgtctaatggaagagatcatgagtgagaaggagaataaaaccattgtttttgtggaaaccaaaagaagatgtgatgagcttaccagaaaaatgaggagagatgggtatgtgtgagctcctccattgaagcagattgattaaaacagcttaggaaagggcaaacttggatcacgagcagtggatttttttcatatctgatagtgaatttaactttttcatttctggcgaaattaaagagatctgtgaccaaaagtggtcaagcactggagtctgaggttttcaatgtgagtttaataacacaacttgtcttttaacttaggtggcctgccatgggtatccatggtgacaagagtcaacaagagcgtgactgggttctaaatggtaaatatttcaaatgaagtatttttcccccttacttaacctagctagaattctgctcagataattgatcatgtatatgccttcctttgtagaattcaaacatggaaaagctcctattctgattgctacagatgtggcctccagagggctaggttagtacaaactcgcattcatggcttggtttcccagaagatctccatttaacttttttaaagaaagtttattgctttctttaacctgcattttttctaagttttttttcacataaaggtgctgtctttgtggcaaggcctaggcatgacaatcggaggactcgagggggatggaggactagtgatcggctggctgcttccagtcgattagagaggtgaaaaagctgaacgtgtgccagtaatcttcaaaaggcagaacatatcacctctgccccgtaaactgttctctccgagggaaaaaatggaagttatcctcacagttcactgccgtggtatttcttctgtcccatgctttgcatgactgccatggtacagccttgtttcaaactgttcactgtgatctgtgggtctttgagtttcagtgagtttgctgaaatgtcgaagaagtagttccaaacttcaatgttcaatgaaatttttgttcaagtttgaaatggagagagcagctttaaaaggtactaagccttttacaaattggtgagtactggcacatgagatctagagcaggagcaacttctcacacatagtaagtgggaaaagaaagtgctttgaaagttcctccctcacctacacagtagtcgtcatgtcgagacctgccagagagagacacattctcaagtgaatcctggcttcttggaagcgcttgcctagacgagacacagtgcataaaaacaacttttgggggacaggtatgttttcttgcagctgcggttgtaaggtcttggcaagacaagcagtgtggccagaattttgaacttctgatgaatgtgtaatgcaaaggaccttgtacatttttttgtttcaaggtcctcaaaatgagcacatgaagaggttgctgtgaaactttaagtggccctactgcgcagaagcattcagatgtcacttgatgatctgtaagggaacttgctgatttgggaatgtgcttagggaacacacattccttttgacagggtctgtcactgggtgggtgatgaattatacagatgacatgtgcttttttttcttttttcaacctcaatggtattcctacaggaaatggataaccattttaactgtattttttgcagcccgtaccttcttgggaatacaattgtctaactttttatttttggtctggctgttgtggtgtgcaaaactccgtacattgctattttgccacactgcaacaccttacagatgtggaagatgtgaaatttgtcatcaattatgactaccctaactcctcagaggattatattcatcgaattggaagaactgctcgcagtaccaaaacaggcacagcatacactttctttacacctaataacataaagcaagtgagcgaccttatctctgtgcttcgtgaagctaatcaagcaattaatcccaagttgcttcagttggtcgaagacagaggttcaggtaaggatgactgataggaaatgttggtagttacgagtcacatcgttgtctacaaatccatttaaatggtattggagggtgagtaaaaccttgaatgtgaaaacttaagctgaaaaattgtaaaaacatttcacgcctaccatgaatagatctgtttctttctgtccacaatgatttgtgtcatagacataattgatcaatttgcaattgttttcttgacaggtcgttccaggggtagaggaggcatgaaggatgaccgtcgggacagatactctgcgggcaaaaggggtggatttaatacctttagagacagggaaaattatgacagaggttactctagcctgcttaaaagagattttggggcaaaaactcagaatggtgtttacagtgctgcaaattacaccaatgggagctttggaagtaattttgtgtctgctggtatacagaccagttttaggactggtaatccaacagggacttaccagaatggttatgatagcactcagcaatacggaagtaatgttccaaatatgcacaatggtatgaaccaacaggcatatgcatatcctgctactgcagctgcacctatgattggttatccaatgccaacaggatattcccaataagactttagaagtatatgtaaatgtctgtttttcataattgctctttatattgtgtgttatctgacaagatagttatttaagaaacatgggaattgcagaaatgactgcagtgcagcagtaattatggtgcactttttcgctatttaagttggatatttctctacattcctgaaacaatttttaggttttttttgtactagaaaatgcaggcagtgttttcacaaaagtaaatgtacagtgatttgaaatacaataaatgaaggcaatgcatggccttccaataaaaaatatttgaagactgaattaagtggaaattgtactttattttatataatgtcatgtaaaactttgcttaagatggtctggttttttttttgtttttgtttggttttttttttccatgaaaacaaatgactgttcctttttatttaatttgggaggcagggggaatcagaaggcccttctttataatgagctattcatattgcaggagtcagaatgaattgatacaggtgaatttttagttacaggctaaattgcataaaagctttgtcagcttccagcatcaggggagtcatttaatagcctttttccttatttgctagtatggttaaatgagaaaatagtaaaatagatacaaagtcatctatatagtgtgagaacgtgggtgactttttcaaagtttataatttaaaaagctccaaataactggctttttcaagagacttatactcatgctcttggctatactgtgaattactgaaatgttgaacaaacctgtgaaagacatacattagccctttaagatggccaggagctaagcttgagtctcctttactgaatttcgttcttagtgcaggttacttgtagattctagtcttcacaggctccctggggctcttaactagtcacactgggagtcatgaatgtctttccaataattcagggaattctagagatcctcaaactgtaaggtctattcatactcaacacaaggaaaaaacctcattaaaattaatgactaatcaggaggcaacgtaaccaaaagcacagtgaatgaaagttttcatggtaggttcaacatgggtttattgctagaaagatccaggggatagctttaggtttaacttcggctcaccaacgtaactttctaatcatttatttcagtaatagctagaagtgggtctgaatgttttcccagagtctgatacgtgtttttttttgccagaagagaggtcttcaggagacttcatttaaattctgattattaaactgaggctttaattgatgttaatgccttatgtcaaatgtaaagttagaatttgctagggctgggatagggagtgatatttctaggacttagacattgaaaactaattcagcctgtagtaacctggatggttttcaatggcatggttagtcaaattcatggttttaaacttagaagcagctttcgggggagagggtaggttggagcatttattacatattttactgtttaatgtcttaaccgtgggccttttaatttgtaaacactgaaatgattgttgggctgtggaaaacatttacctatttaccttggaagttttaaaagacagtccactttttagcatgtgtgttgtgtccagcctgtggtcgtcttaactaataaatgtgatttttctccccattctctctttttatttatttgcgtataggccttttacctggtgtgagttcctgaatgtggaaaacacctggcagtagtacccagctttgcagttaattactatctagctggcctttttttaaacccttgtatacacttgtaaagaagaactatttcctgaacctggtacagcactttactaatgataaaactttactcctgaattacattaactcaattgctaagctgttacccctcttaatcaggtagtagtttggtagtctcacagtgaaatgtagattgttcctttttccctgaacctctttaaaggttttcgtaactgaggctggtataagaaatcatggactttggaatcaaacttcctcagtctgggtataccacttttccactttctgggtaggtctta

SEQ ID NO: 87719 - DNA, 1008 bp, Homo sapiens
ctaagtttcaataaactttagaaaaagtcacgtagggatttaaaacattcattcaatgataccttaaaactgtaatattgtattttgtgagaatcagtgatccatccaattttataccagatctgtctttagcggcaaaggggaactataaagacatatctaaagaaaaatggcttaacataatcgtttatgttaaatgatttagttttcatcagaattcaataaaatttggataaatctgcaccaaatttagttagatcatgaaacgctgagagatcacttcctgttctacctgcttgacttacggaacattttcacagtaactattaataagacacaactaattttctaatacctcactttcaattgagagattacttaaatgctcacttaacccatgggaatctcaatatagatgaaaaaacaagacttgcccaatctagttcagaaagccgctgagagagtttttctgatacatcatgtaattcttgttctgttaatctctttcttggcctctgggggaaaggtgaattgcaggatgaggctgtagctctgttttcatttctgtaataaaagtgaccatttgacagtaaaatagctaggtgtctattatttagtttaaaataactgtaatacgtactttaacaaatacttcattctggtcttcacagctaaatttggagatcatgcccctgcattttcaaattcctttgtaaacagactgtaaacactgaagtctgcagtaatgttacctttttcctttgggaggcttccttgtcctaggcccttggacctgagctggatatacttcccatttgctgcctttaggcaacttggaaattaagaaaagtccatcatctagatcctattaaaaacagaaaaaaagttgatttgaaaaagctacaaataagaaacatgaactttctgggagtgaggaagggaggaactgtggcacaaagctacgtgccttcaatctccgtgttttgaagtgcatttgtcaaaagaccc

SEQ ID NO: 87720 - DNA, 1033 bp, Homo sapiens
tactgtctaatttccttagtttttgcctaaatgctcctggcagctcaggctctgcttgaaagtctgggtgtgccattttcctactccttgtgaggtggcatctgggccagccttgttagcagcttcctggtggcatggggagtgagccctcagttccacaggagtgcccaggatcactgctgccctctgctgcagtggggtgttattggagctgctcttcagattgaggtgataaagctgccaaaggctgaagggcttctggggccactggccccccacacgtgacatactgcctgaagacatcgtgatggggagtgaggcagatgagaacgctggaatctgcattcctcttgtccttacccttctcttccctcccctttccctttcttagcaagacttcaaggactgcattcgtaggcaaaggttgacccaatcaaagataaaagaaaatcgacagcaaatcgttcgtgctcgaaaatattatgatgattatagagttcagttgtgtgcaaaaatgatgagaatgaggacccgggaagaaatggtaagtctgacttttctgtccagccctgttaagaaggtgaactttgttatctttcaggaccaccttctttgttcgtgactcttgtccaaatttgaatccaaaatctaaactgaagtcctatagtgctggccctgagttctgcttggccacacttcattttcttactccattgtgcattcccgtccattctcagtctccgtgtccctcatcttaatgtgaagtcttacttcctccctgcctcctacacataacaggtacttctccagtaaaactactttagaggtttgggaacatgtgagagacaaatttagtgtgataacatgaccttgcattccacataaaatcaggactagtgtccagctgtgctgtgaggggttttccacaaggatgacatttgctatgtcatcctaatcaggctgtgaaatgattaaccttttgagatcccaagctagcaataaatttcatctgtaaaatattttagtaattata

SEQ ID NO: 87721 - DNA, 1088 bp, Homo sapiens
ataattcagtatgttttattatactcagttgtgcaaccatcaccactacagaacatttttaccaccccaaaaagaaaccgtatactgactagtgctcattccccctgtcccatccttagcagtcaccagtctgtactttctgtctccatggatttgcatattctggacacttcctaaaaatggaatcatgtaattcgtggcctttcgtatttggtttctttcactccgcatgttttcaaggttcatctatactgcagtatgtatgaatacttcattcctttttattgccaagtaacatcctactgtatgaatgaatgcacactctttatccattcattaactgatggacactttgggttgtttccccttttaggctattataagtaatgctatgaacatttgtgttttttgtgtgattatatagctaggagtgaaattgctgggtcatagggtaactctatatgaccttttggtaaccttctgaggaactgctagattgttttccaaagcagctgcaccattttacagccccaagttctccacatccttgccaacactcgtcctctaactgtggttctgagtcgtatttccctaatgacgaaggtgttcattatcttttcatgtatcacagaggttctttacaaccttcagaaaagcagtgtcaagcagccatgtacatagggtaagaacgccaagagcagaaacatgccacacctacacatgtacatcactgaggagggggagtgatcatttggggaggccaccggaaaacacactgctcaaagggcttggatatgcgcacttgtcctcccttcatcagtgtaaattctggatagaaaaactggttctgacggcgacgcattcatgagctacagacaagttacttacgctctcctcaaagccttcctctagaaatatgtccaagtctttagtaaactataattactaaaatattttacagatgaaatttattgctagcttgggatctcaaaaggttaatcatttcacagcctgattaggatgacatagcaaatgtcatccttgtggaaaacccctcacagcacagctggacactagtcctgatttta

SEQ ID NO: 87722 - DNA, 1188 bp, Homo sapiens
acgcacctgcagtgatttcatccacatttccttcatttgcaggtgctgcaggcccgagactctttaccatacaccagattgatgcctgcactaacaacctgccgaaagcccacacttggtaaggtatttttgtagctgtattccccattccatgtacataagtgttagttccaaacagatttgactttttatttattgtacttactagtgttaaatgggcctttaaagggaatgataagcaacttaagtgatttaaaagttaagattattcggaaattggtaggaaaacccaaaagtggtcatctctgttttagagaaataccttttagttttctgtgtgacacagagtgatgtggctatactggtatacacttgctaggccagtttacttattttgaatgaactgtataaaatttgatttgcttattcacagcttcaatcgaatagacattccaccctatgaaagctatgaaaagctatatgaaaagctgctaacagccattgaagaaacatgtggatttgctgtggaatgacaagcttcaaggatttacccaggactctatttatacaaccctgactgacagcctcctttcagcagagtttcaaagaatatgctgaaatacaggaaaacactccccccccccccctttttttttttttttttacattttaggacactgtgaggggaaaggacaattttgaaattccttttcaaggaaaaaaaaggtctttatgctttgccatgaggccacattcagctgctatttaaacttaatatcttgaacctaaagaatgctgacttttcctacatttccagagttaggcagtattctacacttaaagactactactatttttataaaaggtaatctattcaaatttcttcacagatttcaagtctctcaaacatcaagacaacttcagcagtcggtacaagtcacatttcattttgattgaatacatgatcttgaacagctcctgtacttgctctttgtaaaaaaaaataaaattattttgaattattctacctttgtaaacaattggctaaaagaatcatctttaagaaattaagccatttacatgtttgtgtttttctatagcagagcattatattttgcattatatgtttcaacctagtctaagtgggtcttttttacatttttcaagaacggatttcctggaatacag

SEQ ID NO: 87723 - DNA, 2889 bp, Homo sapiens
gtctccccagtaactggtactacaggtgtgcaccaccacgcctggctaacattattttggctttttttttttttttttttttttttggagacacagtctcacttgtcccccaggctgatgggatctcagctccctacaacctctacttcctgggttcaagcgattctcatgccttacctgggattacaggtgcccgccaccacgcccggctacctttttgtatttttagtagatacagggtttcgccatgttggccaggctggtcttgaactcctgacctcaagtgatctgcatgcctcgtcctcccaaagtgctaggattacaggcgtgagctaccacaccctaccaatttttaaagacaatatgtataacatttattttagcattgtatatattaatcctgggtgtaattctataaaatacaggatttgcaagttatgttttatagtatacatggaattcactgctataaacaaacatgttagattagtatggtgagttagtcttgaaccctagggagacatattaatgatagtataaaatgatttggatatagttcatctgtgtgaccctccatcaggatgtgtttagcagaggtctgtatcaatgtgctcatgtattttgtgctttaatatcaatttaatattattaagcaaatgtaggccaggtgtagtggctcacacctataatcctagcactttgggaggctgaggcaggcggatcacttgaggccaggagttggagaccagcctggccaacatggcggaatctcatctctactaaaaatacaaaaattagctgggcattgtggtgcatgcctgtaatcccagctacttgggaggctaaggcaggagaatcacttgaacccgggaggcagaggttgcagtgagcctagatcatgccactgcactccagcctaggagacagagcaaaattctgtcttaaaaaaaaaaaattattaagcaaattgtatgactcacttattcaacacccatttctgaagtttctgtgcattatcggttgcttccccaggatgtagtgaaatggatgttactaccatattacagcagaggaattgattgaattgccctcaatcaacaaagctaataggtattgaaactagtagatgatgcaggtccaaagaaggcacatatctgtatttactctttgggtctcaatttctgtccattttttttaaagctttataattttattatgaacttatgaaacattctcaattgtttacctggtcaagtctatcacagctgtggttctcagaccctggagagggagtttgcagtgagtagatatctctggagctttttaaaatatagatcccaactgtcaccccaggtgcacagaattaacatctctgagcctaggacctggaatgtcaatttgaaaagcttttcagatgattctgatgtgcatctttaattaggaaccaccaaatgacagccagcagtacaaacctaaagttctcttttgaggaatttttggtctggctgtggtttccacaggttcattactgtgtactattttcacagctcattatttgtggacttggaaagatagatgttaatgactggaaggtaaacacccggttaaaacactgtacaccagacagcaacattgtcaaatggttctggaaagctgtggagttttttgatgaagagcgacgagcaagattgcttcagtttgtgacaggatcctctcgagtgcctctgcagggcttcaaagcattgcaaggtaacagcctgaggtgcaggcaagctgggcagcgggtgggggcggggctgtcagcgtggggtctgtggagatattttgtaaaccatgtgcttagagattctctttttcacttcttatctgtgactctcacattgtgataccttcttctccctcctttcttttgttcccttcccaagagccttttctgcgggcttctctgattgtagtgagtgccgcatgctagagaccgtacgtggtgatgctctgcctttgttttctggtcaccttacttttaattctgttgcacattcctgtagggaagtcgttcacttccatgttcacatcttgacctggtgaaacgtttacctgcctgggatgcctctcccctctacttttcgttctttctcttattagacagaagcagcatgggtcatggaaaccatctgttcggtcagagcattttaattactgcatggcatcagaccatttgtttacaaccatattccttttttaagaatggttttctgtggaataagctggttaattttgggaggagctggtaatattgctaatgattgtggtgcttcactgggtggcagttgcttcctttacctcttaagcacttcattttcaaagctgctggtgatgaataaggacacacaaagcgacactggtacataattcgacagtgctgcccacagcgcatgcgctgaaatccctggggggagagcgtgctttcagctgtgctgcccttctctgtaaggagagctcctcatcctcacacttcccagatgcataaagtgaagttgtatttctgctacatgtatttatatggggtgcctgtgcgaactgaaatggattctatagacggctcttttgctgtcagcccagtttgagtcatgaaatctaaatttgcatcaggtcgtcatctttttgaatgtgtgcctatgtattttaccttggatttgcctgattacttttcttctcatgcttttgggatattgactttctataaaagatagaaattgagaaagggatttcaatcttgagttttttctcaaatggaaatgtgaacctattacggaatctaagccttatccaaggttaattctggctcttaaaacccagatgcttttcctgctgccctttggtagtatgtgt

SEQ ID NO: 87724 - DNA, 1008 bp, Homo sapiens
tgtcctactcagtccctggatcccactcttcagggttcagtcgtgtttacagcacgtaataatcccttgccaactacagttattagattaaaaattcaaagaaaaacttttacagttacacagttttgctgtccccttaacccaacaaacaaaaatacggtcctccaaaggatataatgttaagtaacttatttcttaaagtagagaaccatttctccaaatttggaaatgttaacaaatttgacagatgagtaagttctgtgatgcatgagatggagaagttttcttgggtagataaataaaaacaattcacttataaatcgtacattcacacaatagatgtagtttagtgcatttttttattggtaaaattacatcttccagaatttttatatcctctagagaacaatgattatttaatcaaaaagtgcttgctattggcttttactatttattcttctcatttttggtatgaggattctctacctcctcttctcccgtaggcctccctcaaatagaaacaaaacacccaacacattcaaattacatttgcaagtaaaatcagaaaaataagtcatttttgagtgaaagagctctttattctagttattggcatgtatgctgtaagtttagaaagaaatttcatcaagactcagctctagtagacgtcctgtttcctgggagcttctctgatttgaagggttgctctgctgatgctgcttttgttagtagtttaccacttttcatcaacattgaactgtgtcacacctcagggttcatttatccccattagtctgagatttattgttagacttgaggctaaaccgttaatgttagatgcttgtaagatgcggtgttgctaaagtagagatttataataataattaccagatctgaaaatacatgtgattatacgaaatcctgccgaatgtttacaggctctatgtgaactggagatttttacgaggcattgaggctcaattcttggctctgcagaaaggatttaat

SEQ ID NO: 87725 - DNA, 1109 bp, Homo sapiens
caaactcctgagcacaagcgaaccacctgtcttggccccccaaagtgctgggattacaggtgtgagccaccgtccccagcctcacatggacattttgaaataaaaccatattcttccttttgttttatgtttattatggattacaaatttatttggcaattaaaagtaacagaccactggaccgtatcatctcgtgagtagctgaactgttggataatacttttatactctttgatgctaaaatataataaaattgcctaaattttgcgtgagatgttacttcaatataatagagtttttatatgctatttgggtacggtagatttttccaatgtgatcttatataactgtagttagtgcttttttgccttttattaatttaaataattatttgctaaaatgattagttaatgacatatcttaataaaaatgtatacattaacaaaaaaattccttggtcatatcttgttttctagggaatggttgtatctcttgtcacatgaaatgttgaatccatactatggcctcttccagtattcaagagatgatatttatacattgcagatcaatcctgattctgcagttaatccggtatgatttgaagttatgatgtgaattgtgaccaataatgcttttcatgtttacatgttaatgtagtttattatatagaaattatttgtccttgtcttagttgtgccctttgactcagcaattccccttctataaaattttcccaagcagatgattatggatatatgcaccaatttggaaacagggatgtttattgtttatagtagcactcaactgaaaacaacatagttgtcttcaggagcggggactgattaaattatgacatgaagcagaataatgcaaatgattaaaggcataggttctggaattagaaagacgtgtcgtggtctcatcacttactagctttgtgacctttcagggcaagttcatggacttaagcttcagttttgtcattgctaataaatacatttgtacctcaaagaggggttatgagaatgaaatgggaccctgcacattaagcacttagcacagtgctgtatgttattcactctacaactctatcaactacattactaagc

SEQ ID NO: 87726 - DNA, 1050 bp, Homo sapiens
taatattgacttggcattttaaacaaaggtgtattttctttgtatggtcatatgttttaggtataatatttggcctggtgtataaaaagaagggatccctgccaagctgcctttcagactcctgtttggctcttccagaaagaaagagtctagataacaagcagtgtttggcacatgcctgaattttaaagtgggtgatggtaaactctgtaggggaaaatggaagctatattggaaaaatttgtcctcagaagctgtataaagctttatggataaaattccattatccaattctgtcagtttatgtggactatgagaaataaactttgtagctggtttattgctgccaaaaaatgtcaagccaagtatatgttctactaaggcttggaaaatgatagagctagacttgctttataatatgatgctattttaaatctataattgcaatttttaaaatttgatatactttaataataacatctatgtttacttctagtcggcagaaccaattgaaagaccaacagcaacagcaagtggtatcgttatgtcctgatgacacagaatgcctgacagtcccaaggtacaagcgagacctggttcagaaactaaaaattttgcggcaagaactttcccaacaacagcctcaggcaggtcattgccgcattgaggtttccagggaagagatttttgaggtaaatttacgagccttattttgttttactatttttttttccagaaacccattgcttgctaatacaaaccttattttaaattagagagaaattggccgggtgcggtggctcacgcctgtaatcccagcactttgggaggctgaggtgggcggatcacctgaggtcgcagctcgaggccaggctgactaacatggagaaaccccatctctactaaaaatacaaaattagctgggcatggtggcacatgcctgtaatcccagctactcgggaggctgaggcaggagaatcacttgaacccaggaggcggaggttgcggtgagccgagattgtaccattgtactccagcctgggcaataag

SEQ ID NO: 87727 - DNA, 1053 bp, Homo sapiens
ttttttggcaaaaatgtcattagaatataaattatattgcaaaacattgccattggggtttaataaataactttgccaaggaagcatattcttctaagaaagcattttagtcagtttttttttttatttcctttgcttgaaaagcatgtttttgtaactcagtaactatcttaatagtagctatagtaactgatatttattttgcacttaccatgctctgagtgcccatgtcatcttcattgcaatcctgggctacctctttctcatcagtgagaaaaatggggcctcaagcagttacagaacttgtccagaggtgcataaaaggtgctagagctgggatttgaatccacccagtctgactatggaggtttttttttttcccttcatgttttgattccagtaacactaattacttatttcccttcctttgactggcattgcatgaagatattctgccttatacccttaaaggaagcttttctttttaaagaaaaagatgacttatgggcaaggggattacaatttgagtcttttccctgcttatcagatctacttgatttcaagaaaatcatttgcttgtttgataaagcctttagacattggcagaggccctaaaggatagaccagcacccccactgtttcctggcctgcactctcacatcagcccttacagaactgccccttgcaccctagcacacctgaagagacaggctgctttattgggtagttagattttttttttccctgagtgcatcaggaacaatagttccaggctagctgcccacatcccagaaggattttctcctgtgtccgtttttgtccttcagctctaagccacctttccatttgcatggcttggtctttcacaggaggctttgtgaagaggcctgatatctgctggattttttaaaatcagccttattgaaatatattgacatacaataaactgaatatttaaagtgtacagtttaagttttgatatacaccatgaaaccatcaccacagtgaagatagtgaacatattcaccacccccaaaagttttctcttgccct

SEQ ID NO: 87728 - DNA, 1180 bp, Homo sapiens
ctaccatgccctctctgggcaggccaccgtccagtacctcagtgtgttcaccaacctggaagctccttaactcattctttaaggccctattaatccttctctatatatactagtattttaagaatgtataatataatagcaatagtctttggtccattaaaaatcttagcttttcttattgcagtggtaacccttagagcactcttggtaatgtatcttaaacaggttcttcattgactaactttacagattttagaattgcagtttattctttaaaaatatgctgtgattattttcaggatcataatttcagtaacatttccagttttgctttgttggcgagcttaaaattatggaatggacattttatgcaaattttatggtatagtaaagaaatgaagggacattttagaaagcatttaattctttatgtcactgacacttgtaaaattacttcctgtcaaacacgtgttgaaatacagtttatgttggcaaatattgggattgattttatattaatttaaatctgtattacattaaagcctaggaaattactaaaaaatgtaggctatgtgataagtttttctgagccatttatggattgggctttgaagatgaaagtttgttaaaccattgggaattaaagattccagctgaacatctcaagtttctgaaacaatacattttctcacactttgtggaattgttctgtgtcatttacacttgcttggttcagcagggcgagcaatgaggtattttttattttatatttgtttttgcagggatcttagcaacatcaattgtgaagagcttggtccattgcctcctggatgggagatccgtaatacggcaacaggcagagtttatttcgttgaccataacaacagaacaacacaatttacagatcctcggctgtctgctaacttgcatttagttttaaagtaagtttttgaaacaatacatgttaaaatgggagttaaacatgatgaaacgcatagatgcttttaataataaatgtgagtctcgatacagtggctcacgcctttaatcccagtgctttgggaggccgtggcagcaggatcacttgaggccaggggtttgagactagcctggtcaatatagtgagacctcatctctacaaaaaaaaagttgtttaaattaaaaaattagctgggtgtgg

SEQ ID NO: 87729 - DNA, 1020 bp, Homo sapiens
ctcactacaacctctgcctcctgggttcaagtcatcctcccacctcagcctcctgaatagctgggactacaggcatgcgccacaataccccgctaatttttgtatttttagtagagatggggttacgccatgttgcccaagctagtctcaaactcctgagctcaagcaatctgtgcacctcggcctcccaaagtgctgggattacaggcatgagccaccatgcttggccctattttgagttattttttaatgaacagatgcaaagtaccaagtagtccagttacaactggaaaaaagcttgaattctaaattaaattctaaatcaactttgtatgttgcacatacaaaggatttgtaggatgtggatattttatgttaagcacagcagcgcccctcctccaaaacaaacccccagaacaacccacagaaggttgtttttttttcctgcctaaagcttatgctcaggactctattgtgtatttgaataaaaaacagatgtgactagctagtcttgggttgctttgatactctctatttataaataaaactgtgattatgaaaatgtcttactttgtgttatagagctcagaattctttgagggtggcaaccaagggaatgtgctattactcattactttatcaaggttgccatttccatgtcttgacaatataagctgttagtttttaaaaagtagtgggggccgggctcggtggctcacacctgtaatcccagcactttgggaggctgaggcaggaggatcacttgaagtcaggaatttgagaccagcctggccaacatggtgaaaacccgtctctactaaaaatacaaaattagccaggcatggtggcatgtgcctgtaatcccagctactcaggaggctgaagaagaagaattgcttgaacctgggaggtggaggttgtggtgagccgagatcgcaccgtggcactccagcctcggcaacagagcaagaccccatctctaaaaaaataaatagataaaaagtagtggggaggaaattt

SEQ ID NO: 87730 - DNA, 1010 bp, Homo sapiens
aaaatcgaatgaattaaattgataagcagaggaatctctgaactaaatcttgaagaatgtcaggtatggtcacttcatggagcttactgtataaagacattgggatgcaagataaattttgggaactgcaaagaggtgcttttgaagtaactgaaaacaaatagtctatgtggctgaatccccttctcctcacccttttaagtgagaacaaaatttgccatcttgtgcagtgttttgttttgcctgttttccccttcttgagcaggactggcactaggcataaaataccaaattcttttcattagctgcacctacttttatttatacagaactaattgcttaactcattggatcacaaggttttctcttttacattataattctcaggtaaaagcttagctcatgttgccaagttgcatttctagtattaaactgccaaggaatttattgaagtacccatttttattatatctgagcacaaatgaatatgtacttgtgtcagtgttcaaggtttcacttgaacaccaatttccttctgactcatttaaccagtaaaattagcttgaatttctacatgtataaaaggatgattgttgttttaaatgttaatttttttttttttttggagatggagtcccgctctattgcctaggctagagtgcagtggtacgatctcggctcactgcaacctctgcccactgcaacctctgcctcctggattcaagcaattctcgtacctcagcctcccgagtagctgggactacaggcgcccgcccccacacccggctaatttttgtatttttagtagagatggggtttcgctgtgttggccaggctggtctcaaactcctgacctcaagtgatccgctcgcttcggtctcccaaagtgctgggattacaggtgtgagccaccataccctgccatgttaatttaagaatgaactcttgattatttttttattttgaaagatctgcaatagtagactggaagccccttaaagagacaaact

SEQ ID NO: 87731 - DNA, 1054 bp, Homo sapiens
tgcggtggctcacacctgtaatcccagcactttgggaggccgaggcgggtggatcacgaagtcaagagacctcgtgattttatggttaaatatattcttagtatagccattttccatattctggagtaattagtatgaatttaattgtgtattgttgacattattaaaaattctcagagtttggctgatggaaaatatttgttacacctcagcataaatactttagaagcttcagaatcccataaaatatattacagagttctaaaataagttgaaaaaattatatattctgtgaattgatacttcgggttggcattcccgatttgtaacagcagatgtcttactggcttgcttgttgcactgtgtccaagtttcctattaatgccttatcactcaatatttttatttaagctgggaagaaaggagaaccgcctctggaagaatccagtatctaaaccatataacaagaactacgcaatgggagcgcccaacacggtaagaacatacaaatattttctcatgatctatgccagccaccctcctgaagtccttttctatttatctgtcagctttactagattttttttcttggtttttgctgtcgtagatcagtagatcttataacaggtgccattgttattttttaaaagtgatcttcaacagtttgtttgacaggtcatgctgtcattgtagctccagggcctgcagtggtactcaataaatatttattgaatgaggcagggcgtggtggctcatgcctgtaatccctgcacttttcgaggctgcctgtaatccctgcactttgggaggccaaggcatgtggatcacttgagttcaggagtttgagaccagcctgggcaacatgatgaaaccctgtctctaccaaaaaaattagctgggcatgtgacttatgcttgtggtcccagctacttgggacgtggaggtgggaggattgcttgaacataggtggtggaggttgcagtgagccaagatcgtgcccgtgcactctaacctgggtgatagaatgagactctgtccccaaaaaaaaaaaaat

SEQ ID NO: 87732 - DNA, 1044 bp, Homo sapiens
tagaaaaccttagaattctaatattactcctaaagggaaaaatctatgggaaaagaaattataaattttagtagaaaccaaagagttcattctaaagtattaaaataagctaagtcagatgtcttctgaagatagaaattttagattataatagttctttctagttgtatgaatcttagtaatatttctgtcatttaatagtaagtcttcagtccagagaccgaataggcacaggaggacaagttgtggactgcagtcgtttatttgataacgatttaccagacgggtaagctaacatcactgaaatcattagagaaatatatagataatatccttaaaagaatagaaataagtgggtgtttattgtatattaaatggtgtttatcgtatattgaatgtagattttccttctaattgtaaaattaatggaagatcttgtctcgacaaatttataaaataagccacaaattagatgtgttaaatttggttattaagagttttgactaggagacaaatgaaatttcttgacaaatataactctcttgtaaatattatctagttaaaaaaatgttgcttgattaaattattcaaaacaggccatgcaagtgctaaattagaaacattgctatatttaagagggatgggatggataatttgtgtaatagtaattaaaataacatagtaagatttcattgagcatgtatatggcagatactgttataagcactttatgtacatatcatttaattctcatagcatcttggaaggcagtatatagccatgcttctgaaatcagaccacctgagttctaatccttactattctgtgtattggctttatgaccttaatttatttaacttccatatgctttggtttatatttatttacaaaagagtatgagtgataatagcatactcataaactgttgagaggatcaaatgaaataattcaggtaaggcactttagcacagtgtcttgcataaaataagcgcttagtaaataattagctactattatttctattgctactattattgttaccct

SEQ ID NO: 87733 - DNA, 1854 bp, Homo sapiens
attaagactcagactaaagtggtctaaaagttttggagagaaagtgactgcatgttggcaatgtaatacaccagtgtttggtttttgaaatctgaactctttaaatgataggtttgatttctaatggattgtggaaatttattgtcactctatagatgttagaatctctgataccagctaattttttcgttgctttctttgttgacttcaaatagatcagaggttggatttatgcaaactcgggccaaatgacaatgatacagttagaggacagatagtaggtaagtgtggaatttaaagttacatgaattttggtttcaaactgacctaaagtgtaaaataccttttaaatcaaagtataataactgtagcttcattgtgttggcctgaattaaatgagccaggtaaaatgttacagtgaatccaggatccaggttaacttaatttaaaaaactttaatgtaaaaaaaaaaaaaagttttgtgaagaactgttgatccttcaggatataattctttcaaagtatcctaatatagtagagcactaagttcagactttataaatgttattaaagtttactgaaaataattctcaaactagtttttttagtaagaagagaacattctattgaacttgttttaatgtttaatgctttacagctttaaaatctatgctaattgagaaaaaacagaatgagcaatggtagtgtaacactggaaaaagggagaaattgttaccttactcatgaggcacttagtagccttatatggtatttagggtgtcttgaattgacctggagggaagggcttgatataaaatttgctgagacctttcttaagaattgatagagatttgatcaagatgcctagtatggaaggacactgttcatcttagaggcttcttaaattaaagaagaaaaatgtggccaggcacagtggctaacacctgtaatcccagcactttgggaggctgaggcgggtggatcacctgaagtcaggagttcgagaccagcctggccaacatggtgaaaccccatctctactaaaaatacaaaaaatgagctgggcatggtggcaggtgcctgtaatcccagctactcgggaggctgaggcaggagaatcgcttgaacccaggaggcgaaggttgcagtgagccatgatcacaccattgcactccagctgggtgacaagagcaagaccctgtctcaaaaaaaaaaaaaaagaaaagaaaaattcaataggaatgtcacacttcatgatagaacagaacttagtgagattattttgttatgaacccatcagagaggttttagttactgaaggtactttattttacaaggcagtgaattgggttcatagttagagaaccatcagagtagccacatagcaaagccctattgtggttatcccagggaagtatctataccagcgcaccccaccatttttggtaccaggaaccggtttcatggaatacagtttttccatagaccaggctgggggtggaggtggtttcaggatgattcaagtgcattacatttattgtgcactttattattattacattgtaatacataatgaactaattctacaactcaccatcatgtagaatcagtgggaaccctgagcttgttttcctgcaactagatggtcccatctgtgggtgatgggagacagtgacagatcatcaggcatgagagtctcataaggagctggccttgtgtgtgcggttcacaatagggttcgtgctcctatgagaatctaatgtcgccactgatctgataggaggcagagctcgggtggtaatgctcactcacctgccactcactcctgttgtgcggccgggttcctaacagacc

SEQ ID NO: 87734 - DNA, 1015 bp, Homo sapiens
cctcaccagacattgactctgctggcaccttgatcttggacttctcagcctccattgatttgtgaaaaacaaatgtttgctgtttaagccacctaatctatggtatttgttttggctaaggcaaacgtcttgccaaattatattcttcttctttttttttttttttttttttttttgagacaagagtctcgccgtgtcacccaggcgggagtgcagtggtatgatctcggctcacgggaggctctgcctcccgggttcaggcgattctcctgcctcagcctccagagtagctgggactacaggcacatgccaccatgcctggcaaattttttgtatttttagtagagacggggtttcaccatgttagccaggctggtctcgatctcctgatctcatgatctgcccgcctcggcctcccaaagtgttagtattacaggcatgagccaccgtgcccggccatgttcttttttaatgtgtttgcaacctcgtaggttaattttatgagaaattttagagttgagtaataataatagccagtgtttattgagcacttgctgtgtaccaggtactggtctcatgttctctgtgtttcaatttgtttaatctttaaaacaacaccatgaggtggctcttagtatccttctgtcctcatgtttacagatgagctatctgaagcaaagagaagttaagtagtttttagggtcacaagttcataagggatagcaccaggttcaaacccatgcattctgaccctaattatttaactcttttatagtgcttatagcttaacacactatattacactgcctctataagtgtctctagaaaaagaaggtaaaggaaggaaacttgggagtggccaaaaagtgatgcaagtctttttctacatataaaataatgtttaggcttcattgcaagtatatacttgaactttacaataaggtttccttctctcggcatccttatgaagaaagtaaattgtgtggtttaatttaaatatacaatattcatctct

SEQ ID NO: 87735 - DNA, 1033 bp, Homo sapiens
tcagcctcctgagtagctgggactacaggcacacgccacgacgcctggctaatttttgtatttttagtagagacgggattttgccatgtcggccaggctggtctcaaactcctgacctcaggtgatccacccacctcagcctcccaaagtgctgggattacaggcgtgagccagcacgcccagcctacagtgctttttatagttgcagtcttctttcctatttgtgcttgtggcctgtgttttcaaatggagcgtatttggaaagctaaatacctttgcactttgttttcttagtagatcatcaggtatttgagtgactacagtttttcagagtctggaagaatgcagaagatgtggaagtttacctttgtttacaatgttacagaaacaaggcaaataaaattttagaacattatgggacaatatacttttctattgtgaatgagagagaaggctcagtgagatctgttattagataagtagttgggccctaaggaatgggtacgcagagtacttatgaatagttaaggaagccatcctgatttgaacataaagagttactaggttaggggaaacaaggagtgagctgcatgtatcctttaccttttagtttgcacatccttataactcgtcagtggttttctgaggattttatttgattcaacaagtatttgcatattatgtttaagatattatataataaactgtagaagaggtttatagcttaatgagacagaggtaagacatcacatgaataactttaacaagcaaaatgagaaagcactataataaaacaagtagaatccaagtgttggaggttcacgggaaggaagagatcaaaatcagactgaaaaaggagagtcagaaaaggcttcacagaagtttgatgaatggataagattttgagggccagtggttgggataataacatttaaggtgggaagaacattatgaataaaggcaaaggcagaaaagtcctgggcttatttgagggaagaggatgagcttgtcagtctaggggttaatgagagag

SEQ ID NO: 87736 - DNA, 1006 bp, Homo sapiens
tttgcccacactagactttgagatttatttggactaattttgtagttaaatgcctgtgtgtcacatcccagtccactggctgaacttgctggatgaaaacttgcagtgaatttggtatttgagaatttagcttgaatgtatgttggctgcaatttaaataatatattactttcatggcagttttcctttccctagggaaaattgcagggaatcattaactgagtgattcttaatggaaaacctggattggaggatacttgtattccaccccctcccccctcattcagtgtccttacattgggaggagtcagtggaaacctttataggggatctttgttgctttagagtttatctgttgctgttgctgtctgtagtcagtgatcgtggaaagaacatgtgatcccaggtgtgcagaaagcatcagaaataggctgtttccatttaccctcctctgggctatgtagagaaaatgagggaaaaaattgggtttttgattttctgcagataaggttagttgaggtttttagtatgacttaatagatcttaaagtgtttatctgtggtttccgtactgcctatgatacattataagaatttataattaaagtttattaagaggaaagattatgcttatattttaggggaagggggaatattgaactacatttatagtgattttgtttcaggtttttctgaggaattttaaataccctgtgtcctcttaatagtaaaaacagtttgaggtactctgagtttcttacaactatttgtctctgaatagttttctcttaaaatttgacaaatattaaaaacattgtccttccttctttggttacagtggagtctcttctgttttgccaggaaagttaacatattttttcttccatttttgttcatcatttataaattagatggtatagattttagcaaatagatctcaagagctggattcaattagcagctttttaggacataaacattaaagggttagatggaaaagattgttt

SEQ ID NO: 87737 - DNA, 1012 bp, Homo sapiens
tgcctgtggccttgggaagggccagggtcgcgatcaatgatgagttgggggtcggaggaatgggaaggcctagttcagggagagtaattggaaaaccacttgctctggtttggacattgtttaaaaagccgaggatgactcggggcggggggtggtgttttgtggaggggagaatacaccggttcgcatcgcaggcggatttcaggtcggaaagtcttggtcaaggagccagacgctgcctcccggggctcggggaacagcccctgggctaccgcccaggtgagatcgtgaaggggatgaagagctcccgtggcgaggattattgaatccggttgctgactgcgcgcagtaaacactccttaaagatggagcgcttaacgggagggtgtgcgtgtgtgttcccgggttgttaccttgcacacacccagttatgcccgcatgaaaaacctttactccccgccgccggccaccgctgcccgggccacacaccttaaactcatgtctctgaggtgaggagacaggttgacttttccggtgtgcctgtctgatccgacggcttgggctcattgtacactgtgttttggaagtgtctgattgtagggtggcatgtttggggttgttccttttaggccgcagaacttgtgtctaacttctaacgccagacctgctttaaaaacacacttttttggggggggtgcattgctaagtatgtgctcatacaaactttcgagcaaactttctgttactctccccaccctccccattcctttttcgaaatggaaaagaatgtccggaggggttgccagatagaagactacacttacaaagtgtttatgattccaggtgcatgaaatctttaacattacaggtacgttttgcttacagtgccatttttggtattcttacatggacatgccacccccgttttaggagaacttttatttggtttgtaaaggaattggaatcacggcgttatcctaccttcaccatttacccctgataaattgtccac

SEQ ID NO: 87738 - DNA, 1338 bp, Homo sapiens
ttgggcctcttgttaaaacttttggagtacagaatttctgaagtgctgagaaaaatataaggtaaccagcatcaacattttttccttttcagactcctgccctaagagccatagggaatatcgtcactggtacagatgaacagactcaggttgtgattgatgcaggagcactcgccgtctttcccagcctgctcaccaaccccaaaactaacattcagaaggaagctacgtggacaatgtcaaacatcacagccagccgccaggaccagatacagcaagttgtgaatcatggattagtcccattccttgtcagcgatctctctaaggtaacgaagtcttaggatttaatcaagtcatttttagtatttatagaaagctgtgcttgataagcttcttcatgtgcaagaatcttgggttctactaggagtcctttgctgaacaatacccagtaacccctttacttaaggttgtatcaatagaaccttggtactttcagtcaccgtttttgtgaaaaagtactcttggaatcttatttgtgcaactgttctgaaataaaaccatttccttatgtttaattggcagattttgagacacaaaaggaagctgtatgggccgtggaacagttgaacagattgtgtaccttgttcactgtggcataatagaaccgttgatgaacctcttacctgcaaaagataccaagattattctggttatcctggatgccatttcaaatatctttcaggtaagtcctatcaaggtggctttgtttgaatttggacttgataataattggtttactatttagacttgggggagggcagctgtaagtttactcactagtaagccacagaatcagaaagcctgtttatgtggccacccctttgattaaaaatgtggcaggcattataaaagatataaaagagatgacaagtggatggtgcgaactgaatcggagtcaggcgcttatgtggactcatcacacctgtttacttggttgatttaatttcccaatttcataccgaattttggtgacattaaatttgaatgacttggccgggcacagtggctcatgcctgtaatcctagcactttgggaggctgaggtgagtggaccacctgaggtcaggagttcgagaccagcctggccaacatggtgaaaccctatctctactaaaaatacaaaaattagccaggcctggtggcagacgcctataatcccagctacttgggaggctgaggcaggagaatcgcttgaactctgggtggggggcagaggttgcagtgagccaagattgcgtcacttcactccagcctgggcgaaagagtgaaactctgtctc

SEQ ID NO: 87739 - DNA, 1833 bp, Homo sapiens
cgttacattttattttttaaaaagctgaataagacccactatttatttcatagtcactaaagagttgggatcaactgtttgaaaatactattttgaagtatccatgaggtcttacactatagctggaatgataaaaggacccaaaagagcgtttttaggaatatattttgggggggagaatacctgtgatgcccttctttttcccttaggtataaacttgaaaagcttgttataaacttgaaaaaatggtaggtgagtaatttatatgtatggtttcatgtgtatatttgaaatattaatacatgaaagcagtgaataatagtatctgacacgtaataggtacttaatatgtgttagttttctttctgcaggcatatcttggttgtttaattgtaaacaattagctttacttttaacttagcttttagacttcaaaagttctatcataagatttatcttaacttactttgagtgattaattttaattattgaaagacagttgattggatacaatttacatctttggctgacataaataatgcagtctttttatttttttggtcaggtactggtagttaactctcaaggagaaatttcacggttgagcaccgaaaagaaagtggtcatgaaaggaagtatcaacaattatcttaaattgggtcaagaagggaagtatcgcgtctaccacaatcaatactccactaattcatttgctttgaataagcaccagcacagagaagaccatgataagagaaggcatcttgcacataagttctgtctgactccagcaggagagttcaaatggaacggttctgtccatgggtccaaagttcttaccatatctactctgagactgactatcacccaattagaaaacaacatcccttcatcctttcttcatcccaaccgggcatcacataggtaaaggaaactaaggttaatttattgctgtaaatatactaaatgtttataaaatgattgttgtagttgtgcacttgaaaacgtcattaccaatgagttgaatgaagtcaatgtggtcagcagacaggacgttagaggcatgagtgtacttctaacttactgaactgacaccactaactatttggaggattcctaggagtcagaatctttattcctggaatcagatggagaccaaagttacaactattatgcttttaatttagatcaacctagtgaaataatttctttcatttcttctgaaatacagggcaaactggatcaaggcagttcagatgtgtagcaaactcagagaatttgcattggctttagccattttggagtgtgcagttaaaccagttgtgatgctaccaatatggcgagaatctttaggacataccaggtaagtgaattctgagccttgtaaatgatgaatattggactcgcttttgaaatactagcctattaatcatgaaagttaatgtatttaagaggccatattaaagactttacttttggctcagtttcttcctatataagttgtaaacatgaatgaatattattagttctttctttctttctttttttttttttgagacggagtcttgcactgttgcccgggctggtgtgcagtggcacaatctcggctcactgcaacctctgcctcctgggttcaaatgattctcctgcctcagcctccgaagtagctaggattacaggtgcccaccactacgcccggctaattttttgtccgtcaacccaggctggaatgcagtagtgccatcacagctcactgcagccctgacctccctgggctaaggttattctctcacctctgcctcccgagtagttgggactacagacgcattccactat

SEQ ID NO: 87740 - DNA, 1911 bp, Homo sapiens
atttcatttattttagttttatttgagaaattaagaccagaagttttgctcatgtctttttcacttggaaatctgacttagtacctagttaatttgtctctctcccatcattttaaggcgttcgcttctgttaatcacagatgatctgtccttgtgttgtgctgcttgactaaaagcactgttttgttttgttttgttttgttttttaatgataggatacagggtggcttttcagtctagtaaacatgaggaggggagagattgtgggtgggtgtgggtgtgtccgcatgtcccaaatacagcacatgcccatttttttatggtacgaggttagggcttattaataaatgtatactagatcttgaagtgtaagtctaagtctgaacattttaaacaagttggactttatggctttttcaagttccatcaagtagatactagtcttaggctggtaggtgattaacaacatcatttggagtacagtgtttgtaccactagcattcttatgtctgtacttgaacgtgtagttagcatttaagttatgttcactcttgtagcattcaggtcttaccatctggtttcaaatgcgagagcttatatgaacattgttttgaaagcatgaatgatatggcaatattttatgtcttgataaggagagttttgtgacatatacaaatctgctgttgatgatgaaagtttacaggtggatcagagtatgctggaactcagtgtgcataaaatttcagtcagtgaatatcactgaacgtcatatactacttggtatgtgactttggtttgtgttaagaaagcttgtatataatattttttgccatagtaagtgagaaattgtccttaatcatgcctgtttgatggtactaggaaagaaaggggtagagattaattcttgcacagtataagcaacagtgcaacaaactatgccatttaccttttacctcttacttgaaggcagaatcgcaaaacgtttgaaatggcttttctaaactactctactctggtgagagctcatttaccacaagaagccttataaaaaagtatattttgtaataaccccgtagatactgtacctaacaaaacatgactcgtattagctctataaaatatttgtggcttaggattttttttttacatatatctttttataactttccaggaactaagcacattatctgataattgttgtaaatttttttgtcagtgctttagttcaggatgggcaataaattatttctaaaggaggtctaaaagtggaaagaatggtttgattttataaaatgagttgctagttcattacagctttttacttttgtacatattttgcaaaacatttgcctcttgctattaatatttgctttgtaaaaattactgacatttaataaacatttgtaaacaattcaatactatgatgttatttaacagtttggtaattgtaaaatgtaaagcagatactaaaagtttgaaagcaaaagtttcatctagggcctgagttaaggcacaaatctacttcagcagaatcccaatgccacttggcttgaatattagtctagaaacttcttactagaaatggagatgtggacttcttccaaggaagttctcagacacttaatatgttttgacaagggaataggggaagagaaaccacttgttttctctgctcctcttatggccactgaaactgtattagggtgtacctgagctcagttcatccagctgcgacaatattaataattctgttacgtctgttgtaattaatgtttggagacaaaccaacattgaccactcatcttttttaaaaaaataaacttcatgttagattatgatttacagaaaaatttcaagacagtacagagttcccctatactccacaccccttataatagttcccgtagttac

SEQ ID NO: 87741 - DNA, 3125 bp, Homo sapiens
aattttgagtagtattgcagggatgaaaacaagtagattctggccatttgtagtaaattttgaacccgtcctgctaacattttaatgtatcttggcttttgttgtggggagcacaagtgggtcttgctatattgcccaggatattctcaaactcctggcttcgcaagcgatcctcctgcctcagcctcccaaagtgctgggattataggcatgacccaccatgtctgaccagtcttggcattttataataagcataatctatctgaaaatgtcacttaaaagatcattttgtttgcatatctattcactagtccagttagtagtccattaaaaattcgcattacttcgggattaataggtataaaacaagttttttcttttccaggattatattccatcacaacaagatattctgcttgccagaagacccaccaaaggcatccatgaatacgactttgaaataaaaaatgttcctttcaaaatggttgatgtaggtggtcagagatcagaaaggaaacgttggtttgaatgtttcgacagtgtgacatcaatacttttccttgtttcctcaagtgaatttgaccaggtgcttatggaagatcgactgaccaatcgccttacagagtctctgaacatttttgaaacaatcgtcaataaccgggttttcagcaatgtctccataattctgttcttaaacaagacagacttgcttgaggagaaggtgcaaattgtgagcatcaaagactatttcctagaatttgaaggggatccccactgcttaagagacgtccaaaaattcctggtggaatgtttccggaacaaacgccgggaccagcaacagaagcccttataccaccacttcaccactgctatcaacacggagaacatccgccttgttttccgtgacgtgaaggatactattctgcatgacaacctcaagcagcttatgctacagtgatgtacaaaagacttgctgttttaatatctttttgtgtttttgatgttttctgtttgttttgttttttaaaatagcagtttacaaccagaattagaacaatcttaattctacgtttaacttcttgaaaatcttagtactttttctgcggcctttggtttgtggctgaaagctgttgagtgactcatcgccaagatttgctgtaatgcaggctttgatctgtttcaccatggcttctattcaagtccagttaaaacctcccagctgacctcagactaggcatatttcaggctttaaattattctactttccaaactgaattctcctgcagtgccaagtatcaaaggtgtccttaaatacttgtagggatgaggttaggaatattcagttccaaaacaagatatcttctgtccgccttacatatagcagtgacacttgttgcctaactttatggtgacctcctattttgtaagggctgttagaagttctatctaagaaatggcattctgtaggtttatagaaggtttagccttcatattttaattgcttgtatacacaacagctgttttgcttttagatttctgtgtttctgaaggtaatgttcttcctgttttcaagtttacataaggatctttggtctgatgctgatgaagagttcacaggtggtatgggagagcaaaaggcaagctaatgctgtttaccgtgttttggtcaaacgtaacgagtgaaatagaatttgcctttctcatatttaattatcatgtagtttaatgtaccatatgtgaaacattctggccatagcagcaactaaaaactgcaagcaacttggtaacagaactttctaaataaacttaacctgttccagaatgtcatgtatttgacttttaagccctatctcagttggtcagtaaagaccaatccttactgtaggaaatcattgttgtatcatcacaaacatctatcttttgctgtcctgtccagtcccatcaactccacactgtgccatttgtggcatcgttttgtttatttggagtttgctaagggcagtatttttctgtcaagactattcaagaaggcattatttgagattcctgttcattcttggtgtgtctctaacagatacagtatgtatacatttgtataattgttgttgttgaaagtccagcttttttgaggtatattttaaatgttttaaggatgcttctaaggatcagtagtaatttttttagttcgcacctaaagatgattacattgacctcccccgactgcttaccaaattaaaatgtgtccacgaagtagctttgtgatcgcagatacattcatagtgaactcatcagaatggctggtttgcagtactgaaatactatcttctaggctgtatgtagtgctacaattagagaaacagaagtccaaggctggcgacagcttgaaaagtctgacagcttttctacttttcctgaaaattttaagactgtgatatctgtcattttactgtatagctgactgtgtactcaggtattttattggtccttgaaagattggtcgttatggatcacccagcctttccaagtcagtggctgttgttctgtcttgctgtctgatacgagagtggggcttttcagtgaactaaccagggattgttcttgacatacctgacttttctcacatttgaacttccactatcattgtatccatataacttctagcattttcatgccatggtaatccatgagctacacatacgtagcccggcaccgtgatgcaagttcatggtatcgtgcatgttcgtggtatcatggtatcattcatgcgtgtttgaatagttctacatctagtgcttcttgccaaaaagaatacattgtttaaattcacaaaattagcataattgcagtgctaatgaatatcggaatatgtgcacagtaacatttggactattcattggagagtttacccatacatttagcaaattgaatggccaaaacatttgactccagtgagggctcaagttagatccctatagaaagaggacacttcatcttacttaagtcatagttaagatctgtgatacgaaccatagatattgcctgacaaagcagaaatcaccaagtttcccccttttgaattaccaccaagaagtgttgaaacaccaaatagatatcatgttattttg

SEQ ID NO: 87742 - DNA, 1080 bp, Homo sapiens
aattctggccgggtgcagtggctcacgcctataatccgagcacattgggaggctgaggcgggaggatcacttgaggtcaggagttcgagaccagcctggccaaaatggtgaaaccccgtctttactagaaatacaaagaagtagccggccgtggtggtgcacacctgtaatcccagctattcgggaggctgaggagcagaatcgcttgaacctgggaggcgcaggttgcagtgagccgagattccgccactgcactccaatctgggcaacagagcaagactccatctcaaaaaaatatgtatatatatatattcttaattccattgcaccattttgagacaatgagtattcttgtaatgaaatttcaaaatcatatgacactattcagaaaggcataaagtgcagcattgtgaataacagcattgttttaaatcctgccttgatttttaaaatattttgaccttgatgataaatattagctgtcccgttcatgtattaccagaaagttgtgttgtagttttggaaaaatgctagactgacaaggaagaaccagttacattgcataaggaagtgtgccatcacagagtagccagagacttgtgtgaccagcagcttctgtttgttcagggtcttagagttcactgaccaagagtgcagagaagagctcatttgatccttgcaacaaccctccctcccaggtatatagaccaagtgtgatcacctccatttcacagacagaggtgctgacactcagagtaagtgactagtttgagttcttgggtcaataagtaagaaattaattatagtagagaaaggatttttcacacatgtaatatagcagcaatgaaaacatagaagttttaagtcatgagtggggttgcacagtaaaagaacttttagaataggttagagagaggtgggcagaacttggaactgggaagtgatccttgtgaattggcactggaatcagatcccattgccttttttttttttttttttttttttaagacaaagtcttgctctgtcacccaggctggagtgcagtggcatgatctcagctcactgcaagctccacctcct

SEQ ID NO: 87743 - DNA, 1132 bp, Homo sapiens
ggaggattgaagaaagcttagtctgtaaatgttggcatacattgtattcttctagcatagctatagtgtcattgcataataaataatgctttaccatggaatttgatagcaaaattatttacatcctactgtgccttaaaagtgtggtattcagggccttctttttatttggatggatgtgtatttactcccttttttttttttttaatgtcatggtgtggcaatactggtgacacttggaatattttcaagttataactgtgtcactgcagtttgtggtgcaccaagcagtggtgcagagtcatgagagtgcaacacactgcctcagtctccactcctcacctctgctgttgtagcctggaagttcccatagacgatacaccaacaggtgagcgtggctgtgttccagtgcatttttatttatggatgttgaagttcgaatttcatatcatttttacatatcatgaaatagtcttttaagttttttccccaaccatttaaaaatgagccgtacaaaaacaggcattgggttggatttggccttcaggctatatagtttgtggacagacccctggtccagaatctagttaaatataaggagcaatccatttgctctcaaccagctcttccttctgccataatagtaattcactagcactgttgtagttgtatatactttttcagtggtactgtgttgaggatcatttgaaagatcttaatacatattgccaaattgctttctagaatatgtttaccttgctttttattagaaaatctatatttgatacccatctctataaaccttatgttatattcttaaggcatgaatcagactttgaattaaaaaactctactctttacctattttctataagcagagttgcccttttcttattgacataaagccactggtgtttttgagtatgttctaaaacagcagatcagttcttcttgtgtgttctttggctatccagcttaaattccatatccttttaaagaagtgcattctaaatcctttccttttaatattttagctgtgcagaagagagcattgaatacaaatgtcacttgttcagtaactgggtcgataagctgctaagcctctctctgtatgactatgaatttaatagaa

SEQ ID NO: 87744 - DNA, 1040 bp, Homo sapiens
ttgatctcttttctgtctttagcatttacatttataaacaagtggaatttagtggcagaaagttgcctttaaaaaaaaaaaccttcccgttcaatgtattatgcttgtgacaactctgacatttgtagaaataataagatggaaacaggatgtcataaaggggaagttataatacaaaaaattcaacagatgtttatgtagctattgctctgtacagggtaaaattgctatcctaggatacagggaggtgtagcaaagagattttgagtctaaatttgacatgtaggactacatataaaaataaagaagtgccatgagtggtataaaccgtaagtgcaaaagatattgagtgaagagtatgattaccgagagttgggaagttgcagtggaggtaggggaaaaataagaatcaggatacattaaattcttggttctgccactgaaacagttttgttggctaagccacctaacttccctgacccttaggcttctcatctgtaaaatggagcataaggttacttgttctccaagctgtcttccaacttaaaatttatctttgctccctgtataatagtaagaaccccagaaggagaggtggaagcagaggcgtgtgggggaaatggtgttaggcagaggaggtaggaatatgcacagaattttccagaagcatggggagatgagcatggagcttgtttcatagggaaaagtaggagataatgttggagatagtcagttgggactagctggagacttcaaacacgagacatgctaactgcatagctaattcagcattttatcagatactattatatttctcctgttttaggtagttcttggtaaatactttttgactcagcagcacaactgaacagtatccttgatccttcagtgttcaccaagtttttcccaacatccttatgtttctcattcaggtgaacttctcagtattatatcagtaactctgcctcctttttttttctttttctttttctttttgtttctacctcctttttaagaaacaaaatccatagtattcctct

SEQ ID NO: 87745 - DNA, 1007 bp, Homo sapiens
ttttttagccaacagaagatagtggtgctaaatggtaacatggaacaaatatggggtaaatattaccatgttgctacctgatcagcaatatatatgatgtcagagctgacccatctctgcagtattaaactcctttctcacatttaaaatttgtacttaattttgttaagtaccgtggctcatgcctgtaatcccaacactttgggaggccaaggcgggtggatcacctgaggtcgggcgttcaagaccagcctgacaaacatggagaaactccatctctactaaaaatacaaaattagccaggcgtggtgttacatgcctgtaatcccaggtgctcaggaggctgaggcaggagaatcgcttgaaccagggaggcggaggtttcagtgagctgagatcgtgccattgcactccagcctgggcaacaagagcaaaactccatctcaaaaaaataaaataaaataaatactaaacatatggctaaaacttttttctctgtttctccacgatgaagcattttagtaaggtcctttttttgtgacttctgtagtaggagaattactaaactgcgttgtacattttgtgttaacatttgataggactacggaaatactcctagaacacttggatcattaagattattagccttgggccaggcacggtggctcacacctttaatcccagcactttgggaggccgaggcaggtggatcacaaggtcaggagatcgagaccatcctggctaacagggtgaaaccccgtctctactaaaaatacaaaaaattagctgggcgtggtggcgggtgtctgtagtcccagctactcgggaggctgaggcaggaaaagacttcatctcaaaaaaaaaaaaaaattattagccttaaattattttggtgataaggccaacacaaaaacttgatataaagaggaatttattaatttgtgagcagcaacaagaaaaaggcaatttctagaataatgtaataagttctttccaaaaaagctctt

SEQ ID NO: 87746 - DNA, 1021 bp, Homo sapiens
tggcctgttttagtactgaattaaatatttgaaatactctactctggctgtacattcaacatagcctgccactgcacttttgagttaccctgtctttagaaaaccttcttatgtgacaatagctagataatttggtaactcagatgaataaagagatgggagtcaggggttggctggatgatacaattggagatatggatgaaaactgacaaaatggctaggagtcatttccaactatttttttttgtttaatttatattcacttattgagaaataaggcaacacttgttacgtaggacaggacagtgtgtgtgacagtgggaggaacatcccacagcttcctactttctgtaaacagtttaacattgtcagcattaatacaacttcctgtaatggccagtctgtctttgcaattcctgaaaccaaagtgtttttgctaatcatggtaccttcagttagacttaattcttttctttttgtgcttgaggttactcttcttgaagccgataagatagtgtattcattaacacagagatttactccctcaatctgtgtaacaaagtaaccatttagctccatgattggcctgtaaaaaggggaggtccaactaagtattctagaaacttcagtttcagctaattttttttatttatttatttgcactgcagcatgtattggaaatataatacaatcaagagtcatttgaagctcctgtagtcccagcttctggggagacaggaggattgcttgacctcaagagttcaagtccaatgtgggcaacatagtgaggacagccccctccctcttaaaaaaaaaaaagaatcagagtcatttattaattaatgctaatttggatttgctttaaatattaaagaattgctactttcagttgtaaaatactatgtttcttttggatgattggtccattttctctataagtatagtcaagcaaggactttgagttgctaaaaacctattggttatcttttgattctaggattagtgttaaatatttcatccc

SEQ ID NO: 87747 - DNA, 1963 bp, Homo sapiens
tcttggctcacctccgcctcctgggttcaggcgattctcctgcctcagcctcccaagtagctgagattacaggcatgcgccaccacacctggctaattttgtatttttagtagagacagtgtttctccatgttggtcaagctggtctctaactcctgacctcaggtgatctgcctgccttgccctcccaaagtgctgggattacaggcatgagccactgtgcctggccatctacctcctgtttttaagtgctgcttattctcctttcttcttagttcattttctcaacaaaccacacactttcaactcaattttgtcaggctctattcatccttccaggtcagagaagaaacattcatctgtaataagcatacagtgcatatggattaaatgaataaataaagaactgcatacctgaaagttctctgtggggaagttccgtatttgccctaagtccatttaattaaagttgtgtttcatggacagttttttaatttggaagctgacgtctaactgtctcacatcaggactgtcatgtcctcattgttgagaaagcatccctaagtatatctttgtgattaagaacgaataggtaaaaccactcaggatgaggacctgcttgttgttgacttgagccagttgatccttaaggagcaaagaagtcctcaaagatgaggagagataagttccagaaatacttttttccatgatgaaaagtagagacaagaaaagaggaacagagcaagacctaattttaaacttctggaggacagagattcttttttcctgagtctacgctcagcattgttttttgtttttttgtttttgttttttaagagaaggtctcactgttgcccaggctggagtgccctgttgtgatcatagctcactgtagactcaactcctgggctcaagtgattctccagcttcagtctctcaagtagctaggactacaggtgtgtgccgtcacacccagctaatttaaaaaaaaatttttgtagagacggagtcttgctatgttgccagtgctggtcttggactcctgacctcaagcagtcctcctgccttggcttcccaaaatgttgggattataggcatgaaccactgtgcgtggcttcagcattgttaatagcacctgacacatagagatgctccattattatgttgacttaatgactcttaaactcttggatgtgctgtggtgcttggcatagtgtcaggcactgagaaggcacttggcttacttaaaattttcctcaaagtcatcatcaattccatctactcatctacatgcagcagctccccaagttctgatttttctacctctgtaacgtctcttgcattcattccctcctttcctctattttgtgttctgctacctcttgcttggactccaaggcagtcttgttcaaacacagcattggtttgctcagaaagctttggtggctcaccattgtcttcagaacagagctcagcttttttgtgggagtaaagactctagctagcttacctgtgattccagcaatatatttcattaggccactggacatactctgtaatctcttgattcccacataccctaattttttgcttctatagctctcatcatgcgtagtccctctgccagaattattctttaccctatctgttactaggtcttacccttcacttaatgtagtgataatcacactaaatgtggcccatggaccccatggactggaatgcttgttaaaacaaacaagcagatgctcagactttatacctgaggatctgattctggattctgggatgggacccagtgatctgtgttttcagcaaatagccataggtggtttggatgaatttgctccatgccccctccctttccccaggaacagtgccttaggggctgtgtctctttatttgaagcatctccagtcttcttggctagaatggagatctccgtgtcctttgctttccctagc

SEQ ID NO: 87748 - DNA, 1002 bp, Homo sapiens
cgccccacttccctctcgcagggggagagaccaggacgcggtggggggtgggggaatggccgtgacgcccaccggggagacaagcgggagagcagggcgaccccgagcatcctctcgccctggggcgcgagggcaccccgggcgggcagggccagttgccggggcgcgcccccttcccgccagcccgcccgccgggcccgttccttcgccagcgacacagcggaccagggcggtgccccgccccgcacccgccgccgccccagcccccctgcccttaacccccggcccccattcccggcccggcacctttgatcacgttgctgtagatggtggggcggaactcctcgcgcgcgcgctggtcgaagtcctgcccgtggatgatccgcatctgcttcaggaaggtggacttgccgctctcgcccgcgcccagcagcaggatcttcaccagccgcttcacataggtcttttcccgagacaggcatttgtcgatctccttggacttgcgttgctgctcggcctcgccactcgtcagcaggcagccggggaagcacacggacagcacggaccgcgacggcaggaagtccgccatcttgccgccgccgccgccgcctcggcgggcccctccggctccctccacctcctcctccggcggcgggcggctccggcaccgaggctcgagggcggggagcgcggcggcggcccgagcgcgcccagggagggagggaaccagcgaactgactcgcagggcgggccgggcagggcgggccaggacagcgggggagggagggagggaaggagggcgggcccggccccggaggggcggtggccccggagcgtgcgcgctcccgctgcctcccggaggcgcgctcgcacgccgcggccgcttctccgcctcccgccctgggcggcgagtcacgagctcgatgtgtcgctcgggtgcccgcgcccgcagccgcggccgggcgcgcggggagggctgaggaaccgcggtcacgtgggcca

SEQ ID NO: 87749 - DNA, 1047 bp, Homo sapiens
ctggagtgcagtggcgcgatcttggctcactgcagcctccgcttccctggcttaagcaattctcctgcctcagccttcagagtagctaggatcacaggtgcctgccaccacgcccggctaattgttttgtatttttagtacagtcggggtttcgcaatgttcgccaggcttgtctggaactcctggcctcaggtgatccccctgcctcggcctcccaaagtggctcacaggcatgagccaccgtgcccagcccggggctatcttttctatcagacaggaattgtttgcatctctaccagacaaacattatttgcaacttagcaatttcctttaagttagcatctagaatctgggccttaatcagcaataagtactaagtcaaagtgcccatcccttcacattgacggaccctcgggtattacccagatcccctctttggggttcagccctgtccccacagctgctgggagtatcagctgctgatatgggtagatggcttacagctctgttcttacctggaaatcacctgagatggaaggaaacttcctcccccacgtgtataccttccctcccttacttctggttggtcttgaacaggtgatacaaagcctggtgctcttgccttaatttgcaacaacaccgatggccacctgggctccagagctttccatgggacaggctgaggcctcagcggcagcctcactgcgggtgagcttcaccctcacccatgcctccctttccacaagagttcctccccagagcagccccagtacaccctggtcttgcacctgcctgtctcagagtcggtatcaagggaacccaatctaacacaggacttattacacaatgctagggtggctttggggaaagggcatgaaggtgtctttttgcctcatttatgagtttttagatactttctcttaaggaaggtagtaaaaaaatctgtggaatgaacagacaggagtgggcggagaaggctcaggggaagccctcccccacacctggaaaaacaactctgggtccgctgacagaggccacaaccagcct

SEQ ID NO: 87750 - DNA, 1243 bp, Homo sapiens
gagacagcagaggtgctgggttgaagattgcaggtggcaggcccagcccaggctgctgctcagtgggtgcctggccttcatcatctcggcccacctgcttcttgtggtgtggccagtcccagctgccgtcttaaagcagatgtgcgcaacagtgtacaggcacacctgccatagcaaattcctaggatacctcagtcctccatgttggtatgcttttcttttcaacaatgtggaaaatgcagtttaccaagaagcttttttggttttccttttaaggtattacttcaaaaaagcaagcgatgagtttgcctgtggagcggtgtttgaggagatctgggaggatgagacggtgctcccgatgtatgaaggccggattctgggcaaagtggagcggatcgattgagccctggggtctggctttggtgaactgttggagcccgaagctcttgtgaactgtcttggctgtgagcaactgcgacaaaacattttgaaggaaaattaaaccaatgaagaagacaaagtctaaggaagaatcggccagtgggccttcgggagggcggggggaggttgattttcatgattcatgagctgggtactgactgagataagaaaagcctgaactatttattaaaaacatgaccactcttggctattgaagatgctgcctgtatttgagagactgccatacataatatatgacttcctagggatctgaaatccataaactaagagaaactgtgtatagcttacctgaacaggaatccttactgatatttatagaacagttgatttcccccatccccagtttatggatatgctgctttaaacttggaagggggagacaggaagttttaattgttctgactaaacttaggagttgagctaggagtgcgttcatggtttcttcactaacagaggaattatgctttgcactacgtccctccaagtgaagacagactgttttagacagactttttaaaatggtgccctaccattgacacatgcagaaattggtgcgttttgtttttttttttcctatgctgctctgttttgtcttaaaggtcttgagggttgaccatgttgcgtcatcatcaacattttgggggttgtgttggatgggatgatctgttgcagagggagaggcagggaaccctgctccttcgggccccaggttgatcctgtgactgaggctccccctcatgtagcctccccaggcccagggccctgaggcctgctagaatca

SEQ ID NO: 87751 - DNA, 1083 bp, Homo sapiens
attacaggcgtgagccaccacgcccggcctagcagcctttttttcaagccattctacaaaatctcagaagaaatggggaaatggacatgactgtgtgataacccccattagttgttctcattctgctggaataaggggtgggctttaggcattctgagatcatgccatcccaaaggtgtcctgctctgggtttgtctctttagcactctccaatccaggtgagacccggcatctctgtgataatttctcttctctcatcttcttgaggaagcaccccatttatgccagcctgaaagaggccgccgtatactttcatttggtggcggtgggggaaatgataccaatttgtacaaccaaaaggaaatcatccttttctgcatgctgcatgcagcacatgtggggttggactgtgtgtcccccagagctgcctgactctgggatgtggggctctgccccagcccccactttgggtttacaattgcagccctagtgtttggataccctgtcacttatgcacatgtgcgcacgtgtgtgtttgctttagatgtgtgtctgctttaaaatgctaaacttgttccattccatcttattttcagtcacaaagagccaaagaaactggcaggtgtccacgcgctccaggccagtgagttggttgtcacttactttttctgtggggaagaaattccataccggaggatgctgaaggctcagagcttgaccctgggccactttaaagagcagctcagcaaaaagggaaattataggtaagagtcctgtggcttttttctgctctcagtttgtttgctcagaaccaagagccagagcctggagcagctcccctggctgagcagacctaggtggggcagggtgggagggggctcagcaggcgctgggggaggctcccttctcatttcttctctcccctcaccgctagcagcaataacgaagcagcagccgcaagagggaggctgcgtggagggttctctgggggacctggccaggctctttccaccaggtgaaccagactgaggagagaaaaggagcagctgcttgcaccgacaggagagtggggctcaggccaca

SEQ ID NO: 87752 - DNA, 1025 bp, Homo sapiens
ggtggagtcaaaaggctaagctaattggctcggctcaaatggcagctaagtggagtccacacttcaaaaccatgctccccagaaacagctgggcccggcagcaggctcgttaactaaaatgtttataattaaaggagaccgtatagggaccacaactctggtgctctccagcccacaggcttgagcagccaggaaactgatcacagacttttagagcttgaataaaagaagagaggcccccttttggaatgaggggctgttttggaagaagattcttggctggagggaattaaagccacatttccttgaaggtgcctgttaagcctttctgagcctctacaggctgacatcttccttttctgctctggttacaagttgcctttccagcagtttagtccttcacctgccctgggtaatggagtgtgtgtggtggtggtggtgggggatggggggcggggtatgaggtgcttatgaaatcatttgttccttttgccttcaatattgcagttatctactcccctccccatccctacccccatcctgttttttttttttaaccttattatatggaagaagaaaaagaggcataaaagctctaccactgactttcatctgggagaaggaagagtgaaagctaccagtggaaatgtcaagagtcttggagggggtggacgggggactcttctaggactcttgaagccttatgtcacttgtgtcatggtggggtccatggagtgcttgactcctgcccccaagactgtcaggaacagggctgaagcagagtcatccactgtctaagtccctagaagagagatggaggatagacattgtcttacagccctagggcagcagaatttggttagaccagcatgagcccaatctgtgggataccgccacccctaccatacaaggtatcttaggtgagagatggggatattcagcatggcttgggaaccacctggcgagccccatagctagtgagtactaggtggttggggaggacttcccagaaaattccacaaatt

SEQ ID NO: 87753 - DNA, 1075 bp, Homo sapiens
agacacaggccctgtactttgcccgctttgcccttcccccaggcatgagcgttctcaacatgagatctgtgaataggaccggttggtcatgagacctttgagccactttgggtttcttttatttatatttcttagtaatcaagactgctttttagaaagactggttctgggaggggtagaagggagcaggttctaagttctcccctgcagcctccccatttacttcctcttcttttatccccttcccagaagaaaaactttcttttatttagaggtgactttaaagctttcacccttccccctttagctgaagcactttggattccaagcatgggggagccacttttcagggatcagaaaggttacctttgccagtccctattctaggtggcaagggttagtgtgtagttcagtgaggtccacttggatacagagacagaacaggtcaagtccctcatgtagcggctttctctttggggcacagtagatacctttgggttcctggtggcagaacctgtgagtattaataagcctatcctgtggcaaagctgccttggatggatagtgaataaaccaggaagccaggaggaagtgctgcaaggcctagagacccgtgggctcatggtgttggctctgttcgtcctggtggtgttgagtggctctgtgccctctcccaatcaagtgcgcaggttatcagattaactgtcacagttgtgcccacctgggcatttatactaattaggagtgcatttggcatccatgtggggtcactgtctcttgggcattgtctcatgctgcctctagtggggctcactagaaaacatcagaagggtctccagacttgttggcactgactcaagctgccattgggtgccaggcatgggggtctctggggccctccccactctgctgcaagcagacttggcgatgcaatgtgttctctggccgactggccctgggtgtgtgtgatcctgcccagcaccgggcggtcacccgggattcccagggctgggatcagacctcctcttcagaactctgccaattgtaggcctcgtgcagatgagagcgccgggcg

SEQ ID NO: 87754 - DNA, 1040 bp, Homo sapiens
tctgggttgtgggatggtggtgttgggcaggggacgtctcagtaggagggccctggattgagtgccttcctgtgtattcctaagaacctggtgttgagaccccgggcttggcggggtggggcagggcaccaaagcagagaagcacactggaaaagtaaacggcgtcctcctcctcattgccatcgctcctgtcgccgtgtgtggggtgctctgcaggtgctaggccctggcttggcatgatgggcaccactgcctttaatcctacagcaaccacaggttttctgacctaaggagtgaggcttacgagggaggggtaggggatctgaggacagtgcctctgtttctttgctggcaccaagggctggcagacacgactgcacaagttcttatgagaagtgggtatctgggagagcttccctttaggctgggagatgcagaggcaaggatgtgttccgttcattcccaatgcaaggggtaatgagagcaaaagaagcatctgcaggaaagagggcaccacctggcagctccaagttcacactggactttgaagcagtgcaggccccaactattcattcctcccccatagacagccaaatggccatactgtgcagggggtcccctaccttcacagatttatttccccagtatcaacagcagaggcagggacacacctcatgaacagctcataggaaacctcattccaccacaaggcatccgctcccacccaccagaaaaggcttcaaagcggcaaccaaaccttgatctagtggccagtttgggcacattccctcctcccgggtgacttccttctctattctttataagaaattcttgtaaagctctataaagtctaaaatgagggccaggcacggtggctcacacctgtaatcccagcactttgggaggccaaggcgggcggattacctgaggtcaggagtttgagaccagcctggccaacatggtgaaaccccgtctctaccaaaaaaaaaaaaaaaaaaaaaaaaaaaaaattagccgggcatggtggcgggcacctgtaa

SEQ ID NO: 87755 - DNA, 1007 bp, Homo sapiens
tgcactaggcggtttctatagttgtttcatgtcatcctcataaccttgggaagtagctgtcattaatcccatttcacagattaagcatcaagagcttaagtaattttcctagagccacagatggcaagccaggaattgaaccaaagttggcctaactccagacaaagctcaggctctttccgctatgaagttctgtctctccaacctcagggaatccctagaatggattgaggtttccagaaagcagtaattttccttacactcactcattcattcattcattcaacagctagtgaaaccagctacatgcccagccctgtaaaagaaactggggtggaaagacagaaaagtcattcctgcccaagagaagctctcaggtttagggaagagatatgaaaacaaataaccacaaagcagtttgagaagtaccagtaatagaggggaggaacacagaggaggggaccgctggctttgcctggggctaggaggcaaggagcagctggggaggaggtgaacgattccacaggagaggtgacatttaaaccaaatggtggaggatgaatgggagacagaaagacaagtgttccaaagagagaaaatggcctgggccaaagagcaacggagcgagaaagacacggtgtggaagcagcagtggtgggcagggcgtgaggacaggtaaagccacaatgatgggggtgggccagatcaaaatggctctgcaatgaggagtttgaactttattctgtcgtaactgatggattttcaataaggatgggatgtgaccaaatgtaaaaaacacaacattgacattcaacaaatcctctgagttttatctagggaattgtctgaatttaaataaaatcttaccatactatttgcacaatattgacatgtaagccacgtccacctcttctcacacaaggtgtcttttctaggttaattttctgcaaaagagagcttccatccttcaggaagaactgactacatatcaaggcagaaggtacagc

SEQ ID NO: 87756 - DNA, 1045 bp, Homo sapiens
tctctaccatccaattggctcagaatagtttaagaaatatagggagctcctaccttctactggccgcccccctttttctctcagacttcttatggttgccatatgtgatccacaaactaagttgagctataccatgtgtagactaaaaaaatctcaggcaagtctcctgaaagttctcattccatcaaacatctactttgccataagggacatttaaagtatatattaacctaagtttacaatacaacaacccttttatttccaaaattactggatatgacaaagatcacagaagattactggatatgacaaagatcacataagccacctttagtacagggacttggtttcacctgtcttagtattttaaagcttcctaaggacataaagaagcaagattaattcagttcatcaaaatgaaggagaaaaaaagaattttctcaaagctggatgaaaaaagttaacatcatacaagataaaatagtacccttatccctaaaatcttagcctttctgctgccaacatcagttttaaatacgtgttcaagataaagagagggaatgaaattgttatagagacctaagttgccaacttgggcactcaagctacacagaaagatccttcagataggagcctcttatggttggaaataaagcaaaaacacaccctctggaactctatttgaataagaaaagatgccctttctgtttgttttcacttatagatgaagttggaattttcaccataatgtgttttaccatgtgggccaataaacatgaagagtggcattcatcgtaatatccacacacgtttaggattttttttctaattgtaaatcgtgaattttttctgccatttgaagtaaagaaaaaagctggcccaatgaggatactgcggccctcagccaccagtgattgttgagagcttttttctttgtctttttactctttaccatgaattcttttcagacatcatcagaatatgatttctacatttcagtacatttttaatattaaagaaatgccttcaacggaaagaacaaaat

SEQ ID NO: 87757 - DNA, 1112 bp, Homo sapiens
tattcatccatatttaacttaatcttttatctaaatttgacctatgtccccctttaaatctgtgacactaacacaagtagtcaaaaataattagaattaggctgggcacagtggctcatgcctgtaataccagcactttggaaagccgatcacctgaggttaggagtttgagaccagcctgtccaacatggtgaaatcctgtctctactaaaaatacaaaaattagccaggcgtggtggcgggcgcctataatcccagctacttgggaggctgaggcaggagaatcgcttgaacctgggaggtggaggttgcagtgagccgagattgtgccattgcactccagcctgggcgacagagcaagacaccatctcaaaaaaaaaaaaaaaaaaaaaaattagaactattgtcacagacactttttaggatctgctaaatatgagtttactaaggatatctaaaatgttgagattgttacattatgaatgtatttttcactgttcatcaaagcaacttcaataacagtagctagcctcacatcagccaatcgaacaactaaaatgtgtttgaaacagcccctgaggactatcttctctttcttttcaagcaaatattgttatcctgatactggttgcattaaggaatcaaaattgaaactggcagaattacaaaagacaatcctaagctgctttttttaacttgcttgctttaaaaatgtttaaatggtttctggttttcatttaagaaaaatgtctatgttttgattctataaaaacaagaaatgaatgaggcattgtaaaagttatgtttttaattaaaaaccaaaagctgcttctcatcaggtcttgatgggtggcatctttgctgtccaccacatgccttggtgccaccaactctcccttctgtcccctcaagcggacagatcagcacacagagtccccagggaagatgtgctcattgtggggcacaaagggttaactttctccttgggcagattcaagagaaataacaccaatagaatcagaaaataaattttctaagtcagctttacaaaaacgtgatgttttctctaatcaataaacagcaatttaaaatcaccattatttttattcata

SEQ ID NO: 87758 - DNA, 1051 bp, Homo sapiens
tactacattctgtccatgaaaatgagtcaaatgaccaagtgccaaaatgaacctagatagatattctcattctattcttctctctgcatgaatgatataacatttttgcaacaggtgtttgatttggacattctgattatatttaagtgttttgtacacatagatttaggtacatgaatagatattgatactcagagagaggcacagccactatgaggcttgattttctgggaccaaatacatttgtctgcagatatattcaataatgccataaaagtagcgtgcatgctaattgtgagacatacttcactccacttctgggttgatgatgaactgacctctttcaagctggtgatcaagaatggagacagagagtaaacctagtactcattctgtcagagcttataataatgcttcctcagataaatcattaaagtaattctagagaaaatttgaggtatactgaaacccacttaaagggtcaccagtcaggtgcaatataacttgataaaacatttcttgaggataatttggcaatacctatcattattaaattgcctgagagatatacctagcctttgaccattttcagaatttgcccaaaggtggcaattaataatcgcactaagctttagctaatcaaaaagatgcttgttctagctttcatcctttcagtcaatagttatttatttagctcctcttatgtgacaggtacctgcaacaccagcattctctatatcctttctatatttttaactatagcaaatacactgaaaactgtgcactataggaaatgacgttggagagcatatataaggatattgaaaatgttcacatgatatttttcagtgaaaatgcacatcccaaaacatatagatatgagctcatttttgcaaaacaaaagtataactcaagagaaaaaaagactacagttatatcaaaattttactaatggatatctctgagtggtagaatttatgattttttaattttatctatatttaaactataatagcacttttgcacagagaagcaataaaaattgtttggt

SEQ ID NO: 87759 - DNA, 1053 bp, Homo sapiens
ttaacatcaaagaaatcttagttaatgcaatacacaagaaaaggaaataagaggtatacagattggaaaggaagaaatagaactctctttgtttgcagatgatgtgattgtctatatagagaatccaaaagaatcgacaaactcttggaactgataagtgattatagcaagtttacaggatgcaaggttaataaataaaaatcaactgctttcatttataccagcaatgaataagtggaattttaaaccaaaaacacaatactatttacattagtacccccaaaattaactacttaggtatacgtctataataactgtccctgacttacaaaggttcaacttcatgatttttttgactttacaatgggtttatcgaggtattaaatgcatcttctacttaagatactttgtacttacaacagatttatcggggtgaaatgccattgcgtgtcaagaaccatctgtatgtatgagatttatatgatgaaatctacagaattctgatgaaagaatcagagaagaattaaataaatcaaagaacaactaaatgagcgcttacctcatttgtttcccttctctttgggtcacaatcctctgcttcctgttgcctgatatcctaaaacagtttctcctttgttttgtccagttttctcattgtttactgtggcagttacttcatcacagccagggcagcagtcatgaattttactgttttacaaatttgcacatttattttgaagtaaaatacagattattttcaagtttgaatgttttgtaaatatttaaaattaaatacaaatatttgttataaattttctaaatatttttgctggtaggatggtgcggagttttaccaggctggccataactggattcatagtgttacatgaaaggggactccatccagaccccaagagagggttcttggatctcgcgcaagaaagaattcagggttgagtccgcaaagtaaaagcaaatttatcaaggaaatagaagaataaaagaatggttactccatagacagagcagcccctagggttgctggttgcccac

SEQ ID NO: 87760 - DNA, 1109 bp, Homo sapiens
gacggagtcttgctctgttgcccaggctggagtgcagtggctgaattaattatttcttaacattttattttatttctactattagcttattagctatacctcttcactgttggtttttatagttgttgatctaggttttattatatacatcttaattacagtctgtcttcacctactgttgtaccagatcatataaaatgtaagtttcttaacagtatacttccatttccacattcatattctatgtttctgcaagtattataaacctcgcaatttgttattattgctttaaatattcaattgtcttttaaagaaattttaacgtgagaataaaaagtaatttatatttacacactttttttatgtccagtactatttgttcccttggtttcatccaggtttccatttagtatcaggtccatctgcctgaacgacttatttcaaccttttttgtagtgcacatctactggtgacaaattctctccaatttttctttgaatatgtgtgcttttcactttcagtttggaaggatagtttcactggatatgcatttctagattaacagattttttttttaatttcagcactttaaagattcattgtattgttctctgacttttcagatgagaaatcttcattgattcctgtctttttaatgtatctgttttctctggcttcttataagattttatatttatttcttttctttgcaattttattatgttatgccttgatatggttttctctgtatttatctcatcttttgtttgtttgtttgtttgatgatcttttggacttgtggtcttagaggttttttttttcattttggaaaattttcagccattccatctgcaaatatttttccaaacctctttctctttctgggatacaactacacatatgttagatgatgtgatactatctcagagataactgagattattcagtaaacttactccttgtctctctgggaaccatttggatatttaaaatgttatttttagcttaatttccagtttctgccctggcatgtaaggtgcttggaagttgccattcatcctaacaacaagtaaaaagcaggaaaaaaactgatcagcattttttatatt

SEQ ID NO: 87761 - DNA, 1057 bp, Homo sapiens
ctggatcattctccacagtgccagaggattcatcttcccaactggacttctattcattttattccctgctcacagacctcttccccatcccactgcatccaaaatgaaatccagtttcttggcctgtgaccccttgatttgactaaaaccctgaattgttgaccctgaagccccagaattgagtgggagacagacatgagatataaccaacaatgagatgtatgtgggtaaggtagaggatccggtgccagcttacattcccagctccgtatcccagcattggaagcttctttaagctgtcaagaggaaagtgtttctattggtagatattcttgttagccacagatttgtttcagaattggaggggaaagaaaatacaccttattcaggaaattttttgcctagaaaatattttctcttaatttcacctcaaaataaaagggaagtaacactagagaattaaatactacattatcatatacttaaaccttttaaaccaagtggaagggaacaacttttgagtctaatttagggtaaaatatgtgtattatacctttgaccagtcaaggaaattcaaacatttggtttctgcctctttggctagtaaatgagttagttcattttttgtgtattttaatattctgaaggctttcggtcattaataaaaattaagattcactaaagcactccggaacaaattctggttcctaatgcattttcatgtagaattttatttgctcttaattttttagtggattgaaaaccatggtcacatagttcatcagaaaagcacttcaaggatgtcagtagctttggattctaaagcaattaactataacctttctaaacaagagacagtaaaaattctcggatttttccaaattctgttctgcgattatagtactggagatcagtgcttgtgacaaataacaggtattaagcatgtcatcaggctggtttagaatgcaagcaaggtgatgtgcaaatctaaatgaaattgaataatgagtagaacataggagagtagggagatatccctagaacctaggtctactat

SEQ ID NO: 87762 - DNA, 1062 bp, Homo sapiens
atggaagaagatactgattgtgtgctttccatgtgtaaagcactttcacgcaccttatctactttaattctcccaactcactgaatgctttagaattgtaggcgatactgaggctcagaggaattacacaactggctcagagttacacagctacaagttgcagaaccaagattctagtgtgtctttctccaacacctatgtcaggaatgttggcttctcatgctatttccaagcaaatccaaccatctgttggctcagataggtcactatgagcaaaagatagaagcagctcctgtttcacaagatcattggttttatgaaccaattcatgcttgttgccacattcctcatttcccaacgaggctctgattgggttcctaattcctcattgcccacaccttttgttcacaagtccccttccctgtttcttgtttctacgttgatgagtttccttgagtatttggtacttgactgatctttcagctcttattgatcactttggacttgatcttagatccatttgacttaaagaatcctctcagtatgccttttctcgaagaattattggtccttgcccctggagagacaccagaccttttcttggtgtttctgtataggatgacaagaagtgtaatcttcccatcatgccctgctagtcacctggattcagaggaaatgctcactcatgcatacattatcttatttgaaataatgttttattctagattgtttctctctgctttaatttgcactgtagatttttacttctgtatgaatatttttctgctcgataatggctttggaagagcaatgtttgcttttgttttcaatcctagaaaagttcaaaaaaagcttttattctatataaactctaaagtgtatatattttaaacgtgttacttcttttttttaattttgcattggcatctgtagaaatttttgtcagtttaaacaacaatgcttgaaagtcactttgacttttcaagctgccagattgccttatcattgtctttgagagattagggatgcttttttagaaggttgccttttatgtaaataaaa

SEQ ID NO: 87763 - DNA, 1049 bp, Homo sapiens
gagggaggctgtgctctcactggcttcttgttagaagttctgcctgccctacagcctgcactgagggctctcatcactgcttctgagatcttaatgggggtcaacgaagatgtgggcttctctgagtttagaccatccatctgccaaggaaaaccaagccctgagactgatagagatgagagaagagaatggtaatgtccccaagacagagcaggcaggaagtttgaagcctctgagggatacaggaaaatctaacctcaaagagaagaaggtaagaacaagacaacctctgtcctcctgacatagggatcttgctgaaaaaataaatctcattgctgagctgagttaggcattggtaattcatctcaaggagatgaattttgatagggcagggatgatggaacaaactgcaatcacattgaacagaaataagggccatcatctagatatgctggactgcatgccctgggaaatgcagggaggtgtctgacatctgggggcaacaggcagaatctggcagaactttctggaagaggtagattgtgagctaatggcattttctcccttgctcaaaagcttacaaagtgctgtagcccaagaaaaagtgaagttgccacagcttcctagttgtctggccaaagatttgcataatttcatttcccctctgtacctttcattgtttttctttcttatgtatttattttaattaattaattttaagttatgataactatttttttactgtacagttcagtggtgttaagtacatttaaattgttgtgcaaccatcaccacgatccgtctcgagaatttttttttattttgtaaaactaaacctgtgcccactgaacagtaactcccattttctctccctctagcccctggcaagcatcatttacttcctgtatgtatttgatgctctagggcaggggtccccagcccctgggctgcagacccgtacctgtctgtggcctgttaggaaccaggctgcacagcaggaggtgagtggcaggtgagctacttcctgatgatctgaggtggaactgttt

SEQ ID NO: 87764 - DNA, 1006 bp, Homo sapiens
aatagaatgagctgatgggcataaagctgcatagatacattatgggtctagtatagtggaagggttctgtgttgagagtcaggtctggttctaactcatattcataatggaaaaaaaaattctctatgggcctggtttgcctgatccagctttgtgcagattaaataaattaaaaattgaaagtggttgagtaatttaactaaattgaatacattatgagacatggtaaaaaaataaatagaaagtacatgaccactaaaactgcagttggcttaaataaacctcttcattctcataagtaataaagaaaatgctaattaagacatactattttttaatatattgaaaaagtaaattagtttaaatattaccaagcgtaattttaaattaataataccaagatgcctagggtgcagtgcataaacactctaaaatgctattgttgagaatataaattggtacaaccttcctgaaagcctgtggttatctatactgtgaaccttaaaaatatccctatcttttgacctagtaatctattccttagttagcataatatcagtgtcaaaactgaaaaaaaaaaactctctaaaaacatattaatctcacttttgaatattgtaaaaaactaaatattaagcaggagaatctagtagcatatttaaaatattgtacatcataatcacatggattttattccaggagtgcaaagatggtttgatattaggagcactattattaataatataaattactatactgataaatcaaaaaagaaaaattatttgtgattctttatatactagttagagtaagcctaagttgctgtaagagggaaccccataatgcagtggagaaatgaaataagaaagtttatttctgttttgcgtaagaatccagatgtattaggatggcccagggctaggatcaaatggttctctttcatgaggtcacttaggaacctaggctgactagtgagattcctcagtcatcctcaacatactgtctc

SEQ ID NO: 87765 - DNA, 1024 bp, Homo sapiens
agaatgataaaacccttatctttgtggcaaatatctttggcatttgccttttatgatttaattttatgatacacaaacattttatttaaatttcgtctaatctgttcatcttttcctttgtaaattctccactataaatagttgttttcagcttcatgttttgatatttataaatataccaacacatcaaacgttttctacaatgtgctctactcagtaaaaggctcttagcattttgacatagcatttaccagcttgggttcctggtctgtaattttaagtggtgtctgaaggattatactggaattctgccagcctgaaatcatgaaaaggctttgagcaacaattcagcatctttttcaaatttaagaaaagctccatatggcataattattcaaagttaaggtcatagaaactacttaaacctttaaaatttataattaaaggattaatattaacttatgaagacattgtcattttggcttaagatggatttccaacctcacttttgttctttttacttttatcttttccatgactttttcctttgctaaaaaacgtgaagttttatatccttaaactttaaattaaatgttatcctcaggttagaattataaaattgattggccaacaatatcccgtatattttttattatgttccacaaatattggtgaacctaaagttgtcattttcctctggatatataagctatagcctggtgtaatagataatggcacctgtaaatataacaataatttaatttaccaggtaaaaacatacacaaataacttggaaaacttaggatgtgtacataatttgaatgcgatgaattggtgttcatttatatgaaggtttatattaatgtgcttttgaatgacctaaattgtaaagctttcttgactatgacaggggttataatcttgtcttatacaaaaactaacactttttataggataatttttttatttcaactttttagattcgggggtacatgtgcaggtttgttacatgggtatagtgtgt

SEQ ID NO: 87766 - DNA, 2084 bp, Homo sapiens
tcatcatagagatagcactgattaggttggttaaatataaatcgatcaggaatgtagaagtttctggtcggaggaggaggaagctgaactgagttaagaacatgtggagtttgaagtgacactacactttcccttgctgttgaaagaatgcttctggatatcccaagagcaggcaggattggagacaaacagctgtgggaatcacccacagagaaggcctggccagtggccttgagagtgagtgggactgttaaagcaagggggaaagaggcagggagggagggagagagagggcaactgtgaaggaagaacttaggggtacagctccatttgagaggccagggaggaaacagttgaagaagggtcacgaaggtagaaggaacatgagaagaatgcatttttatggaaatagaggaaaagactatttggaaagggggattgtcaagaatgtgacccaaactcaggaaggatgagggttgaagaaaggtcactggatgtgaaaccacaaagtcattgatgatcttggacagtgcgctgaaaatgattgtgtgcccagaaacagggtttcaaaagataagtctggaagtggaagtgagggaacatcctgttgtttgggaaaatacgatgttaaaagaaagatgtagttccaaagagcagcaggagttaaagagaatatattttggggctgaacatgggttgagcattttgaagtacacaaagggactaatggagaggaacagcttaatgacgtgaagaatcagagatcattgatggcttgtgatctgtgaggtggtgcaggtgggaatggcatccccagcacagacgcagcacaggcctacctcagccctcggctacaaggctgcaagggtccattggtcttttcccagaatgtgccacactctcccctgcctccaggtctttgcagctgctgtcaccctcttccagaatgcttctccacatgattttttcaatggccaacctccttgacatcattctacactcctcagagcatccttccccgaccttttcatccaaagtctggcctacctatgccacctttttttgtcccattgtcttcatagctcatagcattacctgaaatcatccttttatttgttcgcttgtttcctcccacccactagaacataagctctgttagcaggaccttgtctagcttgtttacttctgtaccaccagtgcctagaaaacccagctcggggcaggtgccctccgggtatgacatgaatgagtgacaggaggcatgaccttcaccaatggaggaaggaagtcaagcattggtaaagatatagagaagctctctgacaagacttgaaaagaccttgtagctaatagcatctgtattcttagtaaagaatcagagtagtctgcttaggtgaggagtttcaaaaaaagcgaaacaggcttccagctgaacagtggaatgccttggaaaggaagaagatataagggaatttgttcctatagaattggagttctgcaggtagaggagggagcatgggtatcctgcatctggaagaatggaatgctcctggattgaagtgagaacacaagggatcccagaatttagaagggaggtttgaggacagttcttttagctgacatgggtagaggtactgagatgaaccagaatggagggacttgttgacaaaaagggagagtctggggaaagggaagactctcttttacataggctggtgttgagtgcgatgagttcggtttttgtccagttggtggaattcaccaacctcagagtccatatgatgatatctaaatgctgtgctcacatcgagtaatttgtatttccaatgattgatatttttacataaatagtcaaaggagtttagcattttcaaatgcagtaaagacctggactccgaattccctgaaagcaggaaatatttgtttctaatgccccaggagcttgcatggtgccttacacacagtaagcactcattaaatattaagtgagtgaataaaagaatgataatcgaggcgggcgaatcacaaggtcaggagatcgagaccatcctggctaacacggtgaaaccccgtctctactaaaa

SEQ ID NO: 87767 - DNA, 1067 bp, Homo sapiens
ggggaagggaaggagggagggagggaaggaaagggaaggaaagggaagggaagggaagggaagggaggaggggaagggaaggagggagggagggaaggaaagggaacggaaggaaggaaggaagggagagggaaagagggagggaaggaaggaagggagagggaaagagggagggaaggaaggaaagaaggaaggatggagtgcaatctaagctttctattccatatgttcatatttcatttattggccttttgcccattggttcttcttttgtgacttccctattgatatcttctgcccatttttccatttttaaaaacaaggttattgccgacatggaggcccaggttcacaagttgagagaagaattgatcaatgtgaactcacagcggaaacagcagctggtagagcttggtcttcttcgtgaagaggaaaagcaaagggctacaagggaacatgagattgtcgtcaataaactgaaggctgaatcagaaaagatgaaaatagagctgaaaaagactcatgctgctgagacagagatgacactggaaaaggtaagatatttaactagttttttaataggcagttgaaatccatgtttaaaatccattgccaccacccttatatttaatctccaaaaggtagtagacatggcattactctttaaatgtataaactcttcagtcgaggaatttaagtatcttgctcctatgtctaagtaccagtaaaataatctagggaatttcctaacttttcccttggctttcatggaagggattatatggaatatcctattccatagtaattaaatacacgttgtaataaagtgatattataatattgtccaatattattttgattagaaatactggggctgtatccctaaattttcctaaatgggactaagtttcagatcttccctcagttgtctaataagcatttctagattttacagctttttataacagtgtcacataaatgatgacttattttcccaggttgatatttcagtcgagataagaaaagtctttttagaagtatatattattggaataaatgtcaatata

SEQ ID NO: 87768 - DNA, 1109 bp, Homo sapiens
attgtaatgttattagcaaacagactattaaagaacaaaagctggcaacatatagtaattccgaattgggccagtcccacaaaattagcataaatatgtcaatcaatcagaatagttttggacttcctaggaaagtgtccctattcttatctagctctaaaagaatgtgaaataaactattcatttaaccaagtataaaaatatgcctgctatgccgttataatcatgtgtcattaatcagaaaatactgcagaaactctgacaaattaaaaacacaaggatgtgtctgcaagggtttttttagccattaaaaagctgcttcacctctctggcaagctcttttatggcaacttcttactcagtgtactgacatcttcaaaggctctgacatctgtcagcctttgaactaccattaaaaaatattatcccatttccattcttttatgcccatttttttaattatagcccctctttcaagttaggaacatggttggtttaaatgatgctgtcctttcgttttcagccacccagctgcggtttgaataaattgatgtggaaccaaaggcgggactttaaagggaaaaggtttgatggacttggactccgaaccagatgaggttttatgatgaaaagggtttaatcccagcacaggcattgcttctatcagttgagcagtacaaagcaattcatatatataggttcacgtgaaatgatctattttttttaacagcacagatctcttcaggacttgcaaatgtggcattagctaatattcagagagctgatttcctttcatccaccagaagcttatgattatagtacagttctcgaattggaaatgagagctgcaacacagatttaaagctgtgctgtctgatttgtattcaatatacctgtcactgcaggacaggctagtctgggccaagctggttcaatacaaggaaaaacagtttcatcatctgagagtcttagtcagaaatatcaccagctaattaaaacagcagtctcatgactattagtgaggtgtttggttgattggtgtctcttcaaatttgacaagaaagatttgaagatgcagcttctcttttattacatattcttcttgcagt

SEQ ID NO: 87769 - DNA, 1032 bp, Homo sapiens
acgcagagaaggatagcctagtccgagaccatgaacgggaaattgaaaacctggaaaaacagcttcgcgctgccaatatggagcacgaaaatcaaattcaggagttcaagaaacgagatgcacaggtaattatcaataatatttgataaaacgggtatctgtttttaaaaagtcatcagcgtttaatgttttcttattattcttattgatgcacgctgtttgatcatttgcaaaactgacatataaatgtgattttttttttgtttttctcccccccacccccccccccccccgttttgggatgaataaagccttaactacagaaaccacaggtagccagattaaaaatcccatggcgcgctataacttggcccccttttttatgatcttgtctcagttcctttcatgatggatttttttaaggtatctgccccttacccctcccttcagccttagcaaatccctatgaaatatatcagcctcactccttgctttttgttttaatctctgtaggtaatcaagcagctgttttaatatttgcttttccttcctagtgttgctgttttcattagactatatttgattagatcactcagatggtaattgataaaaatgactccagagaagggctatttcccatcaggtctgttgctttttcctgcacacacacatgcctcctagcccacatctctgtagtccctgttggaagccatttggcagaataacccccagctgtggtagcatttgactcctcaaacttgtggatgaaatgtgcactgtcagcatggaaaattatctttataaatttcagatgaaaaaagaaatcttattggatgtgtatctttgtgatacaatacattctgtagagtatatataatcaagggcctttagtgtatcctcttgagattgctgtgaaattgcattaaagaaaaatttaagagcaattgataacaataaaaagataatgttcttttctaataaaaacatattgtatactaggtctaaataccccttttcccattgaaatctaac

SEQ ID NO: 87770 - DNA, 1052 bp, Homo sapiens
agtctggtgattcattgcacgaaacaagatcgatttggagcaggctcctactgttagcttttttgaagatggattctcacgccgaaaataacacaacatattctagataacagcagtttttccccctgaaatccaccaaaactgaagaaaaatccaagtgactgttcttagcagctgtgtggcctggagttcactggggaagctggcttcctgccgtcccctattcatcacctgcttcaaagacagcctggctggctatagtttgcaggccaggtagggtgccattgtgcacagtctgggaggattagtatcaaagctgcggcaaccaggccttggtctcgggctgccattcagtctagcggggagaggctaagactggccaaggtcacagtctccagtgtggagtggactgggaaaggatcctgagaatagaatgctctttatgaaatcatggcgcaagcttgcagcacagcaggtgcccttctggaacacataacatctgtttatgttggtataccgtagctgacaacgagataatagagctttgaaatttatcattttattttttaaaagacaactgtatatacaagaatccagatgcatatttagctccgatcttttatttgtaaatcatgaagaaagctgaccgatttaattgctgctttttacatgtgtatatttaagcaaaaagcaaagcgtactattaaccatttataaccattgctgatcagtaatacccgaattcttggggaggaagtgactagcattcgagataatttttttcaatgttcagacatttgtgtcaacagattgaagaaggatttactgaatatgcccaactattttgaatattaggaggtttgcataaccaccaccccaacaaatgagagtatttcgagggtgaggtaataatgatgtaaaaataaaaattttcaacttggacaaattagagaaaaattaagctgtacatgagttgtcatgacgacaaggatgttctgttgatgaactgtcctcctcattgtccaatcagatagtagagctgaagctggagc

SEQ ID NO: 87771 - DNA, 1022 bp, Homo sapiens
gcacatacccagtattgttatctgtctcatagctcaatgcttttggattatggaacttgaagccttccctcttttattacagggaactccttagccagccttaattaagcagggtccttgatcatggtgcatccagttctcccttgtagcatgtattatgggtccagatgccccacaccccttaacttagaaggcttattaaccatttaatattcattttgtgggttctgtctgcttttatgtcctctacaatgtccataatttaccacctcctggtcatcattaactccgttagacattattgttggtcaaccgaagtatctactagtccaacatgaagaagatgtgctactttgtgtttacctttgagatgtgtccacaagtaaaggacaaatggaaagtccagatgattcttttaacatttatttacatggatggggctaggcaccagtaaaactttttatttacatatctaccttgatgacattctttgtagttatgaataccatcgtcaagatattcccccaacattagggtttctcctctggaccctaccatttatctggagaagacacccttgctagaagatgctgatggtgcggaagcctaggaaaagaccagaaagggctcatgacatccagaagttagccatgtagtgttggacttagcagacaagcctgagctattgcattttaaattgaaaattatcctccttattctctgttcaagcaggagaggtaaaagtgaatgatatttaaaaggctttggcaaccttgagatttgttcattaagtagaatcatgagcaataggccctggcaaaatatcaaactaacaatcatttatgactatttatgtttatgcttgaaatgtgataaccgctatttcctttttttcctgatttttaaaaatgaataaagtgaaatttgaacatgggcatgatcattgatgagtctataagaaacttcaaatgtctctgtttagaaagttactgtgaaagtacattactactagagtacagaac

SEQ ID NO: 87772 - DNA, 1068 bp, Homo sapiens
agcactgagccacctccatggtggtttcctctgtattccggggccgacagtaggagatgctgctatggaactgagctgcctcctttcaacaggaaagttgggttccagaatggcaggcactacatggggcacttggatagatggaaggtagacacgattactctactggatagtaaggctagacaggcccttcaggtgtcttaccctgcagggatctgtggtgataatgagctgtgttctgagagataagatagagagccagtgggaatactacttggcttgtacaacatcaagaaaatgtccaagactgatgagtgaaactgaaacagttttccacttagggtggaaaatcatagtcctctaccaagtttcccgatctgagttggttcgcagacccagaacccgtttgttttaagagagaccacatcccttgtttaagagtcttgtactgccaccagaagtaaatattccccccgaagggagctactggcatttgacatggtcctgcacacaaagaagaaaacaaaaattttacccaaatcttaccttccggaaacgactgctgttaatcttaggtgagcattattccagaaatttctatgagagattgataaatagaaggataagtagatatatagacaaaaacaattttctagaaacaggaccatgctacatttgccacttttaattaaaatattaaattatatgtgaaattatttgaagaaacaagggaaacggaaagatttctctcattttttcttttttatttattttttatagagatagggtcttgatacattgcctaggctgatcttgaactcctgggctcaagtgatcatctcacctcggcctcccaaagtgttgagataacaggggtgagccactgtgcccagtggaaatggaaagatttctaaaatttagaaaaacatttttttaaccacataagagattatttttagaatgttagaaattaaaaatacattgaagttagagtaatttttaaattttgtggttcaattttgagggcattagttaactccttattagagaaaaattaaactgcccata

SEQ ID NO: 87773 - DNA, 1066 bp, Homo sapiens
cacttttgcttaccatttcatccttaagagatttttttgaccccaaataattttaattttaattttttatatttttaattgacaaatcataattgtatatatttatgagatacaatgtgatgttttgatacatatatcaaaatgcacacatgcacacaatgtagatgattaaaacaagctaattaacatagccataacctcatttactggttttttgtggtgactatttgaaatatactctcttaccaattttgaaatatatattattaactatagtcgctatgctctgcagttgatcactagaaagtattcttcttgtctaagtgaaactttgtaccctttgaacagtatctcccaattcccttttcctactctcgcccagcctttcctaactaccattgtactctctacttctgagttcaacttttttagattctacctgtaagtgagatcatgccattttgtctttctgtgcttggcttatttaacttaacacaatgtcctccaggtttatccatgttatcacaaatgacagaatttccttatttttaaaggctgaatagtattccaagatatatacatgccacattttctttatccctttatccttcaatggatacataggttgattccatatcttgtctattgtgaataatgctgcaatgaacatgggagtgtatatatctctttgaaattttgatttcaattcctttgatttatgctgagtagtgggactgctggatgaaaaaatggtagttctatttttagttttttgaggaaattctatacattttctgtagtggttatactaatttacatcctcaccagcagtgtacaagggttcccttttctccacatcctcagcagcacttgttcactttcatctttttgataaaaactgttctaacagttgtgaagtgatatctcattgtagtttgaactggcatttccctaattagtgatgttgagcattttgttccatcagcttgtggggcatttttatgtcttattttgagaaatatctggttaggtcctttgcctgttttttaatcagtttatttttctt

SEQ ID NO: 87774 - DNA, 1053 bp, Homo sapiens
gcgggcgtgcggtctttggttcactgtcctcatttttgttagttggcccctgtaggcatttgaatttggactcctgctccacagttacagctacagtcatttatttttaaattgaggtaaaatttacataacataaaattgacattttagagtaagcaattcagtgacatttagtacattcacgttgttgtgcaatgactacctctatttagttccagatcactttcatcatcacaaataaaatcctatacttattaggcagtggattcccattccccgccttctgtcagatcctcctaaccaccattctgctttctgtctctagggatttatctttcctggatatgtcatagaaatggaatcatacaatatgtgaccttttgtgtccggagctactttcacttagtgtaatgttttctaggttcatctacagtgcagcaaatattgtcacttcattccttttgatggctgaattatattccattgtgtgtatataccatagttagtttacctactcaactattgatggccatttgggttgttgctaccttttggctattgtgaatagtgctgctatgaatatttatgtataattactcgcttgagtacctattttcaattatttgtgtatatacccaggagtggaattgctgggacagcttactgtttgtatacttggctttcagtattggtctccaaaataatactctggcagttggcacacacatttcccttttaccctaattggaactgcagctatcgcccacaaaaggagaaaagccattgaaaattatttaaagggtttccaggcacttgataaaaatatgtttttctagtgggctagtctgttcaagaattcaaaccatcagttgaaatgttgtctgataatcatagaattataactaagagaattgtgtgttcttaaatggtgtttctatctagttaggataagcagttaagttgggcaagttgcccttctctacttcggggatattttgcctgtatgtcttatgccagctatcataaagcacatttttctctgctaatcagtac

SEQ ID NO: 87775 - DNA, 1017 bp, Homo sapiens
tgttgtcatgaacggttctttgatttttcacaccattgaatatatgctttattaatatagtagaccatagacaacttcttctgaagcttttatcccttaaaaaattattcctggcaccatttgttcatggagtgtatagtaaaaccttagccatcacttttagactgacaagtggtcctcctctacctctcctgtcatccaccactagttagatgtaaaagtgatactacttctattcttgtgactccaggccaaaatattgtttctggtttcattaatgttcttcttttaaactcttgccttcttgtattttgttaatttatagggtgttttctttgtaccaatccttccaccagttctttgcttcctcttacaattattgcatcttcctccattttgaagtctaattcagggccctcttggtatctcttaactacattggtcctttcaacacttagacatgagtaagtatccatcttaaaacttttttcttaatctcactccaaccccttcaactgcggcttctctctctttctttgcttttatattcaggtttctttaaggagttattttactcattgcctcagatttctcatcatctaccttcaagccaatgcagtttgggttattccctgatgttaccaaaacttctcctcctagggataccagtgacctccaatctggattttgttcagtctttcttcctcaggacattttcttcttcattttctgtggcacacattcttttggttttcgtcatccctcttggtcttttttgcatgttcatcctactcttgtcttactctagattatttcatgagacaatccagttcgaaagtatagcttcagtaactatcattctgtgccatccttacagcaatgctatacaaatgtgtatcttggccttgggctatttgcttaattttctttatggcacttattaatatatgatattttaatatttttatgtatgttccaattttaaaattctactttaaaatttgtgttaggcagagt

SEQ ID NO: 87776 - DNA, 1047 bp, Homo sapiens
aaaagtctttgccaaaatactgaattttgcttggagttaaaagaagatattttagcatgttaaataaaattcttctgtagattatttatccatcttccatatagttaataccttcattttggctaaatgtctggatgatcttaacagtacagtacccagcatagtagtaataatgtagtctgaaagtaaaagagtaaattattgtgaggtctaacttcaaagtaaacagcacaagttggctgttttcccaaaggagaatattgtgactgctgctgcttttgaatctaagaatagcgttagatctggttggcccagagacagttccattttgctgcaagacagctttgtgatgtagaaatttgccttgactattaacaaaattttttctttaaaaatatgcaaagaaggaaaatctcagttttagaatgtagtgttatttatccatgtagttattatttctttcattcattgaataagggtttatttcttctgtgcatgttgaatatatagtagagaggctatcagagaaaactgggatatataaatatgaatttatatacatataaaaacatgatacatgctgtataaagcaaaatactttaaaaacataataaggtaataatcagtaagatggactggtaatgggaggcatcttagagaaggaaaagtctttaactgagttgtgaaggaaaagtggagaataaattatcctgggattttggtcccatcttctcctgtctctgtagagatgctggtctctactagttttgtctctttcttttctatttccaagctgtctttcttcaccttgttacatgaccagatatactccttccatagaatacctttccttttctcctaatgacttctaagtgtcaagttctttgattctctcagattatagaattttgcgaccatgtagggatagtcttgtgaattgggatgatatataatgtgtttgagatgttaatggaaaagttgagtggctttattctgacacagtaattgtatcaaagacaaaggctgggaatttttctatgagaggat

SEQ ID NO: 87777 - DNA, 1102 bp, Homo sapiens
tttcatagagtaactatatgcgttattattgttttgaaatcttggttctgctttcattttataattaaaattttgaagttttctgtaaagctattatttttatgtcagtgttacatttccataacattaaatattatgtagcatttaatttctatttttactttaaaagattatatttttatgtcagcattacattttcataatatttaatactatgctgcatttaatttatatttttactttaaaagattattttttctagtatcttttaaaaacatttttcattcaaatttctagataattttaattctgattggactttcaggggtacaaaaggcatattttttcaatcagaaagtataatatggtacaaaaatcaatattctgctttttattcttcttaaaatccttgtaggcatctagtatgattgaagaattagagcagaatgtctgtcaattaaaacagcagttacaggaatcagaacttcaaagaaagcaacaactaagggtgagtcttgtatttctacacagaagaacaatggtcaaacacagttttcttgattcagatgtatcattgagagtcaattaaaaaaataaaactcagaaatgcaggtcatcttttctgattcttttatcgcattgtataattttacattttatttatcttaatagagattgatgctttgagatgtagagaataaagtacaataatttgaattggaatgatctcttttgagattagttttaaaaataaattttatttaaatatatcattattttagaataatttccttcttttaaattacctgccaatcttcataatttctctctttctttccctctttctttctctgcctctctctctccctctgtctctctcttttgcaccttttagatctcttttctctcgtgatcaaaaaataccaaggactgttacatgatgtaacttcaaatttatcatttccatatttattgacttggtcatttttgaagtaatctcttaatcctaagggtcagaaagattttcttatactgtaaagcaagtgcttttgagaatagtaatatcttcaggtgactaagattttatgcctcgtaatacaaa

SEQ ID NO: 87778 - DNA, 1060 bp, Homo sapiens
cgtctcagaaaaaaaaaaaaaaaagattttaaaatattaagatagttgacttggggctagattaagtatgaccttgaattttagatttagaagcttgaactttgtcctgtagatgctggatgtaaagagccagggaaggattttgagatgtgagttttaggacctcatgttttgggaggagtagcctggtaatggagggtgtattgaacagagtaggccaattccaagtctgttaggcagaggcagaatggagtgaaggagagagaattctacttattagaaaacataggctgtaattccagctctgttaccagtgtccgatgtatgatagcaagttgtctctgggtcttggtttactcattataaaatggtgagatcagaataaataatatataaagtccctgccaactcagagatgttctgcttctgtgctgctgtaattttgcatgttaaggtgagaaggatttctgaatgatggcgctgggagtagttagaatggaaccgaagaaaagaagaagtttttaagagtgaatcatgatttagtgaatgagaagatctaggcaatgaataagagaaaaggagaagggaaggttttcatttaggattttctgtatggaacttactggctctcccccagatcaaacctgagtatatctgagtgaatgataatggctttgacaaattaggacagccattacatagataagttaaccaattaaataaatatttgtaggttcatttccacccttaaatgttggtaaaagcaattataaattcgtttaggttttttctccaaatattaccagtgtctagaaaaatattttaaatttatttccaggtcttcttctttaccctgattcaaaataggtaattcaaacatgcctaaggtttaaaaatgatgaggttttaaaaataatgtttctaaaggcattttgaattgcaatcagatcttagtttaattttggaagtgtaaagtaaaatatattgtagatggtaaagacccacattaggttaacttggattcatctcctctccttatttgttgtgtagttgagatata

SEQ ID NO: 87779 - DNA, 1106 bp, Homo sapiens
cttttttatctccctttatcatgaacaaccttccttcaaaggtgcttctctctacctcagaagtgattccttcctagaactgcctttctggttcttcatagtttccaagccccttgttttgtgcccatctctggcactctgagccattaagtttttttgtgtggcccacttaaggtaggccacttttctttgacaggtcagtatttgatgatatttagttccaccactactaggaccctgaggtacttccttttttccccatgctaccactctggctcaggatctaattctgctgatttggtatctttatttggccacctacatgttaatccagggatttgtattccctttctcctttttatgatgtagtcatggatgatgggcatttttatttggtctctttatcaatctgtatgtgtctttggaggatggggagagacatttaaattcatacagttgccattactttataggatctggcgtccacacgaaagaaaattgttttgtgtatttcctttaacctagatgctaaaataattatactttatatcctgtctattgctatattccttttaagttttacttgattggattctattataaatgttatgacttctacattttttgattaattgattcttcattcaccgttatctttattgtcaaattgggtatggattgttcattttcaagagttattaaccgtaataaatcgtttggggaactttttgaaaacacaatgggattttggagaactagaatccaataatttatatttgaaatgtttatcacttgatcctcatagtacactccaggatgttaaaagaaaaaccttaaagaaattaaattgaacagagtttagtaggcaaagaatgattcatggatcaggcagcccctgaatcataataggttcagagaggctgcagcactactggatgattgaagatttatggacagaagaaggatagtgatgtacacaaaatggaagcgaggtacagaaacagcaggattggttacagctctgcgtttgccttatttgaatctggtttgaacgattgattgcctttaattgccaaaactcagtgagtggcacaagagtaagctgt

SEQ ID NO: 87780 - DNA, 1018 bp, Homo sapiens
ccacagtactaaaattgctgagaaacaaagagaaatcttttttttttttttgagacgaagtgtcgctcatgttgcccaggctagagtgcaatggcacgatctcagcttaccgcaacttctgcctcccaggttcaagcgattctcctgcctcagcctcccaagtagctgggattacaggcatgtgccaccacgcctaactttttgtatttttagtagagacggggtttctccatgttggtcagactggtctcgaactcccaacctcaggcgatccgcccgcctcggcctcccaaagtgctgggattacaggcatgagccactgcacccggccaacaaagagaaaatcttgaaagcaccaagagagaaaagaaagttctaaattatgaatctaaacccccatctaaagaaactggcgaaagaacaagttaaacccaaagtaagcagatgaaggaaataataaagattaaagtagaaatcaatgaaattgaacacaagcaataatgaaaatcagtgaaaccaaaagctggatttttaagtgatgaatggaatcaatgaacttttagccagactgacaaagaatgaaaagaatagatttgctaatatcaagaatgaaagagaagatatcattacagacactatagatactcaaagtataataagagattactgcaagcaactctatgggcatacatttgacaatgtagatgaaagggaaaaagtccttgagcaacacaaactaccaaaaattcacttaagatgaaatagataacctgcatagtcctatagctattaaataaatataatttatattttaaaacctcccaacaggctgggcgcagtggctcacacctataatcctagcactttgggaggccaaggtgggctgatgacctgaggccaggagttcgagaccagcctggccaacatggtaaaacctcgtctctactaaaaatacaaaaattagctgggtgtggtggcatgtgcctgtagtcctagctacatgggaggccgaagcagg

SEQ ID NO: 87781 - DNA, 1043 bp, Homo sapiens
cctcttcttcatgggtctttattgtaattttacttaaggttacagagaagggaaatgtgttcattaatggggtactttgtggtatgattagttgggacaattctcattaagtaagcatctaatttcagctgtcttatctagttttattttaggcaatttcatgctttttttttcatgtaggttagaaacctgcccattttcttattttttcttttttttagagacagggtcttgctctgtcaccaaggctaaagtgcagtggcatgatcatagtgctcactgcagccttgaactcatgggttcaagtgatcgtcttgcctcagcctcttgagtagctggtggtgcacaccaccatgcctgactcctgtccatttcatactacgcaatggtctgggagagaaactgagctgaaaattctgatattttaggcttctcatttggctgtagttttccacaaatgagtgaaagtgtcagattttgagactaggacaaagttacccaaatgaagaagagttatgagagtggtttacataaaaaattaatactttgataagacaaattctctttgtctttctctagagtttaaaaatatctggaagtatctactcaaaatggtagctgataattccacatggtaaaatatcagcacttattttcttaacattttaagtgtttttttaaatagtaaatatttattattcataaaaaacaaacaaagccgtaacagtatttatagcattttccccaaagcttgcttttggggagtgtaactatattcagagttttatttgagaagttgacatttatttcttttaaaagtgaatgtaaacttctggccatgagtaaatctattacagccaggttctcccacaaccaagaattctggacaaaatacaaaaagcaaaccaactggggactctgaaaagtcaataataacaggccgattgagagggaagttggaatatgaagaatcactgatatagtggcaggaagtttcctggttttctgtttgtgttttttttcttccttaactcccagctttg

SEQ ID NO: 87782 - DNA, 1050 bp, Homo sapiens
gttaatttttgtgctctggactacggatacattttttatattactgatgttactgtcaacaccttcattctgatgccttagatgttgtagaatttgaattttctagcttttgttaaaaaatcaaatttttcccaaatatattctttattttcccagaaatcaaattcccaaatgtattctttattttcccaggagtatgttagtattttttctaggaatacataattcaaatagagatttatttattaaaaactagcaatgatatttttctcttgtattttttcttaatatttaaacttttcaacatttagtttttatgacgctttcttgctttctcaatatattttttacctatttcgtgtctgactctctaagtcacaagctgaatgtttgtgctgtgggtattcgctatttgtaagttcatttgagtgcttgcatggatggaggctttggaacattctccctttagtgactcgtggatcattgtgaaacactctatgtgtacccatttgaaaaaaaactttaaaaattatgtcttatttggtttttcaagttttagattctatttattttgcgattaatgtaatatcttaagatctatgtcaggaatattggaagtttttgatgttgactaggaattatttgtagcttcctttgtaaagtgctacagttttaaggtagtaggaaaaagtcataagtatgttcattctggtttctagaatgtgcttgtgaattttctttgataagtgaggcatataatattaacattcaatgaaaatcacaatcatgaaacaagttaagcatcctgtctctctttgaatttaaatccctttatctaccttataggtatagaaatggatgggaaaaattagcttgctgacacaattgaaatcttccattgaatgaagcttttaaatttagcactaaaaatcatggtcattattgactgatggtttaaaagaaaaatggccatacatagaaagaccaacttttatcctaagaaaattatgttatccttactcttgtgtggtaattgaattgataatattt

SEQ ID NO: 87783 - DNA, 1027 bp, Homo sapiens
atgaaagttctattggatatgagtagaaatgcagacaaggtcttgattatcttttaggtctttttttttcttatactttttctttctgtcttttttttttttttttttttgagacagaatcttgctgtgtcgcacaggctggagtgcagtggtgctattgtggctcactgcaacctctgcctcctgggttcaagcaatcctcctgcctcagcctcccaagtagctgggattacaggtgcgtgccaccatgcctggctaatttttgtatttttagtagagacgggggtttcaccatgttggtcaggctggtctcgaactcccgaccctcaggtgatctgcccaccttggcctcccagagtgctgggattacaagtgtgggccaccgcgcctggccgttttaggtctttatagtggactccatgttagtatgattgctgggaggagggaaaggtaaaaaggaaaaacttttgagagagtaaaatgtgctaagtgactgattgaaaggctgaactgaagggcacctaaaggcttggttctgagaaacggaaatgttggccttttgtcagttaattgactgtcagatgagggcggatccattttaaaggttttaatttaaatagtggagtttgaaaactggtaaggttaaatgggatagttcaaggcctagagcttcctgagagtcaagagctggaggtatatgttggagtcacactgtttgaggaggcagctgcgcccggagactagaacagctctaatctttggagagctcagagagtcaggaggtctgggtggagagcagagtaagggaggatgtctggttcatggaatgggcacagttagaaggttgggaaatggataggaaattaaagtaatgtgggcctcctattaattttgggagttttctagagaaggagagaagtagaattgatgagaggaggataataaatcaaaagaaaaacattttcatgttttaaggtgcaggggaagttgccattggaggcaagtcctgttaccagtgtgggagaag

SEQ ID NO: 87784 - DNA, 1112 bp, Homo sapiens
acaatacactttaaagctactgtggtataccacaattaaaactttttgtaaaagaacttaaagagaagagcctggattaatttttaatttttttttttttgaaatttagttgctgtgtgaatatattgttaaggcagctcatagccctcagcagtcattacttagaactgagaaccctagttcagttgtaacctaatcctttcctctgagggcaatacagcattaccagacaagcacacaaaactctcattgcgctgaatgacatgtattttgttctttttttctccctcccgtcccacttctttctcttctttttctccctcccttccccctctttcccttcttttcatcccttcctttcttccttttttccttttttacttccttcctctttatttccctttatctcttctatcttttcctcttttatctcttccatcttttccttttatttcttccatctttccttcctctcctcttcctttttcccttttgtatttcaggaagtttattcgaaaaaatctcctgtttctttggatgatagtgacattgaagctcgccttaatagttggaatcttggggtaaaaaaaagtatttgctttatgtatatatagatgtgtcaaaatcatattgtatgtgtataatatctgaactaatttgattttattcagtgaacgttggatgttagacatatgttactgtgtggccttgagaagggcttaagtataggaaataaataacattctgaacaaacataaaatagtccctgtccccaacaagctaactttgttatgtgtgaaataagagatatgcacataaaatagttaaataataataaataataattaaagatagtatatggtagaataccaagatgagttatgtgagtcgcccgaggtggaggggagggaagggagaacttgaagcaacacagccatttgggttaaaaacactcaaggggaccccatggatgagcagctcttacggaaaacagtttatagaggctgagggtcatgaaagtatttggagaggtagagaggtgggaattggaggcagaaataggcacgaagaaagatgtagtggggtaagtgagctgtcgtgattgggtgttt

SEQ ID NO: 87785 - DNA, 1104 bp, Homo sapiens
tctttctctaactttagtaatatgtaaattggcctgcttgatagtgtctcataagtttcttatgttttcttcagtcttttaaaaacatttttgctcttgtggaatgtataatttcaaatgtcctgtctttgagtttactgattctttcttgtacttgatcaaggctgctgttgagcccctttagttaagtttttagttcagttattgtattcttcagccctcaaatttttctttttaaaaatattttgtttgttaaaatactcattttgtttatgcataatttatcctaagcttattgaatattttgattatggttgtttttaattcttaccagctaatccatttaccttcatttctttagggttggtttctggagatttattttgttcctttctttgggccatttttcattttccttgaccctttgtgttaatgtctgcatatttgaaaaacagccgcttctcccagtctttatggattggctttgtacaggggcagaccttcaagaatcggcctgagtagagattctggggtcctcataaactttttctgtggatatgtcttctctggacttctgtgtgtaaatttctaaatagtgggattttctggtttctgtttttaggagatcataatctcttgttccttcttattctgtgtcttgtaccatgggccttctggagctagtagcacactggctcaatccttttttggttattacttgcttttttagtttcagctgcccctaggcacttagtttatgctgcgtcccaccagtgcttcaagacagatgagacagaaacaagttccttgggcagtcccccaagagtctgaatgttggatatatgctttagttttctctttccctccccagggagaagctgtggaccatgagtttttctaattgtgctgagccaggggtaggagctctggccgtgagtgtttactagtccaaaccaccacctttgttctcagtggtccccaggcatttagagaataccagtcctgtgagtacttgcagaatccggtcccttaggcagccccttccaaaagccagaatgttggacagatgcttcagctttttcgttccccagggagaagttggga

SEQ ID NO: 87786 - DNA, 1751 bp, Homo sapiens
caaaagtaataggttgtattcttgctttacaattctgtgaaaaatgttttgaagcttcttgttaatggcttgtagtaattttatgtcttttcagtgaagtatacgtggtctggtagcttatcaccaaagtgcagtgaggttctgggatagggaaagatgtaaaaaaatgatttaatagcacttattatttttactgaaaactttgattaaaagttagggtagggtgaagaggagtaatgttaaataaaccctgacctttaaacactgctttacaatggaagaaacacgttgcttctgcttatttgagaggaatttattgatgaaaaagaaggcatttaattaggtgccattttattaggagcctacaccagattgcttaggatttctaggagagtgcaaataattattattaactacctactatttttaccatatcagatttaggctaattttatataaattatatttatcttttaactcatgttgggtcatctaaataatacatgtgttcatacctgtaagaaagaacttggagaataattatcctattttaaataattatagaggactatagtttttacatctttgctttaatgagattttgccatgggttatttgatgctagattttagtttggaatgaagattctaattatggtcctgcccttatggaaaatgtgacttgctttataatgatcctctttatgatatggttttccaggaatgcattgtggcaaaaagctgggattctgtatgtcttaccccaatatagctagcatttcatttgtgtgtgcagtttaataacatggccagcagatggtgatcaagtataatgaaaacccacttgtggttgaagaagttaatctatgtgagcaaacatttttcactttaaaaatattgatttaattttttagtctgggcatgcaaaagaatctttttactttgttaaactccacttttatatgtaaatgatactatataacattataaattgctcctcctgaaattgttggataatttagcaaggagccaatcaatacctttccttcttagtaaaaccttcttaaatattacctgccaaaagtacattcattttatttgtgaataaccctgatgtttgggcagatatgtgttctacagcagtactgttcaatagaactttctgatggtaatgttctataggcggcactgtccaatacagtcgccaccagtaaacgtgactattgaacacttgaaatgtggctggtgtgattgaaaaactgaatttctaattttaattaacttaaatagccacatgtgattaggggctactgtgttgggcagaacagtaccagatccgaatcttctgcttggccattgcaaaacctgactgaccagatggagagctggtggcctgttctctgtctcggtggggatgtggggtaggaatggggactagggcttgggtgctggtgcatagaaactggctctgccacatgggagacctttcttctgtgcttacttgcatttcacgggcagctcccttttttggtgatgatcacccatgatcaacatctagttgctcttggtcaatttctgctgtcagaggagctcctactaacaaaaaagaaactgtttataaataaatatacacacacacacacacacacacacacacacacacatatatgtgtgtatatatatatatattttttttgagatggagtttcactttgttgcccaggctggagtgcaatggcacgatctcggctc

SEQ ID NO: 87787 - DNA, 1002 bp, Homo sapiens
tttggttatttctaggttgagctgaaagaaagcagtttgcctttgttcacattccacttctgacacttggcaaccatctgtcctcaggcaagttacttaatttctctaaaccccagtttcatcactcgtaaatggagatagtggtagtactaacttcggggttagtactaccactatctccatttgcaaatggagttgtaaggacaaagtgaaataagacgtgtagagcccttgacagagggcctgttaagtgttagctgcggctaccaccatcatcactggtatggtgatcattattgtaatagttcatcagggccttgcttgttagattgtttgaccatgcttttgcttccctaattactaatcctcccaaagggtattatcttaaagtctgttggtcattaattattttcagttactaaaagtcattttgtattccctgagaaaaataaattatgactctgcagaaaggttatgattgtaagtatgaatcctgcacaatatcaaaataaagaatggtaattctattttaaaagaggctttataggaatctttaaacaatgtaataggcctctttttcaaggatagaaggaacacacagtggctggcctcattgtttacattttttcacgccatatatttgaagctgcctaagtaactgtgtgtttttttttttttttttttgagatggagtcttgctctgtcacccaggctggagtgcagtggcacgatctcggctcactgcaacctctgcctcccgggttcaagcgattcttctgcctcagcctcctgagtagctgggattacaggcgtgtgccaccacgcctggctaatttttttatttttatttttagtagacacgaggtttcatcgtgctggccaggctggtctcgaactcctgacctcaggtgatccccctccctcggcctcccaaagtgctgggattacaggtgtgagccaccgtgctcggctggtaactaatattttgattttagttcacat

SEQ ID NO: 87788 - DNA, 1266 bp, Homo sapiens
aatttaatctgtacaaaatccctttgaaacgggtatattgtgacagaggaaatggcctaaaaggatttttttttctttttaacatttcagaaaacgttgagggaagcataaattttagaaaatatagagggaagcttagatgtagtttatagcgattcccttcacacactgtgaggaatgacaatgaaggagctggaaaggacatgcttaaaatatcctctgtcaaatgtcagaatcactaaggtcaattagggctgccaaaacaaaatatctcagggtatcttatgtttcttttaatttaatagttttaacttgattatttttacaattttaatttgatttacattagttaacagatatttgtagtttttacatacatgaagacatttaaaaataaaactaacatttactttagctaaagccaaggaaactaatcttaaggtgaaatatgtatcatgtgtgacatcagatcacatttggtggtgaatcgactattgatggttctgtcttatttcttttctaaatttcctcctttactctgagtgatcatagtatgctaatgaaaaagttagtatctgctaatcttgacttaatatatctaatcagttctgcaagaaattgttttaaaaagtttaagaggcttataatatttgacacatgtatgtttttatggtgaataatttattgttacttagaactgaagtttaatgctgcctcataaattttacagccacttcaacttgtcctttgaaaaacctctttaatcttaaaagatttttcccccttagtgtttcttttttgatcactttataaaatcctgctttacttagacctttttgtatgtgaagtatttctaatggcattttagatgatgctgtttgtgtcctagcctttttatattattaaagatgcagagtccttttgaagcctttttgttaggactctctattcagtagagatggcacctttcctttacttttattcttcctgtaggatatggtatatagtcttgttccaaacttgttagaagtatggtgaggtcatactccatctggcttattctcacgctttattttttccaccaagtatacattatatactagtgtacttagcatttcacaccaaacagcttcaacacttagctagtagtcctgtcctggttctcttctttgctttcatttttcatatttcttggtttaagataatcttattgcccatattttctataagaaaaactactgttccacattgcattgctattatata

SEQ ID NO: 87789 - DNA, 1049 bp, Homo sapiens
tactcacaataattaaaaattaaagttatttaatgataatctagagattttatttttgagaaaatatttctttgcatttgtctttctcatttaccaattacctaataaagtgaaattgtagaccaggagttagcagacaatggcccatgggccaactcctgcccacagtctttttttgccaggttttattggaacatagtcatgccatttgtttacttatggtctctgagtgctttcatgctacagtggcagagtagttatgccagagatcatatggcctgtgaagcctaaagtatatactctctggcctttaacagaaaaggtttgttggtccttcttttagactaaagcaggtgctattataggtctttgtaattgaatgtttcattttataaaaaataaaatttctaatagttcttctgtatttatagaacggcagaggtgtgctctttggattagaaagctgtgcgaaccttcaggaacaggtgcaggaataatggggaggaagaatcggaacctgtatgcaaaattgttattgcatatgcttaaacgaggtgcgcttgaaggcccttttacacaccgacctgaacccgggacactaaaaattctaccttcatacatggtaggtatcaatgaacaaaaggtatatattagtttcatttaaaaaaaagcgtcaagttatcatccctttggggaatggtaatactattaggttgtatgtgctagataatatattaaaattgttttttttcttcctgattcaatttttttccacctttaataaaatacatgtattgcttataaggggagtatccttattgatttagttatgcctcagtattcaacagtatttctaaaaaactgaaaacgaaattttttatattgagctttactttttgctaattttcactggattgtaatggtaatttttacgtaattcagtaaattctagtttttaaactctttcatatatattatttaaacgtttatgagaggttggagtgcatgatttgtaaaagttcctttttactctaataaaatgacagtaa

SEQ ID NO: 87790 - DNA, 1266 bp, Homo sapiens
acacagatgtgaacagtttacactgagaacagagcaacagccagtctagggcaagggggggccagcttcactcaggtgacatttgagctgcatttacctgactccaggtggagggaatagcctatgaaaagggggtgggattagataagggctcgggggtgggggggggtttgaccatggtgaggagttcattgtggcaagagggaagtgggcatttgtgggttggtgtagttaggcaaagtgtgtgtgtgtgtgtgtgtgtgtgtgtgtgtgtgtgtgtttgtgtgtgtggtgtgagagacaggcctaaatgcaaaggtacttgtatgcctaactttgggtttggatagtattctgttttaggcagtcacgagagatttttaaacaggaagctataggcttagctttgtcattaggaaactcattctggagcaggtgaggaaaatggactcaagtagagaaaactgacagtagggagacagatgatgaggctgccgcagtagttcaaataagtggtaggcaggcctctatctgagatcgtggcagtgagaatagggaagcaggcagattttgagatatttctcagcatttattgatgtattggtttatgggggttcagaggatgggaacattgaaacttctagcttgggagatgaagtagatgatgatgtcatcaagcagagtacatcatagatttatggagaaaaacatcaaggattgttttcttggacatataaatctagataataaacaggacattagtgaataggtccaggagctattgtaaatgagtctggagttgcaaagagaggctggagtttgaaataaaatttaagggtgaatggcatgaaacgaatacttgaagcgatggtactgaatacaatcactatgcgagtgtgaaaagtcagatcaaaaggagactaaggaaagagcactggagagtccatattgactggagaagccagagccattgagagaccgagaaggaatgatctgaggcagtaggggagccagcagtgaatggaaccactgaagtcaaagaagagtttcttaggagcagggagttgtcagaagtggaagatgctgtggagatgtcaaataggatgcaaactgaagacagccctttggatttggcaattagtggatcactggtgaactttgaaagatttttgctaccatgatggagatagaagaggtaatatacagggggtgagatctggatagaagttgatgaagtggagaaagtaagtggatttggcgaatgga

SEQ ID NO: 87791 - DNA, 1036 bp, Homo sapiens
gtgaattgccttactctacctaatatttgaaactctggatttacaaaccagacaaattagagaagtgactatgtgctttctatatagttctttgctttggtgaagaatttaacctcagatctctttaaataatgaattaccctagtgcgtttacaaattacagttcacagagaccttttccaatagtatacatttatttgtaacatgctgtctgcttgttatattttgtttactgtgtctcatctgtatttgacttctagtaggcatatgctagtccattgtattttattgtttgttgtaacttaagaaggatatgttacctcagggtgatgcttttaatcccacaaatatagttacccagcattttctgttttggctcctaccgcaaaattaatctttctattaacatctgactatcgtagagtgaagttttcttttaatgctctctaattttgttttttttttcctcggttttgtttgatagaacatcattcttctgcaggagaataactcattctcattcatacctttggcaacacactctctggaaatgacagctggagtttgaaactgctttttgtattcctcatacatcagattatttttacccgatgaggcagtgctttctgtccactagtatgtagtatgttgctttggttagtaggtaaaatatctgcagcaagcatagtttttctttttttaactagaggggtgtgtatgctcccagtgactcacatattcatgcagtaagtaatatagctttagatccaaaatatttatcttcattttacttagtaaatggtgagtaggtatttgaagactaaagaaataagtgagttttagtccttaaaactgggtttgtaatttatgccatttagagaatggcatcttacaagcatgtgaagtactaaagttatttctactttcatttatgttgtatcttggggaagggaagggcgtttctctggagagacttattggcttattctcatgttcccttcatggactctgtgccattcttctttatattgcaata

SEQ ID NO: 87792 - DNA, 1033 bp, Homo sapiens
cagtttcccagaaagtgcttgtttcaattctttcctcaaccccgtttgcccagatgatatctgtttcacctgttaagtcttagtctaaggtttagctctggtctttcccaattgtcctattctacatgttcttcctatcgtaggaccttttttttttttttttttttgtgagacagagtgtcactctgtcacccaggctggagtgtgcagtggcacagtctcacttcactgcaacctttgcctcctgggctcaagaaattctcatgccttagcctcctgagtagccgggattacaggcacataccatgacacccagctgatttttgtatttttagtagagacggggtgtcgccatgttggtcaggctagtctcgaactcctgacctcaagtgatctgcctgcctcggcatcccaaagtgctgggattacaggcgtgagctcccgcgccccacccttcctatcataggaccttcacactgtatcacctctctacttctgtttcctctgccagttttgagtgcgaggactgagtcttatttctttttgtgtctccagtgtgtaatgtggtgcctgacactcagtagatactatgtaaatatttgttgggtgtgtgattatataaatattaagagatgtgatacaagcattcataaccagaaagatcacagtgacttctgcctggctgccttttctatatttttttaaagcaagtttataatccaaagttgtgccaactaagatcttaggatcattaaagaaaaagtacttttaaagctaagcatacttattcaaaagagggagcagaaaattctacctttatgtatataataagttaacatatgtaatggctaaacctaacacattaacactgcagaaataaaccacttaatgtgtcttctttctatctttagaatattatccaagcatcaagaataaatcttattgcacaaataaaacaagagtgtatcatgggctatagcaggagggggaaaatgtcttgggtatagggtgagaaagtaaaaccagcttttag

SEQ ID NO: 87793 - DNA, 1048 bp, Homo sapiens
atatattacctaaaatacacacatacaaataaattactcattagttaatctacaaatgtacatatttttagtagctccctaaacaagatttaaagcttgactaaatgtagtcatggagcttattatttggtagttttgcattctgtagtttatgtaactctatccttaaaattgaaattatttctgagtggtacaagccaaatacagaagtcaaagctttatttttgatagtttcagtgttgttgatttgaggttctgaccttggaaataaagatacagaaaataaacacacaaaatatacaaaataacaatggacatttatgtatgcttttttcaatgtttattttctagctaaatccaagcacaacctaaaagtcttataaatattccatggaaaattttccttcctatgctaggtttctgagttgctttaaaaattagtctgaaacaatggttactttttttctccttggtaaatttccctgggggagtctcttggacattctttattgccctgagtctttgaaccatattcagaatgagaaactgaagacagttggtctgaagatactcggaggatggacagaaatgaccacagctgatttgatatgtatgaataattttgaaaaattttgatagaactcaagtgccaaggacagtttccatgtcgccttctttattgttcctttgtgcctgctatatggatgttattgtcttttttgaataatggcctcccttttcaaataatttagctcactttttaaaaattttttttagacagccttgctctgtcgtctatgctggagtgcaatggcatgatctctgctcactacaacctctgcctcctgggttcaagcgattctcctgcgtcagcctcccaagtagctgggattacaggcatgcaccactgcacttggctaatttttgtatttttagtagagacagggttttgccatcttggccaggctgatctcgaactcctgacctcgggtgatccacccgcctcagcctcccaaagtgctgggattacagggtgttagctaacttg

SEQ ID NO: 87794 - DNA, 1052 bp, Homo sapiens
aggccaggcgtggtggctcacgcctgtaatctcagcactttgggaggcagaggcgggcagatcatgaggtcaggagagaccatcctggctaacatggtgaaaccccgtctctactaaaaaatacaaaaaattagctgagtgtggtggtgggcgcctgtagtcccagctacttgggaggctgaggcaggagaatggcgtgaacccaggaggcggagcttgcagtgaggtgagatcgagccactgcactccagcctggatgacagagtgaaactctgtctcaaaaaaaaaaaaaaaaaaaaattgctgggtgtggtggtgtgtgcctgtaattcaagctactggggagactgaggcacgagaatcactggaacccgggaggtggaggttgcagtgagccgagatcgcgcccctgtactccagcctgggcgacacagtgagactgtctcaaaaataaaataaaatttctggatgtttctatcgtcatgtgctcccgtaaccgccagctatctgacatcaactctgtaaacttcatgtcctgtgtctccttcgtccacatgacttacatttttttatttcaattcatcttttctgctctcatctctatttctcatctttttgaaatttgtagtcatcagatagcttttatttgagtattaatatgacaagtttagaggagaattatttcacagaatgaggtctgaaattttaggtgactattcaacagattttttttccctaagcattcatcgtcatatctgccagccacggtgcctgatgctggagatacaagtgagcaaagctgagactacctctgctggaatccctctagtgatggacccagccactaatctgaaaatcatgtggacaagtaacaaaagactgcatatggagttaccaaggaaagcactacgggattttggcagtgtgtaacaggggacctaacttagtctgaaggatcaggaacgtctctcctgagaagataacatttttccctctgttgcccaggtaagagtcagtggtgattgtagctcactgcaatctcaatctcctgg

SEQ ID NO: 87795 - DNA, 1031 bp, Homo sapiens
caacatggggaaaccctgtctctactaaaaatacgaaaattagccaggcatggtggcacgtgcctgtaatcccagctacttggcaggatgaggcaggagaatcttttgaatctgggaggcggaggttgcaatgagctgagatggtgccactgcactctagcctgggtgacagagccggactccgtctcaaaacaaacaaacgaaaactgaaggcagatctcatttgctggagtgttttgaatgaggattattatggtgagaagaggctggagaggtaggcaggagccaccttgcaggtcttagtccatttaatccgtgttaaaaattcagtgctttagcccaagaaccatggcagtctttcaaagggctttaagcaaggaggtggcctgattagtgtctccttgtgtaggaggatcatgcctactgttatgtgaagaactaactagaagtgggcaagaatggatggggcagcctgttgggaggtctttcctcattctggtgagagacttggttccagaaaccagagatgtggtggaggacaaacgtttgcaaatccaggatcctttttaggaggagagatcagctggacatgatttggaggtagaagggagaggagggtatcaaaggtcagaggactgtggtgccattcactattacgtagcatgctagaggaagaccaggtttcggggaagaccatgtggttttaaacttgctgaatgagaagtgccttagaggtctccaagtgtatggtacagggactggggcagagggtgatgccgggaaggcagctggatttaggtgctggagctgagagaggcagccaggactggagagtcatctgcttacaagttaagttgaatgaatggcaaggatttgagtgcctggaagaaggcacagagagaaaagatgagagggctgatggaatcagtatagtttagtcatctacggagatgggaatgaacaagagagggcagggtttgcccagagaggcaggaacaaaaccaggagctgtggtgttaggaaagccaaga

SEQ ID NO: 87796 - DNA, 1024 bp, Homo sapiens
tatagtataaaaaagaaatgaagttacacatgatcaagtcatctctgttaatcttttgttatactcttctgtctttttaagtgtgtgtgtgcttatttttttttcctcatgttacaaaaatacatttttaggtcttttgttaagaatatattgtgataactcaatttaaaaatgggcaaaggacttgaacagacatttctctaaagaagacatacaaatggccaataagcacgtgaggagatgctccacgttagggaagtgcaaatcaagaccacaatgagatactgtttcacacccattggatggccgttaagagaatagaaacaagtgttgagaatgaggatacattagaactcttgtgcattgctggtggaaatgtaaaatagtgcagctgctgtagaaaatggtatgaaggcttctcaaaacattaaacatagaattcctatgtgtcccagcaattccacttctgggtatctgcccataagaattgagagcagagacttgacagacatttgtacacccatgttcatagcagtattcataatagctgaatggtagaagcaaccctgtgtttgtcagtggatgaatggataaacaaagtatgggaacacatagagtggaatattattgagccttaaacaggaagggaattctgatacatgctgcaatatggatgaacttcaaagacattatgccaagtgaaatgagccaataacaaaaggacaaatgtatagtttcacttacatgagttatacatttcatgtataacttctcaaactcatggagacagaaagtagaatggtagtgggctaggggtagggggaaatgggaagttcgtttttattttcattttatttttttgaggcagggtctcactctgtcacccaggctggactgcaatggtgtgatcatagctcatgacatcctccatctcctggctcaagccatcctcccgtctcagcctccgtaatagctgagactgcaacacatgcaccaccatgcctggctaatttttttgattttt

SEQ ID NO: 87797 - DNA, 1110 bp, Homo sapiens
ttggggaaacagataaaaaggacattttaggctttacaaacacgctacacaccataaaatgtttgtttcagcccattgcttactccaaagcaatggccttttgcttgaagataatctcaataatagaaaacagttaccaaaggaactaggttttgggtggacgacttagccctccacaagggactgcagaatcctggtatttgaactggcagggtgtttggtttctttttttttttttcttttttttttttggcttgtttgttttcgtttgtcagaatatggccccagtttggtttaagttttgaatgttcaggaatttctcagagcagacaggggtccataagggcttagtagtgcttctactgtgcaaacagtgatttcttttttctccaaaaattaatttggcgtaagtgtgatcatggctgcttgacatttttttgttttgagatgggagagcataaaccacattcaaaggaaaaattagagcctatgtattagaatatttaaactgcttaatgtagagcaaaggaaaatgtcacaattggatgctgttgtgttctaagcaagcaatgcttctctggatttggatacttgagaaatcctttatttagaagtcattcatattcatctttaatacagcaactgtgaatatcattagccagaagcaataaattttgtgaaaattatttggcaattgagaaggtagggtagccagttgaagtcctgtgggcccaaggaggaacttggcagtgagttattgtcaaaagctgcgagtgccaggagtcagcccaaggagagttctgtgggaatcagaggagtgtggggccagttgagtccttatattatttattcctgcaagcatgacagattgattattacggatctgaaaaatcacttgcatgggtcttctcattctttttcacccctcttttctttctttttgggagtggataagacttaaaaaccacatacctcaggatacattgccgaatcaaaatttttctgatggtcgcagacttccgtgtctagaaagctgctagctttctactatttaaaatacaaattttgggatatggcaagcctcaccatttcttcactgtatgtagtact

SEQ ID NO: 87798 - DNA, 1042 bp, Homo sapiens
tagatataactaatgccaagcaagggaattatggggacaggacagaatgtcaaagttatacacctagaaactataaaaatagtgtaacagagccaaagtctggaggcagagagaggaaaagtaagagaaggtataagcatgctggtgtccacatctttgatagtagatttaactgattctgtctaaaacaaaagcattgttcaaaaaaattgcttcagctttttaaatattttcaccatctcttaatctgaaatttcattaattttattttgttagagtcaagaaaaattatatcagaagtgaaaatagcatgtggaacatgttcccattttcataaagattacttgtcatccatccttgttcatagaaagatggctagaatggtttttgcttagtgttaatgatattatttctgtgtgttggcatttgagttgatttatttttacatttgtctttctactctgcattgcataaattctctatttctttttttaaaaaagaagcataatatgccaagatgtttaaagtagataattttggatgttgagaacctgaataatttttttttttgtagttttaatttccaaaattaggggagagggagcatcttgtttggtttaccgtgctgaccataggttatatgtcattttatgcatataagtttaagtaatttaagtaccaagttactactagtacttgatttcctaagttgctgggaatatacactgtgggctgttcataatttttggtacttaatccatttcctctctgccatgcttagctttttctctatcactttcttccccccttgtctattctggggccatatcactctttgttatccatcactgaatggcctaacttcctttcaaacagagtttccctcatttggttggttttcggttttcatggaaagctattgaagtggtgtaagtgagtatggggtaggggaagctggttttgttatgatcaggtttagaagttcatttggcctgctgtgcagagaccggattggagggagactggagtgagtgagactata

SEQ ID NO: 87799 - DNA, 1363 bp, Homo sapiens
tgaaaatataccttcccaattataggaaagatagtaaattatattcacagtatgattaaagtgatgttttttttgagatggagttttgctcttgtcgcccgggctggagtgcaatggcatgatctccgctcactgcaacctccgcctcctgggttcaagtgattctcctgcctcagcctcccgagtagctgggatttcaggcacgtgccaccaagtccagctaatttttgtatttttagtagaggtggggttttgccatgttggccaagctggtctcaaactcctgatctcaggtgacccacccacctcagcctcccaaagtgctgggattataggcattagccaccacgcccatcggtgattttttttaaatctagtttttaaaatacctgaacagtgatggtgtaaaggacaagatgatagaagacttttttcttttcattttcttgattttctttatcatccacttttttaaaagacaccaacattatttgcataacaaaacaccatataggccggcacggtggctcacgcctgtaatcccagcactttgggaggccaaggcaggcagatcacaaggtcaggagatcgaggccatcctagctaacatggtgaaaccccatctctactaaaaatacaaaaaattagccgggcgtggtgtcgggtgcctgtagtcccagctactcgggaggctgacgcttgaacccaggaggcggaggttgcagtgagctgagatcgtgccactgcactccaacctgggtgacagagtgagactccgtctcaaaaaaacaaaaacaaaaacaaaacaaacaaaacaccatacagatggatatctaaaagtgaatgagacttgaaaatcagccagaaatgtttgctgtggtgataaacataacccttaaaatgattttttaaatatttttttaaaaaatagggtcttactccaatttcccagcctggagtgctactggagtggtgtgatttcagctcactgcagcctccacctcttgggctcaggtgattctcccaccttagcctcctgagtcgctgagactacagccacaccaccatgccctgctatttattgattttttacttttgggagagacggagttttgccatgttgcccatgctggtcttgaactcctgggctcaagtgatccacttgcctcagcctcccaaagtgctggggattataggcgtgagccaccacgcccagccaaaatgaattctttggggtccagaaatcttgtcttttgcaaagatagtttgatggggcagggttgctgggaaatgagggtcccaggctaacagttctctcaaatgtgcttcatggctcctgagtgccagctctgagtcatgggta

SEQ ID NO: 87800 - DNA, 1079 bp, Homo sapiens
ttagggcagattttctggaaagtcccgaaattcagtgttctgttggatttctggcatctattgagcaagacagttgggataatgagtcttggtattaaatgtattctacgggagggaggagagagaagtgggaggaaggtgtatccgtcttgctggcttcctgcagcttaagtaggaggaagaaaaggagagggtgtgagtagatgacccaagccctggactaagccctttaggtacatgatctcatttaatccccttttcagaggaaactgcctgagatatgtttgacccaggctttgtgctcttagccactaaatggcttccctttactgatgattttactctgcctttatcctatagttacttataggcagctatatttacttcctccaaatagattaactctttgtatactctttggtacctggaataagtcctgtgtaatcctaaacgctcaataaatatttcttaaaatgaagataattctccttgacagaaaattgatcttactgagcatatatccactgagaaaacagacgtatgaatgtttaatactccctgattatcgtatgctttcttatttaagcagaagtattaaacgcatgccaaaggctcacataaatgatttattatgcaccaattaacgttatctgagccatggtttttctttgttgttatgaattgagcattgacagcaaggcagcactcatttaccttttgtttctatgcagaaaacatttcaaataggcaactgttgtctctcctgagtagtctgagaaatgtgaatggagacatttgtattaggtgtccatctcgtgaccaatatgctttgtacttttgaagtttgctttatccttaagattgtgagaactgtaaatctgccactggaaccatccctgcagattgtcataatgtgatcagctctaaaaagcttcctgctttttagagtgtgtacccttaaggataacaatcatatagataaccttttagatgtcaacacaggcgatctttttatgtgttttattcatgatgcaatttacagtacttaaaggaaaaaaaatccagaagccttacaaggt

SEQ ID NO: 87801 - DNA, 2037 bp, Homo sapiens
ctcaacatcctgtatgtactggacagacacccccccattaccaccaacaagaaagagtgatccagcccaaaatgccagtagtgccaaggctgagaaattctgcaagaatccacccctaacacataataatcccacccctaattgcgttatgatggtgtattttctttcattattttatttccacattatacgtaactgtgtacttagtttttttgtatctggttctcttcattgagcattatatcctaacagagtaattttgtaattttcaaaatttttaaaattcacacatttctctcctatactacatatattctaatttactgctgttgtgaataacctgtaatgaataactttgtgtatttggcttttctttttcttttaatttctagttatttcttaagggtagtatttgtaagttgttcatattatttttctaagtggtgaattttttatgattctcgacagatgtttccaagttgctttccaaaggcatggtactaatttcagtgtcatcaacaatgtatagactttctgtttgcttgtgtttttgcctgcataaagcataaagttactggggaaaagcctatttttttttttggctaagtcaatgggcaaaaagtagtatgtgtttgattagtaatgcttttgtgtgggagaaacactgttctgatcattgtcgtcacaaccctcagaagtcatgataaaaccatctgtttctgtttaacaaaggctctgagagttattctaggtcagtggaatgatgcctttctgtacttactgcgaagaagtttattaagataaattgcgatagtttcaactttcttggagtacttttaaaagagcaagatccactcagatcatcatggaaaatcctgtcaaactctaagaaaattgtctaggaggccgaagtgggtggatcacttgaggtcaggagttcaaaaccagctaggacaacatggtgaaaccccatctctactaaaaatacaaaaattagccgggtgtggtgatgtacgcctgtaatcccagccacttgggaggctgaggcagaatagcttgaacctgggaggcagaggttgtagtgagccgagatggtgccacttcattccagcctgggtgaaagaacaagactctgtctcaaaaaaaaaaaaattgtttttgatgaagccattaatgttatagttaaaatatatttaggtatgctaggactccattgcactttcctattttttatgagttatttgtgtatttaatggggcacctagcactatgacatttcatatatgtagaatatatatatatgcttgacacacggaatgctcagtgaaaatgtattaaatatgaacgaacaaacttctgcccgcactttagggccaagagtataattttctgctgtaatgatgacagagagctatagtggagtgtgaccttttgatgtactgctggtcctgattatagtttacttgactttgaaggcttgatcaggaataaaacctccaattatatcactttttcagtggcaaacctgttttatggagtagtgatttgtcttgcaacagggctttggaaactcattaaaaccagggattttctcgcacatttcctaagagaattacaaatatgaaaagctgtggataaaaattatctgatttttgaagatttgctcatttttagaataaaacgttttcttatattttcatatcatgttttctaaatttttattctttcttgagggaaccattccaagttgtacaagtacgtttctttaaatatttgcatttgacaatgactcccttctctggttcttctaacaccttaaatgacttttttttttttgagacggagtctcgctctgtcgcccaggctggagtgtagtggtgccatctcggctcactgcaagctccacctcccgtgtttatgccattctcctgcctcagcctcccaagtagctgggactacaggtgcccgtcaccacacctggctaattttttttatatttttagtagagacggggtttcactgtgttagccaggatgg

SEQ ID NO: 87802 - DNA, 1031 bp, Homo sapiens
atgttgatgtagggatatctttattaatagtcttggtgaaactgaaggagaaggcatacaatacagtctttcacagaactcagcagtagccataaatccatttatgaacagttcaagtaatagagctttgaagcataacattagttttcaataatgatgttattcttttaaaaaatcagaggtttaaatgtaatgcatggggaaatggggcataataaatttgaataagtaagcattacttttcagtggatccagcagattccctttttattttatttattgttcaggttgttgaattttgtttattcaaatagtaaatgagacatagtccagggaagagccctttgcttatgctatatgatttaaggccagctgccgtttttcctgagctacatacgcttcatcatgttggaggaatcaacttcaaaagtcagctggctgttctgcagacaagcaccagacttgttattcaccctgaatcctcagccttagctccccaatctctgttgcacagaaaactacaattcctgggtgcctggaaagagagggacaaatattaatttgcatgacagtatcctgtgcaggacctcgtgctaggagaagcccaggaaatgtttgttggtagttttcactttgtcttgctagaaaagcctctacaggaaatctcctctgcttctaggaacgtcaaatttcaaataatcctggccaagtagctggttcctattcttgactccttcatgggggcggcggaggggaaagcttcctatgataatacattgcagcattacgctgcccaaagtgccaagggcggttgggtactattcttagtgtttatgtctttagttcttgttcttttacttacttatttttggcagattactgtttacaagcctcaggaagttagcagcaagcttgtcccttagtccttagcaataacgtttgagaattgctggaacctgtttgtcttgttagcaactacccaaatacgaagaagcaaggctgcaaggcaagcaccaaacttgttattcacc

SEQ ID NO: 87803 - DNA, 1019 bp, Homo sapiens
taatattttattttcagggggtctgattttcatttgcattaaatatgtgagaaaactacggcttagggaggtcatggggcttttctaagttcctgtatttggccagttggagaacctaggccttgtcacttcttgagatcttaagagtcttgatgccagggactgggccttattcttgtgagtttctttggtattttgcatgtagtaggtctgtagttgctgtttgttgattgaataagtgataccaccagtgcactgagcaggtcagattttgtttctaagtcagcacaggacccatcagtactgataaagccccaaaacccccacctttgcagtcagcctattgtgtatttggttggagcaaaagtaattgtggtttttgctatttttttaatgggaaaaactgcaattacttttgtaccaacctaagacctttcagtaagtgagagggcagcttgtgaagccaggctctttgtgaggtgtgagctactgaaggttaagtgtccaaaactagactctgatgtgtgcagttagccggggggaaggaggtagttcagaaaaccagaaggtggcagctagaattaataatccctgcctcctagtttggatataccctcactgcctttttttaaaagcaagaactctagagattaagtgttccaatagctgggatgcttttggaaggccgtgtatacctcagtgtatgtgttcccagtagtgtgtgccctggaggaaaccccagggcccagagcttccctgcagccccggccccagctctggccccggccctggccctggtcctggccctggaggcatcttctaatgaaattacctccactgaagtttcctataaacatagtcaagagcagcctctctccctgctgagctattgcagatccctcccacttcctcttctgctctcctttctctgaaacaccaagtgaggatgcgtgtttgcttgtttatggatggagtagctaaaggagcagggatggagcttgagttcctccagctcagaa

SEQ ID NO: 87804 - DNA, 1036 bp, Homo sapiens
tcagtcttcctcattagtaggccttgccctggtcaggcttcctcagtttgtggatggagcaggtagggcgcacggaggtgaatctcctgagccaggagcagcagagccaggatggaccctgacttctagcttccctcagcctgagctctttctctcctgccacactcttcttgggcctcttgctgtcaccctgggcttgtcaggtgccagcaggaactcttgggcaaatgggtcctatttctgcttgagtcttgaggtttggagcagcttaactgggagagaaggcagcatcctttaatgggggctggcagtttaatgccatcaaggggtaggatgggagtgtgaatggaagacagcccgtcttcattagactttacaatgtggcttatcaagtgcagtgtttgaagaccttgtgaagacatcatgagcctcacagtgctaagagggacctgaatgaaaggaaaacaatggctttcaatgatgatttgggaaacatggatgatgcactgatctgagcttatagatcctgtccttgggtgaacagggagaggtcagaaacaggaggatgcttaattcattccagccaccgctgctggagttgttttagcaaagctccccatttctgtagttggtgctggcattttgacgatttccccctttgctatggtgatctggaagcacagagccagatgtgtagctgcttctttgttcctaggcacacgccttttttccccgaatgtggccttggagtcagattgcccaggttcaaactttggttcctcggcttgttagctgcatggcctagacagcttgcttaacttctcttgcctgggttagaatgatagcaccccagcagtcctaataacaattcctgggctacagtatttactacctaccttgtggggttattatgaggaacaagtacaatcataacatcaagggctgagagccttcctagaacacagtaactatcccattaatgttcacagaactatcaccactcatgaaatcctagcttgaatatttacattagtct

SEQ ID NO: 87805 - DNA, 1021 bp, Homo sapiens
ttatttaattcatgttcacctctcccattagactgcaagcttagcgaggccaggggctgttttgttgtttacccttgaaccccaacccatagcacatgtaagtactcatttgtcaggtgtttgtgtttcatatccattttttgccttttcttacatacatggacacacttttctctcttttgagataacttccagaattgagtggttatgagcaattcctggatccctgtttgcctcagagccggtaactgttctcaccttttgggaaccataaacgctgccattgttgacctgaacacgaggtgactctggcaggagccctggccatcgtcccttttttggttatcatctgacgtttgtgcagctacacacatcatatctcatttgatctcttggactcccgttggttagtagaaaccttattttatagacaaacagctgaagctcagaggtgttcagaaacttttgccccatttgctgcaagtggtccatgagggtctggaatcaagaccttctggttctggtttgatgctgggactgctctttctgaattgtttctatgcctgtctgttcaatgttataatgatgagggggccagtccctcaccagctgcattctaactggaggctagaaaataatgaatgggaagtaacttaggggaaaactatgatgaggttgttggcatttgttactcttggaaagaagtgtagccttggaaactagaggctaagaaataaagtgaggcttcttagatgtcgttgtgtattaaacaggaagcccgtttgctctggctgtagagtgtgcccatgagagtttatggaagaatgaacttgactcaataaataacccactcagtgcatgatacccttttcttcagctgcaggtaaatgtctgttatggtgagtgacatggtggcatgttgggctctatgaaactgagtccacacacagcctgctgtgctgcctgccctgaaacgggacaggcccttggtaaatgacttgctactgaatggtagtcctca

SEQ ID NO: 87806 - DNA, 1058 bp, Homo sapiens
aataaagcttctaagagcaaaatataattttcttccctgcttgtttcttttcttagcattttagaaaatcccactcagtttctagagttaacacctttccccactaatcagaacacaacacacaacacacacacactctcacacatacagactccctcactgaccttatgggccctttgctctgctaaacacataggtactggatggagtttgtagcaacatgtccctgccccgaatttgtcatccagatgtcgcctttggatgtcatgtccttgacattgacccagggtgggacttctgcagtcaaatgctctacccctgagctatcccccctacggtgggacttctgaataaagcctgtgtcactgtctctctggttcccttcagcgggagctctctgtggtttaatggagtctccacttgaccaggagtgtttccagatgagaaacccagggagggctgcaagcaaatgagagtgaaaactgagctctgtcccactccaaatggcatccgggattcacataccaaggctggctgggaacagctgatccaggctgatcctgacactggagagtccaagcattggaggccagaggccattcagaagaattacctcggagtagaaggcttcctaatgagcaataaggaggaactcccccattcttagggcacaggcctaattgaaaccatcctgggaagagaacatctaattaagtctgactcctcagaggactcaaatagttatatatgaagaaatgctaatctcgtggccttacttgtggctagggaacctgaggtgatgctcaggacagcaataccagcccttacggccttgctgtgtgtcctgggctgtgaacagtgcagaagtccctgtctgttcccgtgattttgacagaggatgccagaggcagaagtgctgctctttggtggtgtccttggtggtgttttcatctgtctacattagggttgggttcactttttttttttttcttcttttttttcttgagacagggtctggctctggctcaggctctgtccaggctggagtgcagtggcat

SEQ ID NO: 87807 - DNA, 1012 bp, Homo sapiens
aaaacttttagaatacggagttagaatttatttatttatttatttatttatttatttatttatttattacctaaaacaagttcagtggaagatgctttttgattattatcacattttgggcttttgtttttggtaacatgcaggccatatatgaatgaaattttgctctttcacagaatgatatgagcatctgtttcttctaattagaatacatctacaggagaagagggattttaattttcatgttgtagcgaatgtctaagggttgaccgggtattttggaggagtagttgtactttgatcatatttgtatttgcttttctggtcaggagcctggataaggaagcgccccctaacgggtgggtggagcagagggagtggggcgagagatggagaggaggggccggggcaaggaaggatccctaggtctgccttcctgtccacagcactgcccgccagccacagctcctgagtcaaaggctctgaagcaaagttgtatgatgaaccttggatttcctgtacaatttggctaactctagggtgatctctaataaagacaaaggccaggggacagaaatatctttcttttgctcctggcaaatcccattttgattctatctcaatctaactgtccagaaaattggattgaaagcaggacaccgccgggaggtaaatcagattagggcttcctctaccacagcctccagcagacatttcattttgcagtgtgcgtccctcatttatatgaagccgtgtatggcccctccatgcagcagggtgcgtccaagctgacccagcgaaccaagacatcaggtgaccctccaatttgattcactgaaaatactgccggtggcttcattttctccagagaactgtctgcacctctgttcctttctttttatttgggtgcctatgatgacctcattgaagtcttcatctttttcttagccaatgtagcgtttgctaaggagccagacctcagataggaatggagagccccagaatccaggtg

SEQ ID NO: 87808 - DNA, 1003 bp, Homo sapiens
tgcctgtcttggtggggagaagtccctggatctgctgtcctttttcattctcagcactagcgtcatttctgccacaagtcttccctgaactcaaggctgggctgagggctattccccaggcactcacaccttacattggcaagaccttcctccacttgtatgatcctgaaatgttctcttagtgactcttttccaaactaaaagctccaggggggcccctgagcgaagttgatctttacaaccaccagggcccagcaccatatctgggatgtagctattgctcgataaatatttgttgaccagaaggtaagtgaaccgagtactccctatccactgtgtgtctacattcctgccaacccctgtatatatatgacaacgactcttcagtcccaggcctaatagacttgccccagtcagctccttcctgatttcatgtaagagtgacacgattgaatacttcctccttcctgaaacgtttccccctgttggatgtcggggctcctgctctctgctcgcctctctcctaggcctgtctctgaggtttggccaactcctcttgtcacccctccagcactatgagcaaggaattctggttctccccacaccatcttttttgaaattgcattcgaggtctccagcatctcttctaggcagatacctgaagggactgggcttcatgtagtcctcccaggcctgccagactttctggccttcaactaggagcttcatgcgtgtctgtggaaggagtgaccaatggacaaacatacaactctattttgaaagtgggttggggctgggtgtggtggctcatgcctataatcccagcactttgggaggcagaggtgggtggatcacaaggtcgggagttcaagactagcctggccaacatggtgaaaccccatctctactaaaaatacaaaaattagctgggtgcggtggtgggcacctgtaatcccagctgtgtgggaggctgaggcaggagaatcacttgaacctgggaggc

SEQ ID NO: 87809 - DNA, 1434 bp, Homo sapiens
cttcatctctagtacaggaaggattctgtcacatgacgtcatgacaggttttgagatacagtggaattaactgagtttcttgatctgctgatgacagaaaaaggagacaaggatgaggaagtcttgtgtgagtttttctttttttgcggggggtagggtgtctcactccttttgcccaggcttgagtgcagtggggtggtcacagctcactgcggcctcaattctctgggctcaggtgatcctccccccatcagtctcccaagtagctgggactgcaggagtgcatcaccatacccagctaattttttatatttttagtagagatggggcctcgctatgttgccctggctggtcttgaactcctgggctgaagcaatccgcccacctcggctttgcagagtgttgggattacaggtgtgagtcaccatgcccagcaatgagtttttgtttttgttttttgtttttcttaaacaaggcttttcttttatctttaaacactttgttggttctctctgtttggtagttgtactatgtctaagttgtttattttgttaggagcattttgttgtaatcatgaaatattttgagattcaatacttgtgtttattcagtcataatattcttattatataatacttcctgatagtagatattaggattgattgaagcaaagcatgtgtattaataaactcagtattcattaaagcagcttgggttgcctgtagaaacggcagagcatccccaaggctgagggaggcggggctcctctgtgggtagcagacttcatctgcaggacaatgtgcagcacaggctgcgggtattaaaggagggatcaagaaactggtattaccaggggcacttgggaggataggggatcaggtaagccatagcatagagacccagaaaatgagccaggaatgttcagtgtgaaaaaaagaataaggctgggcgtggtggctcacccctgcaatcccagcactttggaaagccgaggcgggtgaatcacttgaggtcaggggttcgagacgagcctggccagcatggtgagaccccgtctctactaaaaatacaaaaattagccaggcgtgatggtgggtgcctgtaatcccagctacttgggaggttgaggctgcagaatcacttgaacctgggaggcagaggttgcagtgagctgagatcataccactgcactccagcctgggcaacagagcaagactctgtctaaaaaaaaaaagaataagttgcaggacttgatatgagagctgcctttctaggaagaagggtggactcaccttgggaactccatgtgctgacccagaccactgacaaggcgttatcaggggacagcattttatacaaccctgagaacaacctccagtgagtagatgtttccagcaacagaacaaggactgcagaacagggaggctgaggtgg

SEQ ID NO: 87810 - DNA, 1044 bp, Homo sapiens
ccagtctcagccaaattcaaatatcttgtagagaataaatgcctcttgggtttatggatttatgccatatgtgtgagaagagaaaatacggtcaagaattgttgtatttcttgactccttgaaaggcaagaacactggcttgggaaatagggacacctggtttctagtgttagataaatcttcagaatacagaatgctctttgaaataacaaaatacttgagtgaaggaaagaattgaggaatgaacttaaatttagctctgaaagaattctttcttcagtctgtggttcccttagctactattcaatctctcatttccatcttagccatattttagcttccaccctgtatgacagagacaggggtctttctcttggtttggagcacacatccctcaacatgtccagtagggagctcctgggcgacgggtcctgcaggtggatgtggaccaggagccccgtgggaggaacgtgcccctggggagagctggtggataccccgaatggcaggccacctggggcaaagccagtggaacctgactatggcaggatgagaacaccagtgttttataatgcccacttttttttcacttcttgcagtttctatgtttatttcctgttagcatttagtagtatctttatgagtttatctcagttatgctaggcagaaaggagctcttgtcagttggcaggaccgaaaggagagaataggcagggggaagaggggacagtaatcgaagtaggagcaccttgagcgaagtgaaatgtgggatggaaatggaagctcctgtttgtgatctcccagagaggctcagtccagcgccaggtgccgtgtgcttgtggaataaagagaccgaattccttctgtactgggggttcatgctgaaccccacctttgttgaaggggaggaaccagctgcccaaggcaaactagaagcatgcttgcaggagggaaggttaagacacacagtttatgtgcatagcagtgaaaaccatagtgtctgttctgaagtttgggaaaatagtgtgagactgtctagctggg

SEQ ID NO: 87811 - DNA, 1034 bp, Homo sapiens
cctgaaatcccagcactttgggaggtcaaggcgggcggatcacttgaggtctggagttcgagactagcctggccaacatggtgagatggtgagaccccgtctctactaaaaatacaagaattagccaggcgtggtggctactgtaagcccaggcatctgtaagcccagctactcaggaggctgaggcaggagaattgcttgaacccgggaggcagaggttgcagtgagctgacatggcaccactgcactccagcctgggtgacagagcaaacgaaactctgtctcaaaaaaaaaaaaaaaaaaaaaaagatgcataattgctgcaggtatgtgattgtaaccatagaataagtaggtatgtacatgtggtagatagaatgatgtgccttccccctgaagatatccatgtcctaatatccagaccctgtgagtgtttttcctacatggaaaagagcataatgcagatgtgattaagttaagggtctcgtgagagattaccctgggttatctgggtaggcccagtgtaatcacaaaggaccttctaagagtgagggatgaactcacaaaaggatgcagaagcagagttgggagggttgcccttcaaacatggaggaaggggccatgaaccaaggaatacaggtgacctcttaatactggaaaaggcaaggaagcaggggcccccggaactctgcgagcacctccattgtagccttatgagactcattttggaagtctgaccccaaaactgtgagataataaatttgtgttgctttaagtcactaagtttgtggtattatgttacagcagcaatgaaaaactaatatggcacataagactggaagggaagatattttaaaatgatagttggaagtacagtgtattttagtttgtgtattttgattgggtgcttgtgagtttactttggttggttaagactaagaggcaacagatgacttttaaatgttagaggagggaaaaatggtagagtttcaagttcacattcaagtacaaatgatgaataagcccagccaaat

SEQ ID NO: 87812 - DNA, 1084 bp, Homo sapiens
actgcagagtcctccgaggagctttcaaatgaagcatggcagcctgggcaggttgcaggtccattaaatccacatctccggggtgggagccggtggcatccttgctttgccagaactcccccattgaccctaatgtgaaacctgggctgagaggccctgcctaaagctcgattattttcacctgtggatgtaggcgatcgcttccttttgtggctgttgtcaggaggcagaaaatcccctgggttgttggctccctggagtcttatttttacagagtgccctgtttcaggtgcagcaacctgactgatgtttttacaaatcaccttttggtggcctcctgtcactgctgtctcccttcaagggttaaataagcctctctcacccattccttttcacacctgtgtcgtgtattattggcaggcctcagtcctcagggtgtcaaatggaactgatggatgccagacattgtggatatctgcaagtcctggttggtgaccagggacttgaagagtagactttcttctcaaacttatctttgtgctgttttccttccccagacctcatagtctggagcccatgtttccaggggtggaatttgattttcccagagaggagctgtgttcggcttctaggctgaggagctaagctgccgagcctctgccagccctctgtggattcgctcctgcattattcagcgcctttgctgacagagcaccatgttccactgctgagcagatcagggtgaatttccaagagggaacattgcagatggttttgcctttagggatggattttcttactcccaagtgactcacttctggtaaaattaaaaaaaaaaaaaagaacaaccttgagtcccttgagtctgtccccaccatctttgctcagagggaattaaggagccaattcagagctttaaaaaagtcacgtgatgattcattatctttttgctggttgtttcctgccccctccccccccacccccacccactgacttgtagtttttcataagcatttattcatccttgaattttattttatttttttatttttttttgagacagagtcttgctctgtcacccagg

SEQ ID NO: 87813 - DNA, 1071 bp, Homo sapiens
ctggccccaggagcctggagcacattggtaggtgtgctgagggcctcacagccgaatgacttctggtccaggtttggaattgaaggtttaagttgggatgttggctattcctcagaagtgaggatgtgttcttccaaataaatggtgatcaatccctgtgcattggagagctgatgggggtgtgcttggcggagagaggcatacccccagaggcttgaggagggcagttgtatttcacgtgctgaggagagtagtggtgtggttaaatcaggaataaaaaaaaaatatgaagaaattgtcagggagagcttcagctgggcccaaaggaaatcaagaaaagagcaaatgagaatgcaatttaaaatgtaaatacaaactgaaatcaaagccatttctatgaaacatttaagaacattctgtaagtattgctggtcaggaaagcacaaaaaattgtctgtgttttgagcccattgtcagtgtattatttagagggaagttctgatttttgctaaggggttattccgagttgcgaagtggtgtggtgttgggggaagaataccaccaactccaggccagctgctgcatctcctggaatctctgttttctcttctgtaagatgggagtcagggtggcctccatctgatcacactgaattgttgagtgactcaaaggagataatgtaccaaacactttgtaagccctatgacaccgttcaaagtctatttcctcccagctctgttttctaaaatcaggctgtatgttcgaatcacctgaggaacttaagactattaccagcgccaccactggcatttttcattctcttggacagcagaggttttccaaagccctggatgtcattctgctgggcaagtctggctgacggggctctgaggagttggagggcctgtccacccttgcctttgggaaaccagccagccagtggtccaaggagattgtcggctgtcttcccaagtcagcgccatcttccttcctgctcatttcctgtctcccagtttttccctggaacctttccatttaaatatgaattcagctgcagcctgcggggatctg

SEQ ID NO: 87814 - DNA, 1621 bp, Homo sapiens
acctgccagctgtttgtgagccctgaagatgttggggatttaaattttagatagatcattgtagctgcaaggggtaggacggataggtggggtatccagagtccttggataccttgtcttcctggaccctctctcagcacccttgggctaagatgcactcttgaacacatttcctctatggcccctttcagatctgctgatgatacctggattccttctttcagagtgacccagccccatcccagggaacgggcagatgggctctgttgcccatctcaaagttcccttactttttttcttttgaggttttatcagtccagaagtggaaagaagatggatgccattagctttagaaatattttttatgttttagggagaaagaagcagagaatatacttttagatgagcacactttaaaataccagtaagacagacttgttggaagacaggcattgtgaagaactgttgttgttttttggttttttttttttttttttttttgcaacagctttccccactttgggaaatgagaacttatgccctcctgaatgttgtatttgatgggacttagatccatgggggaattttattttattttttaggaaaaggtaacctactaagtatagttatatccttctagcatgaaatataatcatttattagaccagaactgtttgttaattcagcagtgtgtcttgaaaaagagccaccctcaaatttaaagtagaaatagattcttcattctacacctttttgacatcagatttgctttcctggtctcagtgcaggtgcccctactgtttggtgtttgggacacagcctccgagtaagtccaaggagagcttggggttaggcagtataggccatgagccccttgccagcctcccagggactttgagaggagctgtttggggcaagatgcttaatgaaaggatgttttgtaatttagagagaaaaaagaaatttatcccatagataactaaaccctcaatgggaatattagaaaatacaattgtcacattatgtaatatttgtacattttccactgcaagtaagaatgcgtcctttccttaattttaaaatatggaaaaggtcgacctttctgctaccgtaaggaaaatcaagggaaagggaggttttatacatgatatggggaacttggtataattatttagctcagtatgaaattctgccacaggaatataaggtaattaatttctctaagtatgaaatgcaatcttgaaaaactaggaaacaggtgccgaggtgacaagataggaagagaagctgagtgttgtgcagtggcaccgaacaacttctggaacattccagagcgtggctttgtagctggagagagcctcctggcttctgtgtggcgaccgagactgacccctgctggcagattgttgctaagccgtggctgttaatgaagcagggcaataaggcccttaagcaggagatcctgccaggccacaggcaggtctgtctccgaggctatgccttgtaccagcccttgatgctgttgcctgaattcccagtgggaagaaaaatggacccagcagtttttagtgttttggtctcagtttccaccatctctcccctttcccagtctgggatgtca

SEQ ID NO: 87815 - DNA, 1031 bp, Homo sapiens
gtgctgggtcctctgcttgttgctcagcagggtactggaggccaggaaggctggcgctgcagaaatctgtcttcagtgcacttactgctgttgccatggacagctcattcgtatagctggtgtggagctaatgaagtagggatgtttttaaaatgaaattttaaaaatggggtttgagaagtacataaacagttcattgtggcataaaatgacattataatcatttaattttgagatgatttaaaaatcatttcctcatgttccatgttctacagcttaccagtcaggaaaaaggataattttgtgggactcaatgaagtgatgaaattgagaacaaagcctttcatctttggacttacacttccatgttcctaaaagagttaggcagggatatgtaggtaaatcaaagactggaaacgtagggtctttggaaacttttttctgggtcatctttttagtcttaaagctaagccttcagttgccaagcagtggtttttttaatgaatgaggctggtcaataggatatctatattttaaaaacctcaaccacaagtaacaccctacacaaaaaccaattacagatagatagtagacctaattgtaaaacaataaatgttctagaaaatgacagagaacatgtttatgaagttgaggtacaaaataattttgtaaacaggatctaaatagaactaaccctaaaggaaaagattaatcaggcatttttgttaattgaaacatcaaagaatgaaaggtagactggtattgggggaagatatttgctacacttatacctgttaaagggcttgtgtcctgaatttaaaaaaaaggtcaggtgcggtggctcacacctgtaatcccagcactttggaggccgaggcaggcggggatcgcctgaggtcaggcgttcaagacagcctggccaacatggtgaaactctgtctctactaaaaatacaaaaattagccaggcatggtggcaggcacctgtaatcccagctacctgggaggctgagacaggagaatcgcttgaac

SEQ ID NO: 87816 - DNA, 1053 bp, Homo sapiens
tgtgtaatttaaaacttacaaattgggccaggtgtggtagctcatgcctgtgatcccagcattttgggaggccgcggtgggcggatcacctgaggtcaagagttctagaccagcatggccaacatgggtgaaaccccatctctactaaaaatacaaaaattagctgagcatggtggcgcacacctgtaatcccagctactcgggaggctgaggcaggagaatcacttgaacccgggaggcggaggttgcagtgagccgagatcgcatccttgcactccagcctgggtgacaagagcgaaactgtcttaaaaaaataaagttgtttatttctggaattttccttttaatatattcagactgaggctgaccacaggtaattgaaactggaaaacaaaaccacacatacagggattacttggaaacattgcctgttaccaccttatgcattggtgtgaggcttgaatggagtaacacctgagggcagtgtctggatagagtaaaccagcattccatgttagatgatattcttagtgttagtattagtacataaaacttagaaacaggaccgggcacgtggctcatgcctgtaatcccagcactttgggaggccaaggtgggtggatcatgaggtcaggagtttgagaccagcctaaccaacatggtgaaaccccatctctactaaaaatacaaaaattagccaggtgtggtgatgcatgcctgtaatcccagctactccggaggctgaggcaggagaagtgcttgaacctgggaggtggaggttgcagtgagccgagattgtgccactgcactccagcctgggcgacacacccagactccatctcaaacaaaaacttagaaacaaatattcatctaataactggaggaaaagcaaaataaatttcagatggaggctgtgctatgaagactgtcacagttggttacaacacagtgttcattgtaaggataccaaatttcatgtgcgcggttgctctaccaaaggatatgtgcatgggaagatgaagtaaaaggagatgtattccacaggtatagtac

SEQ ID NO: 87817 - DNA, 1093 bp, Homo sapiens
tctccccgtctcagtgtctcaaggaaaaacctcattaagcagacaccttaagaagtgtattatcttccctttaaacctccaaaagggagggaagaaaaggagggatgtgagagtgaagctgcctgtgtcatgtccagaagactatctggaagtcttttttacctttctttgctttcttaatcacctcgttgaggttataaagtcacgaaggagactagatttggtagttgttactttaaaacagcccaaaacatttataaaaacaggtttttggggggtaatgaaaaaaaatttaagtcagccacaccgtcacatgttcccttaaatagccacagtggggtcattggtaacatagacccataagcacatgctccatacagaatgggtcatgcagctttcaaagagcagcccttcctcaaggagctgtgttacgtgaatactcatcaaagaaattatccatgccgcttctttctaactcagtgaaaacttgatgaaatagataaaatccacaaagctgtttagcccttcattgaacagcctattttagctggtgcctattttcctgagattatgaaaaatccagttccctctttacaatagtcaccaaaaacctccatttccacaaagggagtaggattgcctctggtcagtaaatggcgattccacctctgggtaggcagaagaaaaggggaagcaataagtgggagggaagcacctataacaggaaaatgcaacttttctagaagtgtctaggagacttgtgttgagatctgactggccagagctatggcctgtggctaccgatagctgcaggagaatcggggaaatgtattttgttagctaaacatgtcatttcaacaaagctcagaaatctattcataaggggaaaaaaaatgaatggcttttggtcagaggcctagcagtgtctgctactggaagggaattcaggcccaggaagtgaaaaccgagtgattctatctaagaagtcaaagtgaacacagtgaatagtttgcatcccatacagatagctcactatcggcagtccacagaaagtgtacattgactgtatctggagggccaaaatttcagccaa

SEQ ID NO: 87818 - DNA, 1397 bp, Homo sapiens
agagcatgcacaatgcttcatacccttggggagaggagtcagaagatgctatctcattctttcctttggtgatcggagaaatgtaggataaaaaatgttttggggtgaatcttgagatagtcagcagtagaatttaaacaacattttaaaaattttggccgggcattgtggctcacacttgcaattccatcactttgggaagctgaggtgggaggattgcttgaacccaggaattgaagatgggcctggacatggtgaaatcgccatctctacccaaaaaaaacacagaaatgaccggtgtgatggcgtgtgtctgtagtcccagctactcgggaggctgaggtaggaggattgcttgagcacaggaggtcaaggctgtagtgagccatgatcacactactacactccagcctgggtggcagagtgagactctatctcaaaaataaatttaaaaaaattatagaaaaaataaatgcaaagaaaacagagtatagtaaaagagtgaaggctgggtgcaatgcctcatgcctgtaatcccagcactttgggaggccgaggtgggcagatcacaaggtcaggagttcgagaccagtctggccaacctagcaaaaccccatctctactaaaaatacaaaaaattagcctggtgtggtggtgtgcgcctgtaatcccagctacttgggaggctgaggtaggagaatggcctgaacccgggaggcagaggttgcagtgagccgagattgcaccattgcacaccagcccaggagacagtgggagactcatctcaaaaaaaaaaaaaaaaaaaaaaaagactgaaaacaaagcaagtaactaggagacagagggacaacaacaagtgaagctccacacgacagaggcagccaagaagtgggggggtttaagaatgtactggaatggggctgcctgtgttttcagcccctccccttgctagctgggtgaccttgtcctaggtactgcttaatctctccaagcctcagctttcctcgtctataaaatgtggataccaagtagggttattgcggaggttagttaatatgtccaaggtgctgagtaccttatcaggtacgtacttgtgggtacgaatattgaggataaggtaacagattaaactgcccaccattttcagatgggatgttttgctaaagttcagcgatatcctatgaatgagacctacacgtaaagtaaaatgacccataaacactgagaaaaaggatgggcagtgatttatgagatgaaagaaagaaagcagtggaagtagaattgccccaagtcaggaaactctgtgtacctggatggagaaagccgagtcgggggcttgtaccactaacatgcattggaaatctagaacaatttaaagtctaagcttgttgcacaaa

SEQ ID NO: 87819 - DNA, 1022 bp, Homo sapiens
gacttactttgtcctgggttctcttctaatgctttgcgtatatcaattcacttagttccacagcaaccctatgggttcggcactgttattttccctgttttacagatgaataaactgcgaagttgggtaatttatccaaagccatacagctaataagtggcagggcagagatttggccctagctgcccacgctcttggtccctaagtgatgctgcccctgagaagtcacccaccacctgcagcacccattcacgtgagatggcctgactttcccctgtgcaccatcagatgtgtatccctcactcgggtgcctgcaagcctttgtgagcgcaccttgcttctctcagggaaagcatagcggtcactcccgcctggcttcctgtctgggtccacatctccacttttcatcaagcaggctcttggcaaaatcactggcttcattgcctagcctgcactgtgccatctactgtggtgcacctgtggcttagattctccaatccggctagggcggcccagtcctgcgagctgaggagcagcccatctgcctgtatccccactccattcctgaacatttacttacaactctaaaactctcatgtcctgggttcccgagccacctgcatcggggatcactgggtaggtggttctccatcttcatcatcttatttgaatgggctttatccagaaatgacaggttacatgatcaggaaattatataaccttctaacccaggctggtttttctcagtgccgggcttgacagctgataatttcagagcagccatctgaagccaaaaaaatgagaatataattagtattctgtatttctattaaagttctggaattacagaacagactttctattctgaaatggccagtgccgtggcacagatgtatttcctcagcagatgtctcctcctcataaaggctgcagaactgctaatgagctgcaatagaaaagcattcttcccgcgttccctgccagggccttgggcccatttgggcagacctcggggagcagtc

SEQ ID NO: 87820 - DNA, 1065 bp, Homo sapiens
ggcttccttggcttggtcatgagctaatctttaccttgtggctttttctgaaaatagacttgtcaacactcagtccgagtctggcccccagtcactggttttctctgttgacaggctgcaaagaatcatgcaggaagggctctgtccatgaattcccaatggtcatgggtggtcagccagctcagagctgatggtttgggtgggggcaggcaggacacagccatagtctcagctcttactaggggtattcgttttgtgactcacattcccccaggtgctcacagcctgtagatacccttagggtcacaataattgtattaatttagactccctggctctctcctggcccattgacaaaacctctgttcacttccaaagcccagcagttgcagctgggagatcccaggagtatctcgtgcggtggtgaagtgatccgatcacacacctttcctctccggtgtgaggccctctgctttgaggccacttgcatcccagccatgttcccccccacccgctgcttcctttggggagaatgcccccttgtgagtccacgcccccctcaagctgccaggcctcatgcatggggccagagagctagggtgcaaataccatgtgtaaagggaaaagtgtcctgacctcagctgcccttgtgccctcaggcctgtgcccaccgttggagacaggaaacacctacctccaccttgccctcaggcagcccctcctgctggagaccagctcctcagtcctgtccaagtcccctgagggcagctgggaagcccctgtctttttaggagaggtctcactgttccaccccctcgtctcttcccccttcctggaatggaaatttgtcttctgacgctgccacctggcagcaggcgatggctgtggcgagactactcagaatggcagcagccaccagccccgagctctgatcactccctcaccactgcaggatggcgaggctcccaagcctgcaggacgagaaagggagtgttgacccattttacagatgaagaaacaggcctcagagaagtgtgcagtgcctttactggtgtcccagaccgc

SEQ ID NO: 87821 - DNA, 1076 bp, Homo sapiens
actggagaacagggagatccagccaccattcaagcccaaagtggtgagtccagaaaagcagcctgttttcggaaccccatgtccccaaattctgggagtatcccactcacctcttttcttggagagaggaggccggtgcccctggcttgtacagggtgaggaaacgggccaggtttcagccttgtcctcagtcctgtggcctcagcagccgggattcctgctgccttcagagagtaaggaccgataaggcagggaggggaaccctgtgcacacttcatcctccagctggacagctgcagagcacccccgcacgactagggagtgagggcagctgtgctttaggtctggactttgtggactcgcacccagcagggccgtattcacagccttcagtcctcagcaggactcaggcttcgtgtctgtctctggttttcctgggtttgcctggcaccgaagggagctctgaagcacaaccccgtcctagccagcaactaggcagggcctgggccccgccccctcttccaccactgcctccactgcggggagtgagtgtcagccaccaattctaatgttgtcagcttttttcacactctccctgtttgattcccatttttttcatttatttaaacactgtatgccaggccctgttctgagtgccttacgaatattaattcactcaatcatcccagcagccctgtgagatgggtactatggtccccagtttgcagtggaggaaacagtcacagagaggctgagtaacttgccagaagacacacagctgatagatggtgaaaccaggacgagtctttgtcctcacctactgcaccatcgctccatctcagcaactgccctgacgctgatgctgtgggccctaattgttgattgcggccagcaagtgcctttcatgtttatatctctagaggtaaactgagagcctttaagaagtcagcctgctcactcaccacctgccactttgcagagcctccaagggcgtcctgtttctaagggccgggcggactgtgccttccagctctgccaccatcttggccagcatcaggcagctccccattgtgcct

SEQ ID NO: 87822 - DNA, 1272 bp, Homo sapiens
accattcattgtggtgtgaaatctccttgggtgaagagtagatggttgcttattaaaatggaaataagcccagaggctggacgcggtggctcacacctgtaatcccagtactttgggaggccaaggccagcagattgcttgagcccaggagttcgagaccagcctgagcaacatggtgaaaccctgtcaatacaaaaaatgcaaaaaatagtcaggtgtggtggtgcgcacccgcagtcccagctactcaggaggctgaggtgggaggaacggttgagctcaggtgttgaggctgcagtgagtcgtgctcccaccactgcacaccagcctgggtgacagagtgagaccctgtctcaaaaaagaaaaaaaaattaataagcccagaaaggaaagctgtttgtcataaagaccttactttgaatttatgacatgctttccacctcaacaggtacttaggagcaggttttatttgatgaaaagtaggtgggaaaagggtaatgaaagtagcttcgtcgctgggcgtggtggctcatgcctgtaatcccagctactcgggaggctgaggcaggagaatcacttgaacccaggaggcagaggttacagtgagccgaggtcacgccactgcactctagtctgggcgacagagcaagactccatctcaaaaaaaaaaacgaaagtaggttctcaagcacacctcctagaagataaagtgtgaaaaaagagctgagaaagcacagcccgtgagactcaactgccttataaaaacactagcagcacgtgctggcctctcgcctcggctgggttctgtgcaaaaccccatacatttcaccttcctgacagccttgggcaggaggtgtgattgttctcccagtgttacagatgagcaaacttggtggaccccacttcacagttaatccagagctattctctgttagagacccaaggatgcctggttagtttgaaatgtgtgctagctcagagttaattcatattggccctgtggtgctagcagcaggtccaagggcagtaattggcagcatcttgaaaatcattcttaggatccttagtgaaactcccagctcttcctgcttcagagtcaccctgggctcccggggacttcaacacgccactacccttgtgggtggctgacaaggtgaagagaacactccttccccacttttggggtcaggctaccaagccgtgctgcctaagcggctgtgtgtctcagcgaccccagtgcaacagttctgcctggagtggaccctggaggag

SEQ ID NO: 87823 - DNA, 1044 bp, Homo sapiens
acccttcctagaaagcaagcagactgttgccccattttgggtacaatttgatatactttccataccctccatctgtggatttttcagcattggaatcccccaaccagagatgttaaagtgagcctgtcccaggaaacatctccacccaagacgtctttggaatccaagaacaggaagccaagagagtgagcagggagggattgggggtgggggaggcctcaaaataccgactgcgtccattctctgcctccatggaaacagcccctagaatctgaaaggccgggataaacctaatcactgttcccaaacattgacaaatcctaacccaaccatggtccagcagttaccagtttaaacaaaaaaacctcagatgagtgttgggtgaatctgtcatctggtaccctccttggttgataactgtcttgatacttttcattctttgtaagaggccaaatcgtctaaggacgttgctgaacaagcgtgtgaaatcatttcagatcaaggataagccagtgtgtacatatgttcattttaatctctgggagattatttttccatccagggtgccatcagtaatcatgccactactcaccagtgttgttcaccaacacccacccccacacacaccaacattttgctgcctaccttgttatccttctcaagaagctgaagtgtacgccctctccccttttgtgcttatttatttaataggctgcagtgtcgcttatgaaagtacgatgtacagtaacttaatggaagtgctgactctagcatcagcctctaccgattgattttcctcccttctctagccctggatgtccacttagggataaaaagaatatggttttggttcccatttctagttcacgttgaatgacaggcctggagctgtagaatcaggaaacccggatgcctaacagctcaaagatgttttgttaatagaaggattttaatacgttttgcaaatgcatcatgcaatgaattttgcatgtttataataaaccttaataacaagtgaatctatattattgatataatcgtatc

SEQ ID NO: 87824 - DNA, 1029 bp, Homo sapiens
ctggctcccctgtccctgcagccctgcaggtcagtgcatgatctgggttcgtgtcctgaccaggtgctcctcctttgatccgaggggaaagggactggtttatagaaagagcctaggagacaaaagggccagtccccctgcccagaatggagcagcagcaggacagacccccacgaggccccccagagaggaggaagatcccacggaggaacacatgaggttagggacccttgttcagcaccccaaacagcctgcctgtttaaagcaggcagcaggcttaggccttccctgcaaccccaacacccacaagtttgtttctctaggaaacacattcactgtctcagctggctgttactctctcagaccatatggcaaagttttccaagaaaatgccccgacaggggtgcccagcacactgcctgagggacaacagacatcagaacaaacccccagagagaaacagtcaaaatcagggcccggtgcagtgttgtcatgtggaacctgctttatccattgctgagtgttgaatgtgggtaatggttagggctttccagatctcagcagccaaagacagttattgttggaagactgtcatgtagataaccatgagcaatggctcgcctcagaatcagttcataaaattctatggtactggccccttcgtgggtattgtgtgaaatgagatggtggcgaggggtgcgctgtggaactgccgcagccacgcaggaggtccctgggggatgctttgggaagtccttgcccctgagcactgcctgattgccagggcctgtggaggtctaggccgcctggcagaatctagcaccgtccgaatccccgcaggacccatggagctatgaccacaccaggccattcaaatggctctgcattatcttcccttggaaggtggccactcctcggtggcagggcctttccctgaggctgcaggccgtgggctggcagcccgtctcttggcatttcaattgaaggtcaccaggtgctgggtttgaaaggaagtcactggagtgctgc

SEQ ID NO: 87825 - DNA, 1028 bp, Homo sapiens
cctctccctcctctcctcccctcaccttccctccttctctccttcctctcctcccctccccttccctcctcctcccttcccttcctctcttctccattcctctcttctctccttttctttcctcccttttcctctttctctttcagtctttgtctatgtctctctcccaatctgtttctcagtctctctgtgtcactatctctatctctttctcttttttctctccttccactgtgtgctagactggtcaccacagtcagtcatctccctgccttctgagacactcacctcattctttgtatctttggtgacacccagccaagcctgaggacataggaaaggggtagtaaacctttcttcaaggtttatcaaaggcatcaccaaccaacatttgttcaatctcatgcattctggaattcagtgggtacagaatgtaagcaaacatcacggaacatgtactcttgccagggacagaagagcccgtgtagacgtggaagggaagaggagactctgggcccagagggcagcagcttgtgccacatgccaaagccctgccacccacaccaactctagagaactcactagagccacccagtccccgtgctgccatcaggaaagctctccacccaaagagaagggtcctggcgcctcagccgtgcccctcccccaacctgatggagaaagctgcctccagcatgcccacagctctgccagggccttaatatagcagacttgatgccaggggtggcccccgcacctgttttgtgccagctctgtgctgggtactagtgggggaagttatggagaaggttctggaacctgagagtgaaggagttctttgccccagtcatgttcacgtgtctcacctgggcagcatcttgcacaccagtgtacccaacctttcttcccaccatggcacactgaggaagaggaagcattagccctgcaccctggggaggggattgagaagacagccatggatgtctcccaaggggccccagctgccccgagccccgcccaggtgccca

SEQ ID NO: 87826 - DNA, 1079 bp, Homo sapiens
gatggacttccttctttcggattcctctgacctgtctgcagaacgagggcattgaggggatgactgacctcaacttttctggccagcacagctcagaggcacatttcagaaacacaggaaacttcatcccagagcccgctgctgccagaaggcagagaggaatcggagaggaggaggcaccggagagaagaactgcatttaatgcccccagacaatctcctctctgtgaagcagggacacacactgatgcgttcacaaaaaaggagacaaaccctgccttcagaggagaggctgacagccctgaaacccgctcagctggctggggagggtggcgcctgccagtgcggcccgactcactgtcccctgcgggggccaccaagggtccatgcagccgagatttctacggggctgggagacagcaggtgcttgggaaaggccgagctctgggctttcctttcccaagccttgcttccctccctctcgccttcctcccagcccagatgctaagggaggggcaccctaagcccctactgggtgcttgacattttctcacagtaaccctccaatggggcatgttcatctcccaaggccattgtaacaaatgatcaaaactgcgtgacctgcaacagaaattcactgtcatggtgtggaagccagaagcccgaagtcaaggtgttgggggaccctgctttctctgaaggctctaggagaggaccattcctctcccagctttggaggtggttggcactccttggcccatggcagcagcattgggtctctgcctccgtcttcacagccccttctcccctgtgtcttctcctaaggttcttataaggatgctcgtcgttggatctagggcccaccggattcatcctggatgatctcagcttgagattcttaactgagtcacatctgcaagacctcttctttttttttttttttttttttttgagacagagtctcgctctgtcacccaggctggagtgcagtggcgcgatcttggctcactgcaagctccgcctcccgggttcacgccattctcctgcctcagcctcccaagtagctgggactacaggcac

SEQ ID NO: 87827 - DNA, 1066 bp, Homo sapiens
acttcatagatcagttacttagcaaattcatactgagtcttattttgggaagtcttcctgagggaagctgtacaaaactgaggtggtcaggttcatctcttcaaagtaccagttatacagccatctaaataggcataacttatggcaaaattataacaattttttttctttgcagtaaatgatacctcatctaagaggctctaatacctaaagagtttatccttaaaagtaaaagtgactttgtaccataaaataaccccaaagccactctctagggtttttattttcttctttctttgtctttatcttttctaacttagttttggaattacgttagctactttggttccatagaacaagttttcaacttggggtctacagttcctacagtgtgctcattgtctcagtgaagttcttttgttttcaaagattcatggtaacaaaatgtattttactgctacaactaaaatgtatttataataaaatgcctttttaataatttggagatgtgtttattatgtgtgaactataattctctgcttccttctgcccttaaggtcaaaggtctgactgaagttaagcacagccctttgattttattcctaatagtaaatggtaaaacgaatgtaactgagaactcagtgtgaatttgtaaagttctaactctactttccagacatttgtgacttggcttaaatcccctaacttcagcagtaatgcttttaagacttaaacgtgttacctgaaagtttaaagatctccagtggtcagtgagaaaataagcccttttcaaacagtcattcaacaaatatcttacaaatttaagaaaattatcctgaattactcttaacaagtcacttagttgttaatgcggcccagaatttatttgagaactcataaacctagtttgtagtgatatattatgtaggtataatcatgcacttcacagtaatgcgtgccaaacattaattcaacaatccaaaaaaaaaaaaaaatgctggttgtgcagaaaattgccctgagtcaaggtcttgtttttcttggggaaataattctttgcatctgc

SEQ ID NO: 87828 - DNA, 1081 bp, Homo sapiens
agtgttgggattacaggcatgagccactgcgcctggcaaatgttttagtttttatggttattattattttttttttttgtgggggagggtggtgagggcaaaggatttgtttttcaaattatgtgtttctcaggttaacaaagttattttagattctctgccatgccagcaggtgttagagagagcctgaagtgttacatatggcagaaaataaatgtctctgattactttgctacctttaaaaaaatctatatgtgtttgcaaaacagcctagggggatctaccacctacacagcatgaattattcataagtcataggtgcacatgtatgagcaagttatttttgagaaagaaactgcctataatataataaacctgtcaggtctttgggtattgtttaatttgtgtgttgttgctgttttatctggactgcatcttggggggtactgggctctgcttctggtttttagtttgcctttgaatttactgagctactagaaagacaaaaaaaagctatttttatggtaatagaatacagaatgacttaggtgtaaaagtacacgtgaagaccatcgtagaatatacagctttggagttttcttaagacacagtccttcctactgaaaaggcttgctcacctttggagaggattgtttatattttcagcctgggttcctttatgcagtcccaacttagaggggagcttcggtttatttacactttgctttgcacgataacttgtatgcgaagacctctttatatctttcagtaggtcagagggctctttgtcctggttgaagtcccaaagtgtcagtgcagctgagaatgtttctcagcctccccctttacagaggaagggtcctggattttcataaatccagaccatgcctgcttcctataaatccatgtatatgacattgtactgtatctgatttctgtgccagtcatctgacctgattctttaaaccccataaaggtactggctatatgtagtagttgtatcctaggtaaatatggtgattaaaatacttctcttctaaattataaagataatgagttttgcattttattaaagggtcct

SEQ ID NO: 87829 - DNA, 1057 bp, Homo sapiens
agcagatttttttctaagtgaggttaattgttcacataatgtctttttacatctttgtcctttgtatcactctgaagttttctttttcttgccagaatatttgtttcactttttaatttcagtgctacttgagattttctttttttttaacctgaaagacgatattttggatgatagagtttgtaaagtgagccttcatgctgaaaaaattcttttcatgatctaaaaatggtcttttgttacgatttgaagaacctcattccgtgtaacatggatattttcttgtgtgtctttaaagggggttttggttgtcatttgggcatatgctttgccaaattgttatagcagaactttgtttttgattaatcagtagttaattattgaccatttaaactaacatgaccttaattttcctttcctcacacagatgtgctttctatccaggtcattttttacacgtgaaataacaaactgctttgtgtagattttttttttttttaaatcatcagattttagaataagtttaggtttaatgtaaacatcaactggtcttttcagttcagagaactgcagaataagtaaaataagcagaattcccactgaataagcattacctaattaaacatagcaacatctaagaccaatttatgaaaatactctccttttttatggaggcattggagctgctgagaaagctaatgaatttcccaactttgggataattaatatatagtattgtgttgctctagtgtagttgattttatgtgtttaatatttttcatgtcaagagcaaagctgcagacgtaaaagatgtttctctagcccccttagctagagcgagccacctttgttaagagtcagggtgtgaagaacaatttcaagataaattttagtatttcaaccattgttattaagaaaattagacttactgaaatactcatttaaaaacagacaccttctatagcattgttttatagtggagttatttttaaaaagggaatcccagaaagaatctataaaaatacaaggttaaaactttaaatgtattgaaagatac

SEQ ID NO: 87830 - DNA, 1443 bp, Homo sapiens
ttgtgcaactataaaaaaaaaaaaaaaaagaaaagtttgtctaaaatgtatttaaaaagaaaaaaaaattgtaagtagcatttacatttattcaataatattaccacatgctgggtttctgtaccagaaatggccagttgatgtacaaatgtatgttatttttgcttaaattcatttaaattttttttaaaataaaggggcagcatcttctaaataagttttatcagctttttttttttttttggtgacacgatgctgcattctaaaacttttatagttttagactatgtatgatgtgttgttgtaatctccatccaccataggatagagttaaaggcattctttgcaggcatattttgtatgccactgttttttgaaatgtgaaaaaaacgttggcatacttagttattttttggacaagctacacttcaagcttgtttttaatgttaatttgatagtgtgtgtttttttttttaaacaaatcaagaagctgaaaaatttttaggattgttggtgcttagtagacttgataactattttaaaaatgcgtgaatttagtaaaattctttttttctcactatgcatgtgtaaatgtttgtaacctggcttccctcttctccagtggtataaagaattgtgccgctttaaggtttgggtttttttctctccagtaaaaattttggtaccttatttgatgtttacattaaaatgtgacattatacgtggcaattcaaatattttgctagctgtcttgtttgaggaacaccattaaagaagaaatataatgtttgtcaaaaatgtatcaaaattcatcagaatctggggcagaaaactacccttgtttttcatgtctttcaattcttctaaaataccccttattgaacttgtacacaatataaaatttaaatagccatcttaaatattctaccatctaaaaattgctttgaatgaattttggtaaaatccaaaggaagatgtttaccctcttgaaacttatggtcttgtcacacatttaaagcaatatatgtccttattttcctgaccttgtaatactacttttatatttcagaggtatctcgaaactacaatataaacttttaaaaaaaaataagatgaggctggggaacctttcgaatgaacccaatcttcctgatgatccattcaaaaacaggtttttggaagaccactttcgataggcaatcctataatcaaagtacatttttaaaatcaggttgtaaaatggcaaaggtaaagaaaaattactgacatttcttctatgattggagtttagtttatgttggccagctacaaccccttttaatcctcagacagtttgggataaaagagtgcctttggttaatggttagcaagctccaggataagcgctgcgtgcctcttgtattcagctctacctttctgctaagagtgcggttcatttgtgtg

SEQ ID NO: 87831 - DNA, 1006 bp, Homo sapiens
agggtagcattgtaaacaaatggaatcccatggcactattacttagctcagtaataaaagctgttttgaccaagagtctggatatgcagctcctttttatttaagagagagcatgtgcctgtttacaaactatgagcagttactagaataaatatcaaagtgtacagttacacaaactagttttttatttttcagcaagccttcagatttgaactttagtttttatatgttagctattccacttctcatggctgttttatgtgtctataagatagggacgtttggttggatgtgttgtgatttcagcattctatggcagaaggtgtctgtccttgtggctatactgtccttgagttcctggagatgagagccagttctgacacactgagtgaatgaggcacatgaacattgctgggctcatccttaaatctgtgtcactgttctctgcttttagcgccacccaagactgtcaaaccccctgaggatcaactgaagtcggagaacctcgaggtgtccagttccttcaactacagtgtgctgcagcatcttggccagtttccaccccttatgcctaacaagcagatcgcggagtcggccaatagcagtagcccccagagctctgcggggggcaagcccgccatgtcctatgccagcgctctgcgggcccctccaaagcccaggccccctcctgagcaggccaagaagagtagcgaccctctgtctctcttccaggaactgagcctagggagctcatctggcagcaatggcttttactcatattttaaataatcactttttttttccctcaagggagaatgttttaatttctgtttgtatcagtagaattaaggtagttggacttcatctatagatgcacagttccctttgttttaatattaaatatgttctcacttaattgctttgctgctagacttgcaactaatttttttaaagtatattccattattttgcatttttgatgtgtcaaaactttgacagcttttat

SEQ ID NO: 87832 - DNA, 2823 bp, Homo sapiens
gatttcagtttggaagatacaaatgatataaattttctgtaaagtttaattgaatattctctcttatatcagccttccatttctttctgagttttcgttttcttcctttaagctttctggttcatatgtctattcattgtaaaaaggttatcgtttatactactggtttgtgtatgttcgttatttaatgaaaaggggcttataaagttaacgcctgaaattcatgagagtatatttagtgttctgtatcaccaggagacatggttatcataatctgctctttctgagcccatacccaacgttagttttgtactttagtattcacatatgaaaactttagaatgtaatcccctgaagattgtgactaaacactcgggatagtcatagaaagaaatactacatttcaattttaagagctaattgtcttcattacaaaccttgatttaaaaaaaaagacacgctgcgcagccattgtgatccagggttgtcaggcatagagcacacagtgcagtttagaaaggttacttattctactcactaccgtaattgaatgccttagacaaagaaatttcaattgtgctgattacattcctagttgacactaaattaatttggatggttaacattctagaaaaccaaatcaaattcataatgatttgaccattgaaaacaattgcctttaaagcagagtaaaattaaagatgaattgagatactgtgcttagaaacagatctataaaattatatgaaaaaagaaattaaccagatggcagtactacctcttgccttcctccattcaatagctaagactgtggaaatggaggcactcaaaacttaatagcgagagaattgctctcgtcacggctttcctgcctctccgcacaagggcagccagtccagacccattttcttccctagtttacatcctagtggttccatttactttaacttaatactctcagtgcttacccccacaattttcacatttaattggcttgataatgtctgcttgtgctattttatatttccagaagccatcctgttattgttatgccagttcatctctctgccttctttttaatccagcctccagttcctgatttccaattattgctaacaacagtggtgaaagtacaatttctgagagtcataactgaccacagactgaacagcagatttatcatttgctatccaaaaaagaaaagaggaaaaagaaaggggcaatgaaacaccaatcccattctgtcatttgagacggaacgtggaatcttatctttatatattacattaaaataattatatagcaatgaacccttcctgtgtgccaagaactgctgtacatgctatgcatccttatttaattctcccaacaatcccaagatatggggactgtgggtaattcatgttacaaagaagttaaatcagttgcccaaggtgacactgccaataaaagtcagagcctgaagtctaacccagacagtctagccttagatggaggctgatacctaaccactgctctacactgccttgccattagaattgactctgaatattgatcacaagtatctggcaagaacaaattgaacagcacttgggtaactataaaaaaatcttgacatggctgccacatagatcttgtcggaagggttaaaggaatttgggttgtgcaaatacagggagtttagggaggagaaaatatactaagttaattgggtttcaaacatataaaatattttttgactaaatgaatgagtatgctgtgtcatttgacgtttgactaaaagaaatgcagtggagtccagtcaagagtacttacgttggacaggaggaatcacatcttgccatcaggtctaaagaaaaataaattatgatgttatgaaggaagggcccaagagataagtgtagaatagctgactctgctcaagagggccatgactcaactgcctatactttacccatttaattttgagcggatttgctccttcgtgctttttcttaatctactattatctaaaatgtcaatagaattttagaactgaaaacaactacttcaattcccatattctacagataagaaaacagaatcagaaatcagacatatattgtcaggactatgcagtgaggaacacaactgagttttgagcccaggtcttctgacaccatgtccagagcctagcctgtacccttccccgccctttttctttttggtgggagtagggtggagggagggtttcacagtcacagtatattcttgacaatttttactttatatagtgagatattgctatggagtgaaaagagagaggactatggcacaaggtgcactgatttatgaaatgttctttttctttgtgtagtatgagcccagaggacctggtcggcccttgtaccaaagaagaatctcatctagctcagttcaaccttgttctgaagaagtaagcactcctcaagacagtctggctcagtgtaaagagcttcaggaccacagtaaccaatcttctttcaacttttcatccccggagtcctgggtaaacaccacctcatctactccttatcagaacattccgtgcaatggatccagcaggacagctcagcccagagagttgataggtaagacagagttggtggctaaaactaatctgtactcctcagctcccggatatctgtggagtttttcttctataccacctgcccccaatttgcattatcatctttgaacaatatttaatgatgctaatagctcataggtgtgcaatttaggactatattgattctatatatatatatatatatatatatatatatatttatatttatatttatt

SEQ ID NO: 87833 - DNA, 2543 bp, Homo sapiens
ttatattagttggcaagcctctgtggaattctgctaggtgaatcgtttcccttcttggggggtagctataatttcattcttcttccacagacaccattcctccatccagtctccatgtattctggaaatgtgtcctctattgatgacgaggctcatggtcttgattgttgtatatctataatattcatttattattattttagtggagtcttgggccagttgccaccattaactgggaatcatgcttttaaaaaatgattttgtaatttatcaagtgcttttcaatagattacatcacatgaacccatagatatgaacccacagatattactgttgtaaactacagtttattcatcacacgttatctggcttgttaataaattgattatttttagtcttatagtgatagtcctctccttgctccatctagttttttctctctagggaactgtactgatccaccaaactgtagcgtatttgctttaagcagaaaatgataatttgagggggagctaaattgaaataagttagtagaccctaagtgttctataatcaaggatttcttcctcaaatcttggggaaattaaatagattagttttaagtaaatgaagaaaaaaaatgcagcttattaaatctgatattataagagtgtccatgacatggaaagatacctatgatatttcagtgaaaaattaccaggcagtatgtaatgtctcattttaaattatatgtttaaagatgtacataatatccagttttcccactttagctatgttaagttgatcagtatgtttcagtgatcagatgatgtcattctgatctattgacgttaaaatttctagcaacctttcagattttagcagctgttgatggttgttgcttagatctattgtttcattagaatggcaaaatgattatttaaaacttctttgaatttcttttgtatttatttttcttttataaaggagaacttttcctcattgaatatttaattactacctaaaatatagtctatgtagaaagggaaggataaatgtttaatccttgccctttattagtcaattttcagagtaatgaattgaggccttagcaggcctcaggatgaccattgaggcttttttccccttcttttttcactttgaatattattatttgatatcattatgtatttgaatttttactttattgtagtccttatacattttcacaccttgtcccctatctttgaccaatggaaggttcttcattagaaatattagaaatgttttacattgagtgaaaatggaaatatagcctgtcctaatttgtgtaatgcagctcaagccatgtcagagggaaatttatagcttatattagaatttaaatttatagcttgtattagaatttaataaaagctttattagaaaagaagtaagatctcagatcaataatcaaaacttataccccaagaaattagaaaaggaagagcaaaataaattcaaatcaagcagagggaagggaatttcaaagatgagaacagaattcaatacaattcaaaacagaaaagcaataaaggaaaatcaataaaacccagttagttgttcggaaagattagtaaaattgataaacctttagcaagattgacaaagacaaaaagaggatacaaactacctatattaggaaggagactgggtcactacagacccagtagacattgaaaggatggtaataagggagcactacaaacaactctgtgcacatacattcagcaacatagataaaatgaaccacttccttaaaacctcaccaaagatgaaatagatggcatatggacagtcttataactgttaaagaaattgaatttgtaattaaaaccttccaaaaaagacatctctaggcccaaatggttttagcatggaattcctccaaaaatgtgaagaagaaaaccaccaacttacacaatcttttccagagaatagaacacttctcaatttattgtatatggccagcattactctgataccaaaactagataaaggcaatacaaacagagaaaatcacagatccacttccatgaatatcaatgtaagcatcctcagcaagacattagccatttgaatttagcaatatatgaaaagaatatactatgatcatggggggcttatctctagaatgcaaggctggtgtggtatttgaaaataaattaatgtaatacaccattctaacaatctaaagagaaaaatcacacaatcatatcaatagacatagaaaccacatgcatttgacaaaatgcatggtccactcaggatgaaactcttggtaaactagaaatggaaaggaacttcttcaccctgttaaagggcatctataacaattctgcagctaccatcatacttaatggtgagagatttagtgcttctaagattaggaataaggcaagacatttgttctcaacattcctcttcaacactgtgctggaagtcttagccagtgcaataaggcaagaaaataaatggcattagggattgggagggaagaaatgaagctgtctccattcacagat

SEQ ID NO: 87834 - DNA, 1892 bp, Homo sapiens
caaaagccatggcccttggctgcttggctaaggctggacattgtggtctggcagtactgcctgcatcctttcccacttccggtccttacaggtgtgatgggatgaggaggacaacaaagggcaaagtgccatcttctcctgagccaggcagtagaccatccccaattgccaatagattgataaattgctccaatttgattttaaatgccagtgtaagcttgggattagtgtttacattttctctagacgtttagccagttgtcttcctgtctttttggaattattacattctcactaaagagatgtcactttccaaattctttgcaatagcactgtatcatacttgctccgaggggtgggggtagtgcaaaatgaaatgcagagagaaacaacagaagttaattcttgacctctgagcttccaaaagttcagtttttagtaattttggcatgattaaggatttttcaaaggtaatttttatctgtgtgggatttttcactttgcatgataatttaatactctaacctctgagtaagatgtatttcttcattacatattgtgatctatttctggactttgtgtttttcttcatctataagtttctgtgctagaattatactgttttaagttttgagattttgtggcattctaacccagtagtttaaagtctcccttattactttttcccttccagtttctatatgtggggcatggagtggatgggggaggagggtcattctgtggttttactactaaaaaaaaatttaaaataactttatgaactctttcctcctcctctgtcccacctctacacacccttcttggctttttatttgaaatacattaaacttgtagcttaaattgagggaaattttatctttacaaatacttctcatttaatttatttccttctttcctccctccctttttctctcttcttctatttttccttttttttttttttttctgagacggagtctcgctctgtcacccaggctgcagtgcagtggcgctatctgggctcactgcaagctccgcctcccgggttcatgccattctcctgcctcagcctcccgagtagctgggactacaggtacccaccactgcgcccagctaattttttaatatttttaatatttttagtagagacgggggttcaccatgttagccaggatggtctcaatctcctgacctcgtgatccgcctgcctcagcctcccaaagtgctgggattacaggtgtgagccaccatgcctggcctctctcttctttctttctctctctctcttattttttgaatgttcctcttcaaaaatctgtagcatcttcatttaaatcttgagtatttccaatattcttagagtgatgtgttttgttttgtttttgttattaatgggaccttttttttccattatacttttcagtcattttatcttcagggacaaattctcaaaacgattatgtagcaatgttgatactggtgcaaaggaaagcttttgccatttaagatgtgcttcactatggagtagtttgattaaaagtgctcataaggaataaatagaaaatcctttttgaaggcatctttgtaaaagtctcggagttggcttgtgaaatggctcatttttgtgttgtgatattgtaatggctttctgataaaaatggaatgctagtaagtcacttactttgatcagctttcagtaaatcgacatttacttacatcatcttagagatgacatacatgtttcagtgatgtgtctgctttgaactatttcttgttctgtgtgttggtttttcaacagagacactttgagccatctattttcattttttctttcaaacaactcttgttttaaattagttgataattttaatttcaacatactgttgtctaat

SEQ ID NO: 87835 - DNA, 2803 bp, Homo sapiens
ttgggttaagattgaattgtttcttcaaataatgctagcaaaacccccccatttagtgtgataatcagaaactagttctaaatgctgtatgatagtatccagtggatgtcaggatcatcattatgtaagtgaggaagagttgtcatcatcatcaccataactgatttctggcaaatttagaaaacatttacttcttaccaaaaccaaatttgtagctacgtcctttgtctttgtggagaaaatatgttagtaaaaaactttaaataatgaacttgaaaccccaaattcataaaaaatttttcacaaatatttttgcagatcgtatacatgggagtgtcgctctggaaacattaaggcagcagcaggcacggttccagcagtggagcgagcatcatgcctttctcagtcagggcagcgctccatacccacaccatcaccatcctcacctccagcatcttcctcagccgcccctgggattacatcagccgccagtgagggcagactggaagctcaccagcagtgccgaagatgaagtggagaccacatactcaaggtattccagcggactgaaaatagcccctggaatgcgaccccctcactgttctcttttttgactgtagtccttttagcttcaagctggaatattgcctcagagaaattggatgctggccttccaagcacacgctacacagttctcttgttgactctaaaatacagaaaactcatttagaagtaactcttctacaaatttaggcatggatgatctactatgggttggaaattaacttgttcccttactttgtggtcttttctgcgagagaaacataccatcactgtgagcagctttttttatttagtagtaatacttgcaaagaatgaataaagacaggagtaaattcgtggttaaaagctaaaaattatatcattaattatttttatggtggcacagaattctacattcctataattccagctacatatgagtatttggtcctaactctaagcttgtttttgtggccagtgtcacatgaatgctctgaagtgtttcctaatcccttctgaataaggtccaccatcatggtgaccttttataacttccagttgtcaaagctgtatagagacaaggacagatgtttttaatacaatgggaacagaaagaaatcaggtaattgagcatatttaatttcttcacctcagcatctattgagtgttaatgcttacatctgagatgaattaatgccagttctagttattagtactatgattttgtttgttgaaaatacatgtgtagttgactaagctttccttaatgtgatggagccttttgttttctcctcatattttattgttttcatgtaggtttcaagacttaatcagagaactgtctcatcgtgatcaaagtgaaacacgggaactagctgaaatgccaccacctcaatcaagacttttgcaatatagacaagtacagagtagaagcccaccagcagtcccatctcccccatccagtacagaccacagtagccacttttctaactttaatgataacagcagagacattgaagtagccagcaacccagcatttccacagcgcctcccaccccagatattcaactcacctttctcgttgccatctgaacaccttgcccctcctcccttgaaatacctggcacctgatggagcatggacttttgctaacttgcaacagaatcacctaatggggccaggttttccctatggcctacctccattgcctcacaggccaccgcagaacccttttgtacaaatacagaatcatcaacatgctattggtcaagagccatttcacccattgtcatctcgaacagtatcttcttcttcgctccctagcttagaagaggtaaatgtcttcttattttccttttgttattagctgattgtgaaaaatatcagtatttattgatttgataataggaaggcacagatcttattgaatttaacagcgtattaaagataatcctttcttgggaattattttaattgccaccctcctattgtatttcaggttttgtaaagtggacacttttgttgaaacatgaagccccttaaaagtcttttattgctgtttaaagaaaatattgaatatctgaggactctattcaaggagctttgtctttttttaatctgaggaaatggcttttagtgattcttcttttcgctttaagttacatgtgttaattataaatttgttaatgagaactttccaaagatgctggcttttcagccagtgccagctccaagtgctgtgctccttctcctgccactcagcctggtgctttgttagacccagggactctgattcccaaatatcagaatttgcagatttttaacataaaattgactgtgctaaactaagcattttaagttaaactgaattttatcttaaaatacttagatatttctgccgggtgcagtggctcacgcttgtaatcccagcacttggggaggccgaggcgggcagatcacgaggtcaggagatcgagaccatcctggctaacacggtgaaaccccgtctctactaaaaatagaaaaaattagctgggcgtggtggcgggcgcctgtagtcccagctactcgggaggctgaggcaggagaatggcgtgaacccgggaggctgagcttgcagtgagccaagatatgccactgcactccagcgtgggcgacagagcaagactctgtctcaaaaaaaaaaataaataaataaagtaaaatacttagatatttctaaagagcatctttatggacttttttttcctatgaaaaactt

SEQ ID NO: 87836 - DNA, 1038 bp, Homo sapiens
aggaggcagaaattgcagtgagccaagatggtgccactgcactgcagcctgggagacagagttagactctgtctcaaaaaaaaacaaaacaaaacccaaacccaccctgaaatcagaaggaaaacacattttaatgatttatatcagaatgaaataaatggccatctttctaaggaagaaagtgtgaaattaaaaataatgccctgaaaggaattaaagtagatatgctaataaaatggcagtatcttttcttatgactcacatttaatatgctgttttttttctgtcatctttttaaattaaaaaaaaatttcctttatttgattgtgagaaagtaaataattgagcactcagctctcctgctggaagatatcaatgtatcatatcctttagatgtgttagggttgggaaaaggtggagagcaactgaatttgaatcttctgcagttaaaaaaggcttcttctttttttctaggttgatttggaatcaaatccacagaacagaagtcctgaatcacgtcctagtgttgtttatcccagtaccaaatttcctcgcaaagataatctcaacccaagacacataaatcttccccttcctgctccccacgcacagtatgcaatccctaatcgccactttcatccccttccccagctaccaagaccaccctttccaattccacagcagcacaccttgttaaatcagcagcagaataatttgcctgaacaaccaaatcagataccacctcagccaaatcaggtagtccagcagcaaagtcagttgaatcagcagcctcagcagccacctcctcagctttctcctgcatatcaggcgggacccaacaatgctttttttaatagtgcagttgctcatcggccacagtctcctcctgcagaagctgtaattccggagcagcagccccctcccatgctgcaagaaggccacagtcctctgagagccattgcacaacccggccccattcttccttcacatctgaatagcttcattgatgagaacccctcgggattacctataggggag

SEQ ID NO: 87837 - DNA, 1074 bp, Homo sapiens
acacctgattatgacctccttcatgtgaccaaactatgcatatcaacaatatcttctggaaaaaagtatatcccagctgaatataattttagtcattgaaaagatggagatttatggaggaaaatgtttgtttatgaagaaccttaatcaggttctgagacatctgaagagcaggcattgcatacttgggaaaactgagatagaattgtcgtgcttctcacttctttttgtagataatttatacatactcagtaatcttaagggcctaaaattggccaaatttaatggcaatccatttgagctagatgattagagatgaggatgcacttggcacacaatttgcatcacaaccatttgttgcaacaggttggtcaccaagtgtaccccagctgcaactcaggaacaagctgcttgttctgtttttggggagtggtcagttctatggctaatttaagagcctagggtgaggcaagtgctctgcaatcctcagtcactagctcatcagtgaaacttgtaaggagattgacgtgccaaatttatttacactccaagtaatgcatggagtgttttgacagagccggaaaagaaaaattgcctctttccatcttatattttatttttcacattgtcatcacttatgatcaaatttacatttcagaaggatgacaacactccccagcttaaaaactttttgtagttatcacagtttatggaattaaaaacaattactcagtattgaataattcagggtctcatgtgattgggctcttgtagtttcctctgatattgaaaagggaaaactaatatataaacaagtgaagttatagctctgcgtacacaaaacttcccatgctgtccgaatctgccatacttttcctttcttcaacctttgcataaactgttacctttacctagcatgtccttctctccttggaatattccacctctttttgtaagattcaactcgaatgtcatgacctctgtgaaaccttccttaattttctcaggcactacagttgcatcctcttacagtacctctagtgatatgtttacatattgttatcttctactgaa

SEQ ID NO: 87838 - DNA, 1075 bp, Homo sapiens
atttttttaaaaagataatttctttaaccttcatctcctttatagctactgcctcatttctcctttcttcctcacctcttatttgctctttaatccacatagtctacatttcactaaaactattgtgctcttacgaacatacttcaaatgtagtcttacttgacttttcttggtattaggcactgttttctacttctgtctttgaccatcttgtttctttcgttttctttgacacatttttacttttcacaatctctctaacatgacctccgtcttttttaaaaagttcctgctcagcctccccaagcatctgtctctagtccttaagctgggatttctcagagttctgtcctagtcccacctgtcttgcattctatggtttcttactataaaccagtgcaatccataattttaagtatccacttcatgataccgacttccaaatctgtatctccaacctcagcctagttttatttaagcagctattctctttattcagttacttatatcacataagcatctcttactcacagcttctatatatggaaggattcagtacccactggaggggctgcagtacaaatgaggcagccaagggaacctcctgatagataagtgggggctgcagtgaaagctgaagtggtacgtgtttgggaagtggtgcagagagagaacgagtggcatgtcaggatggtgcacctgcaccagcagcacatatagtcagaggcagcttgggacgaaaccaatcgcacgagtcttaggtgctctcagagcaactgaagccaagatatctaagtgtctctcatgtccttgttttaaaatttctgttaggattcttctctgttagagaactaggcaacctgaagacatgttttgttttctctcccaccctgatgctttgtcttggggcccaggaaaaataaaagaactagtcctggttcttttgactcagtgcctcctcagtattaagaggaaaatgatagaggagaatctgattctgatagtagcagatgcaggcttcttcagctcttaccattctctaccttgcttagggagccaattgtagtattgtaga

SEQ ID NO: 87839 - DNA, 1922 bp, Homo sapiens
ctttatttcactttcatttttaaaagatatttttgtagggtggagaattcttggttggcagtttttatcatttgatactttaatggtgttgttctaccattttctcacttgcgttttttccagtgagaaatctgatgccatccttatctgtgtttttctgtatgtaacaagtctttttctccctggctgcattatagattttctttttatactggttttatcagtttgattatgatatgccttgatgtagttttcttcctgtttcttgtgtttgaggtttgttgagttgctcagatctctgagtttataatttttatcaagtatgtaaatttttaaactttatatcttttcagatatttttttctgtgttgcccctaccactgttcttcagagattctaattacccatatattaggatgcttaaagtttttgcacagtttatgggtgctaatttttttaacattcttttttctcttcatgtttcattttgggtagtttctatttctgtgccttcaaatttgccagatttttcttctgtaatgtctattctgctggtaattccattcagtgctttcttcatctccgatactatagttttcatttcttgaagcttaatggtaaggtaattctggcatgataattcattttacaaagttccagtggaattccaaaaagaatgttttggaacaagaacctaaatcaaggattccttcaaggaacttaaactatccagtggttaattcttttgtagattaaaagcctttcccatgtatgaattgtctattataactgtgcttttttaaaaccttaattttgcctgctctactatttatcacccacttatacacggtttgatatctattacttttaagcagtataactacattactttctgaatatctttattatgtttagattcctttactaaattagattgaggcgttatttagatttttgcttaattgcatttataagtgaccaaagcattgagcctttataaataggcaagaaggcgaaggcctttaacacatctagtttaagcaaatgaggctgtaattcctggagattgggtagtttcctttgggattatttgatgctttaaggtttttcccttattaggctttgccttgtcaatgaagtttgcttcatttgtaagttttctttcttgcagagaaactgtaactctgaaaatttaagaacaaaacccaagtagtcatacactgatcataatgggtgaaaagtgtttaaagtattctgcctctttctctaatattggataagcattggaagtgtcatatccactggagaaaacttataaggatttttaaatattttcttaggtaaaagtgatacaaataattccggacctgaaattaataagattcgaacaccagagaaaaagccaacagaaccaaaacaggtatgctgcttagttactgtgttgtcctagtggatttagtctgattggtcatcttggaatcttgatgttttaaagaaaaatacctccctttgtacacttatcctttatgtttattttttcacagggatatagtgagccatattgccttctctttcttcatcttttctttggctgtgctatttcatgtatcagtatacttttctcaaattctgttattcagtgataaaattgaatttagagattttctatgataaggtagtaaatgaagacagagctacaggtgtgtcattacaagtgtgtcattatcgtgaagaaggagaacttcttcctcagagaggggaagacttactcaggtccctcaccttattctctcatcatacccactaagcccttaattctttatctgtccattcatctattttctctgcttctgtgcttataaactacttagagaaaatcaagtcactggttgaattagtgccactggaagttcttgttttct

SEQ ID NO: 87840 - DNA, 1435 bp, Homo sapiens
actacttaaaaacattactctatcctttgtaagactatagatttttagaggccgtccgtcttgtatataaacccattttctctttctttagaatttttgaatattttgttaatttgctgacacgagtattttcaattcaggagttttagccttggaaacaatttctttcatttaaggcaagcactgtaatttcaggctgagatgatcattgccaaaggtttttggcaaccttgcccacactccagaatgggaaaatgcttagctgcaaacatttctcagccacgttggtcaggatagttcacaatcatgacagccaaggagaatgactgtaaatgagaaatacgtaattcatgcccactccccatagacttcagactttggattttagcagttatttcttccagacagcttggcaacactatacatcatctgctttaaatagtaagtcccttaggatttttatttcactttactaggtcaaagagacttctattttgtaagatttctgagagtttgcatttaacagttataataaaataataggagcagtagctcagatgtcattgtatttattccttttgtgttaatatgcagagattatatatctagacacacttaaacaagttttctgtttttgtattttaaggtggagttgaattaaaagcacagatgacctatttgaattttacctataataaatgaacattaaatgatgtggttactcatattaagttggaataccagttttttgagttgagactccttaggctaagttcttccttaacttttccccctgtctattaaactatgtttctatgcaattatgactttaaaagattatttttatggtaatctgacatgtatacattcatatggaggggaaacaagtaaatactataaaatgatttaatgcctcaaggaataattaccaattttaagccctcagtttcttcctaatctgaaaaatgatctattttccattacatactaaaggtgcagggagctgttttttagccagttaagacacaattgttagtattagcatcaactttgtagttatttattttgagaaaattaacatctgtgtgtgtgtgtgtttgtatgtctttgtatgtttgcttttccctaatcagcagcactctagcagtttgccttccaaaatatacttaatgcatgtattttattttttaataacctaggtaccatggacaggataccagggtaggtttgcagttgatcctcgaattattacacatcaggcagcaatggcctataacatgaacctattacagacacatggacgaggatctcctattccttatggccttggacatcacccacctgtcaccataggccagccacaaaatcagcatcaggagaaggatcaacatgagcaaaatcgaaatggtaagttgtacttcgctgttctcctgtt

SEQ ID NO: 87841 - DNA, 1115 bp, Homo sapiens
tgatggaattggtaagtggaaaaattaccctatgaaaacttgcttttatgatgtaagagattttccccaaatttcaccacaagaaagaggagggtggggagatggtttctctctctctttctctctgacacacacacacacacacacacacacacacagtcactttggaacctctcaatttttttattcaacacttagggttttatcagtgcattgatatgttatttctgaaaaggggcaattttgtaggtattcatgtacatatccagaggttttgaggaaaaacatttaagccttttatgcaacataaattttcagaaaatatttatgtcctacaaatatcagatcataaatatttcaagataaaaaatgtacttaaattattttaaatattgcatagtcgtgcttttaaaataattccttaactttcatattgtatgtggttctgttacagttgtaagtcaaaactttattctgaagagttgtataattttttagatagaagactgtttactaggagtgtgtgcatagctttctctcttgaaagacacatcctgagttcctcagaaaatatttaaaattatgctagtttataaaaggaatgctttgtataattcaagttaattttagggagcattataaaaattttttttttttgtaatatgctttacttttccacactgataattctttgatgataagatatcttaggcaaacctgggaaatatattttgctgttgaatgatttaaattattttttctggatgactatgtacagctgttgagtgcatcctttttctgtttatttttcagttcagcccaatccttctgtacttattggcaatcctattagagcatatactcctccaccccctcttggacctcacccaaatttgggaaaatctccaagccctgttcaaagaatagatcctcacactgggacaagtattctttatgtacctgctgtctatggagggaatgtagttatgtcggtgcctttacctgtaagtggacattcgaaatactttctattgaatcaagtaaaataggtttcactaaaatggttctaatcccaaatagcattctaccaacttcttttttaaaaaaaattttca

SEQ ID NO: 87842 - DNA, 1049 bp, Homo sapiens
gaggttaatggaccaactatgattttttagggggtctttttctgacttcatgaggcttttttatgactttctgacttcagctgcccttcctcactcataaccaattgaccttaaaccttctgtgtttactgctgatctgaatatttgctctttccaacagttagataggtaggtaaatcaaacatcattgtatttttgcttttgtcaagaatgatttttttttcctgctgtagacataatcccctctttagttttcagatgtaatttacaaatttacaaatttgtgtgtgtctaaaggtaagttgcgcaatgtgctacttttcctcaattggcttgatacgtgttacttttagcccatgggaagagagaattttttttttaatccagaaattcagaaccattgtctcttcaaatactgtttctgcccaaatgtcatcatttttaatggtagactaaatataccattatgtgaatttgctattgcttatttaataaatcctgcactgatgggcatgtagattgttaacatttattacacacataaaccatgctctctgtgcccaaatgcatgattacttcatttggataaatttctggaagtgcacttactgggttaacgtatgtacatttttgatgctgttgatatgtattgccatattgctgtctagcagttagctagattatctcacaagcaaataatgacagttccccttttcctgtttttgtttttttaaagtaaattttatactttaacacagcatgaattatactcaaaacgtcataaatcctaagccatatttgcattctttttattccgttaaaggttctcatcttgaagattaacatttttactttgaaaaacaacctctgtgtttcgtgatttgttagaaaatgtatagagaaactgcaattctatttctgcaaaggaataaaatttaaatcatgttgattgcgtatttcattttaatgaaaaatattcataaaaaaggaattttagatacccttaatttgaaactgagaaaacttgaggcccagcaatattatttgag

SEQ ID NO: 87843 - DNA, 1094 bp, Homo sapiens
cgtatgtatataaattagaattatgtgatttatattcattatattgaattttatatacatagtatatatatgtatgtagtaagtatgcctagaagtacaaattttgtgtgaaatgagttgccatcagttttgaaaacttattatatgggtaataaaaaagatcattttgaattagtgtggataggtgagtactgaccatattacttgcattgttgagccagaattaatggagagcctgttttatatgtactataatacaaggtatgactgtagtttcaaaatcaaacttctggagtcttgtgatctggtagaaagattttatctcaatcatagatgactattgggtttaaggatttgaggttgggggtggaatttgagattatctttagttatttatattcatttctgtgatctcatccattgaattgtaatctgatcttgtaaatcttttctgtaggaaattttgggaacggtttattgccctgtgtcatgaaaacagtagcctacatggaatcacttttgaacagatcaaagcccagttagaggctttagaactaaagaagacatatgtgttgaatccgctggcacctgaatttatcccccgggctctaagactgcagcattcaggaagtaccaacaaacagcagcaatcaccacccaaggtaaagcctctgttaatgaaattgaagaggttaaagggagaaaacttcgcagaagtgccaaaggtttattgggatgcaagttactttaagtgttggaattgaaggttacatttggcggcaagcggtttctgcaaggagcttgtttagtgtggacatgtaagtgaaaatacagtatggtgtttagtcatgcttaatgttatgatcattctcaaacaatttttaatactgataacttctggtatcatttatataaaataaccttctaatcctctctactgatagagttgttttagtgagatgtgaataaaacaaagaagtttaaaagattatcacacttactaaaacatgtccttatattctttataaggaataatgttataataacgatatttgtataaagcaaataattctgaacctttactgatgaccaat

SEQ ID NO: 87844 - DNA, 1057 bp, Homo sapiens
aacaactagaaactattaggggagtaaatggatttaagaatagtgttccggccaggcgcagtggctcacacctgtaatcccagcactctgagaggccctggtgggcggattgcttgagctcaggagtttgagatcaccctgggcaacatggcaaaaccttgtctctacaaaaaatacaaactttagctgcgtgtggtggcatgtgcctgtggtcccagctactcaggaggctgaggtgggaggatcgtttgagcccaggaggttgaggctctagtgatcacgccactgtactccagcctgggtgacagagcaagaccctgtctcaaagaaaataaaaaaaagaatagtgtcaagccacattagttttgggctctccttataaataactccaaatatatttaccaacctgaatatttttaaagaaaccattacccctttcttaaagaatcatattatactgtgaattgcatgagatcagcatttttcatccattgtcttgacagaaatcattactttcttagagcaaatgggtgaataattcttcctgaggccatgttctcagaattatccagggctaatttttaacttcaaagctgagtctgcagttgcctgtttcttactactcagctgggaagtgtcaaggtatatacattaattgataagctaagcagaatattttcagggaagtaaatatattatgttgagtgaaaaaaaaacatacatttcatagttacatggcaatgttgattgtctgctttatttgtacagtttaatcatggctgtagcccaagaattgatagttggggcatatggatatttaagctttaatctcactaatttaattagatattaatttactctcacagtacaagtaagctcagagaatataatatgattcttgggtcctgtaaaaatggaagagtgagttctttgtagtttgagttcattaggactgttttcctgcttttttcatttaatattttcaaaaaaactaatatattcccaaatatcaatcaagtttttaaggaatacttactgtgtatattataccagttca

SEQ ID NO: 87845 - DNA, 1451 bp, Homo sapiens
cttttggctattgtgaataatgctgctatgaacgtggatatacagatatctgtttgagtcactcctttcagttcttttgagtatgtatgtaagcatggaattgctggatcatatggtagttctctgcctaaatttttgaagaactgccacactgttttccacagcagctgtaccattggacattctcaccagcagtgcataagggtttcagtttctccacatcttcgccaatgtttgttatttagcaataacattttaaaaaatgcaatgcttttattatatcagtggttcagaatgacaatcttaagtcttttcttaaaaaattttctttgtaggaaagcaattcagagttttgtttcttagcacagtacgtacaagacatacttgtaaacataaacagacaccaattaaaaagaaagagcaacttctggaagattccacagaggacttagattatggttttttatctaactacaagcttctcaatactgccatcacaagagcacaatccctggttgctgtggtgggtgatcccattgctctgtgctctattggaagatgcaggtaattatgtgttaatgttgagacattaaaggggaaatgtgacatgatttgtatccctatgtgtatatttattcatatgaccttctggctaattaaaaacaggtttattgtagcctgatatccagtgggaacacaaaagcatattactttggatctatttattgtatgcataattgtgtattcattgagccattattcaagagatatttcctgagtgacttctaggttctaagcactcttccagcttctgaagatacatgagtgaacaaaatagacaaagatctctgcccttgtggggcttacattttattggtggggcttactttttactggtaaggagaggaagattaccgtaaactaaataggaatattatatagtattttacatggtaagttgaatggaaaggaaaatattaagaggaattaggaatgatgaggacggtgcagactagcttgtgattgtaaatagcgtggtgagagcagacctcactgagaagctgacttggaagtgagggagaagctatttgggttaaaagtgctccaggaagaagcaacaactagagcaggggtcctgagctggtttcatgcatgtgtttgtctttgatggatattaacttttatatcccttagtgcctcactttttcacttaattgttctaatttttgatgaatttccttctgtagtcttgctctctcaaggcttctcaatgtagataattctttgtatctggttaatccagaagatcttaacattagggggttagacgtggtcattacttgtctttcggtagcattattagtattcattagactttagttttaaggaacagtttctactaaatatggttaaaatatcaacctacacaccaaaatctttctttatacact

SEQ ID NO: 87846 - DNA, 1057 bp, Homo sapiens
ggtctgcttagttatatcagtgaggaaggggacaatgttagaccttgtactgctgggacttagtgatgtcactgatgacaggaagcttctagttggttggttagtttcattggcctgatctggagagagtggactgagaattactggggctgtgagaacttgccttccctagaatcatggcctgtctttttcccacacaggaacttgagcttgttcctccctacacaggaacttgggggccaatagcattgtccctgattttcatgttttcactggttgtattattggagaattttactgtttaaaatgtaaatgaaaaatttatattctcattcagttcacatcagcaaagcattactcccatttaggggtagtttttttttttttttaaatgacatctgctaaaatgggatcctttataaatcagttttagttacgatattattttctccaaacattggtgataactttaatatgtatgtgtgtgtttgtttttaaaggtgtttgaagtggtggaacgtgtagaagagttaagaaggaagtggccagtagcgtgggggaagttagatgatggcagtattggtgtggtgactccatatgctgatcaagtgtttagaatacgtgctgaacttcgaaaaaagagattatctgatgttaatgtagaaagggtgctaaatgttcaaggtaagtgtcaattgaaatgaattcagtcattcaaatgcttaaatctaaagtgtgttcacattggatttttagtactcaagatctcttttctgaagttatgtgttcatttcatatcaagttctttaatgccaggtttggcaattaaaggttgaattcatttacatgtttattaagtttttatatccaaataaaataagtattaacaaatataccttttctgtgaccataattatatcaatgccacatagtatatgtatgctgtgaattacagtcataatagtatataacacattctgctgttatacggtatctgaggatgaatttcttcataaagatttttatgtatagacttttctaagtttatagttaacag

SEQ ID NO: 87847 - DNA, 1139 bp, Homo sapiens
tattttcttagtggtttctttagggcttacaatatatatcttaatttatcagaatctacttcaaatttttattaaatgaattccaatgggctatagaaactatactcctacatagctctattcccccttcctttctagggaatagaaaggttatatttctagacactagaaaatatgcacttaatacgaaagaaggcaataaagaagacacaggagatcaacctgtgctattatatataatatacctatatataacaaactcaatatatttttataattattactttatataattttatgttttttaaaaattctaagagaagggtggcaagtacatatttatggagtttgctgtattaaccttcacttctctttgtggatttgaattaccatctggtgtcattttttacctacctcctttgtgccgttactgtcaaacattacgttgttatatattatagcctaacaatacaattatatacatatgggtttttgcagttgctttttaaaccagttaagaggagaaagaagaaatatgttattatactgtctttataattacccacataattacctttaccaagattctttgtttgtgtggatttgaattattgtccggtatcacttgctttcagcctgaagaacttcctttagtatttcttataaggggagtctgcaagtgaggaattctcttaggttatgtttcatctgggcatgtctttattttgccctcatttttgaaaagtagaatataagattattggttgaattggttggattttttcttttagcacattgaaatatgttttcttactgctttctggcctctattgtttctgttgagaaatctgttagtcttactggaatttctttgtaagtgatgagttgtttttctcctgctgttttcaagattttatttttgtctttgactttagtttttaatatggttgtctgggtgtgggtctccttgtgtttatcttactcaaagttcattgagcttggatgtatagcttagtgttttccatcaaatatgacaaatttttagccattatttctttgaaccttttttctgctcctttccatctttgcgctcctcctgttctcccatcagatgcatgttggtgagcttaattggtgtt

SEQ ID NO: 87848 - DNA, 2041 bp, Homo sapiens
ttctgtgactaaatatataatctatatgaaaagctacatgctgtaataaatatattgacaaacagcatgatggtttgcttatgtctttggctatgttgtacaagtaatctgctttaaaagaaaggaagaaaggaaagaaagggagggacaaaaccatgaaacttattaataagttttaaagtatttctgttagctatagtatgcatctataaaggtatatatctcaacaactcagtggattgtcaccacctgcgtgcagcatgtaaccctaatccacatcaggaagcagaacatgaccagtgctccaaaagcccctttgtgctcctttccagtcactaccctgaccagaaacttacactataaaaaagtttagtataatttaataatattgattatgtcagccatgtgaaaaccatttttaggtttccctgaaagcaattggatagatataattgtatctctcaaaatgtgattcttttattattttcagtcatttgctacagtcactgatgagtcaagtactagatggtgtcttcatcagtaaagcgaattcattttacagttgacggcttgactgtctttcagttgtgtacattgttccagcatctgtatgtctttgtgtttgcatgtattagtacaatcatgggtcacattctgagaaatgtgtcattaggtgattttgttgttgtgtgaacatcacagagtgaacttacactaacctagatggcatagcctactacacatacaggttatatggtgtaaatggcctgttggctcctaggttacaaacctgtacaaagcatgctactgtactgaatactgtagataattgtaaaacaatggtaagtatttgtatatctaaacatggaaaaagtatggttaaaatacagtactatgatcttatgggaccatcatcatatgtactgtctattgttgactaaatcatcattatgtggtacatgattgtatgtgactcatttaaataaaaaaaaattaaccaaggaaatatacaggctagcaaatttcctcataaagtctcatcttgtattgaactgtcatcatttcttcctgttttggcttcgtaccttaccaaaatcattccatttaacaatattatgccaggaccctactcttgttatttatggagaaattcttggtatcacaagtattagatgattggagtaaaattaatcatggacataaggcaatattattagaatcgactgattttttttttcttatgggtgaaattaattttgatgtagattttcccccttttttctttttgtcttttactgcagttatacctctgagcttttctatgagggcaaactgatggccagtgggaagcagccagcacacaaagatttctacccactaactttctttacagcacgaggagaagatgtacaagaaaaaaatagcacagctttttataataatgcagaggtaccttaattctttttgtaaattgttaacattttctcagtcacatcgtctagttttgttaagcatttatttaaagttttgggttgacattgtattgcatattgacttcatttacatgtaaatagtatgtaaagtttattctttcttgtataacattgatttgttcagatgaatctcctatgggaagcaaaaactttgatttacattttgtcttatggtaagacaaaatacatgatttcattcaaaagaaaaaccaagattgttctcaattagatcattattgttaggtatctaaaatagactctgagtaagttttatagtgcatatgcaaatgaggtgtatcattttaaatgaataagacttgaattgcagaattctatgctccaaagagatcacagggacccagacagcgatgttgcaattccatgatgtgctccaacttatataattctcttgcaatttctgactttttaggttcagagagcatgtgagtagtttgaagggtcaggtcaggcagcagaccaaaaaaatggcaacgtcttcaggggctaacaaaccagaaaccctggagttaaggttctgtccgtcagga

SEQ ID NO: 87849 - DNA, 1054 bp, Homo sapiens
atcaaactagtgttatgtgaagtacagatgtaagatgtcaagaagttgttctgataaatatggcaaaacttaaccatcaaaaagcagtacaaatctggggccaggcgtggtggcttatgcttgtaatcccagcactttgggaggccgaggcaggcggatcacttgaggccaggagttcagccagactgggaaatacagtgaaaccttatctctacaaaaaagttcaaaaattagccaggccttatggcatatgcccgtagtctcagctacttgggaggctgaggttggaggatcacctgagcccgaggctacagtgagctgtgatcatatagcactgcactccagcctgggagacagagtgacaccctgtctcaaaaaaaaaaaaaaaaaaaaaaagaaagaaaataaataaataaaagtactcaatactcttagattagcaaactaaactctttacttagcagaaaagaaaataactatagtccttctgcctttgttgctgctctagcgtgctatcctgtgtttatgctgcattttctagggttttttacacacattctattagatgaagctgcccaggccatggagtgtgaaaccattatgcctctagcattagcaactcaaaacactcggattgtcttggctggtgatcacatgcaggtaagtgccctctgagttgctgtgttgaaagtaacttttaattatattttgatgtttaatattctatttctaaaacatcctatgacattatgccatgcattataactttagtacttcaaatagttctgtactaatagtgaaaaatactgttatttctgaagaaaaattactattctgctactcttttttcttttttggatagtctgtcactgttataattttcatgtttatttatttaagttctgttctttatagtatgaatatctgattcttacttttttttgtgaagtgaaatttaaatgatcattcctgtaggatcctggggaattgtaattccccagctcctgtctctattatttgtttacctgaaggagtaattttttttggtgtaata

SEQ ID NO: 87850 - DNA, 1398 bp, Homo sapiens
gtagctatcttgccccaggcattctcctgaactccaaacttatgtattgccttgcttactggatatatccacttggatatctactgaatatgcccaaaacgaaattctgaattcccaccccaaatccgttcctcttttttaccacctttgcaaacgccatcaccatttatccagtttcaaaggcgtggaatcattccttctctcaaattccacttctagttcatcagtaaattctgttggcgttactctcgaaatgcctagtgaatctgaccattttcatatctctattgttggcctaatccaagctaccatctgctcttgtctgcactcttaacagtaaccttgtaactggtctccttgcttctaccctctgctccttcctccgtgccgctcagtgttgtgttggagccaacttgtattggtttgttagagctaatcacgtgtacgacttctcaggttcatgttcagtgaaatgctggtagcttgaaattaccatgacagttttacaccacaaaaatcagcaaacactacaaaccggaatcctctccccttcctagccctggagccgggtgttaaaatatttaccagcacaccgctatccacccccaccatatatgttctgcccagagaaacagaatagtcctttaacaaaataagtcatgtcatgtcactgccctgttggaactctctgttggcttttcatcaaactcagagtaaacccaaggattgctcacaagccctatgtgatctgcctgtgtgctggagcatagtggatacctaatgaatctttgttacatgggtaggttagagatgggtgggtggatgagtagatggatggatgagtcatttctgtgtcattttaataatccattgcgtgaggcctattaatatttttcttttgcaaataatggaagtacttaagactttccagttgttcaaactttaaatttattcttaaatttccagaacctcagacagaggtctacttaagtataggtataagaatatattctaaaataaaatgaaaataacctttgaattcctgttataagtatgcaattcactgttttttgttagcataaatagttaaaatatgagtcaatgtatttttgtaagaacgttctagaaaaagataattccagaatgggaatgttttgaacttaaaaaattgtagtgcttataaatcttacgtttatgtgccattctgttgcaagattactctgaacacttaaaaataattaggtgtttattttgtggtactgcatatactttctatgtctgtcatttttttggtagagagtcacagtggttatagtggcaattgtgtgttaaattctaattcaatagagtgctaacggttaccagattcatttgtaacttttcagatattaccatctt

SEQ ID NO: 87851 - DNA, 4730 bp, Homo sapiens
ctcggatggttttagggtaaccatttcatctaatgctacatacattagatctggacttagccatcacctgaagcagttttttcatttatagaagatggaaaattgctggatactggcagaattatgaataaataagccggttaatgctgagggactctgaaataaaatgtttgagatttagcaaatggcaaatttcagaaaaaatattggcatgattacatggtcaaagtttgttttctaaggttttacattttttaaggagaattttgttggtttgagattatatgtcataatataacagttatatatatattgtagagatagggtcttgctgtgttgctcagggtggtcttgaactgctggtctcagatgacgctcctaccttggcctcccaaaatgctgggattataggcatgagccaccatgcctggccaggttataatttcttgaaaactgaaagcgttaagatttttcaaaaataaccaccttctgatttaagtacaatatagcctcacagagagaattttcctgtctaaactctgtcctctatttgagggttattttgcaggcacttttattttaaattttctaagagtttctttacacacccttactattttgattcacatccctctcatttttaccatagttgttgtgacgtatagtattttaacggtagttgtgagaaagaatgctgttgattctccactcagtttgatgtgtttcagtatctgctgtccatttaaatcttcaaaacttagccaagtcatagaagggacactagtaagatagatctcattacagtagccatctgtgcgactgtgacaggtgttctctactttgaccaatataatatgtgtattatttgtgtgtgtgtgcaaaaatattaaaaaacattttattttgtttggctttttatgcctttttaaaaaacttaatattttctacattaagatctttgtaaaaattaggatctcttaaccagggacatacagatttgttcttttcctcttgttttaaaccttaccaacagatcttttaaataattagaatttgaaattcagatagtttccctattgcatttcatttgttatgcaaaaaaacctactacttaattaatatcagtaaaaagttttctgatgcttttttgtaacagagggaaattacatttttgaaacattgccatttctacttaaagacctggcagcagctagattcgaagtatgtgatttccttagattagttaccaaaatctttttgtacgtagtgtaggacaagataaaattaattttgatttacacgttaaaacactctacactgactctgttgggtaactttataaaaagtagctttagaataagcatttgtttttatagatgctatgctatttcagtggttttaatggttcactgaaattcacgatactcgtgtgttatgttctatttattaacgagatgcatgtgtttaacataaatttttattttccatagacaatgggatgaacagttggatcctcgactaaatgcaaaacagaaagaggctgttctggccattaccactccacttgcaatccagctgccgcctgtgcttatcatcggaccctatgggacaggcaaaacgttcactctagctcaggctgtcaaacatattctgcagcaacaggagactaggtgagagggtgggaagcgtgctcatatttccctggtaggatactacctctgttcttgttttaaatacacaatgagggctagcaagacagttttcatgcagctcttaaacatgaaaaaaagagaaaaggaaaagccgtaaatccaaaccccagagcactaaaaatttgaattctcttaaaacatactgtttttagaattggtagtatagacagtaagttttaaaatagtttttaaatagccatcagaacaagtttgctatggaattgtggtatctattagagccagaagacttgggtttaaatatatgtgtatattttatatgatagacttaaaaataattttggggtacttcctttttaacttaaagagtagtgtaatttcctaaaggtatcactgaataatgctagggattactgagtagggtaagggaattgtataatattaggatggccactgcttttttttttggtattatactgcttgaatagttttgtgttttatcattctttttatttgcaccatttatttcagcaggattctcatttgcacccattctaatagtgctgctgatctctacataaaggattatttacatccatatgtagaagcaggcaatccccaggcaagacctctcaggtattttttttaaggcttattatgtatctgtatcatactttattattcttaagaaaaggtgtctgtaaagattttagtaactttggaaataccaaagtctttatgcattgacatttagaggttatgtcttttgaagaaactgtttaaattaaggaaaaatgtaaaaatctttgactattcatttcttaaacattaagtaagagaaagacatccttttttaagttttgtgtgtattgtttcaacctgagtagattttgatatgtacctctaaaagctagtatgatgaaataatataaatatgataacttaaattaaatctagttcagtaaaaattctaacatattttgcatggcagattagtcatgcagtggacagttctttatgaaaataaaattttggctgtgatcatgcaggtaatttcatagaagctacacattagataaacatgaaatactgaaatgatttctgcaacaaaatgtacttgactggtatttaacaacttttgctaccatttaagagacaaagtgtcaaagaaaatttaaggttgatatagaaaggtcctctgagtatatatggacatgaaatgtacttaaatataggatatgggggaataaaaatccttttcttcagaaaacaataaagaatcatcaaattgttatttattataccatttgctttcattgttatatgaattaatgtttagttttgccattttacaaactaatatgtcatgccctaggttgtttgaatacaattgtttataaattaatttctaactgcacttttgaatcataagtcactaacgttttatttctacttgagctcaagcatggaaaaatgaaattatgttatttaattcttcagtaatcataaccaaagctgtttgaatgatcttagagttccattaaaaaaacaaaagaggaaaaaagtggtgtgacccattaacacgggtttttatgccatattttatttttactttggaagattaagaagcagtaattattttaaatagaatctggttgtatttaatgagaaaatattacatatatacaatcactatcactgtaaatgaaaacatggtatttattgaaggatgcattcatcaataaatagtttgcttcagaatctaatctctgagcttgtaagtgaaagttgagtagttagcatttttgctataggtgttcttactttaatgatataagttgttttgttcacttatattgttggtagagtgagcatgtgtgtgttacataggaagtgtgaccttctcagttatcgtggtgtacttggtgtgaaaacagtggagtaaagccccctcaaatctcggtcgacttagcataggtcatttgacacttggggctgtagagctgttgctgatgaacactaaatccgtcactcgactagcttatatttagctttttccatgtaaaattattttttggaggttataatcaaacatgtggtgcatctagatatgcagaataagaagttatgttcagtagggtacatgtatagttgttgtggcccaagtatcgagactcgccctttaacttacagagagacttacacctgtctgtaagtctcgaaagtggttcagcccaagatggaaaaacatttataaatatattcaaatgcaaatttcatgtgatttcatttagtaaatggaataaagtaagaaaaagcctgacttcccaaatattttctttatgtagtcctgcatttttgccatagtttttctctttgggaaaggtgttaacttgcaaatgtatttcttaagaatattcatgcattgagttcagatttattagcactattattacattaactcattaatttataatttttctaatagacaacaaacatgggaggcatgtgaaatggaatagagaagattagaatgactgagtgctctgggaagattagctttatctgaattgtcccaggatgcagaggaaagaacacaagagggcactaagtgtctgctcatgaccatgaagatgggtgtctctagggagcaaggctcatgaagagtttgctctcttcatgatataggctggaacaggccctggaaagtgctatagtgtgaaaatagtcaaaacattacatagtgaatacagttgtaaatgtgcttaaatatacatacttcatggttaaaatttgtaaaattcttttagttgccaggagttgagctgaacttaaaatatttggagatggagattttagaaaccattttagatcatgtttagtttcagtttttacttcttcactagaactagaagattttaaaatggaatagaggggaaaatatttttgtgtgtggttctcaagatcagtatctggttctggcagatttatggctttgcagatagaggtcatctatggaggggtgtatttcctgctttctgggaaaatggaaggtaattg

SEQ ID NO: 87852 - DNA, 1032 bp, Homo sapiens
aattaccttgaagtttgtttaatttgccctgtacttatttgcctccttatctttatgttattctttttaaaaagtttttaattgtggtaaaatccacataacataaatgtaccctctttaccattttaagtgtacaattccatagtgttaaatatagtcacactgttgtgcaatctccagaactttttcgtcttgcagaactgatactatacacccatcggacaactcatttcccccttcctgcagccttgcctcctctttaagtgattttctgtctctcatataatctttgcccaatgttaattcactgaagatctctctatcctttaagattgagtccagctcatatgctctcttcctcaagcagatgaacctgacccttccatgtcaatattttaacaactatttattgagtgcctgacatgcgctaggctcagttttgtgttttcaagcataatttctctcagtttatcaattaattcgtgaacatttctagacagtttttctgggtaaactctgagctttgtacaggaagagactgcgtcttatttttctttgaataccaacagggttttacatattattcatattcggcacatttaagttcataagaatttcgagtttaaagaagaaaagtttcaattgtaaggccataccagtaagcttttaggcatttttcttgatatgctcacttctgaaaattacattgtatatgatgtagtatatttaaatactactgactgtaagttttaactgcaaaagtaagcaaactttcaagcaggaaaagatttttataccactgtaatttaaatagcaattaaaaggtatctgggtctaggaacatactgagaaactattagttgtaatggtaatgggctcacacctgtaatcccagcacttggggaggccgaggtgggaggattgcttaagttcaggagttagagtccagcctcagcaacatagaccccatctctatacataaagaaataaataggttgggtgcggtgggtcacgcctgtaatcccagcactt

SEQ ID NO: 87853 - DNA, 1035 bp, Homo sapiens
caaagcaaatattattcatcataattatgattagactatgattatactttaaaagaatctctaaacttactgtcccaaacagattcctcccaaagtattctagtgagctgccagcattgatgtttgctttcatgcagtttttaaaacattcattttgtctttcaggttgaacttcagtttcaattaaatcgattacccctctgtgaaatgcactatgcactagacaggatcaaggacaatggggttttgtttccagacatcagtatgactcccaccataccatggagtcctaacaggtacaaaaaggcgatatcttattaaaggaagttaggttaatattaaattgaatatctgtatcaaataactcaagcatacttttataagaaagtttgcctttgcttttcaggagatattggtttagaaaggagagtaaaagaacacttaaaatgaaacatttgaggttcatcattactttttctcagagtctaaatgaattctactgcttttctcaacagccttaatttgataggatgccaagcaatttaggaatatttccaagtagaagttgaatggggaaattagggcctttctaaagtggttccagtagttaatttaaaataatttttatttatttatttagagttggggtcttgctctgtcatgcaggctgaagtgtagtggcatgatcattgctcattacagccttgaactcccgggctcaagcaactctcctgcctcagcctctgagtagctaggattatagacacatgccactgtgtctggctgattaaaaaaaatttttttttgtagacaaggttcttgctgtcttgtccatgctggtctcgaaatcctggcctcaagagaccttcctgccttatcttgccagagttctgggatgtgagctactacacatgtcctaatttaaaataatttttaaagataggagagatttttagaaattatcaaaatggatgaagtacgatagaagaaactacttcagaaactgctctccagttaatggtcgtataaatattg

SEQ ID NO: 87854 - DNA, 1052 bp, Homo sapiens
tttcttcttaggttgttttagtgtgagatgtgtgtacgtgataaagataatactatatttcatataagttttagaaaatgcttttcttttgagatttgttttacttctcttatcctcagtcacatgttggtgtgtgttcaataatgattctactttgaagtgaaatctgtttgattttaagagatacattttcaaaggaaatgtgctttagctgaagctattgtgtccattaaactgtgcatgcctcattgggtcattgtgcctggcttctcagtgctaacagctggcatgacaggcctagtatggggtgcacatttcatcgttagatgggtgctgcttctgttggtgacaggcctagtgtggggtgcacatttcatcgttagatgggtgtggggtgcacatttcatcgttagatgggtgctgcttctgttggtgacaggtctagtgtggggtgcacatttcatcattagatgggtgctgcttctattggtgacacctcagttctgtcgctctgctttagtaaactcagggattgttttattactttgttagatttttattgttcatatagtcagaaatcacatgaaatgaaaaccctatataggtttgaaattttttgaaagttgcactcaagagatggaattgttactaaggttgatagagccatatttctcattagcatggaagtatctttttcagtctattgagtgttcagttggctgtaattctgtcattccctaaaaggttagggaattatgtaaactttaaggatgattttaaaatgtagcatgcaacaatggaaagatggtttttcttcttattaagaaatatctttcttaattgtaggatatattttctagtttaggtatttctgagttactaaatttcaaaaagtacatattttaatatttaagattactaacataattttagttttagcctgttaatcttttatacaaattaattattagtatagctataacctttactagaaagtctataatgtctgcatcttgaacatgtgatgaattttctgtgggaaaagctgcatt

SEQ ID NO: 87855 - DNA, 2450 bp, Homo sapiens
ttttttaatgatagttaattttatcgtatatttttattttatttttttagagacagggtctcactatgttgttcaatctagtcttgaactcctgacctcaagcgatcctcctgccttgacctcccaacgtgatggggttacaggcgggagctactgtgcgcagccccaatccagagtatttttaaagtgcaagtttttaataagcagaccatctttacatttgatggttataatggtatttgtgttgccctttgagaaataaaactggcatgtgaaaatggcttttcaaggagcaaaggttagaaattactaagattatttggataagctatttgccactattgagacattaatcttggtgaatgactaggctcatgtttataatatatatgtaacatttaaatgttgccaaatctctcactaaaaaagacatggcaattgtgcattatgttgtcatttcaaagatagtttaggataatttgtactttggagactgatctttgtctaacttttaattatttcttcctaaaattttaatctgagttgtgaaaccgtttttccaattatgttatgtcaaagtcttggtgtaatgtatcagtaaggttacattttttttttcttttggttaagttttcttttttaggtatatgtatgtttcactcaatagaaaagtaatacgcactacatatagagtgagccaacccagtgctcagagtttatgttactatggatttcatcttgtgctggtattgtgctactttttttcccctggtatgtcagaacttgaacagtcatttgttttgacattgtgccctacttacagtataatttaacgaaggctaacctggattttttggaaatgacatttgaatggcattgtactgcattttaataaggacttagcagtgttttacattaatattttcgaaaagatttttgtttatagtaagttgacttaaagatactgtagtttcattgtgctttatcacacaagaaaagatttaaccttttacagtttttgatcttctctttctataatgggatgggtattggtagtaggaagagaaagtgattatcatctgataaaacctatgaagaatttatcatatctttttcacgcagattcaaatttctcttgactgaagagttaagttctaaatgttaatctgtattttaaaaatgttaatttctagtatgtcctagcctgataaaaagttttttttttaaacatggatttatactaatgttattttgttttgttttgttttttgatatgggggaaatagtcaatgggtatttgcattgttttgtttttaagaatttgagctctagcatatacaattctcatacaaaaatatgtaatatagttaagaattttaatgttatttaaaaattttaatgttctgtttctttataaatgtgttttttgtttccatttagatctcgaatacctgatgcatgcaaaacagcagctagtaaccacagctaaacgttgggattcttcctctaagactattatagattttgaacctaatgaaactactgatttggagaagagccttcttatcagataccaaattcccctctctgctgaccagctatttactcagtccgttttagacaaatcattgaccaagagcaactatcagtcacggttacatgaccttctttatattgaggagatagcccagtataaagaaatcagcaagtaagttactttagaaacactttaaaacaaaaaatctcccctttggatggtatttctaatctttaaaatgaaagtgtgcctaagtgaagacaggtagtaaatggttgttattgaataactgtattctatctttaaaggaaatatgagcttcttaaggcaagaactgtctcatgctcaccatggtatccctgttatttagcacatagttcatttctataagaccttattaaacatctattaggggacaagctctttgccagatgccgggagtataaatccgtggttcctgctcttaagaagctttcagtcaatggtagtcatagcaagcactgaatgagtatttgttgaacagatatacaacaaccgaaagagaccacatattttgaaaagttgttttaggaatgaaattatttagattttcaggaaaacgggttaataaaacagctttatagcagtttataaatacgttaacatattttacattttatccatatgccacaggttaagaccaagtgcttaaatcaaaagcttatttgaattattttaggaaaaataatctcagaaaagaaagttagagtgagggaagattagtgaaatagttgtatttggtagtagctttctattaatatattttagataaactggagacaagccttaaaaactgaaccacaattatgagacctgaatacatttttataagtagttttacttttaaatacagctgaaccagcatatttttctt

SEQ ID NO: 87856 - DNA, 1093 bp, Homo sapiens
gtattcccaactaccaaagttgttggtaagttaagaacatattatatatctacatactgttacatgatcagaaaagtaatagaaaaatagacttaaatagtttgtcaataaaagaaactgaatagaagtatgtaaaaagcatgaggtatttcttaatgctcttactctgctgttttaactttttgttagcctctttcagagagagaaatagggacagttaacataggcaagctgagagagattcaccttgcttccatgtggcagtttgggtgaaagaaaggatatagaaatggatcactgaagcagtagtttgggattactgtgggattttattttattgttaatttgggcagtcaagatttgtaaagccacataccaaaatattttctaaggaagagtgtggtatctgattttggaattaggaagcatttcatctcattctctaagtcctagataaatatagcaggttttaataaattccatatttaacacccatttattacctgcctcttacatgtcaacccttgtgctgggtacttagaacactcgatttccccaccgcttattttcttcttatctaccttccaggtcctgttaaaggtatttttcaagtctgctatactatatacttcaagacgaaacaaacccaccctttggatgctttattagaatagtaaagatgtggttgaaatgcaagcactgctattctcagggtcagaaggccaagggaagttgggaaatgtatcttgtgttagagtagttatttcaaccttgaattctatttttgatagcggaaccccttcaaaagactgttatcttcaaaagattaggtgtattctaattatctttaacttatggatttctattaaaatctgtttatagtttttgcctagcacatctcagggtaacacattccataggtctgtaatttctgtcaggtttgctttgagatttattattgtaagaattggttaataagtcactgttaaagttaaattcctaaatggttttatgaatattgatcctaacctgctcacttctcatctttctgttttttttgatactgagtcttgctttgtcacccaggctagaa

SEQ ID NO: 87857 - DNA, 3054 bp, Homo sapiens
cttaaacaatgaacttgagtcttgactttattgtgtgctctattttggtttatttccttatcttctttgcaaagaacttgattctgatagaatgatgtttttagtagctatagtagacccatttgttaaaatgaagagcagaactaaaccacttgtttggagatttgcctgtactgtattaattaccttcattcaggcagtttttgagtgccatttttgtggtggtggttaattttcttttctctcttattttagctttactatattttgttcttgtcaaaattactgaaaatgaaggtataaaatactttggtctgtaaacagttccatcatcatcttaactgttgacatttattttccatgctaaaagattttgtttgtgcccttagcaataaaaacataacataaattgctgtctgttttcagcttagtgaatgtatagaaggagtaaaggtagagcacaatcctgacctgtcagttactgtcagcaccaaaaaatcccaccagacatggacctttgctctcacttgtaaggtatgaattttgtgctagttaaagcataaaagttgtgtttaattttctgaacgtttttttgacctttgaatctctgtgttaaagaatattgaaaatattttaatctaagtacattatatataggttctatattgtactaaagtatatttctgtactttgatcattaaaagtacaattttaaaaatacttttagatgagatctttgtagatatttagggtgctttcatatttatttatttggtaaagagatctttgacatattgtcttctaaacttgggacataggatggggttcatggcttgtaattaactacttaaaaattgtttattctagtagttctaagatttttaaaccataacaacttgtttttatatttgatatgatgaagtcacaaattctgtgataatgggtttttaatatggggcattttctgcagtgcttcccatcttaaattatagtagtcaaagtttaagatcgaagcaaagtaaaaagtttctgtgagtatgctcagtggaaaagtttttgtcttttttgtggcatttcttctgctgtactttctgtatctggagatgaaaaatctaagaacagttagcttcagccttgaacccaatccagtgctttcagaggtaactgccctcttacgaaggcttcctacttgaggctacatgaaacttctgtaggtgaagagtatggaaagtttgaaggttgatggttatatagggtgatagcttttgccacagtgaaaaatgaacatgtcacaggaagagaagggaggctagcgatatagcataaataaataattttaacaactgattttaaaaaaccattctgatttttttcttaaatggctatagtatcttagaagcttggggaagtaaaagtcccttatggaaatattttcattgaagagcccaattacaattggatttttcacccccttgtactcaatgaattattttaacttccttgtagcctgcaagaatgctgtatcgtgtagcattgctttatgatgctcatcgtcctcattttagtatcattgcaatatctgccggagatagtactacccaggtatcacaagaagtcccagaaaactgtcaagaatggataggaggaaagatggcccaaaatggattagatcattacgtgtataaagtcgggatagcatttaacacagaaatatttggaacttttcgccaaaccatagttttcgactttggattggaaccagtactcatgcaaagagtaatgattgatgcagcttctacagaaggtaatatttagacttttttcccccgatacaatgtgttaaaaagcaacattcaaagatatgtattggcccctgaatatattccatggataggaagagaatagtaataaagaaaaaaatcccaacttaattgactcatttactgtgtaatgggcttataatgattcacactgtgccctgatttcttcacagagccaccaggtaaagcttgaactttgaggttccccaaacttgtatgagtagatgatcagacctgttttggtctaccagtttcatttcacagtaagatggttttagcacagtaatatctttcaatattagtttgggtagaatatcattttaatggtaattgtgtatatacctacaatgtttattttcatgtcctattgactagttaactttgctgatgttagtacattgtttctgaatgaaaagtcttgagtataataagccttcataaatcagtttgtgcatccactagtgttaaggaggccaagggtgcctttaatcaaatctgctctttgtttttgggaagaggtccctggtttcatcatgtaagcatgacataaggaattactttgtacattgtcaatttattgcctatatctaaattttatgccaagatccaacaggacaaagaaaggacatgttagcccacatttcctttgctcttggttggatttataggtgttctattctatttaacaaaaactttttatttaacaaacacttcaaaaagcagagctgtgtgaaacttgcttttgtattgactataactaaccatattgtggaggacgttttttactatgtaccataatgtcccattcatgagaacctagaagtagtttttctcattagcgaatgctagaattttattttttttcacatagtgaaaaggtgaaattggtctgtcttcctctttactttagctgctagtaaggttgaaacaacgatggtgcccaaatttaacagttaggtgacatcttcttctacgtgtgctaagattacccagacttcactttacccttatttcccactgactttgatcccttttacttgtttttattctgtagtatgtatttttgtcatcttttcagtactctttggaatcagaataaattaatttccatagctaaatagatatggtagttgataaaataaaaataaagtatttggcttatatatattagcatagtatttggcaaattctttctgcagagggccagacggttaatattttaggtgttgcaggg

SEQ ID NO: 87858 - DNA, 1176 bp, Homo sapiens
cgcaatctctgcctcccaggctcaaatgatcctctcacctcagcctcccaagtagctgggactacaggcgtgtgccaccaagcctggctgatttttgtattttttttgtagagatggggtttcaccatgttgctcaggctggttttgaactcctgagctcaagcaatcctcctgccttggcctcccaaaatgctgggattacagatgtgagccaccacacctggccatggccatttgttaatgtgaaatttacttaggttgtggtgattgaagttgacaatactttatgtaaaaagtagagcataaaatagataaagaaatgttaaattgttttaacctttctgaaaaatattatcttcatgtaattcttatgtagaatttatgaataattcataatgaagggctaacctttcaaaatttaataattatttattaatgtggaaggaatgattaaagttacagttaaaatggtaaactcttcggttctttttgtaagaacttgtaactagtgggatttttagatataaattctcaccgcctctttagattacttttgatagcgaaggaaatttgctacatggttttgattattgaatagtcaggaaactaatgtgtaagtattgaaaatcctagtggtgttatgttgtagaagagacagaacacaatcctatgaaaaggaaatatgagaagatttgaagtacagataagaatataacactttcactttttagggaaataatttaaagccaagcaatagaaagacaaagatttggcccattaagacatattgaaaagaaacataaaatgattttaaatgtgtcttcaaaagtgtaagagaatttaataaatagtataattttaagttcaagtactttgttgtaccatcaggaaaagttttaaatatactcattttttcaaatacggtgaaccatttgaaaattcatattgtgctgtggttcatttcttatttcttactatccatattttttccaattgaaaaatggtctgtaatataacatctctcttttgctatttatagttttatattatatttacatttaattatgtatttttttttatttttgagacagagttttgctcttgttgcccaggctggagtgcaatggcatgatctcggcttactgcaacctccgcctcccgggttcaagcgattct

SEQ ID NO: 87859 - DNA, 1073 bp, Homo sapiens
ggaacttcttctcactgtgcagtagtggaatttgttatgtaagctttccttccaggatacaatgatttttttcatccctgaaggaattcctgatagacaaacatcccatgcctaagaaatgacaagtatgccagccacccgccttgtgttgttagggaagagattgcactggaaacctgtccaccagttgctaggacagagtcagagtcaccagcttgattttaactaactgctgggaaactgcctcttcagtgattcctatgttttatgtagttgattggtagattactttttggtagaggcaagtatgtcatgttcttttttacatcatatgggatgatgtatgtggagggattgtagtatctcttacacattaaaatatcagaattactggctagcctcaaatgataagactatatcctaattactccctagggtcttgtaatggttggcatttccgcccaccacctaggggaatcacaagcagcgaggaatatactttgtgtaaaaggtaatgtgaatttttttgtttttaaacaatgacatgtcttgttgaaaggacagataattttccttatctaatggagtaaaatggtttattttcaatttgaaacagaagccataaaggtcattatcattaagtaataaaagtcaaaaccatattgatgagttctcttcctttaattctaaacagcaatgatctaaatgcaggttgttaagactgttcagtagtcttttattttttatctatttattttttttgagatggagtctcgccctattgcccaggctagaatgcagtggcacaatcttggctcacggcaacctctgcctcccggctttaagtgattctcctgcctcagcctcctgagtatctgggattacaggcatgtgccaccacactggctaattttttgtatgtttagtagagacagggtttcactatgttggccaggctggtcttgaactcctgatcttgtgatgtgcccactttggcctcccaaagtgctgggattagaggcgtgagccactgtgcctggcctcagtagtcttttataataccagttgtatta

SEQ ID NO: 87860 - DNA, 1368 bp, Homo sapiens
agaaggctgaggcaggagaatcacttgaacccggggggtggaggttgcagtgagctgagtttgcgccacttcactccagcctgggcaaaagagcaagactttgtcccaaaaaaaaaaaaaaaaagaaaaaaaaaaaaaggaaaagaaacctctgtaatcagacattttctaggtgttatgaagaggagagtaaagtgaataaatggatggaaggtgctagcctgtgaggttcaagactggggacttggacttctcttctgctgccagctaatttctatgtaggaggcctctatcagcttccttaatgagagcctcacaaatatgttttccatatttaattatagtttaacgtagaaaaaaacaaaaatcattggcaacatattaatgttattaaaaatttctgagtattccaacttcacctttgttttaatattgaaaatgttcaagtttagttcagcatcaacgttattcttgtttaaaaaattctttcatttggaaaattgcagacagcaactagtaacgccctctctggatatcacgtggaagacttagatgagggtaagtgccaaatgctgtgtaacttctggtagctgtgaataagggctttgcttttattaattattgggagaaaatttactgagttacagtacatataagtggagatgtaggagagaatataagattttaattttaagaagtaggtgtagttgaaagcaattttctccctggcaccttttcatagaataatggagtaatggaggtaggaggtaacttcagaggtcatttagtttattttcttgcctccgtgtaggactaaatttaaacatcattcttaacaatctatagagggaagacttttcttctctctctgtcctaagctagtacagttattactttttggaagttttgatctgtgagctgagttgttcctgccctaatgaaactctgtgatctcctctcctctcaccagaggaaagggaaaagaagaacattcattgagtgcctgctgaatgctgtgtactatgggcattggctttcacaaaacatgtactgacttagagtccttctgcatctttttgacaggtgatgaaactgacattaaggtttatgagttgccctaaagtcacacagctagtatagagatgaagcacagctttaaactcaacctggctgaatatctttcttttccttttctggggggcatagtgacttgtgagggagtagaaaatggctataagttccttgaaacttgttgctgctcaacctctataaagttctagcctttttttctcattatccttattttccctggtttatttggaaactcctatccaaacaaatcaaagctcattgtattcacaagtaagt

SEQ ID NO: 87861 - DNA, 1058 bp, Homo sapiens
aaggtgaaaggtacatctcacatggcggcagacaagagaagaatgagagtcaagtgaaaggggtttccccttataaaaccattagatgttatcagacttactcactaccacaagaacgatatgggggaaattgcccccatgattcagttatctcccactgggtccctcccacaacacaagggaattatgggagctacaattcaagatgagatttgggtgggaacacagccaaaccatatcacttagtaaagacccacaggtgacttgatataaggcaagattggcaagctgtcagttggttcagggataaatgagacaagcggtaatgagggctttacctaggacagtggcagtgggaggagagaatgtaagagagatgagagacattctagacctgtttggacaagatttggagaatattcagagcaggatagaagagggaggagttcaagatggctttgaaaatttcagcttggctctctttgggtaagaagaatccattaacttgtgataaggagcactgaagaaggatcaactttaggataaagttgatgaattttgctttgggcccattgcatttaaagtgcttaggtgaatcatccatttatccatccacccacccacccaaccacctacccatgttcccatccacccacccatgttcccatccacccacccatgcacccatccatccatccatccatccatccatccatccaactaaccaaccatctatctgtttatccacccacccactcatccaacatttactgagcacccattattatgtgccagatactttgagaggtgcaagaatatagaaaggcagttacagactgctgacagcagatgtgtatatcgctgataacgatctagcatgtaaaatactacagaatagtttagaaaaagtgctatggttggcgctttgttgaaattggaagtgtagagcttagggtaaagttagagccaaatgcgctgattggtggtttatctgaggatgttagagtgaatggatccctagccttggactcctctgtgggagaagggctcatctcaga

SEQ ID NO: 87862 - DNA, 1051 bp, Homo sapiens
tggccagagtagagtgcacgcggtggagaggtgggaggaccaaagcctgtggggcctgctggctcgtgataaagactttggtttttattctctgtgagttggggagctattgcagggctttgggcagaggagtggtgtgatctaatttaacagaaattgtttgacttttgtgctgagaataaactgtaaagggataagcgttgatgcaaggagactagattggagactattagaataatccaggccagagtggctcagatcaaaatggtagcagtggagatagtgagaagtaactaggttttggtttatacattgaaaatagaagcaatcaggtttcctaatgtattgaatgcagggaatgagggggagcagtcgcagttacttacctcgatactttttgtctgagcaattggaagaatgatgtttccttcaactgaggttagaaggctacagctggggaggaggttttgtgggggaaggtgggagttcagttttggacgtactgagtttgagatgtcattcagatacccagctgaagatgctgagtaagcagtcagatatgcacgtatggaatttgggagagagattcattgaagactgtgggatagaagtgctatatgatgtcttgagccagcgtagaatcaccaagggaaaatgagcatcatagagaagaggcgaggactgagggccgagtcttgggctgctgcagtgtcaagaggttggggagcagagcaacaaccagcaaagcaacctaaagagcaaccctgaggaaaggggaaagtgtgagaggaaggagtcctggtagccgcgtgaaggaaggaagtgtgtccaagtgaggaaatgaggagtagtgtcagcagctgccaagaaagccatgagaatgtgtctgagtgggcacatgtgaatcgtgtgggtccacatggatgcagtggaggtcactggtgatctcttgagagtggcttccttggagtagtgggtgaaagtctgcttaaaaagagggcttaggagagaattgggggaaggaattgaaatacatcaacatagacaactc

SEQ ID NO: 87863 - DNA, 1739 bp, Homo sapiens
tttcatcgtgttccattgcctgtggaataaaacccttgcttcttgttgtggcatttgaggtcattcatagcttctcttactcctctgatgtaccttgagtttaggctgtgtattttctccccttggtgatttcacttgaactcgtctctctgaaaagctcacatttgctctccctgtcatctgtatggtgaactcctgttcaccttttgcaatcagctcatgcctttaggcagatggaataagtcttttttgtaattgttcatttgtgctttgcctgtcttgctagaatctgagtttcttgaaagcagagatgacatgccctgtctttgcattcattgctgctagcacagggcctggccctcgagaaatgtttgttgaattgaattaatggacagttcatacagttccaaccagttttttaattggtgggaaataatcctgcatggtatagattttggttttttgcaatcatggtcacagaactgtgagactgaaattaggaaactgaaatttggagatttggatatgaaacgtttctgtccctttggttaagaaaggggatcctttatggtttgttgtatactttgcggtattcacagtcatgtttcatttctaaatttgcctcatttataaatttgttatattgttggtatgatcctggcttatgattgacattttgcttgaatcttagtaaagacttcataaaatatcaaagagaagtatagattttgtagcatcaatagctgctgcttagctgtgaccttgatcaaaaggctagctgagagtattcagatagataattaagccagctgagataggaatggggctagaatttataattaataagtttaaaaaaccttctcttgttctttctccctgtctgtaggatttttgtccctgagtcatggaagacagaagagctgaaaagtcatgtgaacaagcatgtgaatcacttaagaggcaggactatgaaatggccctcaagcactgcacagaggcccttctttctcttggccagtactccatggcagacttcacagggccttgtccattggaaatagaacgcatcaaaatcgagagtcttctctacagaattgcctcatttttgcaactggtgagtaaacactgtcaataagccaatgctgaactatgtaaaatggcctttttcattgaggggtgacgatacaaatagctaattctgggccaaagagatgtgagtgaagtggctggtgattgctgaatatatttgatggcaaggtaactacgtttttgaaccttgaaaactgttctactttagggcattttggattatgcactcactcaacaagtatttattgagtatgtactgtgtactagacactgttctaggttcttgttatatatattgatgaaagagaaagaaaagtctcttctttatgatactttttctagtaggggaacagaaaataaacaataagcattataaaaaataaacaccggctgggcgtggtggctcatacctgtaatcccagcactttgggaggccaagccaggtggatcatgaggtcaggagtttgagttggcctaaccaacatggtgaaaccctgtctctactaaaaatacaaaaattagccaggcgtggtagcgcgtgcctataatcccagctactcaggaggctgagccaggaggatcgcttgaacccaggaggcagaggttgcagggagccgaggttgcaccactgccctccagcctgggcaaca

SEQ ID NO: 87864 - DNA, 1416 bp, Homo sapiens
tggcttttaaggggctgtgatagtactggtggtagtagtaatgtgattctgtgtctacacagataatctggaagcaaaaatcaagaaacaaaaagaatagacaatgttttatagtaatataattttcttggcaagcagtaaccttttctagaagtcagccttttagtataatttgcttgcttttttttttttttttttgagatggagtctcactctgccaccaggctggagtacaatgccgcgatcttagctcactgcaacctctgcctcccaggttcaagcgattctcctgcctcagcttcccaagtagctgggattacaggaatgcaccaccaaccccagctaattttttgtgtttttagtagagacagggtttcaccatgttggccaggatggtctccatctcttgacctcgtgatccgcctgcctcggcctcccaaagtgctgggattacaggcatgagccactgtgcccagccttgcttgcttcttaagtatgggttttttgtttcttcatatcttttaaattaataagcatgttaagtgatttgggaagaggctcaaactcttcaagaaacaatttggaattcttgaaactaagaaggctagctccagaattgctggaaaccctgaaaaatggatcaggaaaaatcaaagtaatagatggaaaaaaaatctcaattttagctgttgatataatttttagaaaattcagtttatctcagtcattaaaacagatggcagaaggcccatcaggatatttcttttatgtatttaaaacattctatactctactaaattccacttattctaaaatttaagagaatttacctctttatgaaaatgattattcaaaagagaccacggttgatgatcttagtttctagttttcttctctgtaggcttagtctctcttctaatgcttcttgcatactcagtgattttatgttttagagaaaaatgcaagtctggctgaatattaagtacagtacaatgagtaaaactactttgcagactattttgcctgtgtatactataggactatatagattccagttttggaaaaatgcagatgaactaaaaggtaataaaacatgcctctttgtgacttgacatgctaatgagaactgaatttggtacaggacagttcttggtatgcttggcatttaggtcatctttgggaaatttaattatttatggaatggttttagtgaattgaatggttgtcatggggataaagatggtataaaatggattctaatttataagatagttgtgttgggcagataaggcattttacacgatgcatttaactcaagataatagatgattcagaggccaattaattctataggaagtaatgctattttagttttgggaggagagcatcttagagaagtagatgttgaagcattcg

SEQ ID NO: 87865 - DNA, 1194 bp, Homo sapiens
atctgctgtgagcccctttgtatcactgctcctctgagtggttctcaagttcttgtgatggcatgtgctgggttgaagcaggacactgcttgaggcttgaccatttgtgggttctggcttctgttgtctctctcttttttttttttttgtgagggagtctcgctctgttgcccaggctggagtacagtgacacgatctcgactcactgcagcctccgcctccctggttcaagtgattttcctgcctcagcctcctgagtatctgggattacaggtgcgcactaccatgccctgctaatttttgtatttttagtagagacggggtttcaccatgttgttcaggctggtcttgaacttctgacctcgtgatccacccgccttggcctcccaaagtgctgggattacaggtgtgagccaccgcgcccggccttctgttgtctctttgtggctgcttggattgctgagaagaccaccactgtctaggccatctttaactcattcagggcataccagtgtgccatggcacaccctttgagaagctctgttctgagggatccaaacatgaaggaaacattgttccgttgacaaggaactaattatctgtagagagaatggggcaccccaaaatgaaaggactaataggaatttcataggtgccattgaagggggccatacaaggtacttcgggattaagtggagggagcgatactgccttcttggggatatcagggaacacttccactgaagaggtggcatttaaatcacaccaccaggaagccgagaagcaaagggaagagggcattctggagggaagtctgggggttatgtcagaaatgtgggtgtcaggaaattgcatatccaagtttcctgggtcctaggatacataaaggaatataatggaaggtaagactgccaataggtcaggactgggttttggggagttttttttttaatatttaactttttgttatttttattttttataaagttaggggtcttgctatgttccccaggctgtcttgaactcctggcctgaagcacttggcctcccaaagtgctgggattacaggcctgagccaccacgcttggccttggaatttcttgaatgttagagtaaggatgagtatgatggattgtagggaagagaactgagagacagggcctttagttgggttcatagtagtctaagtgaggg

SEQ ID NO: 87866 - DNA, 1010 bp, Homo sapiens
taacctctgcctcttgggttcaagtgattctcctgcctcagcctcccaagtagctgggactataggtgtgcgctaccacgcctgactaattttgtatttttactggagatgggggttcaccatgttggtcaggctggtctcgaactcctgacctcaagtgatccacccgccttggcctcccaaagagctgggattacaggtgtgagccactgtgccgggctagcttcagctcttaataaaatgactttccatcctcccttttgcactctggctaagacttaaaagaatatctccagctatttttttactcatctggtttaagctggactttttagctttgtgttttttgtagttaaaaaaaaaatctatctacattttgcttttaattgttctcaggtctcctggcccctggttctttgattgtctgagtccacactgccttttaactgatacagtccactgctaagtcagcaagttagccttgagaatcccagagactttaatgtggcaatattgtatatttttagggtttacagtgaaacttgggctgactacttgctgattggttaaagtaataaataagtaaattgttaaagtaataaatgttaaactaataaataaatcaaaaaaattgttttttttcgagacagagtctcactctgtcgcccaggctggagtacactggtgggatctcggctcactgcaacctctgcctcctgggttcaagcgattctcttgcctcagcctccctagtagcttgggactttgccatgttggtcagactggtctcgaattcctgacctcaggtgatccacccgccttggcctcccaaagtgctgggattacaggcgtgaaccactacgcccggccaggttctttgtttcttgagtgttcgcttgttttgcatgatttgtctcccacgggttcatagggatgatcagaggaccaattgaggcagttggctggtccttgaaaaactggggtttgggttagtataggtcatcatgacc

SEQ ID NO: 87867 - DNA, 1013 bp, Homo sapiens
ctcatcatctcctttaattctcatagcaactcacgagatagttatttccattttacaaaggaagaaattcaggcttaagtgtgactcaactaatgtaacgtcacgagaccagtaaagtagtggagctggtgttcttcctggaaagcctgtgctcttctttctctagctagtctaagtgacttattttccagataaggaaatataggcctgaagaaattaaatgagttgctcaaggtcacacagctcagtagtagcaacattaaaccaagcttgtttttaatctttggaggcttatctcaagactcttggtctagtgctggtcatgctacattttattgaactagtgtggaccaaaagaccatatgctgggaatattggatacaaatgctttggaactgatatcttggtgaatggtgttttctactatgtattaaaaaaactttcttctttgtctttcagaaattataaagagctctgatgggctatttgggtgatacccagtgcagtgaactgcaggtgagtaaggtttagaactttatttagaaaacaagaattttataatgcctgaaagaataaggtgggacaagggtgaagtgatacagggctgtagtgaaacagtggtaacctgaaggcacagatcctaacggaatcggttacttctggaacagactgaatgatgaacaagctccgaagagactgcctgctgccttgtcaggttagtgtgtgaaatgagtgagggtaggttaatcttccacttctgttcagatgagtaactgcataggggctcagcttatctgcgtgctattggaacttgagaggtccttcagtttttgtgtcagcattcttgagtggcgattactttgtgctccagtgaacttggttaagtattgaattgtttttcctgttatctgctatttacatagtgtcatgaatgactgtatatatctgcagttttgaggatctaaatatggagaacatatcaatagaaacaaaaggttgaactttttttccta

SEQ ID NO: 87868 - DNA, 1059 bp, Homo sapiens
acctacaagtaagtagcccagatcttacagatgcatgtgttctctatttaagcagtaggcttggcattaatattgaatgtagattagtctataattgtctgtcagagaccctaagatccaaatacaggccccatacaagaaataaggacctttgcctgttgtttcaaatgtatagaagatttcgggccaggtgtatcaacaacagttatccaagagatggggaggaactacttaaaaaattataagcaaatttttaggtttaattttcataaacttaggtgaatatacatgcagatgtaattggatttctaagtaatgttttgaaatgttttctagaagaaaagtgatacaagtggagagtatgccatactatcttaccattcatttcagttgatgagtgcagtcagggttacttctgtagcattggctagaagcagcatataacatgatggtttattgctttgagggtggctgggataatagttttcagtaatcttgaatctgttagaagtgaatattcctctttttaaaagaccactgtagatgtaacaggaagaattttatttatatatacatgtaataactattttggtcaacttttaattattcaaaagaaatggaaagtttttcaactaataccaacagtcataccaacttgtttacttttgtgaattgtactgggtcagtttctccaagtaagagcaggaagttgtttggtaaagcagagtgtatacatatatcttgtctttgaacaaaaaagaacttgattcatcgtcaggttcttcaaagaatgcatggcatctttgttgactgaactattctgaagtgtgaatgtttgtgatttttgtcatttctgtgctatattttaggtgttcttgtcacatctgaatttgcctttttgcttccttctgcagaaattatctttgttgtgatgaaaatgtcctataatgcgagcttcctgtcagtaggcaacgtgtttaactaatacagttttaaaaaattatttacttttatgcaaaactcctgtatgcttatggtaaacaaatttgagcagtactt

SEQ ID NO: 87869 - DNA, 1032 bp, Homo sapiens
ttttgtttgcagttcaaaaattgtcattccttctccctcacaacttaacacttctcaggcaaatcattaatataataaaaagtgtaacttcagagacagtggattcctggagcgggggaaggagggaggagttgtctgtcttgcctagtttgttcttaattttgctctctcttaaactcatattaatgaaatttcctctccttcatttctttatgtttttgaaagtaaggtcagtctgtgttgaaaaagatgattttattatgtttttgagttttaagagcattgtataatctattcttttaccttactgaaaggaaatgttttaaggtcaaaaaccagactcatttgcaaagctgcacactgtaccatttttgtaactttttccattttaaatgtagatgccctttcacttcaggctgataaaatgtttgctactgataatgtctgttactggtgttgtatggaaacatcttttctatttgcctcaggatttggatgaagtaatggatcactaatgaactacagtgctggtgagatgtgtaaggtgagactgcagttaaaaatgatttcctttttttccttctttattttaatcaactggtaagagtaaggctgaaactgagtaatttgatggggccatctttgttttccaaatgtatcactcagtcagtgggtctatgggcagggctagatttagaaaggaaaaatatgttgaatgtaccaatcttttcagttgctccaacatactcaaacatagtggtacttaactaagagccaaatgttacttgcagctattcttgatcagtatcttcaccagggataattatagtttgcctattcaaattttcttgcgtaactttacttggatgtcttaattttatttgtgttttggtgtctatcacctactgtacgtttagtcccggtgattatgtatatggattttgtgtgtacctggtttgtgggactcgtaaagtataccctttccgttagaaagaattaggcaggtcaatcactcctgcttttattttctga

SEQ ID NO: 87870 - DNA, 1133 bp, Homo sapiens
cattggtgcgatctcagctcacttcaacctctacctcccagggttcaggcgattctcctgcctcagcctcctgagtagctgggactacaggcgtgtgccaccatgcctggctaattttggtatttttagtagagatggggtttcaccatgttgctcaggctggtcttgaactcctgacctcaagtgattcacccaattcagcctcccaaagtgctgggattacaggtgtgagccaccacacccagctgagtgttactaactcttaagaatgaattcccctgcatattcttggatgaagagttcagaaaatgcttttctgaagttttgtttattgtctgtaatttatcctgtcttaatccaatttatctttctctcttgcaggagtccgaagcctttctctcaaatctagtagttaacaagaccatctttgctaaagtagacagattagcaggaattatcaacttccagagacccaaggatccaaataatttattaaatgactggtctcagaaactgaactcattaatgtctctggttaacaaaactacgcatctcatagccaaagaggagatgatacataatctacaataagggtcttagtgctttagaaaaaagttaaaattggaagtcattaaaaaaagactgttataatggtgtatatgttggggttttttttctaagcttctttgtcttaaattttaaaatagtgaatatgtttgagactccctttgacctttcagttccccaagttcattgttaactttgcatttgcaattggtgcaaaaatacagatttctgtcgtctgaatacacaaaaagttgtgtcataacttacccagatatgtttttctatcatttgaaacctttttagctactgtttgttttcattcaactaacaaacatattccaataataaaagcagtatatacatatttcctttctacagttacctctgattctcaacattttgtggggtagtgatttggcaagtgttttttaaataaaacaaatctcattgtaaagctatcagtcatttagtagaatagaaaagcaacatagagcatacaagaacatttgggatagagttgtgatttgtgaagaatttgtactttgatattgtggcggaaagtctag

SEQ ID NO: 87871 - DNA, 1050 bp, Homo sapiens
ttggtctcctggcctcaaacagtcttcttgcctcagcctcccaaagtgctgggattacaggtgtgagtccctgcacccgatcgatctccaatcattttttagattttagcctttaaaacatttgtgttataattagaaaatcttaactttagattcttgcactcagcaaaaatatttcagtacaattataatttttaaccactagttaagacaggcatatattttgactatatatttaaagagctgtgtagaatattcatagtaattcagaataactacagaaaccaaaatatctaagtatttagttttgttattgaaacttagaactagctttgctccagtgatggactgtagaaaaataaaagctctgagtctaacattttaagtaaacttacttggatatgaaaataaatggacttttagacttactgacaaatgttacgtgttctccctgctctctatcctctccccagaatattagaataatggccaagtattatactcggataacaatgaaaaggatggcacagcttctggatctatctgttgatgtaagtagtaatcaactttgagttatttgtaggcattccttttgaatgttgacttgtaaaaattgagtaagaaaatcaatgttatgatttaattttatgtttaggtaatagagtaatagtttcccaagcaatcttgagtaccaaaaactaacttaagtatcaagtgatcctaggtcttgttggaacagtgttgtctttaggtccatgtttctatgttgacaaaatgcatagcacacaaagaggagttaacccaagtgtgtagtaatggcctgaaagccatttctgtccccagaaggatctgtgacagtttaggtggtaagactcatggaacattagagttggaaggtttgttccttgatcagcttgtcagctcttgtcacttatgaatgagagtaccagagtccttagaagtcaagtgtcttgtccgtggtacatacttgccaagtagcagagcatatattctaacccagcatttctggaaacaaattaactgtaccat

SEQ ID NO: 87872 - DNA, 2108 bp, Homo sapiens
gctcactgcaagctcctcctcccaggttcacaccattctcctgcctcagcctcccgagtatctgggactacaggcacccgcccccacgcccggccaattttttgtattttttagtagagacagggtttcaccgtattagccaggatggtctcgatctcctgacctcaggtgatccgcccgcctgggcctcccgaagtgctgggattataggcgtgaaccaccgtgcccggcctaatttttttttatttttgtatttttagtagagatggggtttcactgtgttagccaggatagcctcgatctgacctcaggagatctgcccaccttggcctcccaaagtgctgggattacagacgtgagccactgcgcccggccaagactttaaaatttgaaatggatatatagttattccatgattgttcagtttttgtcaaagtttccattatgtccagtcttgcatataacttgttgtacaactcttttaggctctgaagagtgttgtactctatgttatcctggctccttttgacaatgaacagtcagatttggttcaccgaataagtggtgacaagaagttagaagaaattcccaaatacaagtaagtacttttgaaattagcatgatatatctcagtcgaaacaccattttgaaagaaaattggctaacctaagtgtatacttctgtgtatacttctttttttgagatggagttttactattgttgcccacactggagtgtaatggtgtaatctcagctcactgcaacttctgcctcctgggttcaagtgattcttctgcctcaaccttccgagtagccgggattacaggcacccgctaccatgccgagctaatttttgtatttttagtagagacagggtttcaccatgttggccaggctggtctcgaattcctgaccccaggtgatccgcccacctcggccacccaaagtgctgggattacaggcttgagccactgcgcctggcctaagtgtgtacttcttaattggttactgatagcgtatactagagaataaaactagagaggataacgtggtggaatttttttttagcattgcatcagcagtaaatgagattataacatactttcttctaaattgcttatcaagtggaagtttcatatcaggtctacatttgcagcttttgattaattatttgatagagtttcatcattagtagtttagagctttgtgattttcagaaatacatacttgtgaaaatctattatataaaatagacttgcttcatcataaacacaacaggctcttatttctgtttgtttcatgagtacatttacattcagttatttcagaaattgacagtgcagaagagagcagagtgttaagtgggagaatgctgtattctgaactactgtgggaaaaatggtaataaagttggtaaaatacacaataatcatatggtgtctcattctactaaataaaatttaacgaaaacagtctttgctgaattttttgaactttgctattatattagttaatacttaatttttacagatttggaatattaagatgtatacaattttcagggatcttttaaagctttttaccacaatggagttgatgcgttggtccacacttgttgaggactatggaatggaattaagaaaaggttcccttgagagtcctgcaacggatgtttttggttctacagaggaaggtgaaaaaaggtggaaagacttgaagaacagagttgttgaacatgtaagaatctgtcatagagatgacaatttttattttaacctttagtgaatttactttttagaattaaattttggcaattttgagcataaactatttcatttgtcacatttgataaccaaatgttcatttaggatgttatgtgtttaattcttcacttaggatattttttttctatgcccactgtagtagtgatgcacatttggtgttcagatgtttactctgcatttcccaaagcatattggaatgtatctcactcatcttgggttttttccctatttttggcttttcagaaaagatagctatattttagcttgcttcattgtgagagaacctcttaagaatccaaaatttatagtatataaaccagacag

SEQ ID NO: 87873 - DNA, 1078 bp, Homo sapiens
gttcagaatagctttatttgtgatagtaaaaagataaaatcagctcagatatccttcaacaggtgaataaactgtggtatgtctgtacgatggaatactactaagcaataaaagtaaatgaactattgatgtataacttgagtgaatcttacaatttaggccattatacagagtgaataaagacagcctcaaagagttacatactatatttgacattcttgaaaagacaaatttgtagtgatgaagtacagatcactggatgtcttaggagggcttatgagtgggggaagtgtgtgattataaagggacagtatgaggaagatttttggggttctgtgtcttcattgtgatgatggttatgcaaatcactacatgagttaaaattcatagaattttataccaaaagggggaaaatccattataaattgtaattttctagcggtaactagcttttaatgtaattgtcaacactctccctatatacatgaaggttcttattatttaacaaggatgaatattttaatatctatttcattttattgcaattcacaaaattgcaaagtattataaacttatttggggaattactgtgctaggtggaaacctacgggtcaatggaaaagaaagagcgagtggaatttattttggagcaaatgaggctctgcctagctgtgaaggattacattcgaacacaaatcatcagcaagaaaattaacaccaaatttttccaggaagaaaatacagaggtgagcatatctgtgaccacatgtttactttaaaagtatgaataaaacccataaaccccaatttgttttgtcaacttttttgcagaaattaaagttgaagtactataatttaatgattcagctggatcaacatgagggatcctatttgtctatttgtaagcactacagagcaatatatgatactccctgtatacaggcagaaagtgaaaaatggcagcaggtaagaatatattcgtgtaattgacatggcttcttattcagaagagtaatttgctttttttattttcaaatctttttaactgcaatagttagatgcaattgtatggtgctgc

SEQ ID NO: 87874 - DNA, 1227 bp, Homo sapiens
gggtgtggtggggcactcctgtagtcccacctgctccggaggctgaggcatgagaatcgctagaacccgggaggtggaggttgcagtgagccgagatggtgccactgcacttcagcctgggtgaaagagtgagactctgtctcaaaaaaaaaaagaacaagataaacaggtgttaccacactgagttgataaattagaatccaaaacaaagacttgatgttttcttaggtgttacatgattgttatatgttcagtttctcttaggcatttaaaaatattaaaaatagcttatgggcttcaagtagggaaccactgactgatggaacccactagagaaggaagcactatcatgaaaaggagagaaacaaaactagttatgggtagtccttttcctctagaagaggctgttgatttttccttttctgtgtcaaaaccatttcattttagactagttatttgcattttgtgtgtttttttattgttcattttcatcttttgttttaggaaggaagacttcaagaagtcattgaaacccttctctctctggaaaagcagactcgtactgtgagtagtttacaggggaaagctcagttaccattaatttcattgaacattcttccattaactttcaatatatttttacccttacaggcttccgatatggtatcgacatcccgtatcttagttgcagtagtgaagatgtgctatgaggctaaagaatgggatttacttaatgaaaatattatgcttttgtccaaaaggcggagtcagttaaaacaagtgagttcatgatcatgtctgctccaaacacaaaagcatttgtatttcagaacttttcacaagctcttctataagtctgtttaaaatgtgttaagtcaacgttgtaacatcctagagggtgttttaaaattcagtctacattctcacaatgatatgactgttttctgttttttcttctagtctttatatgtttgcatatttttaaaaattgtgttgtacttagagtgttcatacagctttgttctattttggtattgctacttttattttttccttatttatttacttattttgagacagggtctcactctgtcacccaggctggagtgcagtggtatgattacaactgactgcagcctcaacctcctgggctcaagcagtcttcccacctcagcccccaagcagctgggactgtaagcgcatgccgccacacctggccaatttttt

SEQ ID NO: 87875 - DNA, 1035 bp, Homo sapiens
accactttgcttattaaatgactgagctgctgccatatcttctcttaggagctttcagagatcccacagagtaagccaccaagattctcaagtagataaaaccttagaattttctattttaaggtttattttagcctcctgatgtagagatgagaaaaccgagatccaagaaaagcgactggccacggtcctgagaaatcatatttcgaagcaggggtgtagggatatatgagatggtctgttctattacactcgcttttctcatcgcaaattttaggtaaaaagtctgatgttcccagagacaaaacctgacgctgcaggctggagtggcgagtcccgccccgcgcgcctcaagccccacccccaggctgtccgcggcagtgcctgagtggcaaccagcgccggggacctcgaggggtcctttgcgtgggctcccgatgggctgcctgagcgggtgcgcgggcaacttccggtgtgggtgacgagtggtggccgaagcagggggacagcaagggacgctcaggcggggaccatggcggacggcggctcggagcgggctgacgggcgcatcgtcaagatggaggtggactacagcgccacggtggatcagcgcctacccgagtgtgcgaagctagccaaggtgaggagaggccggctggctgttggcgggcgccaggggctgagtcacggcgcggagcctgcttaggcctcagggggcctgcgggctggagcgtgcaccccccaatgcctgtccagccctagttgggcctgcacgagtgggagaccccaggtcggcccggccagggctgcggagtacgccagcgcctatagcttcccagaccctccccaaaacagatggtcacttccctccgtgggacttagggctccgtttaactttttgccgtttcttggatgctgtttaagtgatatttaccttagtagtttcccaggggttaaggccgcttcagtattaaggctagatcagagagtttcgttctgttgctgttgctcaatcaatttatgtcgttacatcgt

SEQ ID NO: 87876 - DNA, 1020 bp, Homo sapiens
cttgggcgcagctcccggcacgtccgcccttcgaggctcgggacccggctgtgtcctttcgcaaaccgcctggctcggaaactttctgcgtctcttgtttcttccgccgcggggagcggcgcgcgagccgggagcggcgggggctgcgacgcggccacaggagggcgctccagcacgtggtgccggggccgcggctgccggctgggggcgccgggcgcggggcgggggctcgtcctccaagcgcggctctgctgtccttctcccgatcctgcgaagccgcgagctccagtattcaggaagtggtgactcagataggattattccggccccggcttccctttcttccccttcttcctccccacctttgtggtgattccacgactgctgagcgtctctgtccagggacagcgagggagcccaaagccaagcaaggcaacgtgaaactcactagtgtggtttggtgtggcaacacacatgaaatcagccacccagaccgtctttatatttaaatctggtgcctcgaaactatcagatatgtttttgagccactacttggtgagaggggcgatgtgctttgggagagaaaaagatgcataactgagaacatggctgagctcacaggggctgtccgtatttgccatctggaccaagggttaaggtaagacccaagtacaatccaagacaagatcaaagtagctgcaagtttacaaaacgcatcacggggacacaggctgccaaggagggagagatcagcttccaccagaatgaacaaccgagttttggagttcgttggcatttgaggaggtagcatttaagcagggtctggaagggtggatgccaggtgggtagacagagattcgagttgcatatgaccttgtaagtggagaagcaggacatagctttgtggagaaagagaagggcaaatgaatgggactggttaataggagtctttccagaaaaggtggagattgtcccaccttgtgggcagttgagctagagtaattcagctgggaggcatgg

SEQ ID NO: 87877 - DNA, 2309 bp, Homo sapiens
ttgtgtttttagtagagatggggtttcaccatgttggtcaggctggtctcgaactcctgagagttcatgcccggtgagccatttcattttataatgaagtctagacctgtagtaggtgcagttaagttgtctacctcattgacaaactctaggctagaaccaggtctgatttaaggctcaaggctgttctactatatggaattctccctcctctgagattccttggtggaagaaaatattctcctgaggacccatgtgtaaagcaggtacactggctctactctctagttgaaggtggctggggactccaaccttgtgtctgcttagcgggacacatagggtagccccattggaacctattggaagggtggcccacctcctcccgcagccactcggtcccagtgagcgacctgctcaccaaggaggctccttggagcacagtctgaagatcaccctgcacctgccaccctcgccacagaggtacttgttagtaaaatgagcgtctctcaagagacgctaagcacatcctaatattatctaaggcaggaatccttttgttttcattgctttctttactgtttaaccgttctggccaggcgcggtggctcatgcctgtaatcccagcactttgggaggctgaggcgggtggatcacctgaggtcgggagtttgagaccagcctgactaacatgagaaaccccgtctctactaaaaatacaaaattagccaggcgtggtggcgcatgcctgtaatcccaggtacttgggagggtgaggcaggagaattacttgaaccagggaggtggaggttgtggtgagctgagatcgcaccatcgcactccagcctgggcaacaagagcaaaactctgtctcaaaaaaacaaaaacaaacgaacaaacaaaccaaaaaccagttcttgtttaacagttcctgttctgactgcattcacataaatgtgtatacttttagggattgatttgtggtctctagggatatggtgcacaatgcagaaaaatagaaacactcccctcccctccgagaaaagagaaggaaaggaaagaaaagaaaaacaactttttcatacagaatattattttcttttttgccctggcagggagccagtgcacttcatccaggcacccccagggtccccagagagttttcttgcgcacatttctgagaacggatttgggatcagggtggtgctgcctctggaatgacatgaatggaaatgccaaaatgcccaacagtgttccttgttctctttttttttttttttgagacggagtctcgctctttcgcccaggccagagtgcagtggcgcgatctcggctcactgcaagctccgcctcccgggttcacgccattctcctgcctcagcttcccgagtatctgggattacaggcgcccgccactgcgcccagctgattttttgtatttttagtagagacggggtttcacccttttaaccaggatggtctcgatctcctgacctcgtgatctgcccgcctcggcctcccaaagtgctgggattacaggcatgagccactgcgccgggccttgttctcagttttaaaccattttcctgaaatgcatctgcaaacatatcaaggcagaaattattgaaaggaagagattttaagtttgctgctggcgtcaatacctctgaatataaaggataaagactccttggattaatctcacagactttccccaaggtttcttgtaaatgtaatttggaaaatgttttccttgtctggtataaaaattttattctgaataagataattctataaaaagttttctcaagaacgagcacaattttgagaggttgttttattttattttaaattttctgttgagaagggaccaaggtcagggtcatgcgtgtgatttctgtgtgatccaggtggtttccttggtggcttgttctgggaggtgaagccagttggacttcttggtccggtggggacttggagaacttttctgtcttacaagaggattgtaaaatgcaccaatcagcgctctgtagctagctagagatttctaaaatacgctaatcagcaggctgcaaaaacgcaccaatcaggtctctgtggctagctagcggtttctaaaatgcgctaatcagcactctgcaaaaacgcaccaatcagctctctgtggctagctagaggtttgtaaaatggaccaatcagtgctcagtaaaatgcaccaatcagtgctctgtaaaatggagcaatcagcactctgtaaaatggaccaatcagcaggacatgggcggggacaaataagggaataatggctgacc

SEQ ID NO: 87878 - DNA, 1163 bp, Homo sapiens
ttttccctgacttaaaataataacagtgatgctggtgctgatgaaaagactgatgtggcccttacatcccacatgaatcatcattcgggattattgtagcctccataaaagtgacgcagtggatgaaagtggtttttctcaatacttaaaaacactgtgaaaatgagataggtttaaagatataaatgtgattttttaaatcctgcccccccacccaagtgccaggagtttggtaactagaattgcatttagtcatcggggtacagattgtactgtgcgggctggagactcaaaccctgggctattgaaggccatgacaaatgctcattttttaatattatgtttttgctgctcatgaagaagcatcatgttcaaaatgaaaaatctttagattcaggacttaatagttcacctcttttggattgcgtttgacggaaacttggacacagctgagtgtaattatgcttttcagcagcatgacttatagtactgcagatatgggcatactttgagatttttctttttgccaaaatttgtctgaaaaggagcttggtggtggttgtgtgtgcttgtgtgtttttaaggtaattaggctattagaggtccaaatggaataatccccttaagccttttcaggaaaaacactttggaaaggttaagtaaatttaaaattagccattatttacgtaggtgctcagccttttgaccatgttctctaggagttgtttcttttacatttaggttatgtttgtcagaaaccatcttattttttatttttatttttctttctttctttatttttgagatggagtctcattctgttgcccaggctggagtgcagtggcgtgatctcagctcactgcaacctctgccctcaggttcaagcaattctcctgccttagcctcccaagtagctgggattacaggcaccggccaccacacctggctaatttttgtattttagtagggacggggtttcatcatgttggccaggctggtcttgaactcctgacctcaggtgatccaccagcctcggcctcccaaagtgctgtgattacaggcgtgagccaccacacctggccttatttttattttttgagatggggtctctctgttgcccagactggagtgcagtggtgcaatcactgctcgctgcagccttc

SEQ ID NO: 87879 - DNA, 1015 bp, Homo sapiens
tagctgggaccacaggtgtgtgccactacactgggctaattaaaaaaaaaagtttagagacagggtcttgctatgttgcccaggctgtttttcaactcctgggctcaaggaatcctcctgcctcatcctcccaaagtgctgggattacaggtataagccatttcacctggcaaccatcttatttttttaaatttatttttatttatttattttttgagacgaagtctcactcttatcccctaggctggagtgcgatggtgtgatctcagctcactgcaacctctgcctcccaggttcaagcgattctcctgcctcagcctcccaagtagctgggattacaggcgcctgccaccacgcccggctaatttttgtatttttagtatagacggggtttctccatgttggccaggctggtctcgaactcctgacctcaggtaatccacccgcctcggcctctcaaagtgctgagattgcaggcgtcagccaccacgcctggccgtgaccatcttatttttttaaagagagagttcagtactggttctgagatcaaaagcagccagatccctggtatcacagaagcttcatcacggattcatctatttttcatctccagaatggccacctcagtgctgtcctggccaaaaatctgttctctagacctggagaaggaactgccctgagggtcttccacacctctctttttgagaaaagttaagaacaaagtaaaaagatgcagtggagaaatgacgtcgggggttaatggattgggattttagggctggagtccaggcttatgttgctctctgctgagctcaggatctgcactgaacatctctctaaatcatgggctggggtaaaacctgcttacactggctcagaccggaggactttgcagccacctcaagacacacgtttgggtgtgtcccatctccaatcaggatgttcaacttgctttcttggatctttttgaattgcgaatttggccatagctgaccacttgtttttgcatcaatac

SEQ ID NO: 87880 - DNA, 1054 bp, Homo sapiens
tcatcttcaaggctctcgtctcctttgaaaaacttcttgaaccactactgcactgtgcattctttagccattcctgggggcaaatgcgttgttgatgttgagagttgtctccgctgctttaccacacattttgaactcgaataagaaaatcgcttgaatttgctttttgtctaacatcatttccatagtctaaaataaaataaacagcaagtaataagtcattagcaaaaaaagtgaaagaatgtgcattaaaatgatgtataacataaccacatttatttaagaatgtattccaatatcaaatggcaaattccaacagtgcaaaaacttacccctgaaaacaggcatagtcactttcaaacttgatttttctttcattttactctaccttttcatttgatgaaacacctttgcattttatctccctgagccaaagtacctgtaagttgcccggagttggggttggtgcaatactgtggaagagtgtggacacggaagacctagtcagtccttgctgtgtgatatcaatgatttgattgagaaagactcattttcctgggcctcacctgtcaattttctcaactgtcaaatgccctcttttggcctgtattaggggctgatctcatgcaatacggagcctactctgcaaatacaaggggtcatggtcattgtccatttgtggggagtgtgaaaacacctggtgatcatgatgggctaggtactgtttcacactttaaaatgcctttattttagggggaccctctagtgccataggtattttggagtctctgctttccaaatggcctatgggaaatcctgagatgtccgtgggatctaactttgcccagtgggaatgttgtgtcatagtcataaaggcttaaggattagtttatttccagccctgcaggggctataaattgctactttaaatttcattccagcaccctgatgtttatgttgctatggtggtgtgtctcttgctcgggtgacaagattgccattggaaataggccaaaataacagcctaacaggtggctgtgctttgggaagtcat

SEQ ID NO: 87881 - DNA, 1055 bp, Homo sapiens
gacaacatggtgagaccctgtctctacaaaaaataaaaaaaattagctgggagtggtggcacacatctgtagtcccacctacttgggaggctgagatgggaggatcacttgagcccaggaggtccaggctgcagtggacgtccagccactgtactctagcctgggtgacagagcaagaccctgtctggaagaaaaaaagtcaatggaacaaggcagcgtattgaaatattctttccttgggaaatgtatgtcataaatccttttaccaacagatgatttggatctttaaggctcccaggcacatgactttattctcaggagatggttaggcagtagattaagatctgcttattgccttgagactatataaagctcccaatacctatttttattggagaccaaatttctaacttgttcaattggtctgcttatggcagtgctgctctcccagtcatgggagaagacagttttacatttaaatggaatattctaactttgcttagtaagtaaatactgacccaaagataaacaatgggagaaaatggaatttcagtgtttcatgcaaaaagttcctatcacaagggaatcgcagttttcattctttgggtaggtaggtagatttctccatgttctgtgaaactgtgttgttgcggggaaggaagcaaaagaacaaatcaatagctgaggatgggggcatattaggaatttttttttttctttttgagatggagttttgctctgtcacccaggctggagtgcagtggtatgtcttgtctcggctcactgcaacctccacctcctgggttctagctattctcctgcctcagcctcccgagtagctggaattacaggcccccaccatcacgccaggctaatttttgtatttttagtagggatggggtttcaccatgttggccaggctggtctcgaactcctgacctcaggtgattcacctgcctcggcctcccaaactgccgggattacaggcgtgagccactctgcctggccgtgagccaccccaccgggcctgaattttgcttaatagaatcatgatg

SEQ ID NO: 87882 - DNA, 1190 bp, Homo sapiens
tgggttcagtacctcctttaatgtaagagctggcccgtcttccctacctacttgggacactttctagttttgaccttaagtagggtatcaggaaaattccgagaaagggaagacactctttttcctgaattacagaatagaccaactcattagaaaaaataaattaaagaggccaggcgcagtggctcaagcgtatgatcccagcactttgggaggccgacgcaggcggataacttgaggtcaggagttcgagaccagcttggccaacatggcgaaaccccgtctctactaaaaatacaaaaattagtcgggtatggtggcaagcacctgtaatcctagctactcgggaggctgaggcagaagaattgcttaaacccgggaggtggaagttgcagtgagccgagactgtgccgctgcactccagcctgagtgaggctggagacccagagcaagaccctgtctcaaaaaaaaaaagagagagagagagaaaaccagaacccctttgtttcaaaaccatccacatctgtctatccatccgtaaagcacaaagttatcagagacaaatcatggtctcattttgcttcatgcattttggacctgacatgagtccgtctttgatccctgaggggtggtagaaacaagcaatgcttttcagagtgaagctaaaaaaggcactctgtggaagagaatatattttatagatcagtgattagtgagtcttttcatgacaagttttgtattaattatgatttgaaaacctccagtgcagggttctcaggaattactaagtgcccctgggtacagcaagaagcactggaataaagaatctcaatgtgtgaccaaatttctaaattcttgggggtgtacagaaattagccacttctattttctctctctctttctctctctccttccttccttcctccctcccctccctccctccctcccttccttccttccttcctcttctcttctcttttcttttctttctttttttctttcttgagtctttctctgttgccaggctggagctcggtggcgctatctcggctcactgcaacctccacctccttgggtcaagcgagcctctcactcaccctcctaagcagctgggattacagtcatccaccaccacgcctggctgatttttatatttttagtagagacggggttttgctatgttggccagg

SEQ ID NO: 87883 - DNA, 1021 bp, Homo sapiens
cactgcaacctctgcctcctgggttcaagcgattctcctgcctcagcctcctgagtagctgggattacaggcactcatcaccacgcctggctaatttgtgtatttttactagagatggggttttaccatgttgcccaggctggtcttgaactcctgacctcaggtgatccacctgcctcggcctcccaaagtgctgggattgcaggtgtgagccactgtaccaggctagaatggtaacttttgaaacccatttttgttattctaaagtcttcacggtgtggtgttgggaaggctgggttgctgtgtcagatgggtaccctcaccccagttatggctgttctcacatccaattccaggaagcctcattcttgtgtggtcatagaaaagcaaccttaattttcctgtgtcttagtttccttacctcctagaaatgtggcaaagatgcagaatctgtttatttagtaaatatttatcaagttctgggaatacagcggcgaataagccaccaaatccttccttgatgggactcaccctctaacacagccaaggcaatgagagaccttccaggaataacattgagaggcaaattatgcatgtaggtgacacatgaggccaacaggaaatgacctcgaattgaagttgaaatttacagtgcgagatgagccaagaatctgtgaacccttagaactcaggcaaggtgagctggtgtgacttgcaggaagtatgactcaattgtgactgtacccaagaaggcttaaaccacatcatctgaaagaaggatgtgccaacatacgcttccaatgactaaaaggaggggcagagggaaaaacaaaacagcatgttcccaggcccatcctaggaggaaggaaggctattaatacattcctttgacattgtctacttaccattgcatagagttggaggtgagtggcatatggagagacagagatttggagacagactgagtttgaatcccaattttgtcttattaggccgtggacaagtcatttcaactctctaa

SEQ ID NO: 87884 - DNA, 1027 bp, Homo sapiens
cactccagcctggatgaaagagcaaaactctgtttcaaaaaaaaaaaaacttacaaagtaattatttctaccaccattattcttttattcatttgtcatttaaaatcttgtttttatgaattttatgatttgagagaattttcatgtcaaaatatcctttcttttctgaaagaatattttagcattaaatattagaaggaatacaatttcagtagttatgtgatgaataaatttagctttctgaaaacagaccgcacttgctttgttttttccatttggcaatgaacctgtgcactagcatttaggaatcatttaggaattatcagtgtagtggaaacagccttgctttgaaacaacacaattttacttccagttctgaatcatttaatttttctgaacttctttttacccatctgcaaaagaggaatctcagaggtatagcaataaggtttataaagggtttaagacagttctgaatgcgcaggagtttatagatggtaacgtcttttctctggatcattaattctccttactactctgtgattttaaaaacttagaatgttggctagtgtggtggctcatgccagtaatcccagcactttgggaggctgaggtgggagggtcacttgaggtcaggagttcaagaccagcctggccaacgtggtgaatccctgtctctactaagacacaaaaaaattagtctataatcccagctacttgggaggctgaggcaggaggatcgcttgaactcgggaggtggaggttgcagtgagctgagatcatgccactgcactcgagcctctgtgacagaacaagactctgtctcaaaaacaaaaacaaaaacaaacttagaatgttggccagtgtggtggctcatgcctataatcccagtgctctaggaggcagaatgctctagagggtggaagcgggaggattgcttgaggtcaggagtttgaaaccagcctaggcaaggtagtgagacctctgtctctaaacaacaacaacaaaacagctgggcgtggtggtg

SEQ ID NO: 87885 - DNA, 1199 bp, Homo sapiens
cctgggctcaagaaatctgcccacctcagcctcccaaagtgctaggattacagacgtgagccatcacgcctaacctcttgcaggacttttggggtggtttaaaaattacgcctgtgtagcactgggaacattatgacacccaataaataccaaataaacaacagctttaaatattataattcataatgattcacagagtattaagatccccaggcgatgcaaccaggtagtacctaagtgtatcagtcttgggtgcatctgtcagggttaacctggctttgtttttaactttacaggacatatcagagtatagctattgtgcctgtgctttgaacactcaaacatccgctcaactgctaagtaactgatttcctgtttagtcacagctccttgtctgggaccagccactggcagcaaattgtcatcttctgtatctccctctcaaagcaactcagccttctgaagacgtgtagaagttaggtctcgcaggcttgtatttattaagcccccccccgccacccatcagtccccagttattttgagtgtctcaaacgcatttcccacacctgatgattcatctgaggacgactcacccttgttgtcactgacactgtccacagcccagagctcagcctctgatttgctcggcagagatggggctatgtacatatcgtgtgagacggaagctaacataagcagaggagaaatcacggaagcaaagtgaagtgggaatccagttaatacttggaacagaaaactggaaagcagctcattcattctctccgattgtaaaaggcggatggaaacaacacttttgtcagcctttcttctaatccgatcacagctgtaaagaccataaagccaagccccgacgtcaattattcttctccctgttcctaagaatgtgaaattagatggggaaaagtgacagaagagtgtcactaaaataacttattacactttgagggtcttagtcgtcattaatagttgttactttttgaatattcatcagtgcgccctgctgttcggcaagagaggctgtatgaagtaggaactgcacacgcctggcttcagtcatgtatgccttggatttaagctcttcttttccacttaattagttaacaggaacttactgagctgggtgcaaaatgatacagaagaataggagaatgggattgtaacccctgaagcgtttgtga

SEQ ID NO: 87886 - DNA, 1503 bp, Homo sapiens
gcctgagccaccacgcctggccgagactggcttcttttactcaacataaagtttttgagttcattcgtgttgttgaatgcatcagtggttgggttttttttttgttgttgttttttgagatagggtctcactgtgatcacccaggctagagtgcaatcacagttcactgcagcctccacctcctgggctcaagtgatcctcccaacgtcatcctcctgagtagctgggactacaggcacatgccaccacacctggctaatttttgtatttttgttttgtatagacgggggtctcactatgtttcccaggctagtctcgaactcctgagctcaagcagtctgcctgcctcagcctcccaaagtgctgggactacaggcgggagccatcatgcctggccaatagctggttcttgttttactgctaatagcattccattatagggatgtaccacattttgtttattcatcaccagttgatagagatttgtttctaattcggggctactgtgaatattgctgctgtgatcatttgtatacaattcttggatggacatgtgctttcgttcctcttgggaagatactttaaggagtggaattgctggggtttttttttttttttgagatggagtctcactctgtcgccaggctggagtcactgcaacctcctcctcctgggttcaagtgattcacctgcctcagcctcccaagtagctgggactacaggcgtgcgccaccacgcccagctaatttttgtatttttagtagagacagggtttcaccatgttggccaggatggtcacgaactcctcatgatccacccacctcggcctcccaaagtgttgtgattacaggcgtgagccactgggcctggccactgggtcttatattaaacttatgtttaacttataaagaaattgccaggctgttttccaaagtagttcttgcatttttttactctcactagcaacatatgagcgttttgggtttgccacatccttgtcagtacttggtattatccgtcttttgtttgtagcgattctaatgagtgtgtggtggtatctcactgtggttttactttgcatttcctgtactcttttaaaactgctttccattatagaacatgttgtgttgtgctgttatatatataaagcttctgctcacctgtgagctactctgtctagctgattgatccagtattgtgtccgggggcagggtacatggaaaatgcttagggtttgttgagtgaatgagcaaactgatactttgtaggagtggccaattttcaaatattttaggtaacagaaaacagtggtgaatcaactcaaaagatgaggtaccagtcaaatctcttcccttttgtcagtttctaagtagtattaaacttgagtgaactaagttttacttttttttcctttgctttgcttaccccttggtgagaggtaatggagaaaatatagacagagcaggaggaggaaagaaactcaatctcgaaatgactaagagc

SEQ ID NO: 87887 - DNA, 1031 bp, Homo sapiens
attcttctacaaagcttctctgatatgcagtggtcttccctcctgagaattcaccagaatgtactggcttgatttgcccttgatttgttggggaacttttcacatgggggaagcacattaagagtacaggctcgggctgggcgtggtggctcacgtcggtaatcgccagcattttgggaggccaaggcgggcagatcgcctgaggtcaggagttggagaccaccctggccaacatggtgaaaccccgtctctactaaaaatacaaaaattacctgggcctggtggcgggcacctgtaatcccagctacttgggaggctgaggcaggagaatcgcttgaacacgggaggcagaggttgcagtgagccaagattgtgccactgcactatagcctgggacacagagcaagactccgttctcaaaaaaaaaaaaacaaaacccaaaagaggacaggctctagggtaagactctggggtctgaattccagctcaacaacttattaactatgtgatctttcactacttacataacccatctaaaagctttggtttcctgatctataaaatgaataatagtacctatttcacagagttgctgtatagattaaacacaaagatttagaatgacatattatactttttattcttcttttgattttttttcaaccatttaaaaatgtaaaaccattcttaagtcatgggcagtatgaaaacgggtggcagggcctgcaggatatagtttgtggaccctgcattggagtatgaacttgaattattgccgtttactttagaaacgatgattgcttttttcctaattgcaaagcaccatatgttcactgcagaaaacttggaaaacacaaaaaagcacaataaaacaaaagccattcagaatctccaccatccagagacgtttcatgagtagtatgttgccccatagccttccagacaattgtgtacataatacacatatttcattattttttattttcctttttttttttttttttgagtcagggtctcactgtgtcacccag

SEQ ID NO: 87888 - DNA, 1004 bp, Homo sapiens
gcgcgacggtggctcactgcaacctccacctctcagattcaagtgattctcctgcctcagcctcagtagctgggattataggcgcgcgccaccatgcctggctaatttttatatttttagtagagatgaggtttcaccatgttggccaggctggtcttgaactcctgacctcaggtgatccacctgcctcagctcccagagtgctgggattgtacaggcgtgagccactgcgcccggccagtgtgaccaaaactttcttacagctgtgttgcactctgagtctcttcctacccggtactcctttcttttctctccatcatacctaggccatggtctgaaggttctccctgcctcctcctgcttcttctctgctaccatccacactcactgtgtccatgaaaagaccagattccactggtacttcagatttctcaaatgagaagtaaaacatattctataagttttgaaaatgcttctataaaatgcttctggaatcttcctactggaagtcaaatagataataggtccccatagaatagcacgggacaatagtacagcttcgggggcggtgcccagggaaatctgggctgagttagatgaaggatactaagcatcctatgggaactcatgcagcagggagtctccttcgcttaaggggaccacatacatatcacacaggatgtgtctttcttgtttttctccaaacccatcccgttgtgttggagggtgatgaagtttttccagcaaccacagtgcagtctggtgaatcagaatcagtgtcattgagcctcagcaacacccagatatccaagagattgtcttaaagaatcttagaactgtaggctgggtgtggtggctcacacctgtaattccaaaactttgggaggccaagaggatcgcttgagagcaggagttcaagaggatggcttgagggcagaagtctgaggctgcagtgagctgtgactgcaccattgcactccagcctgggtgactgagggagaccc

SEQ ID NO: 87889 - DNA, 1082 bp, Homo sapiens
agagtagcaggcattacaggtgcatgccacctcacctggctaataaatgtttttggagggatgtgttgagcctatgcaggtatcctgtttccccttaaagtttgcccatgaacttaacattcctcagtggaccctgcctgcagctattattactgtaatgttctcctggtgattttctattctcccatgccttctgcctttattacatggaattcttctgtaagggaaatttgtttcttctccaggtatttgtttatctatcctctcatttatttatatcagtgtggactcacaagtacttattttattctctgggtgagagatgtttttaagatgggaaaatggactactttaagttaacctaactgtgagccaggtagcaggaggtgtggggaggaggagcatagatgctgggggaggaatgggcggtggatggagcgaagttcctaggaaggtcagtgagaaggagatccggaggtgggggtcttggcaaaaacaagggacaccctgttcccacaaatgggtaagaggaaagtttgggagggtcgatttccatgtcaggaaggagaacttgaaggagttccaactaattagcttttgtcttctccgtcaagatgttttctgtgacgacaatgggaagttgacttttggaattttaattgtcttggccaaaattcctggcctctagagtaacgtttctcaacctcagccctgccgacatttggagcagataattcattgttgtgggagccgtcttgtgcattgcaggctgtgtcgcagcatccctggcctctaccctctagatgctttagtgccctctcctgtttccccagcagtgaccaccaaaatgtctccaggcagtgtcaaatgtgccctggggagcaaaatcgccccatgctgagaaccacagatctaaaattaacacacacaattctggcaatccgtaggattcttcttctctttatttttatttttttgtctccctctgttgccaaggctggagtgcagtggcatgatccatagctcattgcagccttgacctcccgggctcaaacaatcctcccacctcagcctcctgagaa

SEQ ID NO: 87890 - DNA, 1192 bp, Homo sapiens
cactcttattgcccaggctggagtgcaatggcacagtcttcactcactgcaacctctgcctcccgggttcaagcgattctcctgcctcagcctcccaagtagctgggattacaggcatatgccactacaccagctgattttgtatttttagtagagatggggtttcactatgttggttaaactggtctcgaactcctgacctcagctgatccacccatcttggcctcccaaaatgctgggattacagacgtgagccaccgtgtccagcctgcccagctcatttttatttatttatttattttttggtagagacagggtcttgctatgttgcccaggctggtcttgaactcctggccttaagtgatcctccacctcagccccccaaagtacttggattacagattacaggcataagccaccgcatcaggtctgtttaatttttaccattcagacagcactcaaggcctagtgtgagtggcctccatcgagggccctgggcttccctctaccctgagggttccatgtgcctcccaggttgaagccatgagagagtccagaactacccccaccccaaaaaaagtcttgctcatggccagctgagtgttccacagcccttgatttctgggtgtgtcataatgtagtcaccaagtcaggcctgtgggctgcctctgggtccttcctgttgagagtgatggcatgtcactgctggcttccccgaggatgagaggttcaacttgtttggttcggcccctaagattctcttacattacctctagctcagacactctgcttgtattggaaaactgggaggcagtgccttttcctctttcttcctttctgaaatagaaggtactcagtagatgttggatttggaatattggaatgaaatgaaggctgtgtgggcctctgggcagcctttggtgttagaaacaggcttcatccctgctggacttgagtttcagttgaggagctcctatctgggcagcactcttcaccagcaaaggctgtccgtggtcttttgaaaagagatcttttttagttcatttcttaaaatccagtgctatatgagagccagtctgatcttttctaaatctgtactttcattttgggtagcgcctaaaagagacacagcagtccctgttcaacctcttttcgggaaaccaagagccttggctgcttattcatcccttct

SEQ ID NO: 87891 - DNA, 1083 bp, Homo sapiens
aaatgagcacttgatgacttgattcctgacacttattcttgtgattcttttgaatctcaattagtaagactttctttctcatagaatgccatacggcttcttggaacaaaggacaaacgggtagaatgcttgaaacagaccaaatcaaagattatgatttttttttctgaagggaagaaaaaaataaaattggaaaaataaaaataaggcttatcatgatatcctgccgtctgatttctaaaagtacagttcctttaggttctaaggactggcatgttctttgtgatatttgtcaatgacatgtgaaatgtgctctgagtaaaggcattttcttctgcaatgttcatttctatttcaatggtctgcctcagtacttttctttaattaatactgtttatgctcactgatgaataattcagagttgtacaagcaacagatgtcagcggattcaaaatgactttccctgaattatttattatttccaaaaaagtaacaggtttgttgaacaagtaattggcaacacagatgtagatcaaggtttgtcagcaggcaacaagtttcactactgtttccccttttgtgcatgttgataaccaggatggcattgtctaggagcgggggtctgcctgataccactgcttagggagtcattgacccatcctgttgctgacttggagagctggaaccttagttggtttccaggttgtctaacgatgaaacatgaatggaaattcatccaaaaatgtaattaatgaatgtaggcttgtaaatatctcgcagacagaatgacttaatacaggtgcccagaaagagggaacatctttgtttgcagggatatgttaagaatagagacctagaagaaaaataatttgacagatatgtaaaggtttatgtataagaatgttctctgcagtgctgtttatgacagaatttttgcaaggagacaactcaacgtccaacaatgaaagactggttagataaattctggtagatccaagcagtgaaatattatatcaccactgtaatgatatatatgtatttttgatctggaaaaatgtcaacatattaaataaaagatgatat

SEQ ID NO: 87892 - DNA, 1105 bp, Homo sapiens
ctcatagaatgccatacctcttcttggaacaaagcacacatgggtagaaggctaagctgctgtaacaagagatccaacaacattgtgacttaaagaaataaatctcaggctgggtactgtggctcatgcctgtaatcccagcaatttgggaggctgaggtgggcggagcacctgacatcaggagttcgagaccagcctggccagcatggcaaaaccccatctctacaaaaaatacaaaaattagctgggcgcagtggtgcacgcctgtaaccccagctacttaggaggctgaggcaggagaatcccttgaacccaggaggcggaggttgcagtgcgctgagatcgtgccactgcacctccagcctaggcgacagagcgagacctggcctgccttgttatcttctaaagagccaagtctgggtgctgtcgtgagaaggaaacatgggtatggaagaggcacaacttgccgtctcaaggccctggtccaaaagtggcccatatcactcctgctcccagcccttagcagggacataggcacatggccatactccactgccagctgcaaagcaggctgggaacaaaatccttacaggcatttatgtgaccagcaatagctctgtgctatggagaaaagagaaaaggaattttgctgggacagctttcggtctctgctaaatttattgattgattttcaaattttttttagatatgaggtcttgctttgttgcccaggtaggtcttgaactcctgggctcaagcgattcccccaccttggcctcccaaagtgggattacaggcatgagctaccatgcccagctgctactaaatttattacccgtaaaataaaaataaaaataaatttaaaaaggaagttgagttttgattcgatgtcttcagagggcatttccttttggaattaatcatacagaagatgtatactctgaagcaatttgaagatttaaaaaaaaaaaaaggaaaggtataaaatgtggacactgccttccagggatttacagtctgattgagaaaccggaccaataacaattcgaagtagtatatgcaaaaggccagagagtgttcagataagtgcagaggagcaaattgg

SEQ ID NO: 87893 - DNA, 1022 bp, Homo sapiens
ctgtatgagccacaagctgaaggctgtcttctgggggcggcttaaatgcattagattagtctgcaatgtggattaagggaccgtgggatttaataacttgcgtattaaagaatggctctgcaaatgttaccctaacataaaaatgtaagcattctaattgaatttagaagcaatagtattaaaatttcttctggtgatgctccttagacgcattaaataaaatatcaaaagtcacaattgattaaactgaaactttagcatgagagttattaagcattaaattctgctgctagaggtttttattttattttttcctgacatgtactcagaaaattctccctttacataatttatggtcattctgctgtttaaatgtgccaaaaaatgttctcggagttttggcagtgttttgaaatagagtatattatcttagtcttgggctatatatatataatgaacactcaatatatattgatggtggtgttttcatgagttgaagtctcgctgtgggcaaaggaaggaataggctattctattacatctgatgcttagcctgcctttaatgagtaatgtagaaaaatagacctcttcttcctcctatggcaagtctgtatgtagtcttgctaagcttgtgtctgcccacaaatcctaatgagaagatggcattgatcggagatggtagcaaagtacagctgggatactgctgtccatatgttccatggttccagaattccaaggactacagacagccttgtagaaatcacaaagcatgagtgatagttataagcaaagaggtcttctcctttttatccaaggacaagcaaatggcagggaggcagaaaggtgacgttttgaatctgtagacacataacgaggaatgtggttgactgaaaagtgtctatgcatttagggcggtgagagcagacagttaggggcatccaggaaacctcctcctctcttgcctttcagggtgtctcctggagtcccgagtgtggcatgttctgcattcaagagtattgtgg

SEQ ID NO: 87894 - DNA, 1050 bp, Homo sapiens
tagctctgacataccacgactctgaatgaacaggtggaattgatggggagtgaggaggcttggagagagagcccccgggtgtgaacccatcctgttctaacaataatgagctttgggatgaagagcctccccgcaggcaggggactgctgggagtttctggtgtcccagaagaagccttcagggcagctctgatcagtaaataaaaggatacgaaataaaaatctcaaaggatccgtaatgaataagaaagcaggaatgtcgtccccagggagaaatgagttgggggctttgtcagtcacgagagaacatagcacaggactctgggtccaatggagctgaacgtcagcgcctctgtccccacgaaaatagtaacttccctgacaccatccacctgatgccaagagctgtttatatcaacatttcttctcgggattctttcaaactttatacttacttctctcctcctctgattctattcaaggaatgtgaatggctgaggttttgttttgttttgttttcctctctagattagcacagctaatacagtggaattgtgatgccagggtctattagtgtagagaaacaaagaatgcagtcctgccctgggcaccagggtttacttccatggtgacttcttcttaagcccatgggaaagtgagagggaggtgacctcctcacagtcggctcagcctctggagcccggagccggagccagccccatagtgtgtggccatcaggatgacgcagagaggcgtgtgaacgcagccggccactgcagctggtgcacttgactctgggcagcgcgttcccaggaacccgcaggacactgaggaccgtgcgtgatgtaacccagatctgccagatgtgggagccagcatgagtcacaatgccgggccgttcattaagaaatgctttctgggtcatctgggtgcagggcactgctgcttccctgctgtccagggttggaggcatcaagtctgcccaccaggaatccccaagttcatgaacatctgtctaaaattatagcctggttttctgagctgatgtgg

SEQ ID NO: 87895 - DNA, 1037 bp, Homo sapiens
agatgtgcaagatgccttatggtgaataacaagtatatttctgagaagttgtaaactaactccttaaaaaaaatccttatggatataagacatacagtcagaaaagttcatgcatgcatccctgggtaaaatctgacacccaagtaactgtagcaagttgaagggtggccccttaaatatcccccagagcctgtgaatatgatcttatttggaaggagacctttgcagacataattcaatcaaggatcttgagatgagatcattctggattacctaagtggaccctaaatccaatgacaagtgtccttacaagagacagaagaggagaagacacagacacacaggaaggaaacatatgaagcaggaggcagggattagagcactggagctgcaaggaacagctgagccaccagaaaccaaaagaggcaacaaacgggtggtcccctcgtgcctttggagggagcctggccctgctgacaccttgatttcttttttctggcatccagaactgtgagccagtaaactctgttgtgtgaagccaccaagtttgtggtgatttgataaggaaactaataaaatcatcacacctagatgaagaagcagaatgtttccaaaaccctggaaactccccctcaagcctagtttctgttttcacaccgccccaggacagctactgtcctgatttctaacgccggggataggttttatgccatttgaacataataaatggaatcttacggtgcatcgtcttctgtgtcagatttcttcccctccacgctttgtgagatgtgtttatcctgttgtgtgtttgatgattctcactgctgcttagttgtagtgttccacggtgtgaatataccacgatttatttactcttctcctgttgggggcatttgagtttggggctacgacaaagagtgctgttacaaattctgtttcgttcctttctgatgaatatacgtgggcgcttttgtgagttacattctcaggagctgaattgttgggtcataggctatctgtgtgttcagcttcagtag

SEQ ID NO: 87896 - DNA, 1053 bp, Homo sapiens
ttctgtccaggtgtgttgactgaattcaggctttctttacgcgatatgagttcagttaatgaaaacacaggggagtgaccagaagtgattgtttccttctttggcatttctgtcttcctctttttttgttctattcccttattttgcaaccttttggatgttaccctttggaagttaccctcttgtaacttccacattaaaagtttgggggctggcagatagaaggaactccagagaacaacttgattctgtgctttgggagagacagagaaatgaggggtgtggaggaaggtcagagagaccctgaggcttctgcctcacttcagcatgtcaaagcaccctattttggggtattgctttctgagccccaacatctccagccttccaggagtctgtggcatatccttccccaaaggagtaggatcacttgaccactctactgaacctaagttgtttttcattttcttttgcatctgccttgaagtctagagcaaatgaaaatacaacaacactgtgtaaacaaaacacacaaaaaagctgctctgatctttctgttttctcaggtgcaaaacaggtcttatctaaagcaactgaaaaggcatggaggtagcaattgctttgctattccaggaactagtagccaccacatgtgtaaaactattgaagaacaagttttcaaccttctgctgtgaaaaggtacacaggaatggctaaagtctctctagaacccgtaccttcctggagcaaagggaagacctgggaaacgttttgacaaagcaatgcttacgatatttttcaatatcaggggaattcagtcagtcttctttcttttttgtttggccagtttagctaaagttttgtcaattttgttgatcctttcaaagagccaacttttggttttgttcagtttctctgttatttttctattctctagttcattagttaattaatttaggttaattaattaatttaggtttgacttgctttttttgttccgctgtcttcaggtggaaggttaagttattgatgcgaaatctttttcttttttaatat

SEQ ID NO: 87897 - DNA, 1023 bp, Homo sapiens
gagacaccatgcccaggcagaagatagattttttttaaatgtagcaatttctggaaatataccaaacttactgttttccctgtcttcactgacgacctcaggagagcaggagttgacacccatttgctttcctcaatctgctatctgcttctttttaccaaggaggaaacactcttaggccaactatggcctaagaatgaatggtgcctccctgcaaccagccatacaccctctctggctacaagtgccatccatgcctctggaacctggagcttctcctaagtagggtgagcaaagatgctggaactttccaagtctcaatctacatatacaatccacatatataaccctctcccagccttgctaggtagttaccagaaccccaaaaccacttgccaagccagtcagcatttaggtaagcaaaggagtccagtgaccctcaaatatcactgagatcttgtttgtctaggcatgaagtgccttgaataactctttcaagacattaagaactcccgctgttcaattgtacctgaagcagcaagtgcttctctttgcatttcctttaccctctgttctcagaaggtctcaaagatgctgaaactaattgctgtcattcctgaaagatttctgcttttaagtggtactgcggcttcccttgatgctaccagccgttttcattaaggatttcatgaagggttgatgggtgcattaggcttcacaaacaacggttcttttcatcctggaaaggccttgctaccttggtagtggatggacctctctgctgcgaacatctctgtttatggggctaaggttacagagatgacaaagaggtcacaagcggatggcgcaggatatgtgtcctgggaaagctctatcttgattttccctctttttggtcttgtgattgactgtgggtttatgttctgtagtaaacacaagagccttgattgcttactaaaggtcagacttgtcagcaaacctctccattaacttgagttgcgatcggtttcacatttcctggca

SEQ ID NO: 87898 - DNA, 1050 bp, Homo sapiens
tctaatgctccctgttcagcaattttgctaattaggcagaaagcaggggcagaaatcacacaccctcggctgtcttgggccaaaccaagcaggactttagctccatttaaccctgtagaatgcaaagggagactccagtgtcccccttcccaaggtttggtcagctgccaaagcttacagactgccagccacccggccgagcatttgccaaggtgatgtaaaatattcacgggaacacgccgtctcgatgttctactcacaactggttctctccctagctcccgaggaaaagtaacatgaggcccatgtggctgccttctcttctcagcagaaggtgctgatgttattagtggcttgccaagctatggttggagggggatgtcaggggcacgctgtggggctgacctttctgtctctgactctgttttgtagtacaaaattggacagctgtacatgatcagcaaacacagccatgaacagagtgaccggggagaaggggtggaggtcgtccagaatgagccctttgaggaccctcaccatggcaatgggcagttcaccgagaagcgggtgtatctcaacaggtgagtcatggcagcctgcgttctgcacagaagccccctcccacctgaccccatggtgtgacagtggaggcagtgggtgtctgggatgaaaaggtcacttggaaagtaactacgtccaccgtctacgaccaccaatctcattgtttttgaaaacagaatctgcccgagcgaggtggctcatgcctgtaatcccaatgtttttaggaggccaaggtgggaggatggcttgaggccaggagtttgaggctacagtgagctatactcacagtactgcactccagcctggggtgacagagcaagaccctgactgtaaaaaatattactacataaaataaaataaacgaaatgaatctccccctccccaccttgcattctgcaaaatcgtcctcaactgcgtttccattaagaggagctttcggctcatctttcccacggctttgatgacgtgttacagcgaaatgtgatctta

SEQ ID NO: 87899 - DNA, 1609 bp, Homo sapiens
cttcctttcagttcctttctgaaaccttcggaatatttgtggttagatgccatatgaaatatatcttattggcaaagtgtggtggctcacacctataatcccagcactttgggaggctgaaggtggtagatcactttaggtcaggagttcaaaaccagcctgggtaacatggcgaaaccccatctctactaaaaatgcaaaaattagctgggcatggtggtgcgcacctacagccccagctacttggaaggctgaggtgggaggatcgcttgagcctgggaggttgagggctgcagtgagctgagatcatgccactgtactccagcttgggtgacacagtgagaccttgtctcaaaaaaaaagaaaagaaaagaaaagaaaagaataaagaaaaaaaagaaatatattttattgaaattaactgtccattccagcaaacaagtcttacgtcagccatttcatgaatacttttacccctacctgtggcctctccgattggcccatatgtgattatccagaaagtatttccaacaccctagctgggcagtgccccagtttattcactgacaccagtgactgtccattctcagggcctcggacgtggttagacatctctgagaggaaccatatttagattcccattctcgccttgaccccactccccagcagcttgaattggactattccttcttgatgggagactttgcttcctgtcactagggtggatggaattctcccagacccgtgtcctgacagtgaagggcatgagctgattaaactgatgttttaatttgcccagagatgcagtaccagggaattcctgagtcatgatgaaatgcaaatgagattgatcccattcatctattagtagctgtgaattcccaggctttggaaccagttcagtgtccagccagctgttgatttgcaggggcagctgagctctgggtctgtcctgagcatggcttttttacagagacaggtttctcaacatgctgctttggcattcttagcgtggagggtgtaaatcaaatactgagcaagtttctcctcggggatcacctctgcagggcaaagagaagtgaggaagatgccagaaaatagaaacctatggaaaattccatttcttggcatacaattgcattctctcaagttattacctggagaatgttccttatatatgaaaatcaggaagaattttaggaactttgtaagttttgctgaaacacaataagaggcatccagctctccctgtcatgtctgttttgtcatatcatatttatatcatatttatttaaaagaagagtaataaacattagtaagagggaaatttgttataaatagatgtggacttccagtaatagtaaggaaaaagattaatggggaccctccaccacttcccatgacaaacacaggatgaaatataactatgtaaagaagctgagctcaaaacaaagaaagggaaatcctccgaggctagaaataaacaggcaaactgaaaccagagtggaaagcagacccgttaatgctaaggaagggcatcggggggacatcagaacagagtgtgggttctgacatctagggactgggcatgtcatgcccatggggaaca

SEQ ID NO: 87900 - DNA, 1078 bp, Homo sapiens
agagtcataattcattaaacgagtatttgctgaaatgtacgacgtacaacacattgtgcaggcattggagagaatcccttaagaaataagccatggtcatggttcttgcctcctgatcaaggtagggtccaaggcattttcataagtccacagggcagtgggtcctgattgttggaccggccgtaactaagatgttcccagtgcccatttaataatgtacacagacaattatcattgacctatggacctgaacgcatgagccggcatagtgagtggattctcttccttacatcaatctgtatgggaagtcaaaccacattcagaaactgccttattgattacctaaagtaattattagaggcactggaaatattcaaagcctgtgtaatcacagcctactctccagttaatgtggaaatgagaaagttgctcaaaggggagttagagtccacaataattattatcactaagcaaagatagtgtaaacatccatctatcgaccactggtgtgctttggctggtggttatgttgtctgtgggggatgagtggcagacaggccaaaaaggaggcgtgaggctttagcagttaaggtccacagttgccagcaagagaaactgagtctcttgagcagaaaggacatttcatggaaagatgttaggagccctcaggatcatctggaggcttaagagtgggcagaaatcaacagccccatgatgacagccatctttaagtagagccagatggcgtcattctgccctcatcaccccctacctctgctgcctgcagccatcagcaccgcagctgccctgagtagatctgaattgtcctgtttttctttccaccacttgttccaaaatcccaaacacaagtgtcccattgggttcccagaccaagccctgggctaccagtgaatgggagaaaggaactgctaaaccgttttccaaagtggctgcactgttttatattcccaccaggaatgcaatagggctccaatttctccacataatcactgacgcttgctattgttgtctttttgatgatagccatcctagtgggtgtgaagtggtatctcgctgt

SEQ ID NO: 87901 - DNA, 1045 bp, Homo sapiens
caggcagatcacttgaggtcaggcgtttgagaccagcctggccaacaaggtgaaaccctagctctactaaaaatacaaaaattaaccaggtgtggtggcatgcctgtagtcccagctactctggaggctgaggcatgagaattgcttgaacccaggaggtggaggttgcagcgagctgagattgcatcactgcattccagcctgggtgacagagcaagactctgtctcaaaataaataacataaaatatgggtctctctatccatttattcatttatttttatttttttaccaaaatatataagctgctgcccatgctatgtttgaaagatggctccttatctagtaatagctggtcaagttacttgactatgtgaatattagactgtatacatagtctatacatatatatatacacacacatacacagacggagagacagaaacacctgctgggcatcacacaccgttctaggtgctggggttgcaatagtgaacagagcaaacatccctgccctggtgggacttgcattccactcgggagtgacagtgcacaatagccataataaagaacagtatattggccaggtgcggtggctcacccctataatcccagcactttgggagcccgaggtgggtggatcaagaccatcctggctaacatgatgaaacgccatctctaggaaaaatacaaaaaattaaccgggagtggtgtcccgcgcctgtagtcccagctactcgggaggctgaggcaggagaatcacttgaacctgggaggtggaggtcatgccactgcactccagcctgggtgacaaagtgagactccatctcaaaaacaaaaacaaaaacaaaaacaaaaacaaaacagtatatcgtctagaatatatacttttatatagtctgtatacttatgtatattacatattatttatatagggagactatatatgtatatatatatatatatatatttagaaggtgataagtgttatggaaaataatagagcacatggggtgcttccttccaacctttcagtccatgctatc

SEQ ID NO: 87902 - DNA, 1048 bp, Homo sapiens
ctatctctaagttgctgctctctgttggttttgtccattttcaaaatgtcacttgtatgagttgcttaggctgacatctatctctaagattagcttcctctccctgccagtgtttgggcttaaacattccgtgataccactcctaggaggcaaaggtcaggctggccaaccctccaaacatggaacccttcaggccctgaattctcatgtctttgcaaatccaaagaggacaggctgacagtctgatggagtcccccaccaggctgtagccttctgtctttacacattttgagagcacttgaatatgcacgggaaaaagttaactatgacaaagaccgaagagatggggaaagggcagctgtggagaaaagagatgccccagaatccccctgatttctccagcattttatccagaaagatgtggtagtgtggtgagactctgaacagactccaattgtcttttttctttctttcctcttagcaaactgcctagttgggctagagctgttgtccccaaaatattttatgtgacagagaaggcttggaactattatccctacacaattacaggtaagtccttagtacaaccatatggcacatgtagtgagtgcaaggacatagcatagttgaatttcactgatttacagtggattatccaagcagggccttgtgggagccccgtagtatccctctttttttttttggtttcttacttgtaggttatcaacacttctaacacagacacagagatggcaggtgacaggggggttaagctaagccattccatcttcgttcttagagttacaataaatagtttacggagggccaggcgcagtggctcactcctgtaatcccagcactttgggaggccgaggcaggtggattacgtgaggtcaggagttcgagaccagcctgcccaacatggtgaaaccccgtctctactaaaaatacaaaaccaggaggtggaggttgcagtgagccaagattgtgccactgcacgccagcctgggcaacacagcgagactccgtcaaaaaaaaaaaaaaaaaa

SEQ ID NO: 87903 - DNA, 1076 bp, Homo sapiens
agcctggccaacatggtgaaaccctgtctctactaaaaatacaaaaaaaaaaaaaaaaaaaaaggtagttgggtgtggtggcgggcgcctataatcccagctacttgggaggctgagacaggagaatcatttgaacccaggaggcagaggttgcagtgagctgagatcacaccactgcactccagcctgggcaacagagtgagagtccatctcaaaaataaaaaattaaaaaattaagtcaacggtcatttattaggcatcagtgaggtacaaaacatcatgctagatggcataactgagcaattatctctgtcatttggggtcacaatctggttggaaatagctggacattccagtcaaagcctggcagtcatcagcaagtgctgggcttttctggaggcaagaggggacttagccaaggaaacaagctggcctcagacctgtccactgggctggataagctctgaactgagctgccagcagagattcagacctcagcagagggcagaatcaatgactctggggaatccaaccagataaagcagttgcaatgtgaaaagaagggtgctggcctctgcattggggccttgagttttggggacagggctacagtccccaatgtgggagacaggaagaaaagtacacagcactcaaggaggttactcagtatcatggtgctggggagataaggttgtcaaccttagtaagtgaaaatacagaatgtccaggtaactttgaattttcagataaacagtaaataatatttagtataagagtgtcccacatgttgcatgggacataattatgccaaaagattgttgtctcatattttgtctggcaaatttatgggagagagatggtggtgtggaagaactggtctcagagactcaagtacaaaaatcagttatgagaacagggcacactgatgggccaagggaagggaggggtccagaagtatgtaatgtgggaacccatcctgcaattgacatgccataggaactctaaggtcagaccagagattcagccatctggtctgaatctctgctggcagctcagctcagagcttgtccagctca

SEQ ID NO: 87904 - DNA, 1060 bp, Homo sapiens
ggaaaggctgctcacagctgagagtctgtcatcagtcaccccaggtgaacccgggttatctgcccaggagtggccatggggagaatgaggtatgtttctgaaagccactaaactatctgggataggaattgccctcacagtctgggccttatcaagctcccccagtaatccaaagagctgataggtgctgtgtttagagaccagtgacccccattcctcccaagccccgtctcctttcttaagcctttcttccccgcaccttcccctgagtcccagccaaggggcagtacaaaccactgtatttcataactaggaacacaggaacaagtccagggaagattatgtttattataccagacctctaggattgggcttgttaggaaattaaagaaaaaaaatctggctatctcatctacgatgtaagctaagagggtgaaagtccctaagagtcccttctttgaggccatggagtcaggagttagcgggttaggaaataacttttatctatgtatcacaattaaccctcgatatttagtgcagtacataattttttttagacaaagggaaatatcctttttttagggaccaggccaaagaaacagtcctccagttgggggcactgatgagcaaggcagcaattaggcacgggcctgaaaagcacccttgtggagaagaggacagtaaggccaggtgtggtggctgatgccagtaatcccagcatttcaggaggctgagataggcggatcacttgaggtcaggagtttgagaccagcctggccaacatggtgaaaccttgtctcgactaaaaatacaaacattagctgtgcatggtgacgcatgcctgtaatcccagctcctcgggaggctgaccttgaacccaggaagtggaggttgcagtgagccgggatcatgccactgcactccagcctgggtgacagagcaagaccctgtctcaaaaacaaaaaataaacaaacaaaaaaacccaaaaacaaagaagattatgtgagaccggtgtcatcacagagccagaacgaccaagctcaaaaatcgtcacagttc

SEQ ID NO: 87905 - DNA, 1048 bp, Homo sapiens
ggtgaggagcagcggagaggcccgcgtgcatttccatgctgtagctggaatacaagcagctgttttccggctgtgtttcggagctctgccttccacacagtcccttcctctcaccctcctccacatctctttcaggtcccaccattcctcttggccacatttttcttcctatgcagcatatatttaggaagtcactctgattcatcctcatctctattatttacatgcaattccttttcttcctttcctctttccttgaaaagtctactttttttttccccacttgagttcttcttctcacttttgtggaactatcttctttgcaatttttttctccaactaccctgtcaccataaccacccaccttatttgtatctaaagtcatacgtaaccctcacaaggcagaagggcgaagggagctcaaatatctccccttatttcctttgcatctttgcctgtatgataactaaggttctgagtagagggtgacggccagacatttacctttttgaaattgatgtgtgtattaaagatcttctgtgcacaaaacagaaatttatattttgccttccaagcgtggggtaaaatttctatcaaaatggggagataaaaattttttaatgaataaaggaagctgaaaggtattttaagatctaggttctaccaactgtctgtatacacatttatcatccactttcttctacttttcaagcaacacaggcttttctcatttattttccagtagctccagcctcagagtcctggaagataataagccctaaactctatgcctgccctcattagcactgtggaacattctggatgtgagtctcctgttggtgaacagaggaaacacttgcaaatctagttttattaatgatcccatcttaagttgcaattcccagtgtggctttggagcacagttaatatgacaatatagaatacagtaccagagaatcgatgtcatctacaggggaactccattagagagaaagtcaagtctgtatagagtttcgtgcttgtggatagcagggaacacgttctacat

SEQ ID NO: 87906 - DNA, 1055 bp, Homo sapiens
tatcgtctctctccctatgcaggtgctgagacagaaataagggctgccagcaccacccagaaactgactatgaaatccccaatgtgtctgaccctttctctttaagactttggtttgcttacatttcattttgttcctgtaagtgtttcttattgccatagcaaccctaatcgatcactggaccaaaaatagctctttcatgttttccaaagcatgtctgtagtgaattggaaattcagttctgccgtgcattttgcatatgctgctttcatttcccgacactgaacctgggagggcttgtgtctggaaattattcttgcagagacccagaaacctcacttgtctttcctggcgttcttcttccccactgcagatccacccgtcacttccaaaagctacaagtagctgcatttaaatgttccaccatcacttttctgcacattgagttttgggtgctggaggttttacaggtaccagaatatcacttttcaataagaggttcatcctggtggattccgttgggtttggaaggccaattatagatgcttagacaccagataaaaggaagagggtcatggcagggagcagatggcagcaacacctataagattcctctggcttacgtggatctaagctagaaaatcaaagatgagatgacaggagagctcctgccttgactccctgacttcttcctaacactgctactgtttttagggggttggggcaaaataaacactggatgtaattaagtgaatattttctatgatgctttctctgctttattctccctgccaagctgtgcctttagtcaagaagagggagagagagataaaaaagaaaagatttttcatgagaaagaggattcgagacctggagtgagcccagaggaggaagaagaggtggagagggacagaaatgactcactgatttcccccaggctccagggacaggcgtgcttttttgcctccccctctgcctgtaagcagagtcatctctgtggcctcaagggttcccaacttctgttttatgcttctgtttcttaacttctttgagcc

SEQ ID NO: 87907 - DNA, 1050 bp, Homo sapiens
gagaattgcttgaacccgggaggcagaggttgccgtgagcagagattgcgccactgcactccagcctgggtgacaagagtgaaactctgtctcaaaaaaaaagaaaagaaaagaaaaggagggctgcatccgtttccattcatacttgttaatacttcaaaatctgaacataagaagtatatatttatctaacaattctttaattactaaacgctagctttatctagccagggattcaaaactggtgttttaagccaaggagtgtgctggtgtgctctttttctgtcctgggttgagtgtggagtttttggtgggaggcagagttgctaaggaaagcagtgcagtagtggataattctcttgtctcaccgcgtttccaaactatttaataaactcagttcatttctttgcactttctgggtgtacactcttatcattcagctaccatccttcatactgctatctgcactgtttcctcccctacctgccaaaaatttaatgaaattgatgacgataagaagcaataattaaattgaaagaggctgctgatagtcatattgatgatagtggttgaatcgagtacatgttgttatcctattatcaattaccatataagtaattttttgacgtgacccaatatctagtaaaaaaaaaaaaaatagtggcagtatgagtaaatatcttccttgttaaaaataaaaccagtatacgtatgattgtgaaaacctgcaaactgtgattacattaaccaggatgcaatggggaagttgtcttaaactgaggcccatttattttatgcacatacttatgagaattacttgggccttcattcgtgctagggaggacggcaccgtgccaaggtaaggttccgttgtttatccaaggccataaatctaggcctgtgagagtccgtgcttagcactgcctggttcagctgaatgagaggctgcccatgtggtgacggctgccaggttactggtgttcaatggggttaatgggggcagccttgctactttacttcctcttccaaacaaagcaggcaccatttaaa

SEQ ID NO: 87908 - DNA, 1044 bp, Homo sapiens
gatttcaaagcaatttctgccttttgatgcgctgaaatcattgcttccatctgctcccctacttgtacacagggctctgctttttaaccatgcagtgtgtcagctgttgcccaccaaattctgcacttgatcttctgagactgatggcgattctctatgaataatattaagctattaaatcacatttaaatcctatttctccactaatacctattgaaggcctgtttatattccatcagatttttatggccatttggtacataaatttgttaaatataaacttcatggagcttcatctgaaaatgtttcatcttgttcccagtcctgtaaagacatggtcataaatacctttggactatgcaaaccattatctagagtaattttaattatctttagctatgccgatcagatgataataaatagatgttgaaaagcatcagcaaaatgccatcatggaagagatactcaggggtaaaaccaaataattgaccatttggtgctgaaacattttattatcattcctacaaaggttcagaaatctatcatgagattgggtttgttatgaactcaacatcaccttggttgggatgtcaaaactagagtaaattattgaaatgaaatatgaaacatattaaggaacgtcctcgggaatgaaggacactggaaagactgaattttctagtaacttaatttcgatctatgggtgaagctttgttttcagcacccagctatatttgcttggaaccatctgggtctcttggaatagataatgttaaaccagatacactagttgtacacgtggtatgtctttattgggggcttttggtaacagtttaagatagaaaaaaaagtattgctttaaaaaaaaagtgatccttggtactcacgggtaacaacattctgctttggctaagagtttacgtaactgcatactgttccctatttctttgttgttgttgttgttttgtatttttgttgttattgtttttcttttgagatagagtctcgctctgtcgtccaggctggagtgcagtggcccgatct

SEQ ID NO: 87909 - DNA, 1058 bp, Homo sapiens
gggcatgcgcctgtagtcccagctactcgggaggctgaggcaggagaatcgtttgaacccgaggggcggaggttgcagtgagccgagattgcgccactgcactccagcctggcgacagggtgagactctgtctcaaaaaaaaaaaaaaaagaaaaagaaaagaaaaaaatattattttctaaactttgacatctgctgctacttgttggctaacaagatgtcatctgctggcaaacaaaatgagtaaactactaggaaataaatggtaatgttaaaattcaacatacctggtgttcagtctaacagttcagttcaacaacagcaaaaaataaaaattaaaactttgagtgttaagcttctattaatgtatgagatactagaagaaggtctgagggatgcatagatgaatgagatatattgtatagcttattccccatgactgtaaggccacatgtgcctgtagtactggggcactgaatggtacttcagcaatgaccatccttttattagaatccttgggatgctactagtctggatttgcagaattcaccaaaatgaatgacttttgctattacctgtcaagttgatttcatcttctgtgtccagacagctatccaaaccaatataaccaggaaatttactctggattcctcagatcaatagatgaatggttttgttgttgttttgttgttgtttgagacggagttttgttcttgttgccctggttgcccaggctggagtgcagtggcgtgacctcagctcaccgcaacctccgcctcctgggttcaagcaattctcctgcctcagcctcccgagtagctgggattacaggcatgtgccaccaccacacccagctaattttgtatttttagtagagacggggtttctccatgttgatcaggctggtcttgaacccccgacctcaggtgttccacccacctcagccttccaaagtgctgggattacaggcatgagccacccggccaatgaatggtttttaaaacaaaaatcacaatgagcctgttgccttttattggctttggttttaggaggagaaa

SEQ ID NO: 87910 - DNA, 1510 bp, Homo sapiens
aaaggagggtgatccagggaggtgagttgatgagaggaggcagatgtactaagtccatacatgagtgcagtatttgacagtttgcaaagcaccttcatacccactatctcaccaggtcctgctagctcagtgatgaggtgggacacctaacgtcctcacttccaggtgatgaaatggaggcctggaggagtttctaaagtcgtacaactcctaagtggtggagccaggattagaatgagatattttgacctctggacactgctctttccaccataaactgatatgttccaggagcattgaagaaagcttcctagcatattgggaagaaaactcatggttggggtgtggctgggtggatggatgggcggatggatggatggatggatggatggatggatggatggatggatggatggatggatcaatgggtggatgtggagatcagagtctcaagagaaaaagagttaagagtccagcagttgtgcaggtgagatgggggattcaaacgtctatcaggaaggtggatttgtgagatacagaggcagtggagtgaatagaacttcatgtctgaccacatgtgagaatgagaaagaaataagagtgtaatggccggacacagtggttcaggcctataatcacagcacttcgggaggctgaggtgggcagatcacctgaggtcgggagtttgagactagcctgaccaatgtggagaaaccctgtctctactaaaaatacaaaaaattagctgggagtggtggcgcatgcctgtaatcccagctactcaggatgctgaggcaggagaatcacttgaacccaggaggcagtggttgcggtgagccgagatcacgccattgcactccagcctgggcagcaagagcgatcaaaaaaagaaataagaatgtaggataacacccaagttttgaccttggatgattaaaggaccacaaaggaaaacaaacttaaaccttacagccaaagtggtaaaggtagagatgatgaatgttaacttcgaatatgtctaatagtcagttgatatcaatggatctggaattcaggaaaagtgtctgagatatccaggagattcattaggtcatcagcgatcaaaggttagcattttattatagatgttcactgtgttattataaataacgttaaaaaagagaaaaataaaaaggaaaggtcttaaacatgtaacagttgcagattggctcatttatgttacagccatatattgaaatgcaattcagaccttaaaaatgagtgctggctttgggaggccaaagtgggcagattacttgaggtcaagagtttgaggccagcctggtcaacatggtgaaacctcatctctaccaaaatacaaaaattaaccaggtgtagtggcatgtgtctgtaatcccagctgcttaggaggctgagtgaggcaggagaattgcttgaacccaagaggcagaggttgcagtgagctgagatggtaccactgcactccagcctgggcaacagagtgagactc

SEQ ID NO: 87911 - DNA, 1035 bp, Homo sapiens
gaattcctaaatgccagatcaaaagcagagaatctaagtctctgccaggagtgcagttgctgattgtggcattgtgggtcattgaatcaatagaaagagcccttgggggccaggtgcagtggctcacgcctgtaatcccagcactttgggacgccaaggcaggcagatcacttgaggtcaggagttcgagaccatggcaaaaccctgtctactaaaaatacgaaaattagctgggcatggcggcacgcacctgtagtcctaggtactagggaggctgaggcacgagaattgcttgaatccgggaggcggaggtggcagtgagctgagatcgcgccactgcactccagcctggacaacagagtgagactttgtctcaaaaaagaaagaaagaaagaacccttggggaaatcaccctatcaccctatatcccaaaaggaacagaccagggagggaagaattcatccaagcaaaacattcatggaagggagaaacagttgggcttttcatagagggatctgtgcaaaagataacccctagaacctatgaattgggattcccaacttgtgtgctctgtgtctagatgattcagccctaatgtggtgagggccctggctctgggagcctcccaggcggtcacagccactgcatttgatcatcatcaattctgtgtctgagtccctccctcccttccaaagaatggacagatggacagatgggatggagaagtgagatgacgtcaaaggcaaggcatggaaagtgaccagcacagtccctggcacacagtaagcatttcataagtgttcccttctctctgctttgaccctggcttcgagctctgcagatgggttgcaggaatggtggctccgtggaaaccatgtgtctttggaaagtggccaccgtgagtggcgtcacaggagtttgtttgcgtgtcgcttttcccttgtcggtgtgagtggagaacaggagcagaggtgtgataccaatagctccagctctcaggatcatgggatcctccgccggctcagcaagatcctg

SEQ ID NO: 87912 - DNA, 1056 bp, Homo sapiens
cctgatctatctgcctcggcctcccaaagtgctgggattacagacatgacccaccgtgcccggccggcatgttcattttgtagcagaatcccacttggtgaagagtcatattttctcagggtttctaacatgactctgtccctcatgggagaaaaaaatgggaaatgcaatgttgagcattgccctttgtagctgctctcattttcataagaataaatactacccaaattgtctctacattccagataggctggttatctgtttatttttccacttaaaaactgataagagtagcttgccaaaattattttggagtcactggaatttaaccttaatgcactgagctttttgttacttagatggatttgtctattgagattgggggccagttaacaataaaaagtttaattctggaatttaggtccaagaactagactgccagtctcttgaaccctcataactcaggctcacggtaatggcagactctggcacaaacatgagagccctgggtgttttcttgaacagagaagcatgccactcctttcccgtgctccagaacccagccagccagccaggagccagaatgaaatgtgatacgtagaaatcaagctccaggatctcctgttttcctcctgtgtcctgattattgcacaggaaagcaattgcagctcccaaagtaaatgttttccagcctcagctttgtgtctatctaaggcagtgtcttccttggtttcccacagcatccctttttgtgtgtggctttttaaggtaaaaagacttcctcttactagggccactatcatagtattattttgttttgttttgtttttttgagatggagtctcaatctgttgcccaggctggagtgcagtgacatgatctcggctcactgcaacctccacctcccaggttcaagcaattcttgtgcctgagcctcctgagtagctgaggcacaggtgcatgccaccacaccaggctaacttttgtattattagtagagacggggtttcaccatgttagccaggccagtctcgaactcctaaccttaagtgattt

SEQ ID NO: 87913 - DNA, 1043 bp, Homo sapiens
cccagccctactctcaaataagacaaagagatgaatatactgcaagtgtgtgtacaccatggggaagggctggaggtgtgtgagcactataggacctataggcagcctgtaattgtcatcacctatggacagagggattaagaactctgtaatcaccaagatccccagaattgttaacaacttgtcttccagatagttttcatcaaagatgctattatttcagtctccttcttttactttttaggtggtccgagacattctgctgattggacatagacaggcttttgcatgggttgatgagtggtatggtaagtcaatttctccaaaataacttgtagaacaacttcatgttgtctcgggctttctgtccatttggcttcaactgctacctagaaggacaacaacaaaggcaaggccgctgcttcctgtgttggaaatagcactgtctgccaagcataatgaagatgtaattatagaagcttggtctaaaataaccacagaattattgactaagtaggaacctcaggatgtttgatgcttacatagttgatacgcatggctccatcattctctgttagatgggtttcaaacccatcctaatttatcccaaacttcaagatcaaagctgtctgaagcatcctgtcaagtaaaagcagtcctttgattcagacaacatttgaaaccaccccttgccgggcgcagtggctcacgcctgtaatcccagcactttgggaggccgaggcgggcagatcacgaggtcaggagatcgagaccatcctggctaacacggtgaaaccccgtctctactaaataatacaaaaaattagccgggcatggtggcaggcacctgtagtcccagctactcaggaggctgaggcaggagaatggcatgaacctgggaggcggagtttgcagtgagccgagatcgcaccactgcactccagcctgggggacagagcgagactccgtctcggaaaaaaaaaaaaaagaaagaaagaaactacccctcaacaaatatatacaggttctgcaagaatttaagg

SEQ ID NO: 87914 - DNA, 1048 bp, Homo sapiens
ggctataaatagaaaggaacacgccccaccggtgacttaggttagatctgattttcaggtcgattgtctaatgaaatgcccttctccttggccttttccaaagtcacattaaatttgttctgagtataacctagattgcattttggtccttttctgtcattgtttcaccaactccctcccttttctgagcagaaggtaccaaagtaaaaggacacgttagacggaaggggcaaagacagtcattattattaatattgttagctatttctgagccacatttaaaaggcatggttctataagctatgggcttttcttttttttttctttttttcttacctccttttgcagttttcccagatctgcaccttctgaagagcaaatgcaccttcctgggtttgtccaaatgcagatcatttatgctctcttatcacacacccacagaatgccgctctcataccgcaaaagcactggcttgccacattgtcatgtagtctcccagagacctgtctatttctagttgtgttttgtgaggcaggcaggagagtctcctgtgattacttcctctgatccttaaataaatctttctggttgtttttttctggggcgcttttctccgattctcagagggagcacagaccccaagaaaggataagaacttctggtctctcccagcttgtgctcctcagagctcatggtttccttgctaccaacaccaaggaaatatcaaaaggatatttaaagaatcataggtgcaaactgattagaagtttggcaaaaagagaggtacctgaagggccaaaaatctgccactttgaaaaccaacacacagggcacttggataggtttctctctgttgccagagtgccaaagaagatttttcagctaaaagaatagccgggctctgatcaagaggacagaataataaaaagggtttgattagaggcaggatataggaagaaaacccagtgtgggtgggtatctagtaaatgaaaggccaggaaggcgatggggcctgacttttccatctcagctgagcctagggcaagga

SEQ ID NO: 87915 - DNA, 1037 bp, Homo sapiens
ccaacatggtgaaactccgtctctactgaaaatacaaaagttagctaggcgtggttgcgggcacctgtaatcccagctactcaggaggctgaggtaggagaatcgcttgaacccgggaggcagaggttgcagtgagctgagatcgcaccattgcactccagcctgggcaacaagagtgaaactctgtctcaaaaaaaaaaaaaaaaatcacaactatagattacagttctagatcttagtggtctgaattatgtggaaaaggtatacaccacacttcgaggactggctactttcactacaaaaaaatggagtcaccctaagctttttgtaagaagcatgtattgaatttgtaatcattgtaaagggtttaaaaaatggcatttctcaaaggatggctaccattttgctggagccaaagaagtatccattcttatttatgatttctggggcctccctgacccaactacttgttcaagacttttattttgacttagaatgatgtaaaaatgacttctgttttggtgaaggaggctgaaagtgaacggaaatgtttgtagagggaaataaagtataatgtgccatttcacagatcattgaattagaacagaagactcccctttttaaaatgtttgctgctgcaactgtgtggtacaatgaaggaaaattcacgcttgcagatgctttgttcaagggcatttgtagtttccatgtgtgttcaactgacttctaaaggcctttcaaacatatgatcttgcctccacttcctgtgaaattaacctcctttctttaaaaatacaatgatttaaagaaaattgccaccataaacaaagctaaaagactaggggaaaatatttgctgcatatgtagtcaacaggattaccatctataatatataaagaggtcctataaattgaaaatttggccaggtgtggttgttcatacctgtaatcccagcactttgggaggccaaggcaggagaatcactcgagctgaggagtttgagaccagccctggcaacacagggagaccccatctct

SEQ ID NO: 87916 - DNA, 1098 bp, Homo sapiens
ttaacattttgaaatatatcctttcagtgtttttttaatgtagataatggttttctgactaaattgatttcatatgctatatacagttctttttacctattttttatttaacaatagattaaggatatctctctaggattaactattcttctacctaatttttaacaattgcatagtgctatcagtcccctgggttgttttcaatttttcattattatgaacattgctgaacaaggcagcaatgaatatctttgttgttaaaccctttttcacatccataaaatggatacatctttgaaagcccatagtcacaaagtttaagcccctatcttgacgttgagctaattcaagatgaagtatgatttctgtggggattcaatagaacaaaaaaacctataactccttggcttttgttttccaaattactgtcatgcctgttgggatggtggggggcaccccctaatgacatatgtgtagagaaacttctttaaattttcaactcctagctaaaagtgatcgtctagtattatttcagatatatttgtgtttaagaaatgttgataagcagccattgaaagtgattgtactgaaagaatgtgttgttattattaactaagatgcatttgttttcatcataaagcagcatctctttattgctttttggttacctcgattttctaaaagaagagcatgctccttgcttggccaagctgctgcttagcattcttgatacttacattgcttatggaccgcatttgcgattgaggatctccaggtatacctgggaatgatcttctgcataaaatagaccaggtctggatttagaggcacacagcatcttggtcccagaccacagtgaattaaatcataaactcctggcaaatctgccctttggaaatgaagaggatctcacatgacacatggattgatataaaaagacaccaaaccacatgatgcagaaaatacctaaggaaaaattccagctgtgaatgcccactctaaatccccactaagccaattagtggtcagggtggcagaggaagcactttgttcggcataccatcattggtaaagagcatgaagttccgctctgccaag

SEQ ID NO: 87917 - DNA, 1032 bp, Homo sapiens
tcaatcattcatgctaatgaagggtagctagagataacaaagaaaagtgtaatcaccaaatcatttctttgcatcttcagccagagctgtgatctctttgggttccgccttgagtcctcatgtccattagcccagtctccagaataatacatagtaggtgttaaaaaaaaaaaaaaaaatcagctgggcgcggtggctcatgcctgtaagcccagcactttgggaggccgaggcaggtggatcacctgaggtcgggggttcgagacaagcctgaccaacatggagaaacctcgtctctacttaaaatacaaaattagctgggtgtggtggcgcatgcctgtaatcctagctactcaggaggctaaggcaggagaattgcttgaacctgggaggcagaggttgcagtgagccaagatcgcgccattgcactccagcctgggcaacaagagcaaaattctgtctcaaaaaaaaaaaaatcaatgctgtagttctaggaaatttagatgtggctgttgtcataaatggatcctttagaattgtgaagaccttctgattgcactttggaaatttttagttaaatttttggagcatgtctttggaatgtgccctgcaagtctcatgtgctgcaactggttgcatgtgattgcccttgaggttgcaagggccctaactcttctcccattttgcatgcagtgatctgatttgcaggaaactgttggagcaagaggcgtttcctctctatgcacagaccaattccagtaggacttccccctagaagtgctctttaaggaaactctccttgaatttctatcactttcaattaccttttcttttagaaatgttgggccccagttccccctcagccactctgaaagccattcactataaatatgaccaggcaaacaaaggaagaagccacaggtaaagaggagacaccagatggctaaaagatgctaagctcagtgattttctcacagcttataagccccttggcttggctttctttcagttttactgtgattattactttat

SEQ ID NO: 87918 - DNA, 2050 bp, Homo sapiens
cttaaatggataatcataaagggatattgttttcagggtgtagcttccaatagaaaaaattgggggtttggtatttcaatgatactttgggtgtataatcgggagaggcccctttatgatagggttcccatagttcctgtaaaaacaagggtagtgatgaatctatttgcctctcttataaataactgctcgtttttctttctgtttttctccttgaagacatgacaatggatgaagtccgagaatttgaacgagccactcaggaagccaccaacaagaaaatcggcattttcccacctgcaatttctatctccagcatccccctgctgccttcttccgtccgcagtgcgccttctagtgctccatccacccctctctccacagacgcacccgaatttctgtccgttcccaaagatcggccccggaaaaagtctgccccagaaactctcacacttccagaccctgagaaaaaagccaccctgaatttacccggcatgcactcttcagataagccatgtcggcccaaatctgagtaactttatataaatatctcatggggttttatattttcatttgttgttgttgtttttttttaagaatcttctgatagagaaaaagactgctttgtcactcaaacatgttccttcgacctttcagtgtgcatgtgactcagtaacttcacatagaatatgattccctaagtatgctacacagcatcatattagatgtaagatgtaagacttgcaaaggacagaaggaatcttctgtaaccacatagctgtatgccagagaggaagccttgttattgggcatttgatgaggtttggcatggacttcaaggataaatgaatgaaaactttgcaccacttttgttacaaggtacggtagaaaatagtgaagtcagtttcctctcatcaaatctaaaattctccaaaatactctcaggcataacatacttagctgttaaattttgaactgctaattactaatacttgaataccaatagttactgagattcctattttgtggttagtctgactcaggatttggagcctaattaactctaaacttttgaaaattttaatcatcaagctatagaggctccaagtgcaattaataataactcatttataccttccacagaatttaataaagattctacttgtttctgtcttttaataactttccccttttgtgcccttgtggcctcagaaatccttaagaattgcatggatgaatgtgaccataactgattttggaatggttcagtttaggaaccaagaggcccaggtgaggcaacatcttttttctctacaggtaccaacaaaccttgacttgtcagcttccatcatcaattaagattctcagaatttgcaattaattgaatagaattcatttactatctgcccactcaaagaagtacaagggtagagtaagctaactgggctttaacatggtcagaatgtctggtgcatgaactataaaaaagagaactgtctcccatccccttccttgttttactcttagtaacatccagaattccctggaacagattgcctaccaccagaccttagaaaagactgtcattctcttgctccttacttgaaatacaaatattgggaatgtcacagacatcaagcaactactgtcaagtgggaggagagaatgagcagaattgctgactcctatttgtagagtgaaaaggaggagtgataatagatgcccttctgtctagctttcctttcttcaactagtggtaatgcaagattagaatcaaggttgacaggaggcaaggtcactcactgaagtgacagaaagacaattctcctttgctccaaagagagaaatctgtcacctttgcacctcactgcctttaaacacagacgggagggcaggccaaatctcagcattgacttttgtcctccaagagaggaagagaagaagtaattgggcaacttggaggcccacgccccagctagccttcctgatcgtaacctccaacctcaggaaagggaccttcccaaaacacagatcccaaaggaaacaaaat

SEQ ID NO: 87919 - DNA, 2137 bp, Homo sapiens
ctccctctccacacagtagtacttaatgaaaatgttttgctttagagagcaaaatgctactttcagaagacactgaaatagtatatgtatttgcttaccatttgcaagctaaaatcaaggtgggatggggtcattattttcacatagaatgtatttattttgtgcaggctgttaaacacatctggcacctagtttttccattaagagcattgctattttccctttttataaagtagcttctgctgtcaaggttaacaattctatatgctttaggaagctaagttctaatttccttttgtgagtttcatttcttttataaccagtatgttaccacagacatcagttgcaaagctacgatgatagtgtgattcttagccgaaaaaaaagcgtgtgctcttaaagtatgttcagtttttctgtctacatatgctttgtgtgagttaaaaagggggtgggtggtgtaaatattcctttagctgctttgcatatttaacccagtcatcaaaaggcataaatgacttcaatattttatatatcttggttttcaagtatcatttcacattctctatacatgactttgttattgtggaatacaagcctgcaatggatgtatatatacagaacattaataattcttagaaggatggaagccaaatggctgcatgatggaaattagaagaaaaaaaaagcagaaacttgaatttgctaagcatgtttggggggaaatagaatccttaactcagtgcctctgtctgcgatatggaaaccttcaactttgttcaccaaaattgtattatacctgtgtatatatatatatatatatatatataaatataaatatagtatagtgaatcagacaccatcagttttaagtctctggtagccaaacttaaataaataatccatagaatatcacatacgttcactccatcttcatctctgaagttagtggagaccatcaaaatgactgtacatttcataactctgggaagatttcaaatgtgaagtgcccctgtgcattttcttggccatagcacggcattcttgctttagctgtgctttcctgggatgagaagatcttggtgtatttaacacataagctttgttagaaatcacctctgaagatcatttcattttctcactttgggttgttgcaagacaaagcaaaggaaaaggaacacaatgaaggaggccgtgacatttttagttgccaccgttgtaactcaaacaatatgggtttgttggtgaactgatttatcaaggcttctgttacggttttgcatctgtgtgtgaggaaaattttaatttatttggaagtatttattagccatgttgttggtcctgaaaataaatctctaagtagcacagttgtgggtatattatgcagacacttaccacaatacctgcaaaagtaactgtggttttctttcaagacactgtaataaacagtgaactaagagaatagattctgatacatctcgataaatcattctctgcaaaagtttcagggctaatgtatttatgtgtatttttaaattctactttctttggcatctcttcatggctcagcgacaacaaagtaataggtcattggctggcttacgtcgataggaattttactcttaagaagggccagtgtatagctgactctacatataatgtgtaatcagataatccaatagagaggaattgtccaaatagttttagtacctttctgatcatctgactcagtaggctaggagacaatctgtcatctgagccatagttcttgagatttaaaaagtctgtccagtgactgcaatctgattatgaataaactattttaactattcattcttgctgaaactgaagtgtacacaatagcacactgttggcatgctgaggcaaaacattgggttcttttgtgttctaccttcaaaacaatctgtttgcatttgaaatataagtgtttaagctttttaggagttagtgtaataagagaatgtgaatatgttgggaaattttcagatgccattaataattgtaattttgttgttaaattaacaaggactttaggataagcctcttgatgttttttgctttaaattgaaagcatgtctgtcaaattgcaagtctcccttcagtttctatatatcac

SEQ ID NO: 87920 - DNA, 1264 bp, Homo sapiens
gtgaggtgcgcttgtaattccagaggtttgggaggccgaggtgggtggagcgcagtggcacgatctcggcccactgcaacctccacctcccgagttaaagcgattctgctgcctcagcctcctgagtaattggggttacaggcgcacgccaccacgcccggctaatttttgtgtttttagtagagacagggtttcaccatgttggtcaagctggtctcgaactcctgacctcgtgatttgcccaccttgacctctcaaaatgctgggattacaggcgtgagccactgccctcggccagtaaattttttaaatgctgtcattttaatggtttcttttattgattataaacttaattgcttttaatgtttgaagttgacttcttgaatattgtatttatcttaatttcattaggtttctgatcagaaacccttggggagctggtcagtgaaacaaggtcaaattataacatgtccagctgtgtgcaactttcaaactggagagtatgttgttgtacacgataataaggtgagttttaaaacttttgtataatatatacaatataaatgttgattattaactatttgtatttattatatgtaaatggagaataggatagtttttaactagtatgttttgatttaaggttttaagaatatggaataatgaagatgtaaacctggataaagtatttaaagctacagtaagtctttgaattttccaacatatttgtttagcttattggtgaattagaatcattcataataaagtatgtgttatttattttaatacctctgggaaaataagcataaggtcctaatcaggttttcattctaattatcttacaatgtatcttggtaacatgtctccatgagttaaggagatgaggatttatataattgatgaatgagaaatttatacttatttccatgagtttggatgtttggagtgtgtcttttgtgagagcaaaatgaacttctgtgccctttcttagaataggtagaatagaccctgcaagtttcgtgtattggtgtattgtacttttttttttttttttttgagacggagtttcgctcttgtcccccaggctggagtggaatggctcgatctcgactcactgcaacctccgcctcctgggttcaagcgattctcctgcctcagcctcccgagtagctgggattacaggcatgcaccaccatgtccagctaattttgtatttttaatagagacagggtttcaccatgttggccaggctggtcttgaactc

SEQ ID NO: 87921 - DNA, 1001 bp, Homo sapiens
atactttcagtgcaagggacagaacccttggtgctcttcaaggaaggtgctgttcgtggtttagaggccttgcttgcagacccccagcagaaaattgaaactgttatctctgatgaagaagtgattaagtaagttccagtacttgtaagtaaatttatcaaaataaaaatgcactgaacatttttttgccttgttcaaaagtattttggttataaacataatgaaagtaacctaattaaaaatcacttacaaaacactgactaaaacaacatcctaaaaagcctctgggcatgaagattgaagaaaccatagagtcatatgaagtcttgacagaactggatacttagttatttgaggatgaaatgtgttatcccaaaagaccaaaatctttttgttcctctcatattgccctgactaccaagctcccatccttgtcccctggctaaaagtgcatcgtgttagtgaaatcatgatgcattaagacctctgctttcccagattctgaaataaaactggaaaaatgactcatcaagggatagaaggacacttcatgattccacatctttctgatactctttatttcatcacatttcctgttcattttacttgttttctccaggtccacctggtagaaactaattttctaaaagtcagagtgaagactggtacttacaacgtggccaataaccagttatatattagactgacctgatgaatccctctaaggtgtgagcaactgttgtgagggaaatccttggaggatttgagttctagttgctgctttgccacaaactgtgcagccagtaacttctctatgcctcagcttcctctatattgagatcttaatgttttcctcagaacacgagtcccaaaagtaactctgaagaaaatgaggtaggggagtcaatttaagtttgggaagcactgcatctcccctcttagaactttaaaattcacattatcatctggggagttcaataacctgcatttaatccagagct

SEQ ID NO: 87922 - DNA, 1335 bp, Homo sapiens
gttgcgtagaatagcagtggtgaagaaggcagggcaagcacctttgtctttttccttatcttagggggaaagcttttagtctttcactgttgagtgatggtaattgtgggtttttcatagatgccctttatcatgttaaggaagctccttcctttttcctagctctctgagttttttttgttgttgttttttaagtcatgaaagactgttggagtttgcacaatgctttgtgtcaaccgaggtgatcatatggttattccctctgttctgttgatgtatgtgctgcactgattggttttcttctgttaactaccctttcatccctggagtcaatccttcttggtcatggatcttaatatttcccgttggatttggtttgttggtattttgattaggatttttttttgcatctatactcatggggatattgctctgtagtttttttgtgtggtgtctttgtccggctttggtatcagagcaaccaaaagcccaaatgagtttaggaagtatttcctgctcttttatattttgaaagagtttgggaagatttgtgttaaattgtaaatttgtagaatttaccagtgaagccatctggtcttgggcttttctttgttgggtgtttttaattgttattcctggttcataaagccctcccttcctcagggctcacctttccaggcttcttcttaccatgagctctcatttcttccagttcctgtggcaatcactgtcttcataattcatttctatactaaagcaaagcatatatatttaactgtaactccccccttccccaaaatatcatatatttatacttgggacttttttctgaatttatgtcttattttatagaatgcctctctgtatggaacataaaatttcaaacactacagacttcaaaagagttaccacaagggaccagtggtcaagtaagttttttcacttgagtactttctctgatttagttattttgttgtgttttgttttgctttgttttgagatggggcctcactctgttgcccaggctggtcttttactcttgggctcaagtgatcctcctgcttcagaaatttagttatttttctgcctaataaatatgctgtaagggaagagatctctttgaacctaaatattttggcagcttttcaaaccaggtgtggtggtatgtgtctgtagtccctgctactgaggaggttgaggcaggaatatcttttgagcccaggagttcaaggcttcagtgctgtatgattgtgcctgtgaagagctgctgcagtccagcctggacaacatagtgtgatctcatctctgtaaataaataagtaaatagcttggcag

SEQ ID NO: 87923 - DNA, 2531 bp, Homo sapiens
tcaagaccagcctgggcaacatagtaagaccctgtactccacagaaaatggaaaacaaaaaaaaaaaagtttgaaacttgtgaacagtccaaattgcaggttctgtggcaagctgaagagctacactgtgttttgaatgccagtgttctgattttaggggcaatgggagaacccccaaacaaaatcagtaatacctctgccctcccttgtttaccgatggcctcatctgttagcttaacgttgttggacatacagccttttcactatattatgattttcttatctgaggttatcagaattacatggacttcaaagcctctcttaaattgtatgagtggttttttttaaattgttctttgattgtttagttgggcaaaaagtaagtcaaaacattccagaaattgtgcattttgcattttcttaggaactcatgtcgtgtcccattttgtaaactgggagacacctcaaggatgtggacttgggttccagaactcagagcagtcaagaagaattgtaagtttcgtagttgaaattgaaacattagtgcaaatgttgaaaaacagaaaaagactgaattattttaatgaatcatatccttacaactcttagagctttgactataatgacaggacagtttgcggcttgaacccagtaacctcacattctttatccagaaatgccccatgttgtctattagttatatttacttttaaaagtttttgatgagagcaaaagtgtgctaatctctttggagtgtttcatatccctctaaatgtgtattggatctcttatattgttttgtgatcctaatcaatttacttaattccagttaaggagacgaaaaattgaagtgagtttacagccagaggttccaccatccaaacaacttttgtcaaccataatggtaaataaataatattgaaatatgaaaaatcaaactcaagtgttccaaagaaatcgcatctactcttcgttctgtcttatttttatgatcatctttatacctatagctaacatcttgtagtatcttaagggtgtcagagttgatccgatattttggcttctttgatgctcgctgtcacctcatgagattgatatggtgttggtcttatctctttctcatttaactttgcagtgtcagcttcagctttgcaggaatgcatgataactgttagtcatttgagaaaatgttgtgctaggaaacgttaagttcagagtgacattcgttaatgtgccaaactgaattctttaattctgcgctttcagaaagattcagaaaaacacattgaagtagaagtacggaaatttttggctctgaagcagacacctgactttcatactgtcattggggacacagtaacaggacttctggaaaggtgtaaagcagaaccatcattttatccccggaactgtctgatgcagcttatccaaacgcatgtgctttcttacaggtagctgtttgtgtgtaccacactgtacgtgcataattcttctgaccttgttttttatagttctaatcttctgaaactctcaaaaggcttataaatgttctgcagttgagaattttcttaatatgtaatagtgattcagatttttttgtcttagtttgtgccccgacttaatggagattgccttaaaaaagaaagatgtacagttgttacaactctgtctacagcagttccctgacattcctgaatcagtcacctgtgcttgcttaaaaattttcttgaggtaagttagactccaatggtcctttttcttcactacatttataatctgttacattatttgatttccaaaattttgatgcttaggaaatgaaatttttcccaaaagcttggtgataaggattaacctcttgctttcaactaccatcatagcattggtgatgacagtcttcaagaaacagatgttaatatggagtcagtttttgactatagtataaattctgtacatgatgagaaaatggaagagcaaactgaaattcttcaaaatggcttcaatcctgaagaagataaatgcaataactgtgatcaagagttaaataaaaagccccaggacgaaacaaaggagagcacttcatgccctgtggtacaaaaaagagcagctctactgtatcctttgacatagagcatccctctgtttctctttataggatatagttatatgccaagcagtaaccaaggagtaactcaataatttaaggtttttctttccttttccaattgttttttgtttctgtttgaaaatagattatgttcaatgctacgttaagtaaggtttacttaaacctgtttaatttaactaggctgggcatgggtggctcatgcctgtagtcccagcactttttgaggccgaggtgggaggattgtctgagcccaggagtctgagaccagcctgggcaacatggcgagacccccatctctacatcagatttaaaaaaaaaaaaaagaagaagctatactaacacagaagctctatcaattctgaagatcagtattctgaataaataccaattaaagtattccaca

SEQ ID NO: 87924 - DNA, 2097 bp, Homo sapiens
tcccccttcgctttccttctccccccgcctcggctccgacatgaggggccggcggggcaggccgcccaagcagcccgcggctcccgctgcggagcgctgcgccccggccccgccgccaccgccgccgccgcccacgtccggacccatcggggggctccgctcgcggcaccgcggcagcagccggggcaggtgggccgccgcccaggctgaggtggcgcccaagacgcggctgagctcgcccagggggggcagcagtagccggaggaagccgccgccgccgccgccggccccccccagcaccagcgccccgggccggggggggcgaggaggcgggggcggcaggacggggggcgggggcggcggcggccacctggcccggaccaccgcggcccggagggccgtcaacaaagtggtgtacgatgaccacgagagcgaggaggaggaggaagaggaggacatggtctccgaggaggaggaggaggaggacggcgacgccgaggagacccaggattctgaggacgacgaggaggatgagatggaagaggacgacgatgactccgattatccggaggagatggaagacgacgacgacgacgccagttactgcacggaaagcagcttcaggagccatagtacctacagcagcactccaggtacccacccagcccagttgctgcagactccttccccacctcctctgccctccccccttgctcactcgtgtgctgtgcatcctgctccgatctccccccaaccccgcctcccccccaaacagaggggaaatgcgacggcacatcaagtggcaaaaaactagatttacaagaggaaagaggcgcattgttcaaaatggagattgcattgttgcagtttgcaggccacactcgctcgctctctctcccccccccaaccccctttttttcctcttcaaaatttgtgccagtgcagtgtctccaccgggcaggattgaaactttggcaaacacatatccattgcattcatttttctccccttgttttggtgtggttttctggaatgaaagaagcctcttgttttgcaaacctctttgcatttctaatgtggtttctttcggatttttattatatatctgttacttaaaagggaattaaggatttggacagattgtggtacacaaacacgcacaaaaaaatgcgttttcacacccctagctgtggttttaaaattgtgttaaggaaacggatcatttgggttagtaggggaaccttatctggtcctgtgtgtttgtttttattcttcgagtgctaatgggcccgtgcaacagttgctgttaaatggctgattaaaaagcaacgcagaaagccaaacaagacccaaccaaatttggttattcatccgattcagaattattttggttaaatcaaaaataaaagtacaaaactacaggaacgcgcgtcttaactcatttgatcgctttgccttgcttgggaaatgcagtttcgtgtcacctgttgcagaagatatgtagttgatcatctagacataattgccgaagatgaacttctggaacaacttctaagtcacacggcatcagtatcagatttattacacaacgactttttcttttcactctatttctgaggaaaaagccctcccgaaatccgtaatgaatttctccatggtaacccctcttctgttttctcacagaaagtttctctaggctggtgccgagatgcatttggtgaaacacccccggccccccgcaaaaggctgctttgtacatagtcacaatttactaaattgtgaaattaacataaccaaagcaacaaccggcaagacttttcctttataattttgcaaatctagattaattaaattagaatctggttttaaaagcctttaaaaaataaagtttatgagaaaatatttgtgaggaaaaaagaccttttttttcgttgaagtaaggtgtgtcatgtctttctcagagagactagggtagtagaagtggttaacttgaaaagtttgattttaataaatgcttaaatacttattggagaagtagggtagtattaagccaaatgtgaacccacataggttgtcctaacataactgaaaaaaggt

SEQ ID NO: 87925 - DNA, 1003 bp, Homo sapiens
atgaagggaatgaatcaagtgtcaggtatttatgtcttatatgtagaaaggactacatgtaaatccttgccaacttaattttagtactttttttttttttttttttgagagggagtcttgctctgtcgtctgggctggagtgcagtgtcctgatctcggctcactgcaacctccgtcttccagactcaagcgattctcctgcctcagcctcctgagcagctgggattacaggtgcccaccagcacacccggctaatttttgtatttttagtagagatggggtttcaccatgttggccaggctggtctcgaactcttgacctcgtgatccgcctacctcggcctcccaaaatgctgggactacaggtgtgagccaccgcgcccagcctagtacgttttttatagtaataatttttaccttaagaaatcacatgttggtcttctttgcacccagagccggtaattgaaacacggagactgaattgcatacacccctggaggaagttttttctggttaaaaagagctgagacattttggcaggacagttcagctaactttaagtcctattcgaaggcatagcaaataatatttaagattgatgggtgtgcatatgctgacttaaattacaatttgtagctaggtgtcctttaagaaaaatgtgtttacttttgatacttttgtgacattttgtttttctttttttgagaaggagttttgctcttgctgcccaggctggagtgcaatggcacaatcttggctcactgcaacctccacctcctgggttcaagcaattctcctgcctcagcctcccaagtagctgggattaaaggcatgcagcaccacgcccagctaattttgtatttttagtaatgacggggtttctccgtgttggtcaggctggtcttgaactcccgacctcagttgatccacctgcctcagcctcccaaagtgctgggattacaggcatgagctaccgtgcctggtctgacattttgtttttctta

SEQ ID NO: 87926 - DNA, 2179 bp, Homo sapiens
tataatctaatgggaaaactttgcatttagattttctatagatttaaaaattagagctgaatcattgcttcttcgtattattttaacttgacaattattaaagaaatgtacttatgtattttaggggggtatatgttcaaataggaaatttgtagaaatgatgtaatgtattgatttgtaatgatgtcacgtctttatctacaggtaggcgaaaaccaagagtacatcggcctcgttctcctatattggaagaaaaagacatcccgccccttgaatttcccaagtcctctgaggatttaatggtgcctaatgagcatataatgaatgtcattgccatttacgaggtactgcggaactttggcactgttttgagattatctccttttcgctttgaggacttttgtgcagctctggtgagccaagagcagtgcacactcatggcagagatgcatgttgtgcttttgaaagcagttctgcgtgaagaagacacttccaatactacctttggacctgctgatctgaaagatagcgttaattccacactgtatttcatagatgggatgacgtggccagaggtgctgcgggtgtactgtgagagtgataaggagtaccatcacgttcttccttaccaagaggcagaggactacccatatggaccagtagagaacaagatcaaagttctacagtttctagtcgatcagtttcttacaacaaatattgctcgagaggaattgatgtctgaaggggtgatacagtatgatgaccattgtagggtttgtcacaaacttggggatttgctttgctgtgagacatgttcagcagtataccatttggaatgtgtgaagccacctcttgaggaggtgccagaggacgagtggcagtgtgaagtctgtgtagcacacaaggtgcctggtgtgactgactgtgttgctgaaatccaaaaaaataaaccatatattcgacatgaacctattggatatgatagaagtcggaggaaatactggttcttgaaccgaagactcataatgtaagtaaatctggtcttaattttttgtatgcatttaaaattagactagtttccttcgtgattgatgtagcagagctatgctgttgatgtggtataaacctttgtaacttaatagttatacagttaaataatttcttaattgaaggaatatgtgcattaaaatagcttttaagaaggtaaaggaaacatatatgaaagaagcaaaattccattgttttttgatgcctaggctaggaaatagaatgtttctagttgggactgggcacagcagctcacgcctgtaatcccagcactttgggaggccaaggtgggtggatcacctgaggttgagagttcgagaccagcctggccaatatggtgaaaccccacctctactgaaaatacaaaacttagccaggtgtggtggcgcacacctgtaatcccagctactcaggaggctgagacaggagaattgtttgaacctgggaggcaggggctgcagtgagctgagatcacaccactgcattccagcctgggtgacagagacagattctgtctcaaaaataaataaataaacaaaaagtttctaggtggaatgccactgtgggcctgtttttggttatgttcctctatagcctagctcagctcatccacccttaactttggtgttagggttgttttacttcttttttggttttaccatatctgtatgtaaaatggaacagcaagaaaatacctagttgtctaaggaaaggtcagttctgccattattggttggaatcccccaggagaagatgatcccaacagactgagggtcatagtctggcctcagtgttcctgagggtttcgagaagctcttctgggaagcctgtgggcgaggtcaggagacagtctcagggtttacctcagtcagggcatcaggcagggttatagtgtggactgagtatctgacatcctgtagatatatggtcagagggatgggctactttgtgtcttcagcttctgaagtcttcaaagccctcttccagttcttagaattaggtcaaatgaaaaaatctggtaggatgaaatgaatgtcagagcagggcatggaaaggagagttgaaactttatcagtgtgctgtcgagaggtctgaatccacaccgattcttgattctttgtggctggaagct

SEQ ID NO: 87927 - DNA, 1050 bp, Homo sapiens
gctgcccagactgtgggtctatgtcagcttgcagtttttgtcatctgtcacagatatccgtgacagatatctatatcaaggctatattttaaaaagataggctcattttactttttttaaaaagtagagcccataattagcatgtattatctagaggtgaaggtacaccaaattgattgaattctgtaaacacaattttgtttgtaatcttgatttttatttcataggtctaatgctttaaaaatacttaatttttcctctttaatagcttgtattgaaactcgtaagtgacatttgtggtactgttctatttggttatatataggaataatttttttgtttgttttacacattatagaagaaattttggaatccataagagccaaaaagggagacattgataatgttaaaagcccagaagaaacagaaaaagacaagaatgagactgagaatgactctaaagatgctgagaaaaacagagaagaatttgaagaccagtcccttgaaaaagacagtgacgacaaaacaccagatgatgaccctgagcaaggaaaatctgagggtaaaaaaattacttgattaaaaagaaatatttcattagtgttatttatgaaatctccagttttacttgcaaaatgaaagtgaaatattgcaagcagctacctaatttaatatttctaaagagatcaggataccgtcccctcttataacgtgtgtaacaattgtaatgagttttatgtattagtgaatttgctataatgttatattcatgtctctatttatacttcccattaagttgccatttccctatgaaaaagaactattctttaatattataccagagtatacacttttgtatgtgataaaatgttcatttttatattaattacttaagcattcttaatatattattaaatattcttaaatactctctgaattacctattgcagcaatatccgagaatctacttgctttaaaatggccgttcaatggaagcaggttttttgtgattatttagtagttgactgaatgtggccatttgccctgaag

SEQ ID NO: 87928 - DNA, 2622 bp, Homo sapiens
aatttgggcatagtattcaggcagaagaccatagagttaaataatcctgcttaattctgtttctaatactatttgagtacttttgaaaagtaagactataagcttcagattttgaatactatctcagcaaactacctctgcaatatctggcgcactgtaagttttgagagatagtcatatcacttggttattctccagctctggggtatccaaaaaattgtctgccttgtactggagactaaggtgatacgagtcagtgagttagagttgggtcctcacccccccaaaaaaagtcagtgagttaatagcctggaagacttaaaaaaataaggtgttgcctaccactttcttttatacattgcattactgatacatgaacagattttcttttaaaaatacagcttcttaatgaaatcctaaaacaattgtcttttctgacaattcgtcatttttcatgtgatttccaatttaaaaatcagatattctatttttctagaagaacctaacaagacatgtgagagcagtaacactagtgctaccactacctccatccagcctaatctggaaaacagtaacagcagcagtgaactaaattcttcccagagtgaatctgctaaggcagctgatgatcctgaaaatggagaaagagaatctcatacacctgtctctattcaggaagagataggtaagaatatacttcatccattcctttaaagggaagttttttcttttttttcttttttttgtgtgtgtgtgtgtggttttttgcttttgtttttgttttttagtttttaattttttaaatgaaagtttggtggggggtggaatttagatgttcttttcctttatttttcattttttttttaaacacagcacttgcactcaatgtttttgttttcaaaatctacaaaagcacacagagcagggaagaaagatccttttcatactcccctccccaaaggtaaccaccatgcatcaacagtttggtgtgtaacattttagatctttctgcagttacatttatgtatgtatgtttacaaaggttttggagagctttgggcgattttttagttttggggttttttgaaatataaacaggatcattctgcatgtattgttctgcatcctgctttttttactcagtgatacatggagagaatctttttgtgttatgaattgaattcatttttttttaaagctgctgcatggtactccagagtatggatgaaccataattcatctactatttctctattaatggacatttatgttgttaacagtttttcattattacaaatagtggtgcttttgaacatccttaacgtatatctttgtgtacttgtgcaggtatttctggcagtatagaaacagtaagtggacttgctggtcaaatggtagctacatttaaaaaacagtgatggctactgcttaattgtatatcaaaagagatttataccagtaactttcatacatttctgtttccttattctctcacttaaattcaacaacatcattcctcttaacatttttgccaatggtgaaaagtatttcgtatacaaatttacatattcttactcatgtggttaagtttcttacatgtatttgttgaacttcctgtgaattgcttattcatatctttttctcactttttcctaatgagttttgttatttttctttaatgaattttaggaatgctttatgtattgttgctattaatcttcaattttacgtatatttgcatagtaattgcctacttttagctcttcgttgtcatacagacatttttacatttttatttacttaaatttatcaatctttttctttagagtttctctggattttgtgttttattgaggagggttatccccatcccaagaatatatatatgttttatagtaattctttataatacttctataactttgttttcaacctatctgaagtaataattttcatttgatatgagttggaaatctgttttaattaggactttttcaattgcaagtgaccaaaccaacttaaactagcttaagtgaagagggaatttaattagctcatgtagttgggaagtccgagccatcatcaggtataactggaccctcaggtatcaaactctttgttttcctctctctctcaccttttaggtctacatatatttatgtgtgttaacctcattctctcccagtacagacaggctattcccatgtggcagggaagatggcaccagcaatttgtatttatatgtttccaaggtctgtgacccaaaggcaaggcccctacttctgctccaaatcagaagcccttgaggaaggaatttgagtggcttatcttggatcatattgtttctaaccctatggccagggcaggcaaggtactacgattgatgcctccagcaaaagttgggtaggaatggttttctaaggaaacagggacgctgcaaatattatagcatagtaaatatctacacttccatcctttggtagctcagcacgtgtgtgtactcacatttgttctcatacatacaattcaaaaatggttctgcctaatataatgcaaagatttcacccacaacttaaaactttttcaaaaacctctttcccacagttacatcctgtaattgta

SEQ ID NO: 87929 - DNA, 1973 bp, Homo sapiens
actggggaggctgaggcaggagaattgcttgaacccaggaggcagaggttgcagtgagccgagatcgtgccactgcactccagtctgggtgacagaacgagactccgtctcaaaaaaaaaaaaaaaaaaaaaaaattaaattccagtagatctcgaggtggcttatcttgatctcacaatccatgagccacattatgaatttaactgcctatgacactcataaacatagtagagggtgttctttaataaaactggatgccattgtttttctgggagaatggctgtgtttgagaggtgagaaacatataagaagattccccttctggaggccattctgttttacctgcctagttcctgctgtctgttactggggttgggttgctggggacttctataggattaaacaatcatataaccctatttggcaggtttggggttttttctgacagtagcactcacttgtagattcctaggttcccagctagtacttaatgcccagtaacttgctttaggatccatgaaggtgaacaccctccacttcctcagtttatctgtttagtaggccaatagtcctagtcctcaggtgaagagtttgtgtaggcttctgcctgctggtatcattaaacagtgagctgcagaggctgatgtagatctgtagcctgctgccaggctgcatcacaaggatccactgctttataataggaggaatatggcctttgggcagagggtgttcagtaaagacctctaccctcagtttagttctttttctccattcctttaagtcttacccctgtggtaattttctcctcctttcccttatttgcactaaatttagcaagtgataaaggattgactctgagcagtattggattgttggctctgaattaggaagctttttaaaagcactgtgtcattctctttctcttttcgggaaatctgacccagaccaaatgatgtctaaaaagtatctattacaggactttatagatggtcccaagaactaaccaccatagttcaacatcttggcataaaactccatgatctgaaggccaggcgcagtggctcacgcctgtaatcccagcactttgggaggctgagacgggtggatcactggaggtcaggggttcaagaccagcctgaccaacatggtgaaaccccgtctctactaaaaatacaaaaattagctgggcatggtggcgggcgcctgtaatcccagctacttgggaggctgaggcaggagaatcgcttgaacccaggaggcagaggttgcagtgagccgagatcgcaccactgcactccagcctgggcgacaagagcgaaactccatctcaaaaaaaagaaaaaaaacctccatgatctgagacccaagagaaaattgatagtctgaccaactgctttgctaccacacatccaaagtgacttgctttccagcctggggtggcaagatgctcagtaccctctctccattttgacttattatttaaggagggcaaagaggtgtgttctttctgtttaaaacaaaaatctgtggaatgtgagataattttaattaccataccttaaaaatcggggctggaaatttgtagaaatttctagacctacttttgaattgtattttctttatttccaaaactgtagtagtgtgatattttggagtcaaaatcttaaaatattctaccagattatttagaatttactggttttgatagaaatacatcaaacttgcttaaaaagggaattttattgacatacactattgagaagtccagtgttggtgacagcctcaggtgcattgttggatctagggagccaaatgaggttatcgaggctacttctgattttgccgtttcatatttttctgtttatttcttctttgtgatgggcttattgtttgctgttatcaacggttttctccatgttgtgggaataaaagtggccaacttctgatttacacccttcctgctcattagtac

SEQ ID NO: 87930 - DNA, 1273 bp, Homo sapiens
ttctccatctctggattttaaaaactggaaaaggatgctgagaggattgagccaaagagccagtcctgggacagtcactgtggccagctagtggtgtgctttgtctggccacgctgggtcctgctgctcgctccaaaggggcaacatacttgatttgcagccctggcagaatcatatgattaaagtgtgggagggcggtggtgagggaagtatctccccaaaggaaagaaggggtatggaacaggtaaaattaacagatgtttacaaaattgtcttaattattttccccaaaatgcatagccagttttcccaatcctagtttttctctatttacttaaaatgccatctttattatatatcatatagtaaattatctgtcttttcatttgccagtgccacagtgtcttcatttttttaaagctttaaattaaaaaggaaaaatcagagcttattcaactatctggtcaatggaaatttaacagtgatgcagtagttttagaatgtatacaaatttttccagcctgggcaatatggcgaaaccccatctctgcagaaaatacaaaaaattagtcaggtgtgctggtgcatgcctgtggttccagctacttggaaggctgagatgggagaatcacctgagcctgggggttgaggctgaggtgaactgagattgtgccactgcactccagcctgagcaacagaatgagaccctgtctcaaaaaaaagaaaaaaaaaattcagccaaagtgagattgatcagtatgtaaagcagaaatttgctcctgtggagtttagtgtgtccttaaaaatttactaggaaaatgttgagaggtctttattaggttataaaaaactaatttagttgattgttttatattgataagcctacacagataattatctaaattccctagtggaaaattcatgacatttatgtttataagctcaaaactatttggtatttaaacagaatttcagtggaaatctttcaaaaacttaaacctttttatacagaaatccatattgaatatataaggcaacactttgttagtttgctttttgagttattattatgtttgttacttgtaagtttgtagcagctcttcctgttttcaaacagatgagtttttaaacagataacccagcatgtttcaattttttgtggaataatagatgactcacagtaaagttacaacatattttcttttaagtaaaaaacttaaggaataatgatacttgctttgccattcaagggcctttttttatctgtttactt

SEQ ID NO: 87931 - DNA, 1063 bp, Homo sapiens
ttgttctacagaagaagcaaatcagtagataaaatacagaatccaaaaatagacctaagcatgggaatttagctgtagtagcattgcacatcacaaagggaaagcatgtttgggaagatatcacttagatctctgccttagcaaaaaacatttagattgatgaagaattgttaaaaaaaaaaaaacccagaaccctaaaaacaaaagaaaacgtcaataagaaagcatgaattaatttatgtttttgttgtgatactttctttttaaacagataaaaaatccagatgccatagaggaaaaaagtggatacatatatttaaaattctgagtggaaaaatgttattgtaatcaaagtcaaaagacagatgacaaaccgaggaaaaatatttttaccacaaatggaaaattttcttgattgacaaagaccttttataaatgaaaactactaatagtctaatacaaacaagacaaaggatttgaataggcattttgcagaaaaataaatatgaaaggccagtagacataaaaaatgattacttctctcataattaaaaacaatgggatagtattttttacctctgagtttgactaacagtttagaagttcaatactaactcagcatgagtgaaggtgtaggaacgcagggtggctttatgattgcactgttctgaagagtagtttgaccctatatccgtcagcattttcagtgcaagaacttttggacccagccatcccaccactggaggatataggggggtactccccaggtttaccaagaaagacataaaatattgtttgttacagctatggctgtgatagcaaaacaccacaaaaccctgagcaccagtggagttgaagttgagttcattctcttggttggacttcgttggccaagaagtagaaagaaaatctgccactggcacacccaccagcatgctactctgggataggtagcatcagagattagccataagactgcctaactggccttgcttcctccacaaagagaagcctttgtatttggtgataaaagggacctctttgcctcatggacaccaagaac

SEQ ID NO: 87932 - DNA, 5569 bp, Homo sapiens
cccctcaaagtgctgggattacaggcatgagccaccgcaccagcctatagtattaatgtttatcttgtagctgactatgttactgaatcacagttttttgttttttttttaatttttggacacagagcctcactctgtcacccaggctggagtgcagtggcatgagccaccgcaccaggtccccccccccctttttttttttatcctgcagtgttttaaaacaaatttcctaaatcatatttcaccaaaaatgttcacaaagttttctgaaatgtctgaagttcaggcattccttctgtgttttaggtcagccaggcatataggattatatggtaccttatactcaataagacctttgtcttttttttttttttaaatgaaaaaatgaaacataacttgctggaaattacttgtttattttcactaaacttgacatattaaagtgctaatactctggaaataacgtaaattatcgttacatggttctttttagccaaaaataatatggatgaaaatatggatgagtcagataaaagaaaatgttcacgaagtccaaaaaaaataaaaatagagcctgattctgaaaaagatgaggtaaaaggttcagatgctgcaaaaggagcagaccaaaatgaaatggatatctcaaagattactgagaagaaggaccaaggtaaggagagtcagctgtggagggcagcctgggggtgataagaatgcactggatcagggtcccaccacaggaaaggtactgcgttgtgttttcttgataacagctttatcaaaacataattgatatcccatacaattcacccaattaaagtgtaaattcagtggcttttagtatattcacaaagttcaaccattattacatcaatcttagaacattttcataaccttgaaaagaagcctcattcatacccattagcagttacttcccaacccctcccgaaagtgccaccagcttagtggtctactttctgtctctctggatttgcctattttggacagtccatagaaatggaatcagacaatatgtggtcctttgtggctggcttcatccacttagcatggttttaaggttcatccatgttgtagcatttatcagtactttctttttgtttctgaataatactctgtatggatatgccacattttgttatccattcatcagttgatggacattgggctgtttcctcttttggctatacgaataatgctgctatgaacattcatgcagaagttttttgtggccatgcgttttcacttctcttggcgatatacctaggaatggaattactggatcatatggtaactctgtttaaccttttgaggaactacattgtcttttgtaacaagtcatttttaaaaaaaaactagataagctagataatgcatgtggctagagatactttaaaaaaatatttttggctgggcgtggtggctcatgcctgtaatctcagcactttgggaggctgaggtgggcggatcacctgaagtcaggagttcaagaccagcctggccaacattgcgaaaccctgtctctactgaaaattcaaaaataagccaggcatggtggcacatgcctataatcccagctacttgggaggctgaagcatgagaattgcttgaacccaggaggcggaggttgcagtgaactgagatcatgccactgcactccagcctgggcaacagagtgagactccatctcaaaaaaaaaaatatatatatataaattcctcctttcagagtaaaaattacatttatataaatgtctttgtttcacagatgtgaaggagctcttagattctgacagtgataaaccctgcaaggaagaaccaatggaagtagacgatgacatgaaaacagagtcacatgtaaattgtcaggagagttctcaagtagatgtggtcaatgttagtgagggttttcatctaaggactagttacaaaaagaaaacaaaatcatccaaactagatggacttcttgaaaggagaattaaacagtttacactggaagaaaaacagcgactcgaaaaaatcaagttggagggtggaattaagggtataggaaagacttctacaaattcttcaaaaaatctctctgaatcaccagtaataacgaaagcaaaagaagggtgtcagagtgactcgatgagacaagaacagagcccaaatgcaaataatgatcaacctgaggacttgattcagggatgttcagaaagtgattcctcagttcttagaatgagtgatcctagtcataccacaaacaaactttatccaaaagatcgagtgttagatgatgtctccattcggagcccagaaacaaaatgtccgaaacaaaattccattgaaaatgacatagaagaaaaagtctctgaccttgccagtagaggccaggaacccagtaagagtaaaacaaaaggaaatgattttttcatcgatgactctaaactagccagtgcagatgatattggtactttgatctgtaagaacaaaaaaccgctcatacaggaggaaagtgacaccattgtttcttcttccaagagtgctttacattcatcagtgcctaaaagtaccaatgacagagatgccacacctctgtcaagagcaatggactttgaaggaaaactgggatgtgactctgaatctaatagcactttggaaaatagttctgataccgtgtctattcaggatagcagtgaagaagatatgattgttcagaatagcaatgaaagcatttctgaacagttcagaactcgagaacaagatgttgaagtcttggagccgttaaagtgtgagttggtttctggtgagtccactggaaactgtgaggacaggctgccggtcaaggggactgaagcaaatggtaaaaaaccaagtcagcagaagaaattagaggagagaccagttaataaatgtagtgatcaaataaagctaaaaaataccactgacaaaaagaataatgaaaatcgagagtctgaaaagaaaggacagagaacaagtacatttcaaataaatggaaaagataataaacccaaaatatatttgaaaggtgaatgcttgaaagaaatttctgagagtagagtagtaagtggtaatgttgaaccaaaggttaataatataaataaaataatccctgagaatgatattaaatcattgactgttaaagaatctgctataaggccattcattaatggtgatgtcatcatggaagattttaatgaaagaaacagctccgaaacaaaatcgcatttgctgagttcttcagatgctgaaggtaactaccgagatagccttgagaccctgccatcaaccaaagagtctgacagtacacagacgaccacaccctcagcatcttgtccagaaagcaattcagttaatcaggtagaagatatggaaatagaaacctcagaagttaagaaagttacttcatcacctattacttctgaagaggaatctaatctcagtaatgactttattgatgaaaatggtctgcccatcaacaaaaatgaaaatgtcaatggagaatctaaaagaaaaaccgtcatcacagaagtcaccacgatgacctccacagtggccacagaatcaaaaactgtgatcaaggtagaaaaaggcgataagcaaactgtggtttcttccacagaaaattgtgcaaaatccactgtcacaaccaccactacaacagtgaccaagctttccacaccctccacaggcggcagtgtggacatcatctctgtaaaggagcagagcaaaaccgtggtcaccacgacagtgacagactccctgaccaccacgggaggcacactggttacatctatgactgtgagcaaagagtattccacacgagacaaagtgaaactgatgaaattttcaagaccaaagaagactcgttcaggtacagctctgccatcctatagaaaatttgttaccaagagcagcaagaagagcatttttgttttgcctaatgatgacttaaaaaagttggcccgaaaaggaggaatccgagaggtcccttattttaattacaatgcaaaacctgctttggatatatggccatatccttctcctagaccgacctttggcatcacttggaggtatgtactttaaaatgtatttgggggagggagaaaattttaaaaagaattatctcacaagaatatctcatttttaaaaaatgagataatagagataagacaggaaacatattaatggccaaagatagtaatggaaacaggatacagaaagcttcaaaattggccaactaatgtactaaagtttttgtagggaaaaatgtttaaagtcttaaaatttaagggactattttaaaaatgaaattcagttttaactttcataagacaaaaggaacatgtcagatgtgattgtttttgtggtctgattttctgagttactgctctgggaacaagataaccaccaactttctggaatgtttgtattttatttttattaggtaattcataaaaaataagacataaacacgcctgtaaatttcataaagcttatcataatgtgaaaatcttcctaatgtagcttagttgcatgataaacatttgttttggagttctctgttatttatgtatgaataggtagtctctaagattccttagaaatttttttaaacccagaaatagtcctaatttaaaattttctgggcactttaggtttaggggatgcgtcctaaatagatagtgttggtagttgtaaaatcatgtagttttatgttgggaaggcaccttagaaattcttatcttttgtaaatgtacagtaatttgcctgtggctacagagacacaggaatagtgcccggttttcctaaatcccagtctagtactttatttgctgtatcacatttcacttatgtgtccttgctttctcctttttcatgtccttgtctttatcttttcacccctgtaattgagaaggatggaacataaacactgaaaacatgagagttctgggaacatctttagaaatcagaatcagtcatagttgcagttagattttgctaggaccctcaaattatttcagcgagttactgagccgttttcatttccccttaggcttcgtttttgtgtgtcttttaatatttttccaatttctttaaaaatcacacttttttggtttcctttatattaattacaatcagctagaaaaaaaagtaagtactctctataaaggaattcatttattaatacaaccagtcatagtttgtttgaccaagttttttataactcatcttttgatttgaaataaaatatcatcactccattacacattcaatagagacagctgaaaagtacaatttctctgcagggcctgcaatgaaggatttgcagaatcctgcagggaatcaaggaactcttcattacaattcatggatttataggattactctgcacttttctgctttcttcattgagagcggtcccaaaatgtatccttgactgtcctgcaggtaacttctttcccactggaaaagttactatgtacaaatactttaattaaagtgacctggcagttgtggaggccgacctttctgctctttgt

SEQ ID NO: 87933 - DNA, 1026 bp, Homo sapiens
gtacctccacacacaatgtttagaaacaaacatgaacacagagagatttgtctgttgataagtaactaatatggtattgtcctttttttttttttttttttgagatagagtctcacactgccgcccgaggtggagtgcagtggagcgatctcggctcactgcaacctctgccctctgggttcgagctattcttctttctcagcctcccaactagctgggattacaggcgcccgccaccatacccagcttagttttagtagagatggggtttcactatgttggccaggctggtctcaaactcctgacctcgtgatccccccaccttggcctcccaaagtgctgggattacaggtgtgagccactgcgcccagctgatattgtcctttttctaatattttactattcattgtagaatttgaaaactacactaatgctgttaaagttttattagtattaactttattcatcatccagttgttcatgttttgaataaccaccatttggatgcagaatgtttttgtccgtttggaaaggtcttactagatttgtaagatgtttttggtttaatttaattaattaattaattaattaattaatttagagacagagtttcactcttgtcgcccaggctagagtgcaatggcatgatcttggctcactgcagcctctgcctcctgggttcaattgattctcctgccttagcctcccaagtagctcggattacaggcatgcaccaccatgcccaactaagttttgtattttttgttttgttttgtttttgagacagagtctcgctctgtcgcctaggctggaatgcagtggccggatcttggctcactgaaagctacacctcccaggttcacgccgttcttctgcctcaggctcccgagtagctgggactacaggcacccaccaccgcgcctggctaattttttgtatttttagtagagatggggtttcaccgtggtctcaatctcctgaccttgtgatctgcccacctcggcctcccaaagtgctgggattaca

SEQ ID NO: 87934 - DNA, 1037 bp, Homo sapiens
catgagccaccatgcccggccctaagttttgtatttttaatagagatggggttttgccatattggtcaggctggtgtcgaactcctgacctcaggtgatctgcccacctcggcctcccacagtgctgggattacaggcgtgagccaccgcatctgacctcattttattcttttagaaaatttaaacattttcaggtttcttgtttttgcaaaagttaggatttttccttcaaaactcctttatcacatttaataacaattatctatttctctatatttggtccccaaaattttcctaacagatattttggaattaggttaactttataaagtcttcatgaatttttgccttatcaaccttacaatgaaacattctcattttataaacttatatggcatttaaaatgaatatagccccttttaaaaaaaaatgttaggtgcgtgttatgcctatgaatgaagaagtttttcttttaaaggacatataataccaaagtcttacaaaaccatattataaatactggagtcctaatgaggacaagaaacacagcccttcagtttagtagagtgaatatgaatgtgtatgtgtatgtatatacatatagatatatatggatttctttggttttcctttcaggtatagacttcagacagtaaagtccttagctggagtgagcctgatgttacggttactgtgggcaagtttgagatgggatgatatggcggccaaggctcctccaggaggagggactacacggacaggtaagggggaagggagttattttctaatttaagtttaaaagctaaaatcacaggccaggcgtgggcgctcatgcctgtaatcccagcactttgggaggctgaggcaggtggatcatgaggtcaggagatcctgaccatcctggctaacatggtgaaaccccgtctctactaaaaatacaaaaaattacctgggcgtggtggtgggctcctgtagtcccagctactcgggaggctgaggcaggagaatggcgtgaacctgggaggcggagcttacag

SEQ ID NO: 87935 - DNA, 1743 bp, Homo sapiens
agtagttagaattacaggcatgagccagaatgctcagctcatttttgtatttttagtagaggtggggtttcaccatattggccaggctggtctcgaactcctgacctcaggtgatccacccacctcagcctcccagagtgctaggattacaggtgtgagccaccgcagccagccataaatacgggtaaatttatatggacatatattctttttggaagtaaaatacttcagaaatgtagtggaatttcttaaggtgagagaaattgtggacagacttcttgtagaatggtattgtttttatttagaactattttgattcatgtttcctctccttcacttttttagaaacgactggagcagcagaagccgacagtgattgcaacttccactacttccccaacaagcagtacaaccagcaccatctctccagcacagaaggttatggtggcccccataagtggctcagttacaactggaaccaaaatggtactaactactaaagttggatctccagctacagtaacattccaacaaaacaagaactttcatcaaacctttgctacatgggttaagcaaggccagtcaaattcaggtatggaactatcattaagtaaaagattactttggttcaggaaaaagaattttcaaccctttagctactgaaatgaaacatttttttagaagattgtttttcttttgcagccagttgagcaaacaagctgtaacggttggtttgttacaaataatgttcataatattacattagcaaactcctctcttacattatttcactttcaacatttacatagttcactttgagtggagaggaatgtttttattaaaaatacaaaatgagccacatttcatgcattggtgccctttcctagaagtcactacgttgctggttattttaaatctaaagcttattaaatgtcttataccccattagccaccagcacagctgccacatctgctacaaccattgccagcacaggtcagacgttccaaattacaggcaatccagtcactatggcaggaaaagtaattaccaaactgccacttcctgcaaacagcaagattgtcgctgtaaatgtgccagcaacacaaggaggtaagggaaatgtgaagttttaattcacatttgccagatcatactgttgccattatttttcatctccttttcactgatttcagtcctcggatctcacattctatgtagcccactataaaaccctgccacacgtagtttctcctcagcaaccgagcaccacgtaatgctttccaataaagtgatagtttttaattatggcttcatctttttttaaggcgttgttcaagtacagcagaaagtcctgggtatcattccatcaagtacaggtaccagtcagcaaacctttacttcattccagcccaggacagcaacagtcacaattaggcccaatacctcaggctctggaggaaccacaagcaattcacaagtaagaattcttacagacttatttggtttgatgtgttgagcacatcacattatttttagaatgacttcttccaagattaatccaactcagtttcctttgcctattactgaatctgtgacagagtactgatttggaaaaaaatctgttatatttctgataagtgaaaatgatacatgaagtattaatgtctaacagttaatgacacattagtatggtttatgaagaataataattgctttctaggattttataaagaaaatttctt

SEQ ID NO: 87936 - DNA, 4816 bp, Homo sapiens
caaggacaaggtcaaactactggacagttgcagttgatacctcaaggggtgactgtactcccaggcccaggccagcagctaatgcaagctgcaatgccaaatggtactgttcagcgattcctctttaccccattggcaacaacagccaccacagccagcaccaccaccaccactgtttccacgacagcagcaggtagagctgtgggtttatcggaaatgtcggatgttactactacacgtggctgggctaacagaggccaacaggagaaccagtatttacctttggaaggatatgcctcaagccagtgacctcaacagttgacatagtcagcctcacaacgtctcgaagcttttgtaccctattcttacagactccctgttaccaccaccctctccctcctattaaaaaagagagagagagaaagggggcaaaaataatggttatcttggtaactatgcccacacttactccttgctaagccttgtaggtgctgattcagtcatggaggtgatctcagggagggtgggtaaatccagttcatgacctcagattgagagtgggtccagaaccactttgttgaccttctgctgcaagtcattgtaactaactaccaccacatcatgggagaaaagtgaagcgtggcaattagcctgggccagatgacccagctgatttccagaggctgcaacttactttggaaaccagccctctagagttaggagagtgtacaggggacagccaagaagcagggcccaggcttcccagtttcagagcgtcctgccctaagcgtgtccaaatggagcatttcaaaggcatagaccttctgtaccaaaatacaaaattctcaactttatttactttatttattttttcgagacagggtcttgctctgtcgcccaggctgaagcgaagtagcaccattactgcttactgtagccttgaactcctggacgcaagcaatcctcccacctcagcctcccacgtagcttggaccatagccatgctccactatgctcagataattttttattttttttgtttttgtgtagagacggggtctcactatgttgctcaaacgatcctcccacctcaacgtcccaaggtgcacaggtgtgagccaccacgcctggccagaattctcaacttcagaagatttccttcagattcttctttaaccacagttttatgttccagagtaatagaaatggttcatctttcctttttacaggtacaggtgaacaaaggcagagtaaactgtcaccccagatgcaggtacatcaagacaaaaccctgccaccagctcagtcatcaagtgtgggtccagcagaagcccagccacagactgctcagccttcagctcagccccagccccaaacccagccccagtccccagctcagcctgaagttcagactcagcctgaagttcagacccaaacaactgtttcatcccatgtcccttctgaagcacaacccacccacgcacagtcatccaagccccaagttgcagcacagtctcagcctcaaagtaatgtccaaggacagtctcctgttcgtgtccaaagtccatcacagactcgaatacgtccatcaactccatcccaactgtctcctggacaacaatcccaggttcagactacaacctcacaaccgattccaattcaaccacatacatctcttcagataccttcccaaggccagccacagtcacaaccccaggtacagtcttcaactcaaactctttcatcaggacaaactttaaatcaagttactgtttcatccccatcccgtcctcagctacaaatacagcagccacagccccaagtcattgctgtgcctcagctgcaacaacaagtccaggttctctctcagatccagtcacaggttgtggctcagatacaggctcagcaaagtggtgtgccccagcaaatcaaactccagttacctatccaaattcagcaaagcagtgctgtgcagactcaccagattcagaatgtggttacagtgcaggcagccagtgtgcaagagcagttgcaaagggttcagcaactcagggatcagcagcaaaagaagaaacagcaacagatagaaattaagcgtgaacacaccctccaagcttctaatcaaagtgaaatcattcagaaacaggtaaagttattaagtaaaagcagcatgttcagtagcttgaattattgtgctgtgcagtagaattagtgtttggttgtgttaggtttcctaaatgagacaaagtcattaatgtttaaatttagaagaaacactgaattgaccaaaaaaaatactgaatgactactgtggtgtggaacacttcgttagatacatataatatatagtcagtgcttattaggaatgacctgtattttgggaggactaagatgggaagaatggagttatgagctttaatctttaatataaaacttgagggtttaactaagttttaaagccacttcagacattatagcaattcctttaaagttattgaaagttgtcattccttagtttgcatgtagactatgcaaattatagacagattaaactcatttgcatttctagccacacctttgtaaaaaagtttttgaaaacatattatttcatagcttaagtaaaaagtggcatcatccagcaacatcttgcaatggcacattagtgaaataaagcaatttagatgagttagaattagtctactaaagtgaagtcacacatataacatctgataacattactggcagaaaccatcttttcatctacctatagcttgcttcgctcagcactaggcaggagtttgaatgtggattttaagtgttaccaagttgtgagaccttcattcagttcctaggtctcccattcacagtccgtgaaactcacttatccctccttagctatagcctcttaaaacccttctctttccagccacatgagattattgcaatgattaaatgaggtcataaatgtagaagcactttttacacagcgaagttattttaaagatgtagtattcttatgaaaatgacggtcatatatattatatttaaatgtattattacccagctttactgtgtatctataaactgagaattactacactgtctgtctatccgctaatctttgtataggggagacgagggacagttctttaaaattcattcctgggaagaaagcataatgttaaaaatacggcctttggagaaggatagccaggttaaaatttcagctgtattacttactgtttgtcaaacaaggtggttaatttctttatgtctcagtatcttgtttataaaattattgctatggttcagtgttgttgtaaggaataaacgaggtaatgtcaagtgcttagcctagcacggtacccagcaggtggtaagcacccaggccatctggtagctgctaattttatttatgttacgatataaaattcttacagtttctttaaaaaaacacatatgtgctcaaatttctactgttgttatctgtgtactaacctgtggtgattataaaatatgcgcttttggatttattctgtcctgaaggtggtgatgaagcataatgctgtaatagaacatttaaaacagaaaaagagcatgactccagctgaaagagaagagaatcaaaggtaggggagacgcagggtcttgttgtctgtccgtctcttctctttatcgtgcacacgcacagagttctgagtttatacttgtttatcttgattgaagttcattaaatgagaacacttggcactaatagttactcataactggtttgaaccactcttgacgttttccagtcacagaaagtttttgtctcatctgtagaggcatagaagaatgatgtcttaagcctttcaaaatgaaacgcccagcattacataggttgtgtatttttctctagaatgattgtctgtaaccaggtgatgaagtatattttggataagatagataaagaagaaaaacaggcagcaaaaaaacggaagcgtgaagagagtgtggagcagaaacgtagcaagcagaatgccactaagctgtcagctctgctcttcaagcacaaagagcagctcagagccgagatcctgaagaagagagcactcctggacaaggatctgcaaattgaagtgcaggtaagagggcacatccttttcttctgtgtccagtgtttaacatctgaggttctgcttttttcccttgcctttttaataaagcttaaaatttcagtatgttttctagaacttacatttgtgtacatagagtaaaaagcagtgcagcgtgtgtgtcttgcaaaacaagtcagagcttttataactaaatgtgtagttatattgtattctccagactagcaactctgagaggtgagcttgttgattgaattgttgaaaaactctgagaagagcttttcatgtctatgacatagtctagccaaaagtaattaggagcagagcttcatgagaaaggtacagagacagtgaagtaacgttgaaagaatgaaaaataacatgagtccattaaataagacaaattgcaccagaatgaggtggctcactcctatacttccagcagttggggaggccaagacaggcagatcacttgagcccagaagttcgagaccatcctggccaacatggcgagacctcatccctacacaaaatgaaaaagttagccagatgtggtggcacacagcccaggtactcgagaggctgaggcaggaggatcacttgagcctggcaggttgaagctgcagtcagccctgatggcaccactgcactgcagcctgggcaacagagcaaaaccttgtctcataaacaaaacaaac

SEQ ID NO: 87937 - DNA, 2694 bp, Homo sapiens
gtgtaacttctacttggtgtttgcgctttgctttgttttcaaatttaaattgtgagatacattttcaaacctatctaagaaatagccctgatattgaaatggcttctgtggaataggtttgacagatgtaagtctttgattctttggctttggtttttgtgcctgttacagttttacacacattcattcagaggaagacattaccatcaatgtgttgtttcttttttcaaattccagtatgtttttaaagacccatatttcactaagcagtgtacttgttgaaactgatgtgagtgactttatgtttccacatgtgatagagcatcagatactggagtttgccaggagtagaatggttggattcagaaatgtttagctgactcattgcaggaagttacactgtaaaaaagtgaatcaaggcagggaagacagatttaagtaccatgcagctcaaaatgacaattacattgtcattttcattgtgaatacttttaggttctatattggctgtgatctttgtactaactggtatcatggagaatgtgttggcatcacagaaaaggaggctaagaaaatggatgtgtacatctgtaatgattgtaaacgggcacaagagggcagcagtgaggaattgtactgtatctgcagaacaccttatgatgagtcacagtgagttctgataagagcatcatatttaataatttaggaagccaaattgctctgactggttacttatttattttaaaataaaaagcagatttttttctacatttattatacacttacattacaaattccttttcatttttctctttttccctttttacctacccttcaaaatttatcttgcttcatagtgaatgtttgagacacattggggaaaatgtggtttaatggtagatttgattcttcaatatgtaacatagaaattaatgagattaaaatagcctgacttgtttggactttatcagtgtttgaaatggtgctttattgtaggttagaaaaacactaatttgggtacaagctctgagactctgttattagcttataggattttgaacacccatatggtacagtactagttgaaagatttttggctttgttttcagctttaaaatcaattgaatgtttcatatttatctttaaattggttctccagtattacacagtgttcttataaatttttttactgcttgttcttaacatcaaaaatactaaattaatgaactggaatgtcaatcttgaaagtattaaaaccataatactaaaactattttatatcccagggtttagcaaattttcaggtgcatgctttattataagtaacatcatcccatgtgttttgaactcacatttccatttcggatcttgcagattttatattggctgtgatcggtgtcagaattggtaccatgggcgctgcgttggcatcttgcaaagtgaggcagagctcattgatgagtatgtctgtccacagtgccagtcaacagaggatgccatgacagtgctcacgccactaacagagaaggattatgaggggttgaagagggtgctccgttccttacaggtgagacccctctgtgtgcagcatttcaaaatgaaatcagccagcataattttggaagcatttctaggatttcaagtttccaatcttagaatgattatttactgactcccagctagtctagtgaagtgcctaacaaactgcagtccttcacgtaccagtgccatgagctttaccatatccccacaccacgtcagcttatctcacactcacaagagtgttaacatgactcacttctttatacattttatttttaaggagacttcctctcacccccatggattgagaagcagtatgattagattatagttgttcttggccgggcatggtggctcatgcctgtaatcccagcactttgggaggccaaggtgggcggatcacaaggtcaggagatcagaccatcctggctaacacggtgaaaccccgtctctactaaaaatacaaaaaattagctgggcgtggtggcgggcgcctgtagtcctagctactccggaggttgaggcaggagaatggcatgaacccgggaggcagagcttgcagtgagccgagatggcgccactgcactccaacctgggcgagagtgtgagactccatcgcaaaaaaaaaaaaaaaaaaaaaagattatagttattcttttccttatgaaaaacaaaaaggggactgggcgtggtggctaacacctgtaatcccagcacttggggaggctgaggcgggtggatcacaaggtcaggagttcgagaccagactggccaaaaggatgaaaccccatctctctactaaaaatacaaaaaattagccaggtgcggtggggcgcaccagtaatcccaactactagggaggctgaggtaggagaatagcttgaacccgggaggcggaggttgcagtgagccaagatcgagccacggcactctagcccaggtgacagtgtgagactctgtctcagaaaaaaaagaaaaacgggatcgagatggtttgcaggattagcaagtgatagagatatattgaagacatagaaagccagtgtggttgctcacacctataatcccagcactgtgggaggccaaggcaggaggatcacttgagtcaatgagttagagaccaacctgggcagcaaagtgagaccccatctc

SEQ ID NO: 87938 - DNA, 1072 bp, Homo sapiens
tcgagccacggcactctagcccaggtgacagtgtgagactccatctcagaacaaaaagaataacaggatagggatggtttgcaggattatcaagtgatacagatgtactgaagacacagaaagccagtgtggttgctcacatctataatcccaacactttgggaggccagggcaggaggatcacttgagttgacgagttagagaccaacctgggcaacaaagtgagacccccacctctacaaaacattaaaaaaaaatgagctgcacatgttggcacgcacttgtaatcccagctacttgggaggctgaggtgagaggatcacttgagcacaggaggttacagtgagctatgatcacgccactcgacaccagcctgaatgacagagcgagaccctgtctcaaaaaagtggggggaaataaaaggatatagtgcactggattgaaactttctcctgtcgttatcataatcagaagaattgaagtaactaaaaagagaatcatagtctcaatgtgtgcttgaatgttatctaacatcacgtctctgctacctcatcattaaccagctgtggtaatgattccacactttgaacccatcccacctgttgacagaagcgattgcaatgccagcatcactcagtgacggctcatcatgtagggcccagaatactgattttgtgacttctaagcttgtgctccattcccaacacaaagtcttctgaccagcctttgagtaccattattgtagaggaagctcatcttaggtaactattactagagcagaaatcacttaatataaaatatttcatgtatcaaatttaaaactcacttttgggttcattgatgtagtaactcaaccaggaaacttaaatggaattagtgttttcactgacaataatgatgctgctttttcattataggcccataagatggcctggcctttccttgaaccagtagaccctaatgatgcaccagattattatggtgttattaaggaacctatgggtaagtacatgagttgaatatgaagtttttcagaagtctcagtggatgttttattatccataaaattaat

SEQ ID NO: 87939 - DNA, 1050 bp, Homo sapiens
catgatgtatctttttatttagggacagggtcttgctatgacccaagctaatcttgaactcctgagctcaagcgatcctcccaccagccttggcctcccaaagtgctggggctgtgaaccactgtgctgggccagaaatatatatatatatatatattttttttgagacagagtctcactctgttgcccaggctggagttcagtggcacaatctcggctcgctgcaacatctgcctcctgggttcaagcaattctgctgcctcagcctcccaagtagctgggattacaggcagccaccaccatgcccagctgatttttgtatttttagtagagacggggtttcaccatgttgaccaagccggtctcaaactgcagacctcgtgatccgcctgcctcagcctcccaaagtgctgggattacagatgtgagccaccgtgcccggccagaaatttttgtttatttgagttcagaaaacaagtggttcaggaaagcaatgagaattactctgacccaagatgacatttatacagcaggctgtaaaatgtcagcagaccaaatcctagcaggagaatggagcactccccagaggctcagtagagcaagaaaatgactcatacattagataatttgtttaagacagaaaaacataaggctatgattaagccaaagaacgtcagggataaaaatgaaaggcaattagaaacgccactaaaaacagaaagttgtgtaagtgtaccctgttagctgggcacggtggctcatgcctgtaatcccaacacattgagaggctgaggcaagaggatgcttgagcccaggaattctagaccagcctgggcaacatgaggaaaccccatctttacaaaacacaaaaattagccaggcatggtgatgtacacctgtggtcccagctgcttcagaggctgaggtgggaggattgagcccatgaggtagacgctgcagtgagccatcttcatgccactgcactccagcctggaagacacaacaagaccctgtctcaaaaaaaaaaaaaaaaaaaaaggccctgttagc

SEQ ID NO: 87940 - DNA, 2229 bp, Homo sapiens
accagcctgggcaacatggggaaaccccatccctacagaaaatacaaaaaattagccgggcatggtggcatgtgcctgtagtcccagctacccaggaggctgaggtaggaggatcacctgagccctggaggttgaggctgcagtgagctgtgattgcgccactgcactccagactgtgctacagagtgagaccttgtttcaaaacaaaacaaaacaaaacaaaattacaatgtaaagagttgtataagggcaacttgctgttgcctttttagggaatttctattgttttccagatttaaggcagaatgaaacataactagccagttattgaaaattgatttatttatggattttcagaatttcctttgccatattttcccattttatgatctccagcattgtttgcacattgttttcattactgcactttgttataattcatcatttataccatccatattctttcttttcttacagattgtgatatctttagtctgaatttttaactggaatcagaactggatgttggggtcactctttgttttattgtacctcgtgattacctaattcaaaattgccccccaaaaagtcagattagttaatataattttttaatgttaaagatgtatcgtggtaaaaaatttactctagcagccatgttgaacaatgtatttaaaaattgtaaactcttggaatactgtatttatctgctatttcaatataaagtcctttgacttagtcctggtaactgtacagtaatttggtttactaatgaaagttgtgaataaaactgtgaaactagaagggagactttctggactttaatagaaaaatgtgattttaagattgctttttcttttgttttagcgtaatttttccctttatattcccctcatcaatgtaaataaacacacacacacacacacacacacacacacacacacacctttcaccacaatggtaatgcttctgtaaatgcctctatttgtccagttggctgaaaatgttgtaatctttattagacaaatatatatatatatatatatatatatatatatatatatatttaaatattggctttttccagtgagctattatgtttagtgtacagtgaaaagttttaatattataggttaaaattttcttaatcgttcttttctattcgcttgccaagggtgaatgaaagaacatggctgcttctcccagactgactgaccttggcatccgcataaagcatcattgttttcaaaaatgaagggtgcttaattgttcccttttttctatattctgtaggtctcataacaacaaactgcagtctacagcttcttaaagttcagcgtgttaacctaacataaaacacagcaagaatctggttgtctgaactattttaaattaaggagccagatgtttttagtcaggctatcctgacaagacttgacctaaacttcgtttttattggtcataacagtccaattatattcttggccaattttgtccaacggacaagaaaaaagcaaagtcaacgacaccattatcttgtcaagatcagatggttttactattgtggcagaagcgagaaaactttgtttattgaaaaaaaaagaaaaagaaagcaagaaaaaaagatactatggggtcaagtgtaactccatggaaatgccacgtctgctcttcagtgaagaagctggtttagagtctcacagaaaacttttgactgtatttatttattgttgcaaaaaagacgcttttttattgctgccctcatttgtcagctaattattttttcttataaaatccagccccggttacatataatcatctgtatcttatcatgattcctgtaggtaaaagtacaagacgacctctagatgtcttttctttctatgaaaggagctgctatgtacacatgtgcacacacacacaactgggaatcaacaatgagtttattgttcatggtagattaaaattaagcttgcataaaggttgggctaagtggtcctggactacagactctgttgccttgaatataacagtacaatttgtcaattactctgcaccaggctaaaatgagtaaaatctatttgaaggtatcttgtttgtaaacatttgtcagattctaatttttttcttttgtattaaaattcaactatggatgtatatgaaacaaaataaatggagataatttttctcccacagacagaggtgtctttgaatgtgcgctaatgatta

SEQ ID NO: 87941 - DNA, 1025 bp, Homo sapiens
ttatactttacctgccaagttcacaatccttgaaaccatttcatgaaaagtattttcctattggtaaagcttttattctcctatccaaattctgcaggaggtttaaataaaattgtggctgggcatggtggctcacgcctataatcccagcactttgggagactgaagcaagtgggtcacttgaggtcaggagttggagagacctgcctggccaacatggtgaaaccctgtctctactaaaaatacaacaatttagctggacaagaggcacacgccggtagttccagctactcaggaggctgaggtgggaggacagcttgaacccgggaggcagaggttgcagtgagctgagattgtgccactacgctccagcctgggtgacagagcgagactccgtctcaaaaaaagtgagcttttggagatattttctgaaggaaaataattacctttttatatttcaaatggcctagagtgttatttagagacactaagatttgctgttgtttgtaatctaccttcctaggatctgcaaataaaagttacttccctatttctgttaattcctttaggcaaactctctgctgctttatgttaaagagccaacctggtggcctttcagatctctgcacacttagacaaagctacatggttattacagctttcgctcttcatgattgaagctattaccgtaggtctcagacttcttgtccttaatgtgagaatggtgatatttcatggataaagtaatgaagtacttgaggaggtgggggtaagaaccagctgagaagtatttttaataatttgaaacattctgaggtacttctggatacttggagcgagatactagaagattttctcagaagatcataccgcttgatccaatttgaaccaaattcaactaaagaaattagctatattttcaactaaaattagctatatttttaaaatgttaatgtcctgctttatctaatttatttattgcttgctcaaatatttcctgaaattgaggtgatgcattataggtg

SEQ ID NO: 87942 - DNA, 1029 bp, Homo sapiens
agaatcggagcgagccaggcttgagggcgaatgtcccgggaggacttgtggcggccctggtttcgcctcctcctttctcgttgcatcttccccggcgtgggggcaggggctgggggtggcagttgggagcaccgtctctgacacctaggccccgggggtggctctgccaccaagtcgtaggcgagcgtaatgaaagcaaagatagcaaattgtaaggagggctttgacttttgtcatcttctgaatgacgcacagctgatgtcatcctaattaagcgcattcactcctagtctctggaaatgcaaatcaaatatgcgagatgcggcactgcatttttaatgttgaccataatgtaatgatgaagcaaatttttatttaattttcgagtctgcacctattttggccaagtaaagacagtaaaatagggagagcctcctgaggatctgaatttattgccctggcacataatttttagctgtaagttgacttggttcccctactttgtcttgaattaactattagggactctggagtatcgaactaggctgtcagaaacggtggatacatgtggctagtccaaattgaaatacgctgtaagcttaaagtacacaaaagatttcaaagatggagtatggaaaaagaatgtagaagatgtcagttattttatatattgataacacgttgaaatactatttggatatgttgggttaagtaaaatacattattaaaattagtttcacttgtttcttttctcctttttaaaaatatggctactaggaagtttcaatttatatagcttgcattctatttctgatggagagccctctccaggaagtctcagccctttagagggaagggggacacttcccctttgggtaaagctatttcatagtgccgaaaacatgatgatcccccctctagtatacaggtgtggattcagtagatgcttgataattcagttcttatttggtactattattgacaaaggaaaatgataaaggaaatatttttctcttcccccatctttta

SEQ ID NO: 87943 - DNA, 1026 bp, Homo sapiens
tggcgcatgcctgtaatcccagctactcaggaggctgtggcaggagaatcgcttgaacccgggaggtggaggcggtggtgagccgagatcacgccattgcactccagcctgggcaagaagagcaaaactctgtctccaaaaaaaaaagtcgggcatggtagctcatgcctgtaattccagcactttgggaggctgaggcaggtggatcacctgaggttggcagttcgagaccagcctgaccaacatggagaaaccccgtctctactaaaaatacaaaaaaaaaaaattagccaggcatggtggcgcatgcctataatctcaggtacttgggaggctgaggcaggagaatcgcttgaacccaggaggcggaggtggtggtgagccaagatcatgccactgcactccagcctggggattgagtgaaactccgtctcaaaaaaaaaaagaaaagaaaatcctcagaacgttgcctatgacttcatgtctttctccctcaaagtatatctgaatgcaagtgattgagactaacgtagaaataatcttcagtctgctctgattcttgatttttgagacaaggtcttgtatggcgacaggcaaacaccaccatgcctggatattttttttttttttttttttttgttgggaggtctcactgtgttgctcaggctggtctcacctgagctcaagccatcctccctcctgagcctcccaaagtgctaggcttacaggtgtgagccaccatgcctgtccttctcgttcattttttaaaattgttcaaagctgccttttttagcgacaaaacacttggatactccataacttgagactccagtgagtccatgacaacaagtttggaaactgttctacatataaaataatgaatatttaacaggcaaaattaaatgtagggctaaatatttagtagctggctataagcctaacgatgtttacacttgccttcacaagtaagtgtggattttattgtttgtatttaatcttaatgataatgtgcaaactttcactttt

SEQ ID NO: 87944 - DNA, 1861 bp, Homo sapiens
tgcagggatggaaaggagggtaatctacattaatttctggaaaaatggtagttaattataccgcatacatagcaccatacaagtaatctgttcagcttctcttaggttccagaatgtctcagcatttagtgatttacttaaaaggttgtctgaagttctaaactcttgaattgcattttatattggtttttacacaaactccttttgttaatcactgtcaacttttatttctctttttgttcccctttaggaaactactttccagagaaaaacagccccccatagacaacataatccgggctggtttgattccgaaatttgtgtccttcttgggcagaactgattgtagtcccattcagtttgaatctgcttgggcactcactaacattgcttctgggacatcagaacaaaccaaggctgtggtagatggaggtgccatcccagcattcatttctctgttggcatctccccatgctcacatcagtgaacaagctgtctgggctctaggaaacattgcaggtacttggacttgaagttcttttgactgaatgtatctaatcgtaattagttggaagaaaggccttgttataagtaatagtgactttgtcaagttttgagcttgctttcaagcccttattaggaatgaaagtgtcgtctttacaaaggcagcagagggccatctaagtaagtttgggagtttttgctggtgcattcagtcactgaaaattgatggtgttggacaaggtaataaaattaatcttgcctcggccgggcatggtggctcacgcctgtaatcccagcactttgggaggcagaggcgggtggatcatgaggtcaggagattgagaccatcctggctaacacagtgaaaccccacctctactaaaaatacaaaaaattagccgggcgtggcggcgggcgcctgaggctgaggcaggagaatggcttgaacccaggaggcggagcttgcagtgagccgagatcgcgccactgcactccagcctgggcgacagagagaaactccgtctcaaaaaaaaaaaaaaaaaaattaatcttgccttttttttcaggtgatggctcagtgttccgagacttggttattaagtacggtgcagttgacccactgttggctctccttgcagttcctgatatgtcatctttagcagtaagttactaacatgagtaaagttactcacttcttcattctaatttcccccatcttctcaaaagacagaacctctcattgcctattttttttcccccagtgtggctacttacgtaatcttacctggacactttctaatctttgccgcaacaagaatcctgcacccccgatagatgctgttgagcagattcttcctaccttagttcggctcctgcatcatgatgatccagaagtattagcagatacctgctgggctatttcctaccttactgatggtccaaatgaacgaattggcatggtggtgaaaacaggagttgtgccccaacttgtgaagcttctaggagcttctgaattgccaattgtggtaagttatttacttgtagattaggacataagtataagaagcatgatcagggctgggcgtggtagtggtggctcacacctgtgtaatcccagcactttgggagaccaaggcaggtggatcacctgaggtcaggagttcgagaccagcctggccaacattgtgaaagcccatctctactaaaaatacaaagaaattatctggacatggtggcacgtgtctgtaatctcaactactcgggaggctaaggcaggagaattgcttgaatctgggaggcagaggctgcagtgacccgaaatcgtgccattatactccagtctctcaaaaaaaaaaaa

SEQ ID NO: 87945 - DNA, 1076 bp, Homo sapiens
gtctgattcagatgggccgttttaggatcgtttttgatattcattgcggcggtacaagttttgtagccaaactgacttaaaagataacattttgtttctttttgtttcatagcaacaccaatgaatgataaaggttattgaaaatttagagttggttttgtttctaatttgaatcttcttactcatagactgggtaaacactgaataatcatcttaaagtctgtttttaaatgttcttccatattgtaggctctctaggaaacaccagaattatcagtgaagaatatattaaatggctcacgggctactgtaaagcatatttctatggcttgagagtaaaactcctagaaccagttcctgtttctgtaacaagatgttcctttagagtcaatgagaacacacacaacctacaaattcatgcaggtgaattacacgactttgcaattcgaactgagtatatgtatataatatacactcatacatttatgtatttctttttaaataggggacatcctgaagttcttgaaaaagaagaaacctgaagatgccttctgtgttgtgggaataacaatgattgatctttacccaagagactcgtggaattttgtctttggacaggcctctttgacagatggtattccgtttttggcattgttgttagaagcttcttcagcttgagaatatttgaagatgttagaagagggaaaaaattccaaccaagaatcatattgatatttaaaatattttcagttgagacattatgccataatgggaagtgtgctgttggtagattgtgataatctaggttctggttggccactcactacctacaggaccttaaaggtaacaatacccacatcatggagtcatttggagataatttacataaaagtgcctgtacataaaaagtgtggataagcctggacaacatagaccacatgtctacaaaaaaataaaaatttaaaaaactaaattagctgggcatggtggcacatacctgtagtcctagctacgcaggaggctgaggtgagaggattgcttgagcccaggaggttgaggctgcagtgagccatgat

SEQ ID NO: 87946 - DNA, 1067 bp, Homo sapiens
tgttttcacatacatatgtctacccatgcctgtgtggacacttatatatgtatatacgtacatgtcaaagtaatataatgccttgtggaatatttagcaagttgagaaaaaataacatcctattatgctagaaacaaagtgtaagaatgagtgtatttctttttcatcttttttcagtgcgtacttttgacatcatttgtaattctgtgtgtatttggtacgtgccatttcactcagtatatcattagcattatttcatattcacaccatcattatcaaatgcagcgtcttcatggggtaatatgtcaccctatgatctagaagccaatgcttctctcttgcctgatggtattttgctgtggtttgttgaagtgcgcatctttcatgtttttccaggcactggtgaggtggattgatgatgaatcttctgacacacctggagcaactccagaacacagtcacgaggataatgggaatttaccgaaacccgtggaagcctttaaggaatggaaagagtggataataaaatgcctggctgttctccaaaaatgaggaccttcaaataggagtgattgaaataaataactacttgcatgttatgctttcatttgggtggaatacttcattggaataaactactgatcttgtgctgtgtcaaagtaacagactagaaccttctttcaagtacctgaattgaaatgaaactcattttgaataataaaaactctagaaactctttatcttctcatcttactggcctggtctgtggcagcaagcacattatttccattccccaaatatgtttaggtctcccaagaaagctgggactggcggtaacgagcaagtaaataacttgaaaaagaaccgttcaatgccccaaggaaccaaccaacataatttccagggggtgattttgtttttagaagagccgctcccctcttttaggcccagccaagtcacatttttggacgtccgtgggctctgatcaccacagccctccttttccgagagcctaccttactgtctcaagtgcattaccttgtttttttctcttgctggttgtcacc

SEQ ID NO: 87947 - DNA, 1048 bp, Homo sapiens
ttggagtcacactacatgtatagtattgctcacgttagcagttttctgtaaggagggcaagtgtcaggataataggtggactttttactcacctattttaccacaatctcaccctgcaggtgatggtcaatgcttgctgctccatctttattcatcgttaatgttaatttatgacaactcagggggaaaaacataacaagcctagtttggttacaggtacacacaagcttgaatatttctctgcactgaaatgaaagtggcatagttcatcaccacctgctacattttgtagagcatcttatcagccatagaaataggacaatctataaaactttggggagggtgggggaggaaatgacaaagtgtctgtcaaaaacaggcataatctaaaacaaggtggatgtagcaaatctctgtcactgcttgagaactttgagcttgtggcagttttgcagacttacatgacttcagcactttacgacatattttttactatgaatgttcaatacaatttaatatttataactgatttctgagggatctgctccatgtctattctgttatctgcatgaaaacaaaatgtatgccaatttcagtatgtcaataatcaaggttttaaatgtttggaagaaaatacaaacaagattgctgatctgttctgtattagtgacattctggtacttctagatttgcaataaatttatggattttttatttaaagagaccgattctcttctaagattttttattgactctcacagcattcagtgtttgaggcaattaaagttataaaaactcaccaaagattcactccaaataaataattttttaacgtttatcttctgcaaaaccttttaactctactagagacacataaagtttcccaagaagtttctactgaactttttatttacttatatttattattattattttttgagatggagtttcgctcttgttgcccaggctggagtgcaatggcacaatctcagctcactgcaacctccgcctcccaggttcaagtgattctcctgtctcaccctcccat

SEQ ID NO: 87948 - DNA, 1033 bp, Homo sapiens
taaaataattcctgcactgactttgcatgaaatgtgttatggtttggttttgttttttcttgagacagggtctcactctgtcacccagtatggagtgcagtggtgcaatcttggctcactgcatcgtctgcctcccaggctcaaacaatcctcccatctctgcctgccaagtagctgggactacaggtgcacaccaccatgcctggctaatttttgtattttttgtagagacggggtttcaccatgttgcccgggctagtcttgaactcctgggctcaagcgatcctccgtcctcaacctcccaaagtgctgggattacaggcatgagccactgcgctcggccatatttatattcgacatcatctctccatgtgcaagacgtggaggaaggagtcttatggcagctaaccctgaagcctctgtgagttaaaatatcgttttgttctttcccggcagctcccctcgccacagtcctgagcaatcgtttcggacaccgtctggtagtgatgttgggggggctacttgtcagcaccgggatggtggccgcctccttctcacaagaggtttctcatatgtacgtcgccatcggcatcatctctggtaagtgttcctctttggctcagaagttgtctagacacttagtttgaagaacaaggaaggggaaggaggaaattaaagccaaactatatttctttctctttctttttttctttaacattaacagtgtctcagatcagtagttttgaactgagctatatggacttcaggggacctgggaatctgttctcaagtgcccaagggtttttgtttgatcttcaccaaagatgatgataatttctcttttgctgtatttgcagccaaaagatagcatttttacaaagtaagacgaatttctgtagccagtatttctcacatcagtgtctgaggatccagggctgtaggggaagtgcaacatgccagacttattcttgggggcctaagaaaacctttttccattcaaaaggagtagccagcatggtggctcatgcctgta

SEQ ID NO: 87949 - DNA, 1052 bp, Homo sapiens
catgccactgcactctagcctggatgacagagcaagactccatctcaataaataaataaataaataaatattcaacaacttaagaaatggggtaagtagttcttatctgttgtttgcttaagagtatgagaatcatcgatcctcatgctattgctgatctgaattgcttttaactttttctttcagattaagaatgacccaaaataaattaaagctttgttccaaagccaatgtgtatactgaagtgcctgatggaggatggggctgggcggtagctgtttcatttttcttcgttgaagtcttcacctacggcatcatcaagacatttggtgtcttctttaatgacttaatggacagttttaatgaatccaatagcaggatctcatggataatctcaatctgtgtgtttgtcttaacattttcaggttagtacatctttcggcctaaccatgacgtaagtatagggcccttttaatttggctaccttggtaatggtagtcgatgtgtttgtgatgctttcattcccttatacgcctgttggtccttcctagccctgactaacagggttttcagagcattgaggattggcaagaaacaaaaggcactgaagaaaaaaagccttatttgccagccatgacagccttcagtttaacacacatgtattaaacatctgctgtctgcacactcttaggattctgtagattcccttaaggagtgcagtcaacctccttttgtgaggatgtgaggatatagtcactgtctaagaagcaacatcaaaaagttgctgatggccgggcacagtggctcacacctgtaagcactttgagaggtcaaggtgggtggatcagttgaggtcaggagttcaagaccaggctggccaacatggcgaaaccccatctctactgaaaatagaaaaattagccaggcacagtgttttgcacttgtaatcctcagtacttgggaggctgaggcacgagaattgcttgaacccaggaggcggaggttgcagtgagctgagatcacaccactgcactccagcctgggcaacagag

SEQ ID NO: 87950 - DNA, 1056 bp, Homo sapiens
gccaccatgcccggctaattttgttttagtagagatggagtttcaccatgttggtcaggctggtcttgaactcctaacctcaggtgatctgcctgctttggcctcccaaagtgatagtattaaacgttagatagtatctaaacgatagtgctgggattacacgcgtgagccagcatgcccagccttcttcttcttctttttttttttaatagagacagggtctccctatgttgcctaggctggtctggaactcccggactcaagcgatcctcccacctcggcctcccaaagtgatagtattaaacgtgtgagccacctcacctagccagatggtggactattcatttctatttcctttctgagccactgctgggaagttaattccttagtttttttaaaaaactctgctttatgtctgagctattctactctagctagagccacatataactttcacctgcattcttgggtttttggacagaagctttcttttctttttataactgagatctccatcaaggaaagatgacaccctgaaccccgtcctacccccaaggtttatgcctttatcatcctaaagcatcctatgtcctattaaatttagctttgaagataagaccacaatataaagtaataacaggataacctggtttctgaaccttcctgggtgataatgcctgtatttaagtaaagtcatgcacaggtctttccttaaaaaaccgagtcataaggggagaaagtgcttggttgcagaataaaacccttcctggactcttctcccttttttcttttctcttctcttcttctcttctctctctctttctctctctctctctctccccctccctccctcctttcttttttttttttttttgggggttggggatggagtctcagtctgtctcccaggctggagcacagtggtgcgatctcagcccactgcaagctctgcctcccgggttcaagcgactctcctgcctcagcctcctgagtagttgggattaaaggcgcatgccaccacgcccggctgattttttttttgtatttttagtagag

SEQ ID NO: 87951 - DNA, 1934 bp, Homo sapiens
tggtacagttgggtcccggaagatacctaaaggcacgcctggcctttgagtgccccctgccccgggttgggggctccgggacgtcggaagagtcgggggctccaggctcagcccctccgcggattttccgcatgaagttgcctgcgcgtcgcaggagcgaaatgtcagaggtaccttcctaccccaggctggcgcgcgcacgcaggccgggcactgaggcagcgcgagggaaagtggggctccctgcctcccccgacccccaaacacagcactccctgcggcggccaccgtttgtccccagcgggaagccggggatttcccggcagagcgcgggtcctccacctggactgtcagaactgtcagcggctgacggccggtcccgcgcaacttcaaggttcccgggctgccaaccgcaggaaagcgctggtgtcgccaagcagttccgtagcaagggaagatggttttgcagaggaaatgggttatttccttctaggttgttgtcgtcttttctttttattccccccaccctagcaagacaggtcatagaagtttgttaggtggcgtatataaaatgtcaccaaacatggggggcgtcagtcttagaaaaagctccccggagccaactggggaagagcaattacaacttgtcaacctggaagccggttttgtttgcacggttagacactccgtgccagctccttctcgcaggagatggtttctaccccgggaatgagatttctcagtgatctgattgtttttgcaaatcatggtaagataggtgtcttgcttgtaaaaaagatgccaagtgcttatgctgaaatctctaaaccatgcatctccccatgtcccaagcaccgttatgtggcatttttggggtcaacaatacatccggccagatgatataatagaaacccctcttctcataattaagggaagagtgtccaaaataggaacttacagtgtgtaaataaacaatgcagccaagtggaaaagctccttccagtgtaatgagtaccactaaccctgagttttccttctgtggtttccgaaaaaggactttcctcagtggaactcctgaggaggacacttaaattaggggctcaggtttcaacaccatagtcttgtaaaatggtgactcggttgtagccagtgattcaacatcgtgaggcagctatccaggttaggtttggaaattttttttaaatagagaatgcagatgaactttagccaaatacagactggttttgacaacttgggccagaaacaacttgtcaaagctgttctccgggctacgcctttaagaagaagagaaatccgcagtgcttttgctcgaggtctgcctacaacagtagccaccccatttccatccagagcctgcgttttgaaacttgctcttagctgaccctggaataacactctgatggtctacaataatacaatttttttcatgccctcgggccaaatcttctctcgacaaattaaatcacagtgaaactcccaaggatagcggatttccaagcctttggcaagatacctacttatttatttgtttagaggcagggtctcactcccatcatgggagtgcagtagcgtcatctctgctcattgcagcctcgacctcccgggctcaagcgatcctcccacctcattttttaatttttttgtagagacacagcctcactatgttgcccgggttggtctcaaactcctgggctcaagtaatctgcctgcttcggcctccctaattgctgggattataggcatgagctaccgcacccggccaatactcatttatttaaggggacacttaaccacatgctactaggaaatcctccaaactgcccgtggattgtgtcattgtacttcctccagaagaacactagggtgaagggaagatggctgccgggaacccccattcagaattgtcgagtttt

SEQ ID NO: 87952 - DNA, 1021 bp, Homo sapiens
gggctgatcccgcgcggcgctcgcggctgcggcggcttcgcgcccgccccgggcagaacaggttccttccagtttgggtgtgagctgcgcgcgcggcgcctgagttcctcctgcagcgcccacttcccccagtttcgtcaactcgcgcacccccacagttccccttccggcagtggggagggagtgtcgcagtgggccccagggagcgagcggccgggccgctgcgggtgccttgcttcccccactttgctgcaccggcagcagcggcagcaacagcatccgcgttgcgcgaaaggaatgtgagcagccgggctgagtcagcatccccggcccggggcgcgcgcgcaccctccaggcagtggcggcgtcggcacaggtgcatggctcccatacccgcggggagccctctgtaagggacctggaggtttagacagtccgtgcccctcatcccgtagtccccgaccccaaggtcaccgtgaactaagcggatgatgcacgcgaaatctcaggagctcctcatggggacaaagcatgtgtcagatcctagacatttcagagcctgcgggggcgcaaacttagcttcttggtctctacctcacatcccgagggcaaatttggaaactgctcggaagcaaaggccatgttatttgcattcgtatgcagactttggcgccggctgctgccttcattggggttcggagaatgtggttctgatgtcagaaactcaagagagcctagtttgggagtgcatgcacggagggtcgccaccgggaggagtcggcgatctgaattttaataaaaatccttccttgctcgctgagttctctcaccattttgggataggctctcctgagttaaatgccatcctttgccgttgacaagttctggttgtgtaagtggggagaagattcgttggtacagggtgccttgtatggccagtagtgtacagccaaggggccgctgagcagctttgcaaccttgtaggcgtaatttaacctcgtagagcgttaatttctccaga

SEQ ID NO: 87953 - DNA, 1081 bp, Homo sapiens
cacctcctgacgttttgtgccctaggcattttgcttgtctcgctctagcactgtctctcacctggactcacctggacccatgcaagagactcctaactcagctgcttctttcatctgctgccctgcggggcatttgtgtattctcaacagggcagggattctgttacaatgtaaaccagagcctgctgctcttgctgaatccctctggcttcccatctctcgcagcaaaagcctttctttcctctctgactctaatccctgcccttcctttctccattgcttctgcagtggcttctttgccgctccttgcttgtgccagacctcagcctttcccagtttctctgcctttcctgcttggcttcctgatggctgcgtagcttcctccctgacctcacacagatccttatccaaattgtgttttctcgatgagattgtcccagaccaccccctttaactttgcagcctccatcccatgcctgagctccttctttgatgttcttcacgctatttacattttattgatttcatttctcccctcactgtcaaaaaagtaagtggtgtgagggcagggacttttgtctgtttcatttacggctgtatgcactatgcctggtttaaaatctgtcagtcagtacaaatttggtggacagatgacagaatgcgttggggagttgcttccgacaacacgtgagcagctgatgcccaaggccccttctgacagcccctgatggctcgtggccgccagccagcacacagaccatgttctgatctggggagtaaaacaacagcagtccacatcccagagacctgctcccccctgctcttttgtcttttttggcctcggctcatcagatgcttttgtctctggaaaaccaacagaaccctctgccagaaaggtctgcccgaccttcttgttatttcagctgttttcaaggttctctaggaggatgcttggccacagggaggcccatgggaaacgagggtcaggtgatgaagtgagtggctcaggaagcccaaggacttcagctctgtgttttcagacactgctcagcagatcttcaggttgctgcattccattcgc

SEQ ID NO: 87954 - DNA, 1014 bp, Homo sapiens
gggcagagcctcttctgccatctggagggttgagcgtctcccagctccctggaactttgggatggtttcgggcccctgtgccccatggcacgtggatgcttcaaggctagtggggacagtctcttctgcttttgtggtgactcaaacgacactgtgttcttaggggaaggaatggggactcggggccgtttaatgccccctccgaagtgggcatagggcctggacatccacccgttaattaatccattaaagggcaaatcaaccgacagcctccttattatacaaaaaaggggaacagttttgttaattcattagctggttattaagtgaaaagtcccgagtcctgttggcatttaacatcacagaaggaaatccccagaaatgctgatttctttgggatttccacatgccaaatgattttctgagcatcagcagaaaaggccctcaggtccatgcccttcctcctccatgactctggcccctgcctcaagcccctcccccaccttggacctgtttttcaaaaccaccagctgtccctagagtgtggcttcccgctcttccttgacaagggggcccaccctgggacttagggagtttttacttgggtctttagttggctttagtgtttcacccaagaccctcgacgtagtacttggttatcactgctggtcattcagtttacttgactttagacccttcatctggtagcaatgctgaatgctaatgcttgattggagttttttaagcagcaggcaaatctctgaatgggaaaaggagccggtagaaggcatgactcctgggtcacagagctagctgggcctctgttccttttgaggtctgggaccgtgcattgcacctacgcgggcaatacagggcttgataagcaggagtgtatcgggcatcaggatgagcagcggcccagcatgtttgaaatcagacatttcttagttttctttttttgagactgagtctcgctcttgtcacccagactggagtgcagtgttgcaatcttgg

SEQ ID NO: 87955 - DNA, 1055 bp, Homo sapiens
aggtcaggagtttgagaccagcctggccaacgtggtgaaatcccgtctctactaaaaatacaaaaattagccgggtatggtggtgcgtgcctgtagtcccagctacttgggaggttggggcaggagaatcgcttgaacccaggaggcggaggttgcagtgagccgagatcatgccactgcactccagcctgggcgacagagcaagactccatctcaaaaaagaaaaagaaaacttgccccaaaggaagggtgagcggaatcaaacccctgcttttcctatctgacttcaatacggattctcagggggcagccagaagttggcatgggaattttagccttctggttataatgacactgtcttaaaaacaattcttatttttatgtaattatgtaaaaagcctccagatctgttttctaggttcggactcctatggggctgacagatgttttaagaagtttaaaggagtttattcaaaagttgaacatttttaaaatttcacaaaactaaccagcaaagacagtaagccaatcctccatttaccccctttctgtcttggttaagggcagagacacatgtcagagggagactgcgtcccatgtagggagctaatgtgttcactagctattgcttctcgcagggtcgcagcatctacactcacttgcctcatccacactgtcacgttcaaagacaagaaataatcctgaaagtagatcccaaggccagaatgcaaaggaatagccagaagcccagaccagatcagtgggctaagggtttgtcaaaggcagaatctggtgacagctagggtgaggggggctttgtcattggaagcgaatccatcgcccatcttcgttgtcatcacggtttatgttttccttggcccttaggatccagaagttgccacggctgctagttgcgtcatccagtggacacctttatatgtacaatttggatcctcaggatggaggagagtgtgtcttaatcaaaacccacaggtgaagagactgcttttcaaaagacagcctttcgagagctggtcgtgtagagttgtcccttc

SEQ ID NO: 87956 - DNA, 1051 bp, Homo sapiens
atgtctaggcacaccatcttgactgcagacgcagacctcaaataaacttcctcctcgggaggtacccatttcccttatcaaggcagggcatttggctcagaaattgctcggtttctttttttttttttcttaagacagaacctcactctcacccaggctggagtgcagtggcactatcttcactcactgcagcctccacctccaggtttaagcaattctcctgcctcagcctcccgagtagctgggactacaggcacatgcaaccacacctgactaatttttgtatttttaatagagacagggtttcactatgttggccagcccgatctcgaactcctgacctcaggtgacccacctgcctcggcctgccaaagtgctgggatcacaggtgtgggccaccttgcctggcctgaaatttctcagtttctaaataggttcttggcagctcctcttctccaacttgaagttactggccaacagtatataatcatctgcagaaagaccaatatgtactgacttttcactataggaagatttatttcagttttgaggaaatctcttgtaaccctagaggataatggaattggaagaaaagtagatgctgtttcagagtcctggggtaaaatgtaaaaatgagcaatatatacacacacacacacacacacatatatatatatttttttttttttgagacggggtctcactctgtagcccaggctggagtgcagtggcacgatctccactcactgcaacctttgcctcctgggttcaagcgattctcctgcctcagcctcccaagtagctgggactataggcacgcaccaccatgcccagctatttgtatttttagtagagatggggtttcaccatgttggccaggcttgtctggaactcctgacctcaagtgatccgcccgcctcaaagtgctggaattacaggcatgagccactgtgcccggcaagtctcattgtttcactgtagcaaggacgcagccagtgttaaatcaggaggtcttcccctgtgaagttgctttattggaagccttaatcag

SEQ ID NO: 87957 - DNA, 2836 bp, Homo sapiens
acgtttataattatcacctcaacttctcctgagctccctttctactgcagtaaaatggagatgatcatttttagcccccagagttgccacggagagcgttacctgaggttgtggcctgggtgggcaaaggtgggtccgccctgtccatgcgggcagtcagactcactccgcagccctctctgtcccataggacagccttgcacaggtcagagctgcgcttcagtgacatgaccaggtcctcactcgggaaccttcagaggactccgccctgccaattatacattccccagaggccaggagtcgccttatctgttctcatcctctagtttattttctgaacaaagaaataagatggaaactgtgactgttgattttataaatccttgctgggtacagaaggaagacacaatcactcgtctaattgtcttcagcacacaaatcctgaatgcattttgacttcataaactacaagtaaattagctatacagagttcgcctgttgcctcacacttggtatctaacgcagctgtaaatttccttctttctgtctgtttgtgtcatgcccgttcctgttgtgtcagagattgcaggctgtttcctttaaagagcttggccagacaggggctcgaagttaatttcctgctagcacagcagtctgctctgagcagtcaagggtggaaatctccatgaaagtcctgccaactgcagacctcccagtatggaggaggtggtcacagagctgaccaccttttatgggatattgagggagcgttccataccacacagcaatgcagatcattgaacagttcatggtttcttccccagcaagacctctttcttgtttgaaaatgctaataaaagtggtataaatgcttcccttttgtaggagcatagggcatttgctgtacaaagaagatgtctttctatttttgaaaatcggaaagcgtaacctgagacattaatcaactcagagggaactgcattttataaatcactgttaacttacctaaagtttgacatgcaatactttaaataccaagatgagaatcatttagaatcatgggacttcctttgaattccactgatgatgccattggttcttgagttgagagcaggcacttcttttccagctgtagaagaattacagccaaacaattacagtggaattatagctgccagtgacttatgaaaatatgtgtcaagctataacacatccaaaagccccatcagaacctcattcctaggtagaaaaaagactggaagaaaatatgctcagatgttcagaacagtgaaaagcctctgggttttagaattgtgggtgattttttttctccttatattttctaggctttgcaaatgttctacaccatcacttttatattatacaataatatttttaaagcccatatccttccttaaaaaggctttgtgtaacacctgtaacagaaagaggagactggcagaatggcaatagccaagctaaggaaaactcttcttgcttgccttgggtggttcccaagatacgaagatacattcgtgtggctcgttggatttttctgacacttgggccatagggaagtcacagtaggcttttctggggaccttcattaagtctgtaagggtaggaaggcaggattccttgtctaaattcagatggattggtagaggtgcgagcctggaggcaaaactgtcaaataagtggtatgtgtcagagtatgcctgccctcactcttatcctttgtccctttcttgttagcatctagtgtcaaccagttctataataggtattgcagaaagttcaatattagcttagaaagtttaaacgtttcttcccttctgggaatatttatgttttaacataagactctgaagcacagctggaggtatgcgtccaaggcttctgctccaagactgcttagctctctctgccacaaagacacgcccagtattttcagagggaagaagtaagaaacgaaggcttggcatcttgaagtgttaaatctggaaagacctctatatcacggtagccttcatttcacagacaggaaacaggcctgaaagagcagcaaataactcggccagagtttcacagtacatagcagacctcagtcttgaactcatgtcctcagcctatctctaaccagataaatattcctgaaacatgccttaaaataaaatttgaaaatcttttttgagataaaattcacatcctatacaattcacccgtttaaaatgcatggttcaatagcttttggtatattcacggaattgtgtaaccatcaccacaattaattttagagcattttcatcgccccaaaccttgtacctctaagccatcactccctatgcccccagccataggcaacccctaatctactttctgtctctattagattatggatttctctattctggacattttatatcaggagactcatacaatatcggttcctttgtgactgacttctttcacatagcctaatgtttccaaggttcttctgtgttgtagcatgtatcaatactttatttttcttgctggataatattctattataaaaatatatcacattttctttatccatttatcagttgataacatttgggttatttccactttttgacttatgaataatgctgccatgaacattcatatacaagtttttgtgtggacatatgttaaatttctcttgggtgtatatgtaggagtggaatttctaggtcatatgagaactttatgtttagcttttgaagaactgctaaacgttccagagcactgccccattttacattcccaccagcggtgcataagatcccagtttctccatatcctcaccaac

SEQ ID NO: 87958 - DNA, 1280 bp, Homo sapiens
tgtcaagatgaagaaaatattttgacaattttctgtccaaatgttttacagtttatgtggtaagaattctcccctcccccaactaaggattttccttcttttaccactagtgtattatcatttaggggtggaatctggcaaacgagtctggaataaaggttgcttttaaaactcatctaattttcttgtgtgtttttaaaaattttgattatgctagtagttggctaatcagatcctcactccagtggtttgctctgtgacgttaggatactcccatgggatagaagttacgtatagggaatgtcagatattcttcattgtgctgacttgctttcgcttacagttgacttttgtgccctggtaattctgtatcctgtttaccgtttacctacttcccacgtcatcatgatttcttttgagggagaactgaatgaaattcccttaagggcctgacttcagcacccgtctctgcagaggttagtggctcatacttcctcccaggagctgaggttatcgactctcactgttgcctacagagcacagatcctgaactaaatgaaacatttacttggaataatgctaattctgtacatattttattccctagtccccacttccctgtttaaaaacaaaatctacttagaaaaaaatccctgtgaatcagttgtctaatgaatttagcaagttaaatgccagattgacattttgctttatagtttatacaagcatgtgtgtgtttttttctcgcagagaaccatggagtctggcagtaccgccgccagtgaggaggcacgcagccttcgagaatgtgagctctacgtccagaagcataacattcaagcgctgctcaaagattctattgtgcagttgtgcactgctcgacctgagagacccatggcattcctcagggaatactttgagaggttggagaaggtaaaaataaatgtggggagatgatgaggtgattgtgacagttgttacatttaataactggaatgttactaatttgtattttttggaagaaaaggaatctgactaaataaaaagtctaaaacaatttcaaataagaaatacagttaaggcatttgtagtaatttaaaaattcttaattagtagaatttatcagaaaaatgaacctgtatgctaactgtacttggctaataaagggtttccaaacaattctttgtaactttttaaattagtgcgtagaactataacagataaaactgatcagaactagtatagcagttctatgaataagaaattctatagttcttaaa

SEQ ID NO: 87959 - DNA, 1067 bp, Homo sapiens
tcttggatcactatgttgggcttgaattgtttttcctgataacatttcttttggcaggagggtctcttgctatctgcagtagcatccaaaaaaacccaattttcaggattttgtcttgcagtgtgttactgttgtgtgcatcacagataattgttgtcaagacattaatgaatatctgatttgttactcacatgttatgtgagtactaatggcttgtactaatgacttttgcccattaataaaggatagcatctgttatcatctgaggtacattctgttgagagtgtttcaagtgttactctctttttttcccctttggaattggtgttttcctcttaacttacattgttaatggaagaagagattggaagtgactgagatagactatcattggaacatgagagtgccagctttacatgccgaaggatctcattttgcaaactcgtaatttctttcaggaggaggcaaaacagattcagaatctgcagaaagcaggcactcgtacagactcaagggaggatgagatttctcctcctccacccaacccagtggttaaaggtaggaggcgacgaggtgctatcagcgctgaggtctacacggaggaagatgcggcatcctatgttagaaaggtagttttgatatttgaatatcggggggatgcttttgggacccacttggtggtcatctagtctcctttgatgaatgaatcataaaatacaaaacagggtggaacttcatccatcctgtacaattcttgggtactggaaaacaggtttctgtaatagcatgctgtcagaggaaataactaatagtgattatgaactagtgaataattgcattttggggtttgttatttccttgcagttgttttgcagtagaaggaggtgggcggtattgctttttctcttgaatcgtgatgtcctttttttgctatcctattaaatgttgtggcttttaaccttttattctacgagcctcatttgtcctgtgttctcctcttcctcagagccaggctattttgagttatgctgttagccttaaaggggaacagaattgtcctggcactt

SEQ ID NO: 87960 - DNA, 1347 bp, Homo sapiens
tgataatgagagaaggtaggaacaggctctttcttaacactatttttcaagtaagggtgtgatcccaaattgttttcaacacttgttgcaagttttagagctcttagtaattgttcaccagatgacagtctggggtctttaattctaagcttaatgtttgaaattcacggaagagacatgtgaaatgtaacacgaggccttctctcttttgcagtgatatttttgatgccatgttttcggtctcctttatcgcaggagagactgtgattcagcaaggtaagggcctctggagcatgcaatattgttacgggagaggaggcgagactagaggatttttttggttttgttttattgaagtttgttttcctctttgatcctaccacttttttttttctgttatactattggatttttctatttcttttaaattaagattttctgagatggacagaacactttgtattgggaactaatatttttgatacagttttgtttataatttaaaggaaatgcctacattgtcttaccttgaatgtcatatagaattgcagaatcatatatatctctcatgttctttatattgttaatcacttttaaagtaagaaataaatgaaacacctacattcttcattgtatagccctgtctattaaaaaggttctaggacttctatagattcttactttgcctatatagactaacatggatctaactttttgactatcttcctctttttattttcttatttattcttgacattttatgagtgggtatatattttcattttgtggcagcctgataatttgttattaactatttgagttgtttctaatgtccttgttataaatgccatagcagttaataactacacatatgtagcttttaaaaatttttttcagaggtattcttcaccatgagatgactaaaaaaattttgattaattctatgacttttaaaatatgttgcttgattttctttcccctgaaagattgtgttagtttgtaacacactctcacagtaccactgtaaaataagtttattgttttgtaataattttgataatttctttctttaatttggaatatgcttctaacttttttaccctcttttaggtgatgaaggggataacttctatgtgattgatcaaggagagacggatgtaagatttaccaatatcaaaaatatgttgatcttaaaagccaatgtattgatcgcttccgagcaataagaatagtgattttgaagggtcattacatcccttgtatgtcagattttattaataccttttgccaagtatttttatgacacagagaaactctttaaaggtaattttctgttcagaactttgc

SEQ ID NO: 87961 - DNA, 1953 bp, Homo sapiens
tagttgctaattgattttatttaaatcaggggtcaggagactgtaaagggccaggtggtaagtaagttaagctttgtggaccatagggtttcattcgcaaagtctcaactcttgtcatagtgcaaaagcagccacaaataatatgtaaatgaatgtatgtggtatttcagtaaagtttgatttgcgaaagagacagtgagcttggatttagcccttcatctacagtttgctaacccaagtgtgcaccctttaagcaccttagcttgatacgaagaacctcgctagcaggagatgctggtaaaatagaaattgaagctcatgtggtgactaactttaaagtcattttttatcatatgcacacatttgcaaggtagttaaaattgcataggatgtttaaggtgccaccctgggtttgagagtgtgtgtttgtttagctttttggtgattttattataggggtcagctgctgtgctacaacgtcggtcagaaaatgaagagtttgttgaagtgggaagattggggccttctgattattttggtatgtatgaattccctcacaataaatacatggtttctttaagtcacctctcagtgagatattgtagtcttccataattttgtcttctcctgaattttattttctaactgcagtcttttttggctctgagagggaaggtgtgagattttgatctttactcatttaatgaaattactgattgtctcatatctattgtcttctttctcagaagtgcactgctttaaggaaatgtttttcatagaagttagcctgttacccatctttgctttctccaggtgaaattgcactactgatgaatcgtcctcgtgctgccacagttgttgctcgtggccccttgaagtgcgttaagctggaccgacctagatttgaacgtgttcttggcccatgctcagacatcctcaaacgaaacatccagcagtacaacagttttgtgtcactgtctgtctgaaatctgcctcctgtgcctcccttttctcctctccccaatccatgcttcactcatgcaaactgctttattttccctacttgcagcgccaagtggccactggcatcgcagcttcctgtctgtttatatattgaaagttgcttttattgcaccattttcaatttggagcattaactaaatgctcatacacagttaaataaatagaaagagttctatggagactttgctgttactgcttctctttgtgcagtgttagtattcaccctgggcagtgagtgccatgctttttggtgagggcagatcccagcacctattgaattaccatagagtaatgatgtaacagtgcaagattttttttttaagtgacataattgtccagttataagcgtatttagactgtggccatatatgctgtatttctttgtagaataaatggtttctcattaaactctaaagattagggaaaatggatatagaaaatcttagtatagtagaaagacatctgcctgtaattaaactagtttaagggtggaaaaatgcccatttttgctaattatcaatgggatatgattggttcagtttttttttttccagagttgttgtttgccaagctaatctgcctggttttatttatatcttgttattaatgtttcttctccaattctgaaatacttttgagtatggctatctatacctgccttttaagtttgaaactaactcatagattgcaaatattggttagtatttaactacatctgcctcggctcacaaattccgattagacctttatccagctagtgccaaataattgatcagatgctgaattgagaataagaatttgaggtctacattcttggttgttaatttagagcgtttggttaaagtatgtccttcagctgactccagtataatctcctctgctcattaaactgattccaggagattggatttgctgtgactagatacagat

SEQ ID NO: 87962 - DNA, 1407 bp, Homo sapiens
acagagaaatagaggtgatgctgctaaagggagaaatgccaggcggacaaagttcagtgtcgggaattttccccgtgacattcactggggcatgagattttggaagaagttttttactttggtttagtctttttttccttcctttttattcagctagaatttctggtgggttgatggtagggtataatgtgtctgtgttgcttcaaattggtctgaaaggctatcctgctgaaagtcctgctttcctatctagcatttatttctctggcaaacttttctttcttttcttttttaaagtaaacttgtgtattgagtcttaactgtatttcagtattttccagccttatgtgttacattattccaatgatacccaacagtttatttttattatttttttaaacaaaatttcacagttctgtaatgtaggcacttttattttcattgtgatttatatataaggtaatgtagggttatatttgggagtgactgcaagcatttttccatctgtgtgcaactaactgactctgttattgatcccttctcctgccctttcccaggtaatttaaattggtcatggtagatttttttcatagatttgaaaaacttttaggttgttaccaagtatgaagtataaatctggggaagaggttttatttacattttagggtgggtaagaaagccaccttgttacaaattttttaatttccaaaataatctatattaaatgagggtttctgatctgtactttgtgtttagctacctttttatatttaaaaaattaaaaatgaaaattacgttcttacaagcttaaagcttgatttgatctttgtttaaatgccaaaatgtacttaaatgagttacttagaatgccataaaattgcagtttcatgtatgtatataatcatgctcatgtatatttagttacgtataatgctttctgagtgagttttactcttaaatcatttggttaaatcatttggcttgctgtttactcccttctgtagtttttaattaaaaactttaaagataagtctacattaaacaatgatcacatctaaagctttatctttgtgtaatctaagtatatgtgagaaatcagaattggcataatttgtcttagttgatattcaaggctttaaaagtcattattcctgggcttggtaagtgaatttatgagatttactgctctagaaagtatagatggccaaaggaccgttttgtattgcttcctgattaccagtctgattataccatgtgtgctaatatactttttttgttatagattgtcttaatggtaggtcaagtaataaaaagagatgaaataatttaaattcttaaatgaatcagtttttcttccctttctcctttccgtctttcctctctctgtccttccccgaaagtctactc

SEQ ID NO: 87963 - DNA, 1028 bp, Homo sapiens
ctaacacacacctgaccagtacttctcaaaactgtcaaaatcatgaaaaagacagaaagagtaagaaactgtcacccacagttagagactaaggtgacgtgacagccaagaacactacggtatcctggatagaacctggaataaacaaaggacactaatagaaaattggtgaaatctaaataaagtatggagttcagtgacaaggaatgtaccaatgtcggtgtctcagttgtgaggaatttaccatggtaatataagatgataagattagggaaactgaaaccggataaagagtgtatggggatgctgtattttctttgtaatttttctctaaatataaaggtatatttttttaaaatgtagttatatgtgtgagagattattctttgaagctgtcattttatatctgagctttcttttaaaaaattacttcagatgtatcggaacagtacaacatctaaagagtaaatttggaaaaggctactttttggaaattaaattgaaggactggatagaaaacctagaagtagaccgccttcaaagagaaattcagtatattttcccaaatgcaagccgtcaggaaaggtaaaattttaaagaatgtggttatatttctttatagagcaaaggttataaaaagttattatattaaggattaagtgaaaaatcatcttttcattcatagaccatatatatatatatctctgtgtgtgaatatatatgtatattttttcatatatatgaaatatatgtatctgtagatagataatttatatatctctctctgtattatcaccaatactggactaatgaagtctgatggctggtgttttatatctgccttagtattagatttttcaatattcagtagtatttaaatttttttaacattcttagtagtaatgagagttgttttgcatgaaaatgttattattttaaacaattttcatccaactaaataccaaaataagttattgaatttaattttgaattttaaacatgttgaactttagctttagaacataata

SEQ ID NO: 87964 - DNA, 1019 bp, Homo sapiens
attggggcctgtgggagttaattcctcttctgcttgggagaagaagttctagttccataggaagctgagcttggatatagcttttcccaattaaaaagacaagagcaacaaatatcattcttagatatttattattatttcataggaccactatggtggacatactaactgcttttcaaatacatcattcatttttatgaaattgtgaagcgtaatttatatgcctgattattctgtgttgtagacaggaaaatgaaagtaaaatgatttgcttaggatcagatagttattaataagtggcagagttggtaatattgtccacaaccacctgttaatacatctgccactcattctttcatgtagactatgcctgggttagatattctaatacattctttctgaggttttgatttttttttgatataagatatatcctaagatatatcttaagatataaaatgattctcagttccatttgttactctgtggttgtctttcaggaaattactgatatagtttttaaaattgagctgtattttcaagcagctttgcttggaatcattgttactgcaatgccaccttactttgccatggaaaatgcagagaatcataaggtaatgactcagttaaaaatatataatttgctaataagaagtgtcatataaaaataacctatttgcttgattgcaaggcttagtataattgttatttcagaaataagtaaatggaatataaatacatttattatagtttcttattgtaataagtgataattaatatttattatttgagacttgctacatgctttaaaaattatattctctaattctcacaacattgtgaggtaagttttttgttactgatttcttatagatcaggaaatcaaagatgggattgttcatatgacttgctcaggttgactcaacttgtttaaattgtggatttgggaagtgactgtgatctttatgttcttaactggcaaactaacatgcccgtcccttttatcctttaacagaggt

SEQ ID NO: 87965 - DNA, 1029 bp, Homo sapiens
tgaatatccatttgggagttatgcaagattaaaacgtttcttctaaaattaattatttgttgatttgaccttatgagttagaaattagattttacttttggaaataactagctgtctttatttatgatatatttcattacttcacagatgaccaatatataaagttacagaaatttagttttttaaaaaattatatgcttgtttaaaatattaaaatatctgtacattccaaaccagattgtctttatctgtcattgagtattatttctgtgagttgttgaagcagtttttctgtatgagaattagctttgttggtgagaaaagcttggtacatatcaataatatatccgcttatatacagtatgtaataagtgtcttttttttaattgtaggactatgtttttgcagctgttttcaacagtactatggtttattctttacctatattagtgaatatcattagtaactactatctttatcatttaaatgtgactgaaaccatccagatctggagtaccccattctttcaagtaagccaatgtatatacagataaatttccatatgcatgtcatatatataataaccattaaaaactaagcaaaaataacaaaatatgtagaaatttatcttgtgagatctcttagacttcttaaaactcaagtgagaaacggtttacattaaggtttaggattccccagtagaagtatgtttcagggtaaaggagattctgttttggtattaatatttgtataaggaataagtgtgttctatattgatcatagaataaaatataagataatttttaaatgaatattttttacctaaaatccaggtattgggtattgaaaaaaacttgagaagtcacccaggcaaccatttttcctctagatagaactgttggattgtacatatcagaatcaagattacagaaaagtatccaacatattttctcttaatccttttgattttcatatgctaaaaaataaatggacaaatatctgtaacaatattttctatcttcttctttt

SEQ ID NO: 87966 - DNA, 1030 bp, Homo sapiens
gtgattatcttttaactatctagagtttaaatctataccaatgtaggctggtcaaggtggctcacacctgcaatcccagcactttgggaggctgaggcaggcaagctccttgtttgagctcaggagtttgagaccagccttggcaacatggcgaaaccccatctctataaaaaataacaaaaattagttgtgtatggtggcgtgtgcctgtagtctcagctatttgggatggtgaggggagaagattgcttgagcctgggaggtggaggttacagtgagctgagatcatgccattacactccagcctgggtgacagaaccagaccctgtctcaaataaaaacaaaaaaagtccatatcaatgtgaagggagagttttaattgattttcatattaatgtacctttgtaccctgagctgtgttgttttttttttcttttcaggttgcttctgcttttaatttttttcacagttcagatttttatgtttttggttcatcactcttttaaaaatgctgtggttcccatcaaacttgttccagacttatattttctaaaacctggagacaaaccacataaatacaaaacaagtctgcttcttcaaaattctgctggtgagagtgtgtgaaggtctgtgaacgagtgttggcatggagcatggggttgaggggtggataaaggtctggattttaaaactatatttaaggtaaaggcatggtctgtctgcatgaaatctaaattatagttcaatacgtatcttattgatgctgaagaatatattacagtaaattttggtttacaaataaatgacagttttggccaggtgcgatggctcccacctgtaatcccagcactttgggaggccaaggcgggtggatcacctgaggtcaggggatcgagaccatcctggctaacacggtgaaaccccgtctctactaaaaatataaaaattagccaggcatggtggcacgcgcctgtagtctcaggtactcgggaggctgaggcaggagaatcgcttgaacccgggaggcgga

SEQ ID NO: 87967 - DNA, 1039 bp, Homo sapiens
gcttgttctttcagaagcaaactttaattttgttttcatactggtatatatgaacattgcactaaccttaatatttgtattttataggtattttttgctttaatgctgacacctctttttaaaaaatcaaaacatgtgggaatagttgaattttttgttactgtggcttttggatttattggccttatgataatcctcatagaaagttttcccaaatcgttagtgtggcttttcagtcctttctgtcactgtacttttgtgattggtattgcacaggtaggtaatatattaatcttgcattcactaaatattttctttctgttttatgtagcttcttatactaccatgaatactacctttgatttaccaaaaaaattattttaaaattttagcatgaggaagaaatgatttctagagtatattttatatctagttttatttatgtttgtccaattttaagtttttagttaaatgttctgtttataaattttttactttttacttcagtgtatctcagtgatttatttcactgcagaaactcagtttgatagtaatgtgtttaaatgtcaagtaattcttattgcctatggcctggttatattgctatcatttgtacatttatctcagaagaatgcatgggagaaaattgtgtgtggagcagaacaaatttaccgtgagtgtagtggtggaataagtaggcctggtggattttgttggcccaggcttcatggaattgtcattcaaaataacattcagacttacaaatattatttttattagtccttacaggagtagttaggttctaaatggaagaagtcttataagaaatggctttgtagtggaacatgaatttggctaatgtacaaagaaaaaaatgtaattactaaatataagaaattactcatgttggttggatagaagttctgatttatgagatataattaaatattgagttaatcattttacttttttgagacctgagaatgattgttatacattttgagagttcattgagtccccgagtccgcgttctctagga

SEQ ID NO: 87968 - DNA, 1029 bp, Homo sapiens
tttctatttgttcccccttctactttttgcttccctgtggctgctgtttctatcctccagccagagagctagtgtttattttctccattgtgttacacacttgtgcagctgcaaccaccatatccagggcccaatggtaggaggtagagaagaaaagcaaaagggattggcctcatcctcttacaacgatagttccattgaatagagagaaaggttttcctgcctcagagtgttggctgcactaggcttttgttactgtagtctggccctgttaccatgggattgcttgcatgtggggatacaggagaattcagaaaagaaaaaaagatttgctatttctacattctccctgagcattaagacttcccttgcccattcctcaattcaaagctaaggcttcttctggagctgcctctgtgggcggttcgggagataccaaaggagaaaaagtaccactgttgatatggtggtatttcaaattctggtctaccctatttcacatgccttgtttacttttcagagctgacagattgctgctccatgcattctgtccagtttcctaagagagacagcttggagtatgcttaatccatcttacctgggactgaaacagctgcttattttgccgttaaaaattacatgcagtttactgcgtggctccgggtttgtttgtttgtttttcctctttaataggtttattcagaaaacatgtccactgcaattagggaggtaggagtttggagacagaccagaacacttctactgaagaattacttaattaaatgcagaaccaaaaagagtagtgttcaggtaagttaaataactctttcttatgcttttttgcagtttattttgcttgatatattctatcttgaagtgatgatttattttgctaaatatatttttattataattttatttttctttgcttgtaaagtaaaagcttgccatgttagccacagaaaaataactgaattacttaatgctttctaaatgttaaaaattttaataataatttctacatttagt

SEQ ID NO: 87969 - DNA, 1048 bp, Homo sapiens
tgaagaaaaccagtgatcagatgggcttaagagattttttttttgtttcaataacttgaattgaagctcaagattattgaaagttaatattttcatatgattagactaaagcttttgagtataagaaaaatcagattgttgaggtcattcataatactgagtcattggtataatttgatgacagagttaatactttcatcatttttttctctctgtccttttgcaattcattctgtagggtttctttgactcacgcttcaatttagctcactaattcgtctttaaatgaagttcaccccatcttttagtgcttttttatttctatcagttttttatttcatttctaagttctgtaattgcttttttcttaattatctttctcttgttccaagaatatgatattctctattactcttttaaggatattagttatacttttatacacaatcgtgatcaatgtgtataattagttgccatgtacaagccaccattttcagcttttcatgtattaattcttttagtcattttaacaacccaaagaggtaggtactactattgttgtattttacagataataaaacttaggcgcaaaaacattaaataacttgcccaaggtcttgaagttagtatgtagcagaggcaggattcatgtttagttggtttggcttcagaggtcatactcttaacctatactactttgggcattattagttcttatgtttgttaattttggtgcctttgtaatattggttaagatgcttttttgcaagaaatagaatctgatactggttagcttaagtgaaaatgaaaatatattgggaagataataggacatttcacatactccaaggaagaaaaatcgagttgtgagcacagtaggtgtggtacattagaagaaagcttagagtaagaatgtgtaaactttctttcttaaatgttgccattcatgtaattcagtttccttgacttccatccagtctgtgggtctcttagttaattctgccaagagaaattttaactgacacagctcaagagtagtggtggtggt

SEQ ID NO: 87970 - DNA, 1022 bp, Homo sapiens
tcaacacactaaactcccaaacagaccttctcgacaagccaaaagctctttagctaacctaatattctttagctgttgtttcagaggcttttcgagaacaaaactgccgccccgtcttggccttgccgcttttcacccatcactctactgagtgtgtgtctgacttgtttatctggacgcaatctttgtcgcacccagttatctcgctcagcgaccggggcgaccacgtttccttaaatcagagccccgtggactccgccggagaactacattacccagcggccttcgcgcccttcgcaggaaggacgtctgcgcactaagatactcagttccaagtttggagcttttagctgccagccctggcccatcatgtagctgcagcacagccttccctaacgttgcaactgggggaaaaatcactttccagtctgttttgcaaggtgtgcatttccatcttgattccctgaaagtccatctgctgcatcggtcaagagaaactccacttgcatgaagattgcacgcctgcagcttgcatctttgttgcaaaactagctacagaagagaagcaaggcaaagtcttttgtgctcccctcccccatcaaaggaaaggggaaaatgtctcagtcgaaaggtaagaggctgtttgcattagttgcaaaaatgcaaagggttgtgcatgcatttatgaatgcatggatgcaattttcgcctggcgagtgcatttttaagtttgaggttttccacagctcagttgcatttcctgtttagtatgtgtctttttttgcagacacagagagttcctgtaaggcagggcttgcagttcagctgtgcattgacgttatttgcattcttctgctaggattactgagctctttttgccttttgcacagtcaggagagacagagcaggttggtagcgtctaaatgtgcaaggctttatataattgtaaaattctttactatgcacagatattgtaagtaattttgtatgcaacaggaatagaaacttttaaaaactctata

SEQ ID NO: 87971 - DNA, 1050 bp, Homo sapiens
tctaacccaagaaatgggaggaaaagtgaaaagtggatacaatctcatagtattgaagaatttaacaatatgttcaattcaaggacctttacgaactttctagatcactataattcggtttaacagacctctaatttaaggcacagcagaggcaaaggaattacagactctctggaagctggaaggactgggttactgctctacagccttaccaacagtgagattccgagaaagaatttcttaaaaagaaattttgttttccacagttgtaactttaggtggtatgcttttcagcttgtttatattagctgtctggggttgagttgacatttttcaaatattaaagcagtagaatgccttttgaggaaatctgaaatgtaagttaacaggaagggcacccagaaagtgcaggaattcctgcacactacaggaagacaagctacaggaaaaatgtgtcatctacactacccgggagagaaaaactattgttatcagccataatgatctccggagggagggagagaaagagggaggtagggagatctggcatcccccagttcacctgaaaatacacaaaaagtttgaccctgttaaaatacacttttctcacttctcctcctattcacctttaaaaaatattagtttattttagttttagagagcaataagtaaatcatgtaagaaatgcctatgaggcacaattcagaagcatatagcagagtggtaggaaaggtcttaactctactggggttctttgcttctgtaattcattccacccttgggaaatgaaatgtgtaaatttcttgttctctataaattcctttgttaggttgtaccagacggacttgtcatgcttagcctgtaatctgagccagtatgttttataaccccgtacatctcaggacacaaaatcagaataggtagcttgggtttcctgagcttgctttgtattagcattgcattcagttctttagagcatgcggcctgttaactgtagggggcttcaggggtctctggttggtaaatttaatgttggagaaaagagttgag

SEQ ID NO: 87972 - DNA, 2065 bp, Homo sapiens
tgaaaaaatctttggcagtttgatgaaagctattaatattctactctaatattattagtgataaggcagttgcatttttcagtttttttgacatttgtgtttcatgtgcccaaatttctttttttctcatgaaatatatccttaaaattttaatttgggtggccaggcatggtggctcatgcctgtaaccccactttgggaggccgaggcaagtggatcacctgaggtcaggagttcaagaccagcctggccaacatagtgaaaccctgcctccactaaaaatacaaaaattagtcaggcgtggtggtgcacacctgtaatcccagcttcttgggagaatcgcttgaacctgggaggtggaggttgcaatgagcagagattgtgccactgcactgtagcctgggtgacagagccagacttcatctcaaaaaaaaaaaaaaattaattaatttggggatcaaattattttcaaagttagccagaaaatagcaatattgtagaggttaggtaatcctggattgatagttgggttctgtgtatctaaacaatttaattccttgatgagttctaattttaattttaacctaatgtcttaagctgctatcacatattttataaactcattttatttatatagtctatagctatccagacctatatgaaaataataagaaaaatgtagtgatctgattaaattccagtctgagaaatagcttacttttgggcattcctgcattttcagttatcttttcaggcaaaattagtttttctttaggtttataaataattcttacatagcacctggttgtgttatatgcattgttgcagagaaatttaatctaattttttttagcttcctgtgcaatgcctaatcacaaaaggtggttgacttaaatttcctacatttgttaaaataattaagtctagaatctttaagattcttgttaagaatcaattttaatgacctcacaagtcatataagtcaatcagatttaacatatccttaacatagccttaataaatgcgcctatttatgcatcctgatattaagtgatagaatttagagctatgaaagttttatagtccaatcacttcattttacacataagctaactgaggccttggaagtgagtgactttcctgaagacagtagagtggagtcacagggagaagtcagatctacagattctctgtccgtaagttcttttcactaaaccacacgtgaacactaataatccacatttataaaatttttttttcttcagaatctttagtatatttcacatttttagctttgcttgtttttgttgggagcagtctggcaagggggagctgatggtataatgagcaggggttatttttctgtgtccaagaaatggtgacatgtgaatcatggtggtggggtttcttaccagttctctgccaaaggatattttgcaaatgctctcattttgattcccagtgcctacatagtacagctgcaagttttaaccactgtaatggttgtttgccttttatggactgtcttgtttgaaagcccttgctgggtaactaaaccttttcttatatatctttacatctctgactcttatagcattgtccttataaataataggtgctcaaaaaatgtctgacaatgaaagtatttttcatcagtagggataagctctcatttgctcctaagttttatgaaagatttcgggtaattaaattacaatgcaattttcttcttgtgcttcttctttgtttgcactgatattcccattatgtatttgcttaattatttggaagttgcaagaacagcatgaaaagcaacttataatggctggcgaagtgtcatttctcctacctaagccttctgaacagatttaaaggttgcacaattctctgctaactttctttttaaaaaatatgagaagatgaattgtccgaagaatcccatccaatagaattgaagtgatttctgcatcctgtgctggttttaggagctggtttttaagtctatgaggcttctgaaggattgtcagagacaatcctttttttgttgttgttttttgtttttttt

SEQ ID NO: 87973 - DNA, 1051 bp, Homo sapiens
cgacaaacaaagttttattggaacacagctatggtcattcatttatatgttttccatggctgctctttgctcgacagctgtcgagttgagtagttgcgccagagcccctatgtcccacaaagccaaaaatatttgctatctggtcccttgcagaaaatgtttgttgaccctttcctttatgactttattccatcgaatactggggtctcttcatgacagagctcccagaaacattcctctctggctttaattggaagttgttaacctggataactactgctctgctgctcagccagagacctcttgggcccagcccacaggaaacgtctgagtggtgtctctcctagttataagaattgtaggtcattgctcatttcctctgaactaagttacccgtctccttttgcccgtcctggggtcttttccccttagttgtgttcttcctgtttgctttatatttctttcctttttttcttcccttcgatgagaagctgcttattaattcttccctgagactcttcatcctccccttattgatcccacatttctttagaaagtattaggttggtgcaaaagtaatattgttttttatcatcacttttcatggcaaaaaccacaattacttttgcaccgacgtaagaaatcaaaaataactctcctgctaccaccattgcctggcttgttggttatcatcatgacccagctcagaggttccatcatttcttttgtgtcaacgtgaaagcctccctgcatgggaccagagaggtttccagttatcatctcctgcaaagtttagagctgttttcttacattaaccccctaaccccgggtgggcaattttcttttgaggacgaatattctttgtgctcacagagtcgcttacatcgtggatattgggtatatttaggagagaaggttttgatagagggtctgaaaatgaagggaggtgaaagctacatgtagacagaggagctttggtagaatgagcccagatttgttcaccacatccagaatgatgtaaatttaagtcacgtacaaagaagtgctaatt

SEQ ID NO: 87974 - DNA, 1954 bp, Homo sapiens
aagaagggctgacctgtgtctagctatttataggttctttttgacatgtccctttatatgtcttttgatcacagagtacagagtctgactcattttgactcttaaggttgagttccaaatagaaactgcccattggttgaaggaggctgattacaattggcccactgatagttactggtctggatatacaggaatgttatgttaaaatgtaggtaacaaatattgcttccatttgctgttctgtaggttgtatcacacagaaactaagccgactcaaaccttgtgtgtttccttacacatctaagttaaattgtattaaaactaacaagaacgtggccagtgtggcagcatacctaagtgtggggattttgcagcccctttttggcttagtgactttttttcttcctggttgtttctatgtaaatgtaacaatttccttgaaatgatgaatgaacccacatctccagtgttttcctcttgtactggacagagtggaggaaactggaattgcctgtttttgtggcagaggaggtagatggggatggaaatgaatttccttttaaagcaatgaattctttttttttttgtttttttctgagatggcgtatagctctgtcacccaggctggagtacagtggtgctatctcagctcactgcaacctccgcctcccgggttcaagtgattctcctgcctcagcctcccaagtagctgggattacaggcgcccaccaccacacccagctactttttgtatttttagtagagatggggcttcactgtgttggccaggctggtgttgaactcctgacctcatgattcgcccgcctcggcctcccaaagttctgggcttacaagcatgagccaccgcacccggcctaaaccaatgaattctttctcggctttctctccagccaaagcagaacagctatacctatgcctcagttgtttttcatgatcccatgtcgaagctgcggaaatagatggtctggttgttgagtgacaagttatttattcccttcctttattctccctcctccaatttcaaatgggatgagaggagatagctgtaagcgtagggctagaatctgaagaatcagtgggaacagaatagttcagagtatggaaattagtttgaagtaaatgtagagataacctttttgtgatatttgtaaaccttgcgaggcagtcttcacagtttatttaccccttcctgtacccgaaacacctttgccatttgaaaaaaaaaaatcacaaactctgcatatacctaaaaagaggacttggataaggagtttgtttagatcaattcaacaaaggtttttgtttgtttgtttgcttttttcattcagggtcttctatgtggcccagtctggcctcaactcttgggctcaaacatcctcctgtgtagctgggattacagccagtgccactgttcccggctcaaataatacatttttgatctattgttatgtttaagacatcatgctgggtagaaataggcagaaatgcatttgactttactcttccagtgattagccatgtggccttggaaaatctacttaacctctagcttcggtttcttcaccttctaaataaaaagactgacactcattcacgaggtctttatgaagattaagcaaggtcatatatgtaacatgctttggccagtgcttggcattcatttattcaacaaatatttatgagtgcactttatatttgaggtactttgctatagtactctctctataaacatacatttgcttcactcttcctttccttccagcccttaaggaggttattgtctaggaggaggtaagaaaagcataaaaatgtgtagaatctaaactggaatcctagattagcttaaaagaggtactattgagtgggaaagtcctatgaataagagagagatcaggaaagtgttgacaggtgtggaggtatcaatgtgattttt

SEQ ID NO: 87975 - DNA, 1044 bp, Homo sapiens
aaaatacagttctaagagataaaaagataaacatataaaaataaaaaggaagataaaaatacaggataaaagataaaatatttaatacaattaatagattaaatacattttttcttttattattttggtttcaaaaacagagtgacgtatagctctggggctcacagtgggctgtttctctgtgaacctagcatttaatcaccttctttccctcaataactccatttaaacagagtcagtacagtgtgaaggaggtgaattgagtcacccctcctcagattcatgtaagccacagggcagttttggcctcactttgctgtgtggttaaagataacatatgacccagccaggtagaagacctgtcagccatatcatctcattcaagtggcctgcaaagtcttcttgcttgggactttgttcctgaatgagcctctatttttgtaaggaaagtagaggaaaacaatgcagatttaattctgaaattggtttaagaatgggattgagaaattttgatatattcagtctggaataattgttttccatcccgagtttcattctttctttttgatgtaaccctatctaaggacaggatagctagtcagtgttgagcaagacatggcaggtagaggactagctgtctctggattgcatttaacaagcattatagaacaaccaaataaattatctgtacctcactctgtgctagactgatacaaaaatgaacagaatcctcttactaccctcaagaagctcatattctagtgggatgtctatgtttgctagagctactgtaacaaagtaccacaaattgggtggcttaaaccacggaaattaattgtctcgcagttctggaggccagaggtccaagatcaagttggcggcagggctggctccttctgaaggccataaggaaaaatctgttttgtgcttcttccctggcttctggtgtttgctggcaatctctgcatttcttcccctgtatactcatagcccagactttgccttcatgttcacatggcattctgcctgtctgtgtctgtatcc

SEQ ID NO: 87976 - DNA, 1040 bp, Homo sapiens
aagtcattcctcaggtccctttcaacttaaatgttctgagaattgcagagaaaattgcttacatcttctgttttcctatgaggtctccatctctccctgccctctctcattctcaacagttgagtttgcctcttttcttaaaaagattgagtctatctaaaatagatgcctcatctccagtcatacatccatatgctgacttcccatctctctctctgtatgtgtcctttcatcaattctcgatttcctctattctgagaaataacaatattaccatttattagatgcctgagatttctagcattctacagagttgtgaagaaggttcagagatgataaatgtaaggtcaggcttattatttccatttctggggtgagggagttgaaggttgaggaggtcaaattgcttttctaggttgtgtcaattagtaagttgtggtgccagagtttgaacacgtctttctgatcaaagggactttacttctcttgtctgatgttatctttgctctctgtgcaccaaaagccatctcctccacaccacactccaccctgttcttctgtgtatgccctcttgatttcttcccttctttttctaatcatttcttttggtattaagtttgcctcctgagaacaacattcccttaggccagctcgtcttctagctaaaatagctactttagctgctaagaataggaatagcatttcttgagccattacattcacacaccagacactgtgctaaatactgtataagtgttgtctcatttaaatttcataatagttttacgaagttgctactattattaccattaaaaagggggaaaccaagccttggaaagggtaagaaattatccaagggcatatagttggaaagaatctgaatagagacttgaaccctctgtactttctttttttttgagatgaagtcttgctctgtcacccatgctggagtgcagtggcatgatctcggctcactgcaacttccacctcctgggttcaagtgattctactgcctcagcctccagagtagctgagattac

SEQ ID NO: 87977 - DNA, 1082 bp, Homo sapiens
cctttgtccctttgtctttcaacatgcattacctaaggtgtgtatttagggcaaaaagcacaagttaaatctggttctgccaattgtaagctgtgtaaccttgaatacttgacttaacttcagtaatctcagtttccccatctgtaaagtggggatgatgataatagcaactgcagaggtttgattcaaggatgcaataagtttatttatatgtaatacctaaacatatctggcatctaatagagattcaataattatagctcttggtcttctattaatataaaacagtattttccatcctattgctcagtcccaaaccccagaattttcctgcttgattttccaaggtgttttattgtctcttcccacccagaccatccagtttatattcagcttgtttttcacacccaaacatgcattctttcctctagtcagcctcttatctttatttaccttgaatttattgtacctctctcataccttatgtttattcttagaatgtccatttcccctccttccccttcaaatcccatccatgcatttgtcaggcctcagcacaagtgctggagtcttctgtggctgttcccttctgtcctgatctcttcctctgtgaacttcctttgaacttggagtaaccaagcaatagaccatggcagtgtaaggcgccatggaggctgtgtagttcttcccatttggccaggttacaagcttcaggaaggttatccgacctgtttgtggtagtgttagaccctgccctctctacgtcatataaaatattctctgaatcctatacactttgttatattattgaccattcagttgataaaaatctgagcggttattctacagtagttctctgaggtagttactgaagaaagaaagatgggtaaggaccagttttatgtacttgcatgaagtttgtgccctaggtgccacacttgtcttaccctaatccttgccctagtaagactttcacttgtcttgggagctcatcactggggtttagggtaaaggggttgactgacactctcaaaaccgagggaagcacagtggccacagtagagattccgataatgcagaga

SEQ ID NO: 87978 - DNA, 1073 bp, Homo sapiens
caccatgcctcgctaatttttgtatttttagtggagacggggttttaccatgttgaccaggctggtcttgaactcctgacctcaagtgatgtgcccatcttggcctcccaaagtgctgggattacaggcgtgagccaccatgcccggctaggaattggaatttgatgattgcatggaaggcagttgagtaaaaggcattggaggaggaaggagatgaagaaagaaagaaatagagcaatggcttagtttgggccattggggcattcagaagggtgagcattagtgggccagggaagagacagttaatgaaggtgtactaggagtgagcaggagctgagggacgcttattcctagcggggagcctgtgctggggagacttgctgaaggagagactgggctgagtccaggggagtgcagaactgccagactgttgaggtcagttggcaaacagggctgtttcaacccgaaattgagaggctgcatctggaatacagcagaaagaggactgagccgttcttggggtagagatgaagggaagtcagcccgttagcctgggactgaaacagggaggcatctttaaatgcctcttctatcaataaaccctgacagactcacctaaatattgttacagcgtttccctaatttgtcttgttgtttctaatgtatatccccaggaccccttaccccactagcaatggctcaattatctagccctgtagggaaatattgtaatatggttttgtttttgttttttttttttttcaaattcaagtttagttttctgagtgcagaggcctaatttgactctgtttttcactggactctttctaaaaaatcactgtcttttttttcttgtcacttaaatgtagtctaactttttatttaggaaacacagtcattttgcttgtctgcagtgcatggagagtccgttaaggttgctaaggtgcggacctttctgttcccagcccgaagctggaggtctgtggttcccccatggctgtcttgctgcttgctgccgagtctgcccatcactgccttggcctcactcccagttgcagccggccctggccagg

SEQ ID NO: 87979 - DNA, 1059 bp, Homo sapiens
ttagtacagacggtgtttcaccatgttggccaggctggtcttgaactcctgacctcaggtgatccacctgcctcggcctgccaaagtgctgggattgcaggcctaagccaccacacctggcctttctattcttattttaaagatacagcattttacaagcagtaggcactgcatgaattcatgtagtttgatttaaaaatgaatcacaataaagtactcggcttgactctgagtctgaggcagtagcatccgaaaaggttggtctccaagttgcctggccaggaggtaaccagatggtgcacctgcaccctccccttggaccagcaaaaattgctcctgtttccacaagtgcttttttccttgatacagagacccttgggtttgggatgaagccttagaggtcatgccctgtcccagccttcatccatgctttgcctctctgaaacaatctggaagtaggacgtgggaggtcaaacttatgattcacatttggggcaacggaatgtcttttccttgagacatttttaagacttgtacttcatgataaagttgagctaggaagtggggccaatttttttttttttttagtttattcattaaacacatctcatgagtatactttttgccagttactaaaaatataaataagaccctgccctcagagtagttacagtctagacagtagagttttgtaaacagaaatatgtaataaaatataagaagagcactatgatagaaagtatttatgacacatgcagacacacaaaaaggagggttctgcttcacctttgagtgaaatgggatgggtggaggtgaatcctgaaaatgtttatggaagagattttatgtgagctggatccagagcattgagtaggtttgcatgagtcagacagggaaaggaaacatactctagacagagaaaacagcgtgaataagggcacagaacctcagcgcatcctggaggtctgagatttgcaagaatttgtcatggctgaagcgaaggcaaacaattagagttaacaatagcgaatggtcaggggctatcagtggtgtgctcaa

SEQ ID NO: 87980 - DNA, 1029 bp, Homo sapiens
acttaactgtattttgagtggaataatttgcaactgaaaaaagtttacaaaaataggattaatttctgcagaaaatgttcacagtaaaatgccaagggataaaaatggtattaaaaattatatacacagtatggtcttaattttaggagaaaattctatatctatgcaagcatatatagttataggtttgtgtacaaaaatggctgtaaagtaatacaccaaaatactaatagcagttttgcctgggtagtggaatttgggtaatttcagctttcttccttatacctttctttattttctaaattttataataaatattttctttttgaactcaggaaatctatggtatttatttttcaaggtaaatttttctttaagcatcagtggtaaaattacttttgtccccctccagtgttgaagagtgcaagaaattgggagtcctaggtttgaaatgtttttagctaagaggactagagaatggcagttaatgtacatcaatgataattgatccaggagacgctttggagttgacttaaaatgtaaaaatgtgttcagggttcaatatatctattttcaaggtgttattgatcagatctgtttggtttcatcacctctggcagatgttccagtggtttcttaggagagcctccctctaccctggtatgtgtgatcgtaagccagactttctgaatgcagcttaatgcccaagaccaaaatagactagtgagtcacttggacatattctgaatcaaagatttaaaaaccaaagcatgcaaataaatgctcctaatgccttagctcagagtaaacatcagttaattttaattttaaggctagccaaatggctattgcttaaggcggccagagtgatgttaatgtgaagagctggctccgtatgggcaagggctacatgttttggtgtgttatggtatttatggtatgctatttcattttaattaattttgtgtattctctatgatactaacacaatgttgggcatgtacaaagtgctgagtcaatgacagagac

SEQ ID NO: 87981 - DNA, 1036 bp, Homo sapiens
gtttgttttttttttttttttttaccagggtctgtgtgcaagtcagcaacgctcctgggatcacattgcttcttctgtgtttctttctaggtaaactagctcttgaacttagaaagaaacacttttgcttcctggggttgagggcaggagacggtcgtggtgagaatgtgcttaaagacaaagacaaaccagctggagatggtccttttaagtgaaggggagaggaagccgcaacaaggagggaccacctattacacaaagcacagcgtttcttaatctctgcactcatgacattttgggctagagtgttctttgttgtgcgggattgcccagtgcattacaggatgcttagcaacatccctggcctctacctattagatgccagtaacaccctgccaccagatgtaacaaccaaaaatgcctcctgacattttccatatatcccctggggagcaaaatgacctccagctgagaaccacccacgtagactctcagcatctaggtacctacaaaaccatcggtgggagttacacggactcattcatttcactcagcacacattcccatatcaatcagactttgccgcctgttaattcctctttctaatgcgctcttatttttatcctcagttgagatgaaactttctctcataggttgtctggtcactgaggtcactaggtcctaggtctgccctcagttccaggttgaaacttctgtcctcacatctacctgtagcctgtctcaggttccctggcttccacccacagcattgcctggaacaaactggtaggctgattttaagttgttttggttcaaaaactttctctctctcttttttttttttttaattttatttcgttttaaaccacagtttctcaaagtgcctgaactacttcgctctctcatggttctgtaccttaccccgtcatgcttagcttcggagggtgaggcagagctcacgtcacacatgctaggtctcatttgctcaaaatgatcccttagctcaaatcccagcaacctaacaatcagttacatt

SEQ ID NO: 87982 - DNA, 1161 bp, Homo sapiens
ctgatagggatacttaatccctgtaccaagcagatctattcatttgctaatctcatatattgattgtcagtaagacattaataccatgttttttctttttcttttccagcaacatccatttttcaccctacatgaatccaaaggaacagatgtggcatcttttgtaaaactgattcttggagactaaaaagcagtggacttaatcggttgaccctactgtggattggtgggtttcggggtgaagcaagttcactacagcatcaatagaaagtcatctttgagataatttaaccctgcctctcagagggttttctctcccaattttctttttactccccctcttaagggggccttggaatctatagtatagaatgaactgtctagatggatgaattatgataaaggcttaggacttcaaaaggtgattaaatatttaatgatgtgtcatatgagtcctcaagcttctcagacttctcttattctttacaaaatgaatgcattggccctgacaaaaaggtgctacggtagtgatgaaattataagtagatttgtagtttgtcccatttattattttaatatttatgtttaagtgcttggttgaaaagattccattttatacaagaagggagattcaaaaaaaaaatataaggttgggttagcaatatttatagggcttttattttttaagttcaattgtgtctgtggtccagaagaaattatttaatatgcatctttgagaatattataaaaatatcaaaaaggagctcttcttgtgaaatgtctgttccagctgttgtgactgctgccatttttgcaaacatctgcccaatcctgggtgatcaccacatcttttaggggaagtgacaagatgctctggtcatactctttttcccaactttggaaaacataaaaatcactcatataacagctcaaagagtaaaacatttggttcttctgacacttgtggtatagtattagtggaaagtgatttgtaatatgattttatatccacctacctattcatctacctgtgtgtatgtgtgtgtttgtgtgtctatttggcaattcacaagtcctgccaagtggtttctatgagcatctctgtttggtaaggaggacaattgtcagttttgagggggacatgtgttaaatcacagaaaa

SEQ ID NO: 87983 - DNA, 1069 bp, Homo sapiens
catcagtaaatttcaattttaaggggcctatgcaaaatgcctcctttctgatgtgattttcttgggttgctggccctagttgaatttatgggccctgaagcctctagtggaaatcttgtcttccctatagaacgagaacagctatgtaatttgcttcaccttctgttaggacttgcaccctctttgccatacagaatgctataaaaaggacagtctgccagtgaccgaagctttctcatttttttttcttccagaacaatagcacacatcttggttaaagctatagtctccttattattcagaaatattctttttcctgctgcaccattaggcaaacatacattatgcttagaatgatacttggaaactccttaacagggcatattgaagtatttgatccagcaacttacctaaaagaatgtttgctcttcacctagggaaataaaacctgaatttcagagccttcaaaatgaaattatccttccaggggaagcacattgccaccaaatacatcactcactacctgttcctggtgactacatagaagatgtgttatttttctgaggtttagaaagtcactgtttacagctatgcaaatattgtactattacagatttttctaatgaagtagtttgaaatcaaggctttagtggaaggtaatcttttcagtttctgacccagatttctttttcaagcaaaactcctctgaaagcctctttgctatagaggtgatgaaggcacttgctagcctaagcagaaacataaagtaaaaaattttgtagtagggaatttttgttggtaagaaatcagtatcatcttgtaacacaaacacgtgttaatagaacttaaaaatactcagcctaattccttgggactttcagtatcttgacatcacttgtattatcatttgaacttggacattgagccctttatttttgggagtttacagttaaattttggaagaattgtgttgtatttctttcttagatgttgtcagtatgaacagaatttttttgtgaacagttaatcttgatgtgctccatagctttctccagtttacacttttgca

SEQ ID NO: 87984 - DNA, 1692 bp, Homo sapiens
ggaggtttgattaagaaaattgtgtttatctcctgtattacctctgtgtttgatttattctttagtctcaaatttattttctgagtggactgattttctatatgaactgaaatgatgttttaatagaataataggtatttttagaggaaaagtatttttttgtgtaatttgcttacacaactaggacatacttcctatgatactgaatcatcaaattgagtcatttaaagctgaaagaggtgttaggaatgtagtttcacattatttaaatacatgaacagttttctatatattttgtgaaaatcttgatgagacactagaatttctttatggaattgaactttacaagaattttaataaaagaggtggatttcttcagctttctttgtgcttcagtttcatagctgaaaatgctgcttccgtttattaatatggactttgtaaggaaacacaacaacacgttttcttaccttctgtaaattttgtgatagacacatgttatttgtatatatgattgattgtttgcctgttgcaccctaaagttattttcaaaccatgtttattgcaaagagagcctttgggcaagtggaaaatgccctgatgctagaatgaggtagttccataagctagttaggagcttgctacctcttcttggtacctgaaatattctgaaaggatatcggagaggtcctatgcacccctgtctttcaaaacccacctccagcacttcaaagtagtgtctctggagagtttaaaataaaagaatgaatgctattcagtggattccctcattgaggctcccatctttcctgccaggtgcagctttttctggttggaatcatctcttctttacggattgccgcattgtctctttgtgaatgaggcaggctgaactgtagagcatgaaactcattagaagtttataaagtaaagacctgtaaagcatgtgggtggaatgtttccatgctcttgaggtgaatattaaatttaaattctggcctttgggaactctttgcttgtgagctgaagaaggaaagaaggagttgggggtgtatatctaactgtgtttttctatatggaaatatatgagcatcaagtgataacttcaataaggcctcaggattgtatttaaaatacctgttttgtgggacagcatgcctttgttttctttgcctgttggctttggtggctccaaacattttcattttaggctagctttcctgtcacccaggttgtgtgcattttttttttcatttgaactattgtttatcattattaatgatgttatctccaaatcccaaagccaaggaaatagccagtatgcaggacttgcagtagatataagcattggtgttaacataggttaagttttgttagtgttcccagaaatatactgaattgagggataatgtagctttaaagaaattatgtttctttttaacatttggagaagccacctgtcctgggtccctattcttgagaaattcatcttttcatgcaaataacattgatgggggacaagactggatgattgacttctatcagtcagtagacaaggaagtataataattgccaaaggtgagggtaattttgccttacaagtatgtaggtcattctgtggtgggatttcccatcacatctagtaaaaaacaaccttttcatttccctcctttctaatccaagatcatattt

SEQ ID NO: 87985 - DNA, 1029 bp, Homo sapiens
gatctccacacaaacctcaagtctgaaaaataggacccccaaaattatcccttccaccccccaaaaaaatcactttcttagttaacagtgcattttacttgctcttgcaaaaatctccctgccaatgctttctttccacaatcagaatcttttacttttaatgtaccaaaggaaacgaaataatatttattgtgtctcttgcatgtgcttcttagaaaaatggcattagcctcatatggaaatactttgacagacccctgaaaataattccttaaccacaaacatgtcctctacttgtctgatctcaaattgcctcaaatatcacaatttcaggtcagatttaaggatatgacaggcactatcagtccattacatatgaatgatatatgaggtagagggcagaggtgctggcacagaagacggccagttgtggggaagccccatgcctggttccctacagtatctgcctccctgggaactttccaggcccacctgaagacacttaccagccaacggcttcctctgcacaaaggagaagaggaacaatggaagctctctctgtgttcatcatccagataccatctcggaacctcactggagcacgattattggaggcaaaataacacagataggatttcacatgcgagctttggatatggggctaacaaagatagagggacacaaacaacccctctccctgagcccctgccttcctcacaaccccttgttgctctttcgcttccaacttctaattggcagacacctgatctgcatttcgatttcattttctgagcacacatggccacttgagactccctgatacgtgtgggaaaggggtggccatgttgcctgcacctgttgcggagacctgcccgccgcccctcccttcctgccacccccattgtgtgccaccttattctgtttcagtagcaacagaaaagaagtcaaagtcaccggcattcaacaggaacacatacaaaaaggaagccagaaagcttccttgtacctcttctcccaccaccctgaaaa

SEQ ID NO: 87986 - DNA, 1033 bp, Homo sapiens
ccatatccctgttactcccatggaatgactgtgatggtacctgggtcaacacatacatttgggcatctacacagcgccacattgttttccatttataacttatctattttgttatccatctaagcacccgttaatcactcattcatcacaaggcctctgagactatactacattttaattatgtttctagggaggaaggatgatacagacctgaatgagacacctctgtagcatttggggcttccctgtacccatcctcattcactgtccatgtcagggaagcagggagggtggtgtggaacagggactagggccagacagctctggattggaatgtgggtctgccacctgctctgtgactctgcagcttagagaggttaaaggacattgaaacatacagttgataatagtacctacctcatgaggttgtagggaaacacagagaaagccctcaattaagttaatggttgctatttttatttacagaccttaaggtgtggggagattacaacttgctcaaggtctcatagctagaagatgtcagagtgataactcaaaccatgtcacatgactctaagcccaaagcagcctctagaaggttgtttgatcttctgatggaagcacaaatcaccattccaacatgaaagatggagaaacttaagtctagagagatttaaaggacttgtcaaaggcaatgaaacaagtggtatgtgaacttaggtctcctggctcccagtccaatgttcttcgaatatgattttggcagtggtctacccagctagtacacagagtgtgcagccactcttcatgggaagttctgggaggggtttcaaccagcacactcactcctgctggttgtgaccagcaggacaattgctgagccacattctgagcacctgcaggtggaggtgggatcttatagaaatctagggcataagggagacagggaaattagaccctggctactttaacatactcactttacagatgaggaaactgaggcccagagaggataaatgacttgctcaaggtt

SEQ ID NO: 87987 - DNA, 1088 bp, Homo sapiens
cactgggcttccctgtcctccctggatgctccaccctccaggaacttccatgtgcccagctatctggaagctccctgaagaaccctgacttcttggggtttcatggaagcttcatgacgtcagcattccttccccaaggtatagggcagattcctctctggggagggtctcatgagtcagaaaggtggggaagattagagtcctgtcttggagcaggtgtaaggagggcaggagagggattctgtttcctgaggcccaacattatagcaaaagactgtaacaagggctatgggagttatgagctaggaacttaggacgaaaacctgtgtgtgtgtgtgtgtgtgtgtgtgtgtgtgtgtgtgtgtgtgtgtttatcaaataacaccacagtgtcattatctcatctctggccactggtgcccttctctctgggtttcctggccactgcacacatccccaccaaggcctcagctagagccctcatgaaggagaattcctttgcaccaggttgagtggggcccccaggtcttttgagggacagaagggggcctgttggtttccaaatgcccccagaatccatcgtgcatttccctcaaggccttgctgtcctctggccccatacttgcctaaggaaacctttgatccatgttatgtctccattatggcctgtgagggtggggtttgcctgtctggctgattcctgtatccacagcatctaatccaatatggtacttgtgaatgcatggatttgtggttgcccaggtattccttgtggattgatagtgattgctagaatcagagacccagagggcagcctctttcataaggcctatgttatctgtatctgtgaataggcctgatatggtttggctttgtatccccacccaaatctcatcttgaattgtaatccccataatccccaggcgtggagggaggaatctggtgggaggtgattggatcatgggggcgggttcccccatgctgttctcatgatagtgagtgagttcttacaagatctgatgattttacaagtgtctggcatttcccctgcttgctcttctctctcctaccgccatgtgagaaaggtc

SEQ ID NO: 87988 - DNA, 1047 bp, Homo sapiens
taggatttgccctggtttatcacctgctgcttctgctgctgctttttaaaaaaattgaagatggggtctcaccatgttgcccaggctggtcttgaactcccaagctcaagtgattctcccacctcagcctcctcagtagctgggattacaggctcatgcgaccatgccctgcttgtcaccttgccatcaaagaagagagacttgcagaagagtgtcagattctatcccatagtgcagtataccaaggaggtggtctgcaaatggccattgaatatacaaatagtctcagacttagcattttctttctcatggtttattttgctttgtatagttccatgcatttgttgaaaggaggaagattgagatttaaaggaacatccctagtgggataatacccatctgcttagtgccttttcagtgctcagcactgtgctaagttatttgagtacagtctttgttctcatatttaataaaatcagactctttttgaccacctcattccatctcccattcagacccacaacatcctcccagcctgtccagataggtgctttctgcttggacactttaatgatggagaattttatctctcctgaggccacccattctaacattggcaactgcagttgttgggaagttcatccgtttagggagtgtccatctgcctttggatacttccatctgtaggtcctgggcaatgaacaggggatgagagtatggcattatggctgaattgtgggatgcagactacagaaaagttctgtgaagggatgggacctggaagaatcagagaagacctcgtggagttactgaaacttagagaaaaaaatggactgaaatagagagagagcagggaggctggctatggtggctcatacctgtaatcccagcactttgggaagcagaggtgggcgggttgcttgagcccaggagttcaagaccagcctgggcaacatagggagactctgtctctacaaaaattagccacacaggtagctaatttttgtatttttttgtagaggatcctggtgggaggatcacttgagc

SEQ ID NO: 87989 - DNA, 1014 bp, Homo sapiens
cgcatgaggaccggggaggacagagctgtttgcaataggtgtgggcttttatagcattgtgagcatttcacgttagcgtaagtgttgctgctgtgcaggtggtctctggggcttacaatcttccccaatgttcttccccacccctcccaccattctggtgaacaagcctcttgggattctttgaaaaaaaaaaaaaaaaaagttgcttggggtcacaccatttaaacttacctccctaattttctgtgatctcatttttccttaaaatatcattggaaaagtgtttttgagtggagcattttattttccatttaaacatggtgaaaccgagacataggggctaaggcttggcgtgaggttggtggacctgggcctaggacaccttctgtggttccgccttcacaggctgggagcagcgttcaaccacagtgacatcatgatccctgccaggggatgctcggcctctgtggcctctgctttgctaatgggtacggacaccgtattcaatgggtatccctaggggcaaagaagtgattttaaaggaggaaacccccgatgggctcataaacttttgattttctttttttttaagcacagtgggttgggctccatctttaagttcaagttagtgactactctgctctaggaagacccaggagagagctgaaacttggacagtcattagcagctccagatggaggtggattgggaaagactggagggatggacaagccaccaagagcagaaagtccagcccttctagtttagcagtctccagagagctctgccgttgcggaggttgtctgtacaggttggtggaggaccacagaccacagagcgaggggcatagcttgctctcagttaaccagggctactcgtacgaatgagttgtgcactgtgctaggctctaggaattcaaacacatgaggtctattacccaccctaaaggaatttaaggtctttttggagcaagaggatggatagcctttttcccattatcttattattattatt

SEQ ID NO: 87990 - DNA, 2160 bp, Homo sapiens
ccaagttatttagctgctttgtgccttggtttcccctctataaatttggacttatgatagcacttactagatggagttgtagcgaagtttaaatcatatgatacgaggctgggcgtggtggctcatgcctgtaattccaggactttgggaggctgaggcaggcggatcacctgaagtcaggagttcaagaccagcctggccaacatggtgaaactccgtctctacaaaaatacaaaaagtatccgggtgtggtgatgcatgcctgtaatcccagctactcaggaggctgaggcaggagaatcacttgaacctggtaggcagtggttgtggtgagctgagattgtgccattgcactccagcctgggcaacaggagcaagactccgtctcaaaaaaaaaaaaaaaaaaaaaaagtgatatggatttaaattaggatagtgcccagagcatagaaccctcttaataaatactggtgagctaatatttttgagtcttactcttgtggggtcactgcctcccttgtattctagatgaataatctcaaacccactgtgcatcagaatcacccgtggagctcttttggaaacacaatttcccaaggccacaggccaggtctattgagtcagtctccagcaggaaagcctgtgaatctgcattttgagaagcttcttggatggttccaaggtagccaacctgactttagatggcaagggagcagctgctctagagccactatagctgagaaacacctgctctgatttcccacactggtttcagtcacataactcagaagggtctgtgcaatcaagcctaaggctctgatgttggtggtagagccttcctcgctttgcacttcagtttccttatctgcaaaatgaggcagccatgcaaagtgtagtccttggaccagcgacatcagcatcatttgggaacttgatagaaggcacaatctgtggctccatgccagacctatggagtcagaatccacattgtaacaagatccccaggaggctcttgttaaacagaaatagcacctctctagaaaaggttgaaaagaatcaagtttgcaaggaggcaaaggcagtagtcttctttcttgatgagaggagaactcagtaaggctgaggaaggtgcagtgtcagtggatattggaatagtgaccagctgttatccattcatactggacaagaggaaatgagcttcaggagcctcagggagtatggtcagatttatgagaacatttcctgacattgaaggttacaagtttctgggaaggtttgcaggaataagtaagctttggatacgcttctctagagtccattaaaatcagattgatagctctgcatccgttttacaaatgtttatttaggtgccaactatgtgccaagcttgggcaccagtagcttgagggagcacttgcagatggcagtggctctgtatggcttctctttatgttcacactacccatcaccaaggatagacatatatttgcctgtgcacagagctttgcatgatcccattgttggcatggatcaccagggcactccagcacaacccatggcctcgtggaagtgtatcagttatctgttactgagtaacaaaccatcccaaaacatggtggcttaaaacagcaactgttgtatttgtccatgattctggggtttggtctaggcctggctgggtggttgttctgctcatctggtcagtggttactcataaggcttcattctgctagagaattggttggggaactgggctccgctgggccactaggacactaggcctttctctcttttttcatatcatttaagggcttctctttctccacgtggtctctcaagctatcctagaggatagcttgacttctttttttttttttttttgagacagagtctcgctctgtcgcccaagctggagttcagtggcacgatctcggctcactgcaagctctgcctcctgggttcatgccattcttctgcctcaggctcccgagtagctgggactacaggcgcctgccaccacacccggctaattttttgtgtttttagtagagacggggtttcaccatgttagccaggatggtctcgatctcctgatctcgtgatctgcccgccttggcctcccaaagtgctgggattacaggcgagagccaccgtgcccgg

SEQ ID NO: 87991 - DNA, 1059 bp, Homo sapiens
ctaggcctccatgtgcccatctgtgcaatgggatagtagtggtttgcactgtacaaggtggttgtagaagtgagagcctctgcctagaaagcccttagtatagtgcctggtacgtaatgactgctcaaggaagggggagcttttagttacagacatgtacgatctgaagaaatgaaaggcattgaactttggtgggtaaattgggtcttttccagcaaaggtataaatccttaaaagccaagatcatattgtttgatttctctgggctctctgctggatacagtgccaagtccataactgtataccccatggacactctatgttaaatggagattaatgtgtaagaggtgtttttttttgttttgttttgttttttaatttggaaaagaagcttaaagaccacaatgggtgtggcattggctcgacccacagatctgcttagtctcagacaggcactttgaaccagtcttttaaaattgcgtcacaacaactggtgcttcataaggatttgatgatattcttggacataggatatggagttctcttcctgtccagcctcgggctatgaggactaaccctgctaagtctgatctcttcttaggaaagtcaggaggattgcaaataatcaccatgacatgcctataggggactagcctgtataaaagagagcgtcagagtcttatttctaagaataggaacgaggagggaaatggtgagtggatgtgaactagacaggtcacccggcagtcggctctttcttcctagaatgtccagttcacgtctgtgtcgcctctaagggctgcatggatcagaatcacccaacactggatcctcacctacctggccaaaccagtcctgactttgcttcttgttcagggacccacagcacgatgctaacagctggacctgatgtcagaggcggagaactgtctggatttccctcccagcctcctcctccaacgcccttttgatccaagattgagtaagagacattggcagatgctgagaaggacaacccaattgttttaacttgcagaccgagggggagatgggttccag

SEQ ID NO: 87992 - DNA, 1005 bp, Homo sapiens
gccttttttttttttttgacagagtctcgctctagtcccagaggctggagtgcgatggtgcaatcttgggtgcaatcttggctcactgtaatctccacctcccaggttcaagcgattctcctgcctcagcctcccgagtagctgggattacaggcacgtgccaccatgcctggctaatttttgcatatttagtagagatggtgtttccccatgttggtcaggctggtctcgaactcctcaggtgatccacctgcctcggcctccctaagagctgggattacaggtgtgaatctccgcgtccggcccacagttgacttttgtattccacagttgacttgctttatcacttacctgctcttccagcctctttctgtcccatgttctttgatccattccaagtaagttgcagacattagtattcttctctccaaatactgcggtgttcagatcattcactcgagtttaatatttgatggcagatattttttcttttaaagtaaaatttgcatgcactgtactgcaacgaatctgaagtgtaccataggtacagaataataccagtgccctgcaaagtgtcttcatggtctttgccagtccaccctcacccttagaccctcccgtgatggcggaatgatatggtttggttgtgtccccacccaaatctcatcttcaagtgtagctcccaaccccgtgggaggtaattgaatcatggggacagtttcccccatactgttctcatggtagtgaataagcctcatgagatctgatggttttataaatgggagttcccctgcacaagctctcttcttgcctgctgccatgtaagacgtgcctttctcctcctttgccttctgccatgactgtgaggcctccccagccacatggaattgtgcctccattaaacctctttttctttataaattacccagtctcaggtatgtgtttgttagccatgtgagaacagactaatacatctccatagcaacacttctgatgtctttctgc

SEQ ID NO: 87993 - DNA, 1057 bp, Homo sapiens
cagttgtttctgggttgaagtctgcccttctgggtacagccaggcatggaagagaggctatgattagagcagggactttggaattggagagacctgggtttgaatccatcacttgccagctgtgattttggttagttactttgtttgtggcccattaaaaaaatatctgtacaatgtgtttaatgacgctgatctcataaggccattgcaagaattaaatgaagcaatttagtgcaactaacaatgaatgcttccgtcacttaggggaagagcctggagaactctgtctccagcagattctggtgttgaatgtatctcactccgaacacatcttttctgaaaacttttatgccagtcgttaccacttttgtgatagaggagagtgtgaattctatttatttgttaatgcactgaattatgggctgttaggagctgttactgaaacatggagtatttaagaatcatttttatgcccttcttattcccatctcactatttcatgccctgtgccccaaataatcttggtgcaatgtgtttgtatagcttatgtctgcattaggccggttaagagaaaatccttcataggagtttttgttttgttttgttttgttttgttttgttttgttttgttttctcagccaatatcctcacatagaggtccattgacctcacatgtccttgctctcctggatcactgagtacttgagaagtctcgcgagtgtccttggggagatggccactgccatcatccctgatggacggtgactgataaaatatgtttctgtaagctctcttgtgtaggaagggtagccctggggtcattaactcagagctaaagcccatcgctttccggcccagagtagaacattctgcacgtggacccagaatccaggccgcctgcattctgatcccagctgggccactgcttacctctgagagaggtcgctaaagcccatctgagcctccctcctccttgataggtgagtggctgcttaggcttcctgggtctcatgttgcaatttcagaacatttggcaagaaaaagcatcatcctcact

SEQ ID NO: 87994 - DNA, 1195 bp, Homo sapiens
ttttttttagtatcttcaaagtgaaaaacagaattgttgtatgggtacttgaagtgtggtttcggctgaatttgttttgctctcacgccatcataaagtaggaaaattgtatgttggggactatctgcattatttatacttatatcaatgacattaacagataattaatagtgatgtatgaattaaagaagcttgtgaaatttactgccccattttacagatgaggaagttgaggccccgagagactaaggaacttgcccagtgtatgagagctaagagatggcagaacacgttgggtttgcatctgggtgggtggataggggtttgggagctggcatgaatttcattgctggctaaagatcctgagccagcagtccccgggccagcgggtgggaccagcaaggctgtcttcctaggactgaggattggagaactggtctgcctcaacgtgggagggaagaggggacactttgcgcttggtgcccatgccccaccctttccgaggagctgtcagatgctaggccctgtgatcccaggtggaggcccagcaaggtacccgctgcaagttatctttccagatcggtctccaggaagcatctccgtgtggcttccgagctgggggagctgcaggccgggctgccagcatctgactggctgttatttggttttctctgactagatctttgtttctgtgaaacccttagctgctgaggctctcgtgctgcagcttaatcggcgctgcatggagtgctagcctggttaagtaaacaccgttggaatattacctgtctgttaacctgtcaaaattgctttacagcccccttttatcttccccccgacggaatttcccctggagttttctgcctcctctctggttcctttcctcgcctgccctccttctcctgcaaagcttccccacccccggagtcattaaatattgtcagagttccgcctcttatggctgccttgtttgctcagttcagataaattgttgttgactctgtgatgcagaccaagggcactgggctcccagccccaaggaaggaagcatgaggtctgccaggtgggaagaggcgaggggtctgggggaggatgcatgggcgggggccctgcctccctggctgcacctcgctccccctggtcgcctcagaaggagccagtgctctgtccggcctcaccgtctcgcaggccttct

SEQ ID NO: 87995 - DNA, 1772 bp, Homo sapiens
ccgccttctcccctaggtaaccacaatatggagattgttaatattgtaaagggaaggtttactctcccacagctaagggtcaaagacaagcccacgtgacaagaaaagaagggatatttgcttgtggaggtttttctaggtttggtttgagttaaaaatgctgggcaggcatggtggttcacacctgtaatcccggcactttgggaggctgaggcaggtggatcacttgaggccaggagttcgagatcaacctggccaacatggcgaaacgctgtctctactaaaaatacaaaaattagctgagcgtggtggcacatgcctgtaatccaagctgcttgggaggctgaggcaggagaattgcttgaacccaggaggcagaggttgcagtgagctgagattgcgctgctggactccagcctgggcaacagagtgagactgtctcaaaaaaaaaaaaaagaaaaagaaaaagaaaaacaaaaaccaacttggtagatcctaagatctttttctcactgaaatatttaagcactgcattttaagaaaacttcctattcattcgtagacttttatctggccagatttccactctgagggcttttctttctagttatctgacaaaccataaattttatttcctttaagggcaaaaccaacctccaagcacatttatggcccatgttttaagagctggccgccctttctatcctgtatctctggttaaacgtgttttctttttcttggagcaaatttttcaaagaggggctaaagctatgtgttcctctggagagaactcctgcctacccagcaggaaagaaaatgccagagaagcctccgacctgggttctgcccctggtagccaggtctcaggctagaagccttctttttggttgcattggagtccttctctacctcacctttattgtttcttccttcttggtttttatgtattctcctctgcctcctttaaagagtggcaactttttggactttggacaattcctgtgtagcaatctgggctgattttagagagtccttctgtttcctgctttccagtgagctgattggttgatcagctgattttatttaccttcccctggaggaagtagagtcccaggatgctggggaggcccgctggggacccctgaatgccctttatgttgaccccttgtctttttgtttgggttcctagggctatggactgagaggcagcataactttgaaatggtatctattgaaggagtctctttctgcttctcaccatattgggaagaaggtggattaaaacatttatttactcttaattgtggtaaaatatacataacataaaatttaccattttaaccttttttttttttttttttttttgtctgagagggagtctcgctctatcgcccaggctggagtgcagtggcgtgattttggctgcaacctctgcctcccgggttcaagtaattctcctgcctcagcctcccaagtacttgggactacaggcgtgcaccaccacgcctgggtaatttttgtatttttagtagagacagggtttcaccatgttggccaggatggtctccatctcctgacctcgtgatccacctgcctcagcctcccgaagtgctgggattataggcatgagccaccgcgcctggctttttttttttttttttttaaatagagggggtctcaccatgttgcccaggctagtcttgaattcctgggctcagacaattctcctgcctaggcctcctcaagtgctgggatgacaggtgtgaaccacc

SEQ ID NO: 87996 - DNA, 2592 bp, Homo sapiens
ttattgggaatggtattgagggatggaggaggccagggtgggtgatttttaaaggggaggctgagggtgagatttctaaccaagatgcctacgtcattgtcttccttgaaatgctcttcaaattttaacatgaaacaccctctgaggatggtttgtgtttgtttttgtttttgagacggagtcttgctctgttgcccaggctggagtgcagtggcgcgatcttggctcactgcaacctccgcctaccgaattcaagccattctcctgcctcagcctcccgagtagctgggactacaggcatgcaccaccacacctggctcatttttgtattttcagtagagatgtggtttcactacgttggccaggctggtcttgaactcctgacctcgtgatctgcctgcttcggcctcccaaagtgctagaattacaggcttgagccaccacgcccgggctggggacagttctgacacagaagtgagcttatactcccgagagctctagagctttggcctggacatttcttcccagcctggaaatttcttggaagtgtcctttattcatgctcaaaattcctgggaatgctgcaacctcttccaccatgaaatgatagcattgcagactcttgttttactgccctcttgttctaaactcaaatatccctcaagaaattacaaagggtactccctttgctggcttcccctctgttaagctgtgggtacagacataaacccttgccagccagatggcattttctttttctcccggttggcctctgtgtgctcaacagaaatgttcccaccctttggataaagcatgggctgcaacctgcaacattattgcaggctttgttcttagattatgtgccccagatagctccagccagggattttttcataaagttggtatgtgggcggaaggagaggacttggcgtttcttttgtaaggacagagataggaagaagggagaggccaggaggtgatgtactggaagatcatcaaaatgaagaaagaaacaaatatgtggagagacagttacttgaatatcaatggtgtttgttttctgtggattttctttgggctagcggggaggtgatattttgaagtacaaaggaccatctaatctggtgcatctcttggcatattctgatgcctctgggtctacagcaataaatccatcatatcattaggaatattttgtctgtccctcatcccctctcctgcgaggttatctgaacaagatgcacgaactaccaagtggttgaattttcacttagtgggttgcatggattgcaggcgattcctaaataacagagcagagaccaagagagatactgtcatacttttagagaaaggctgcttcgggaacaaatttttgaggctggatgttctcttgttttccctccattttccaaattcttaggttaattaagagcaaaaggagtaagctattagaatttttactatccacactaatttgtgtgactttgaaagtcgattgagttgatgagcggtttatttttagagtggttttggaattgaaaatgtgaagcttaatagttttttttcttttagggactgtgaatggacttatctttaactgggctgtatgtacatacaaataaatcttgattttccgagagagagagagagagagagagtgtgtgtgtgtgtgtgtgtgtgtaagtgtgtacctggacctgcacttcctggctggtgtatctatgtgtgcacaaatatatgcaggactataaataaaaaccgcaaatgaatgccttagactgaaacatgagggctgctctttctattttgtgcaacaaatgaggcgtgcagatctcctttggagaccaagtctttaggagaaatagcagctccgggaagagcctggcacctttgctctctgggtttctgcaccatgccatcttgtggttagcaggggagacagtgcgttaggcctggggatatcctggtcccagctccagggctacccctgggcctccctttccccagtgggtgtcttttccttgtgctaactttaaggataaaccctgattttgatgttgcaaggtaatgtggtataggcctcaaagacagactattgatctttttatgtagtttccttatggatgatacttgtcggtttataaggctagcggaaggcctgtgtgtgtgtaggggggtggggggttggagttgggagtgagcttggtgagcaggtatggggataccagggcaacctgagaggtaggccacgtcatcaccatttataataggcttccaggagagtgaaaaagtcatcagcgtcacctagactgaaacagagccaggggtaataacccaggatggtacactgcaagcctacatctatccattgttattttccatccttcaaacaagaataaatactaaaaaagaagttgaatgaatgccgattgaatgaatgaaatattatagaagatacctggaaaagtcagaagacacatacacccacacccatacacacatacaccgtactcctcaaggagttgaccatctagacatttagccatgtacctttaggcaagttactgaacctctctgtgcctcagtttcctc

SEQ ID NO: 87997 - DNA, 1027 bp, Homo sapiens
aggccctaggtggggaaagtgaggaccacagctaagccacctgcccaaggtcacataaatggtaagtaacagagctgggattcaaacccaggtagtagggattacaggctggagcatctgaggtttaaaaggtgggagaccaggacccaggtctgttacccacactggaaattgttagcatgcttgtcaaggcctgtagcccctgactcccctaggtgaatgtcaggatccctcccaggagtatgtgtgtgagagagtgtatgtgagtgtgtctgagtgtatgtgtgagtgtgcatatctggtgtgtgtgtgtctgtatgtctgtgtatgagtgtgtgggtgtgtatcttggtgtatgagtgtgtgtgcctgggtgtgtatatgagtgtgagtgtgcataagtgtgtgggtgtgtgtatgattgtgtatatctgggtttctgcctgtgtgtgtatgagtgtgtgtgtgcgcgtctgagtcttgtgcgtctctgtgtgtctgggtgtatgagtgtgtatatgttgtgtgtgtctgcgttatgtgtgtctgtgttgtgtgcgtgtttgggcgtgtgtctgagtgtgtgttgtgtgtctctggggaggggtgtgtgtgtgtgagaatgtgtgtggtgtgtgtgtgtctgggtgtgtgtggtatgtgtgggtgtgtgtgtgagtgggtgtgtgagtgtgtgtgtgttgtgtgcgtgcctgggggtgtggtcctatgtaaagagctctgccggtttctgccaaaggccggcgaaggcacaatctgcattgttcctaacagatagacctccagagttataacggtgcttgagggaagtggctcgcttctgtcctcacaaaaatcgtggccagggcaaaggcattaactccttataaccagctgtgcccagcagggaagtcaggcgaagagcagcacctgagctcaggcagctcctctgggcccgcgggcatctctcctggatattgctggggtctgtcgccacctcgtggttattccgtgtatcggctttcaa

SEQ ID NO: 87998 - DNA, 1027 bp, Homo sapiens
ccactgaggtcctctgagaagtttctctttcgattttatattgctattggaggtatatttgttattccaaacaactttgcatttaaaaaagcctgttgtgcatttacacatttgacgatctcttttatctctggtctgtatttgagttttgcagagtcatgatcttagagcctgtcatgtatttacacatttgacaatctcttttatccctggtctgtatttgagttttgcagagtcatgatcttagagcatgcagtttgattcccaccatttaacttaatctttttgtttttgtttttcctcatgcctgtgtccttgtctttgtgttgattttgaatgcctgtacactatgctgcaaagcaaatataatttgcttaagattgctattgaggagtaggagaatgttaacttttagtttaatcttatgtaagtaataccatgaaacttctttttcccttccatttttatctttcggccaaactgggggtttttgtaacaggacaaaagccataccggacagcggtgtagtgagtgaattctttagccaatgagtctcaagggtggccgggtaccctgactaacagggtagcagggcttggccatgaaactgtcctggtgcaaggaactggggctgtgctggtgaactcctggcctctgatctcttctcttcctccactctcaaactccacatcctggaaatccttgaagactcttccattctgctcttggacctgcctggcacatggctgctgcttatggatgatttgttcccttgagtggacttccaggctcgagttccagtgaagaatttttgggagatactcaaaggagaaacgaatctctaggcttgcccagtggccctggggcaccctctttccacgccatcctccatccccagcgatgcttggctgtagtccatcttcctcttctctgcccctgcatttccatcccaggaggaccactgggcacaaggaacatcagaaaccagggagcagtgtgcattgggattccttccagacgctgagag

SEQ ID NO: 87999 - DNA, 1095 bp, Homo sapiens
aaatgctaggattacaggcgtgagccaccgtgcccggccgggaggttttcttagggagatggaaacactgtctgccaggcggtctcttcaggcccctttgcggtcagtgctccttctgcaatgcacactttgctttttgttagggtgttctccatcctgaatgctcttcctcttcctcttgcccacccatgcgtggctcttcctcctcagggaggccatcacctaagggtgactgagcacctgctgtgcaccaggctctgtgacactcagaagttcaagattagcctgggcaacatggcgaaaccccatccctactaaaaattagcccaggctggtcttgaacttctgacctcaggtgatctgcccgccttggcctcccaaagtgctgggattacaggcgtgagccaccgcgcctggcctgatcagctttctgtctctataaatgtgccctttctggagattccatagaaatggaatcatacgtgtagtcttttgcgtctggcttctttcgcttagtataatgcttctgagaaagtgaccgtcaccaacttctcatggagccttctctgtgtgtccagactgttgcattcttggtagtgaatgggttaaccagaaacaaaggtgaggctcctgtgtgtgtgagggggactgcccttgggggggtcttcagcccttcctgcccaggcccctgaccaggcttttcaccctgcctgccagttttgaaggacctggcctcctccttccggctgttgtagcttaattaagttataatgacagacagagaagggttgtttcctggcaattaaagtaagtggaaggttggaacatggtccagccctcctcccggccaggaaggactggactctcccctctcattgttcctacccacgccaaccccctagatgggttctggggtgtgttggcaggggggtgttgggaagttccctcccctccccaaggcttcccatgctgtggctgatttttctcttccccagctgattttgtaggctattggttatgaaaaatgagatatgcattcatctaattttgaggcttcctcctgaccatcccaacctcagtcgaaggagacaggaa

SEQ ID NO: 88000 - DNA, 1099 bp, Homo sapiens
taatggaaccctaggcataaatggctacccccttttctatccctttcatcgttgactttttcaaggggtgaggagaaaccttcttgatgaaagatgtgttttgaaaaacttactgaacatccttctgttttatcatcagcactgttaatcgccaccttagtatgttcccttcaattctagacctgagccagaggaagaggctgggactgtttaaattggccacctatgatgctgcctctctccgggtggaatcttcacctgataacatgtggaggggggaggccccttcagacagacaggtttctctctcgcctgttctttcatagcagagggagccgcttagcacaagggacactttagatgatcctagggggatgggagggctagtgagttagtggcaggaggtggggagcgatgtcatttattaggtctatgaaaacaatacagggtttgtctcctgggtgcagtggtgcccgggggggcaaagccaagatggggctgagtagaaagaaaacaagcacaggtctgacgaaaatgtggtgaccccgaggagctggggaaaaaagcacctttgtttagggaggtcagggcaatgggaggcatttgaggaggactctgggagatttgctgcctctattctgggaacctgggccccgaaaagaggcttgagaagaccaaggaaccgaggctgatggaagtttccagggtggctgatccagctgctgtgcatttctggggcaggtttaaggtttagaggagccacttccttatcagccctgttccttgagggtggcccgagagaggatcacactggagtgtccagggggtggggagggaggatgatggaggggactgttctgatgtgggggctcctgatgggctatggttttgcttcctgctaaggctgcctggatgatctggccctggggcagggaagccccaagagccttgagtcaggccccatgaaatgtggggtgaaggcactcacggggtatggtgcccaggaccccctcccctggtcacactgtatccatgggcgaaggcattcacaggtgcagtgcccaggagcccttcccctggtcaccatggaccctgcaag

SEQ ID NO: 88001 - DNA, 1048 bp, Homo sapiens
tcctctctgtgtatctcagaactacatgatttcttgattacttggagcagggagggtgtctttttgttttgtttgccgttttccacaggtgaccttgagcaaggtaggtaaggagagatgccaggttgttctcagtggacacacggcttccagttctttctgcaatacaactcgacttcttggagaagaactcaattcaacataaatgaaatcaaaatagaaaacagtcttgctgagcaatctttagagaacatcatttgtgatagctatagctgggaatgtctattttgttgtgaccttgtacccaaataaattagaggagtaattgaccctttttctccctgaggtttgagataattttatttatttaagggctttagggcagtctgcttgcccctttccagagggggacagctggactcaaaatgccttcaaaggatccatcttttagggcgccgtggcagaggcccttcacttaggtaaaagtgagattctttcctgcatgctggtgggctcccatcctggatttgggagctgcaaagcacacgttggtgggagatccggctgggaggagaattccgctctgcggggctgctgacccacttgtcactcacttgctgttaaggcatagagacgccttgttgtaactggaattgttctggggaatgaggagtcctcgccactcccccttctccttcccgccctaacctccctcccctccccttaggggaaaaaaaaattccttcccccttttcagcatctgtgtctttaagaattccctccactgtagcctcaggacagagacccttctgtgagagtgtgctggaggcctgtccttggtgacaccccgccccccatattaaaagaccattggaacaagctccccattctcctctggagagggtccctctgtcccaggccaagcgactcttaagggagcgtttatcctgggacactcagtttacaaagactgctgcagtgtcagataaactcactcagcccttcgaggggggagggggaggagaagaacaaaaccccctttattttc

SEQ ID NO: 88002 - DNA, 1139 bp, Homo sapiens
tggggaagactgagaatacagggaggccagacagagagctcgtccagaagcagccacacaagtggatttatgtagagggctccattgtgttcacacattcatgtgccaacttggaagcagatcttctgggtgctccatgttcgagagacagctttgatctccaggctgttgagctcaaggtgggagactctgttttgcttactttgttcacacattacacaggtaggctttgtttgaggagcagtgactcacgctcatgggttgtgtgagctttgaaaggaagccatgcggccctggcaggtgctcccagctgtcctcgtttgccattgtcagaaaaaaatcttattgtcatggcgacagatttttttctacctaaagcttgagtatgaatagccttttttgataggtgatgaagtgggaggagagggggtaggtatcatgtattaaaggtgccgtatgtcctgtggaagtgtagttactgttgcccccatttaacagacaaggatgctgaggctcccagagcttatgtcagttgtccaaagttaccgtgctggtctgaggtggagctggaacttgatctgcttccaactggacacgtgactgcatccatccaggctttagctgcaagctggatcctgtttctcttggaaagtgctagaagtcacaaatcaaatggttttcacattatatatttatttagagacagagtcttactctgtcacccaggctggagtacagtggcttgattgtggctcactgcagcttcaacctctggggctcaagcaatcctcctttctcagcctcctgagtggctgggactataggcatgcactaccacatctggctaattttttgatttttttgtagagacaaggtctccctgtgttacccaggctggttcgtgaactcctgggctcaaacgatcctccagcctccacctcccaaagtgctggagtcataggcatgagcctggcctcataatacttctatcgctatgattcatccttcacttcttcctcctagtaacccactgacagctttaaaacagtgcttctccttccctctgctcatagaggtgagacatacatcctttcaggagtgtagctggaaatagactcctcccttccctacagatggga

SEQ ID NO: 88003 - DNA, 1062 bp, Homo sapiens
tcctccctgctgcttgccctgcggagtcacgctttcatatataaagtttgctggaagtggaacttttattaaagtagagaacacttttctgcacagtttgaggtgcttaaaaagtgccttttgaggccaggcgcggtggctcacgcctgtaatcccagcactttgggaggccgaggcgggcggatcacgaggtcaggagatggagaccagcctggctaacacggtgaaaccccgtctctactaaaaatacaaaaaaatagccgggcgtggtggcgggcacctgtagtcccagctactcgggaggctgagaatggcgtgaacccgggaggcggagtttgcagtgagcagagatcacaccactgcactccagcctgggcgacagagcgagactccgtctcaaaaaaaaaaaagtgccttttgagcatcatggtggatgtcagagttcggtggcagctcccgtggggacctggggtgtgtggctgggtgaagacgatcacctcccttctgtggttttattccccaggctgagtttgagcccccaaggctcctgtcggttctggtttgtgattggctcctccgtgccccatgcgcatgtccagccgccagggagattaggcgtttgtagtaagtgatttcactggccctggggggacagatggtagacagtgtttgatcccagtctttgcagggctctagcccctcgcagcttctgcaccttctctgcatggacaggaaagtggccttgtcacctcagagccaccaaaaatgtggctgttttccattttaatttcttcacggtgatatttctttatatttttaaaattaagcagtggctgggcgtggtggttcgctcctgtaatcctagaactttgggaggccaaggtgggaggatcggttgagcctaggaggtctaggctgcggtgaactataattatcccactgcactccagcctgggtgacagagcaagaccctgtctctaaaaaaaaaaaaaaaaaaaaaaataaataaaaataaaataaaattaaacatcaagaagcaaagttgttgttgctgaagttggg

SEQ ID NO: 88004 - DNA, 1034 bp, Homo sapiens
cgcacacgtgaattgaggctgtctgctttgagtatcactgtgtcttttctgacttggagtggttgcctgcattgagcgaaggcgatgtttgtttgggataaggaagttttgacgttacttaaatctcaacaaaacagatttctgttgtccagacagagtttctgtgttaatgttagggtctggttgcctagacttgatttttcttttcctttttgaaatgctcccaaccttcctactgtagcttgtaaactgaaggatattcatgtctttctctctccttgtgaactggtacagacgttttctgtaactagccagctccagtgaggatcataacaggaagtctcgcggggagaggggttgcggctgttgtgactaaacagttctggaaggcacctctgtctacacctgcctgtccctgtcctcagcgtctcctggtgggtcctccctactcagacgctgcagcttttctagaatctactccagtgcagtgcagactgttcactttaggactgccccacctgtcccctggtgttcaaattgtggtttgcataagaatgaattgcttgcggaacgcgttataaatgaatattctcagcacccacccccgtccagcccctcaccttcagtgcttgggggtctgcattttcaacaagccacccaggccattctgacacaggcactttaagaaaacaggaagttgactgacttcttggccagataaagccttaattgaacattttcccactgaagcttacccaaccacagtgtttttttctttctcctcctccaggaagcctttctggtttacctccactggtctgggcccccgcatgtacttgtttggtttgttggtacaggtttttacttaggagccttgaagtcagatgccctttatacttggttaagacaggagtggctgcatttgggtgaatgataaaggaactacagctctgggcattttctcccctcaggtaggcaagctctttgggagcttggaacgtgtccctgaccaggcagcatcctggcacatttgt

SEQ ID NO: 88005 - DNA, 1027 bp, Homo sapiens
gcgtcctcggcgcacccgctcggccccttgcacttgccttaacgcctgggcgccctccgggctccgttacttcgggagcggtgccgcctccgtgagctcctggcgtccgcccactggcgaccggggacgctgctggggcgcagcggttggagaacgcgactcagccgagcccctctcaccgttggggctagggggtgagcgggggcgtttggcaagcagctttccggcgaggactgggccacccgtcaggctgacgctggtacgcgtttggccagggtgtggacgggctttctgaataggtgggaggtggcaggaattcagtccagtgagaccacccgccacctcccctttccggcgcaacttgctaatggaagtcgtttcttggccaatgtggggagagggcttacgtcttgagtctggaactgaaagcataccgcttctgtatccatagcttcctcctccccttgttcttttgtgtctgccctgtttgggggcagcgcgatgcctgtcactgagtaggcactgaatagatgtttgttgaatgaatgactgagcgactccacccttggcgtgcagattaaccagggtcctccttttccttctccctccttggcgattgtcctcacctccaggacctatctaggtttcctgaggatgctttcccagaggtgggattccctccttcgcccctcacccctctcctgcagcctgtgggttcgcatttagaacctgtcggtgatccatttcccacccagcagtcccttctgcataggaatctgacgctgtcagggatcactcttggtcagtgctcagggtcccagcgtctccagtgagcactgctccaggagcaagagaaagtaaagcagcaccggaagaagaaaaggcagtgcatagtggcacgaccccctaccctgggagctggggccctcggtgcccctggtcccatgcagggtttggaactgcccaggttgacacagcaccttacctgcggcccttccccaccctctgcccccaccccagttctgtg

SEQ ID NO: 88006 - DNA, 1003 bp, Homo sapiens
acaaaggccagaatagacctagcggcattgacaataggactggaatgccagctttgtctgtgaaggaagggcgcaagggaggacagctgtggtgggcaaaccctaaccatttccatccttgtttagcttttgttctgactacgacaggactacgtagtcgaactacgactcccaggaagccgttcggccttccccaccccctccccgcccaccccgctccgccccgtcccggcgcgggtccgcctggtatataagggccgaatggcccagccgactgcagggcgcgcaggcggcgcgggtgcgcggtgcggcgctggtatccagaggacgcggtcaccgcctctggcatttgtcgttctgcgcttctccgcaaggaccctctgttaggcaggcgcccaccgtaagcctcccgggccttgtgaacctgcaaacccaagtctgagagacgatccgccttcagcgctttccagcttggcagagaggctttcccggcggggatctttggttggcgctggcgatgcgcggggaagaaaggcgaggagcggcgtccaggctgggtgatgtcccagcacgagtaggcgggatgcgctcgcttggtcctccgggcgcccggtccctgcccgcgtcgcgcgcccacccctggggacgagaaggcggccgcctgaggacccccgcccgcgacctccgcgagtctggagcgcagaggacagggtctggctgctctttggccttggatggaaagtggggaattgggtggggggctgcggaccccttaacgtggattacttggtgtgtatcagctgggctcagaagacccacgacctcttctccatccgtggattgatttgttctgcttaacagctgggtcgccaagctggaggtaagtttccctgcggttcggggaagggatctgatttactttcttttctttctttccttttttcctccgcgtcgtttttcgaaggtctcgagattccgggttgaaatttttgttcttgtaatt

SEQ ID NO: 88007 - DNA, 2329 bp, Homo sapiens
atctttaagaaataatcacccctcttcattactcacacatggaccacagaacgatcataggtgaccttgggcaagtaacttctctttgcctcagtttccccaccagtaaaatgaggataattatgatactgacctcatgaggttgttgtttggggttccatggttcattagtttgcctggcacatagtaagccccagtaaatgttaccattattaatggtagtgtgctttctcttggaattggacattgcagaggatgccttcagcctagccgtggcctcagggatcattaaggtcttacttttcttcctgtccttctcttccagtggtaatgggaaactggcatcctgggcctccatcctgggatttgtagtgatgatgtcactggacgttggcctgggctagggctgagacgcttcggaccccgggaaaggccatacgaagaaacagcagtggttggcttctatgggacaacaagcttctttcttcacattaaaacttttttccttcctctcttcttcatctcattatcctgattgactctgattataatagaaccatttttactttgctttgagggagatttttgatttaatggggaattttaaggtgtcatggaaatacagattctttgttttggccactgaatggactctctcttcagtgggattatcaaggaacttcagatcagggaaatctccacttcgggaccttctatctgcctcccaactcctcaaggtcacctatagaagcgagctaccaaaagacgtctcctaagcattttggtggcctagtgactcagggcagagtggccagcacacctctcatccgcccctcctgctccatcactgctgagcctctccccatctagaatgttggaactggagcatcataaagatagcaagctaccttccaaggccgagccagcccagagaggagcatgtcttcctttacctccccctaaggagatactacatgggagggggacacagaaaaagggaaggaaattggctagtctggctttttttttttttttttttaaaggcaaagattgacattattgaaggaaaggggatgaggacaactgtgaactcacagtgagccctgtggaaagaagagacagacagagtgtgggtttgttcggaggcctctgctgtcaatggattccaggagcaaggccatttgtcgcgctttccaaatttcttaggcatttattttgataagtttatagccatcatgtttctaagagacttggagacaccagcaaactgctagaactcaaactcttcaattactcaaagaaggagccatttcagttaactcaagtgaatgaaagagttttggaatctgctgtgggtccttccctgttgaccatttggtaacttataatctgacaaaaactcttgagctgcaacaggccttgccagagggctcaggatgggaaaggaagaaggggataggaaaagaagaggtaattttacatttcccctttaaagtaaattttagccaactcatcattctgaaatgtccctataaagaatgagtcgaactagaccagaagccagcctactccttcttacatagcttctccaacaggggtagcaatgacctgtccacttcaaacacagataaggcctgccatcctcattggttaaaggcacacgtgagactttcagtgggctctgctgagaaggaaggcagcccaggagtcaggtatgcaggcattgcattgtcagtgtctgctctcagagtttacacattcaattgcttccaagggtgaatctcctgctctgtgaatgctatcagaccccaaaggccaaccttgggctgggtctatgtacgttcttccgaagcactgatgatcaaaattgaagacacattcagaggtttgattggttgagattaactggtgtggtggttggtgtatgtatgttttatttttatgtctttgtatgtagttctacataatgcaaattgtgctttctgatggacaagacctcataactgtgattaatatcaataaaaaggggatgttgtggatgacctgtgttacgttcagtacttctcaaagctgcttctttgcaaggatgatcataaaagagctaactaaagttggaactaacacctccctgatccaacactaggagaggcaaaggaaagagctcagatgggaagggctagtcagattcttggttgcaacaacagcatccaacagcagcttacttaaacagaaaaggaaatgagtggaagcctgttagggaattcacaggctctttcggagaatcgggcttgaaaatgggttggatccaagaaagccagaggtctggggc

SEQ ID NO: 88008 - DNA, 1069 bp, Homo sapiens
aatcttgagctgctaatccatccttccttattggcactgacttttccattgccccctcatctgcagggtcttgaacttggtttcctgccctggacttaacctgccttcctgacaccgactgacttcacctctccccatgccctcatgtcatgtcttatctgttcctattgtggatccgggattccttggcctgtcccttggcctgctgctgatcatatctccactctgacccacaatatagattttcaaggtaaaaatttttttaaaaaatgtttcactctgttgtctagtaaaatacatgaatgtgtatcctttgactaagggtctttgtgggtgaggaaacaaggaagcaccgcagctttctaggggagggttaccttcaagcttcgtggaaagttcctcatgtcgcctggcaaagcactggacacctttcaaagcacactgaaaattctaacatcaaaactcacaaacactgctttctggtaaggccatccaaaattttaggtggatccaagacatcctgcaagtgttctctccatattgcctttcagatcaccttctattaaaaaacaaaaactctattaactgaaactcagtagaagctttcaaaaaaaataaagggagggttgacctttgttgttatttttctttggtctttcaagatggagtgagaactggcctctagtgtttggtaaataccttacgctgcccagcaaggttgactgtgttatcccccggcaggctagctcaaataggcaggcaggccctgccacaggcagatgaaaacagggagaagaagtccacatatgtcacatgtctttggagcctgtcccctgtctgtcttccttcttgaagacccagtcctttctctataggtctctggctcagcccatctgctccctctcagcttaatgacaacaactttgagtcttctgaaacaaatgtgcttgcatggggaggcaacagtctttgtcccacctctgccagcagaccttgtaggacaaggcatcagtctaatccctcactaagccctgtgctttgcagccttcattttaactgcttctgttca

SEQ ID NO: 88009 - DNA, 1060 bp, Homo sapiens
atagatgcaaagatcctgggaggtaggtgctgaaaatggaaccggatataagcaggtgagctgggttcatctggatggagtgggcactgaccgttagcttcatgtgctggaaaatttctttaagctccaagtcaaaactcagtttttccatgaagccctttctggctccttcaagtgaagctggtcgctccatcttaaagggccctgtttcctttgtcagaacacttgggtttcagtatgtccccaattctaagcaaattcctggtacagaggaggtgctcgataagtacttatggatggaataaatgggtaacctacatggatgggtgaattttattttattcagatacagtcaagagatggtggaggatgagtttgtgaacagctcttaattattttgaattctttcaggcagtatttcctaaaatacaaaatacaggttctgtaagatgttaacaggtgttatctaataaaagggttccgttgtcaaatacattaggaaaacaaaattatacaggtgtctttgctgcagggaattcttcaagcctataaaatgtgatgtcggttctgggtcttgaagagtatttaagatttctaaaactcattaggttggaccataggaaattcctgttttgtagttttttaaacattgttaaatagcagcaattttgtatggtttaacctaatatttaactgtggaactcttttaaatgttactgatgttccatggagctcaattttgatctctagaacattggtttcatttgggaggcaatgagggagaaggggaggaaggtggagggttcgtggatgagaatctaaatcctgttgggagcttctcctgtcccaggagagtctgatgtgctttaaggttgtggtcaggtggtctttaggaaattaactccttgaagattcaggtctagttctctctgcctccaccccatggcagccaattggaaaccacagtttagagggagaactccaaaaaggaccaatgctcacatgctggacatcaaggcctatttcctcatcccaaatggtctacgtgggtctcaaaaga

SEQ ID NO: 88010 - DNA, 1033 bp, Homo sapiens
aaatgctaaatgatgttgcctattactttttaacatcattaagattcattataaccaaagtgtgtcctagaataacctcctacggtttactcgtgtgcagaatgtggatgagaaggcctgcctgcctgcctcagaagtgcaagctgtgcatgtgttcaccatcagcaggagcttattacacatgtattgaatgactaacatgggctgtcaactgtaagccctgacaaattcgaaggtgtttgttgctgtgcttccgaatgcatagtgctggttctaaatgtgcttgttgccttgcagtgcatttattgggcatgttgctcttttggcctatgtggtgatgttatcagcccaggtcctctgagaagcagattccaagaagggattagacctgcatgagatgagattgactgggagaaagacctgagaaggaccaaggggagggagcaggagctggcagactgccgtgcaggtctgacacccgtgaaaggagagggggaaggaaggaggcctgggaagaagagccgccaatcacagcagatttctaagaacattaggtcaggctgaagggaggcccatgagccaaaagtgtcctctaaaaggagtgccacatcccactggaatgggcctacaaccatcagcactatctggctcccgaacttttttatcttcccaaactgaaactctacctccatgagacaccaacttcattttcaccttcccagccccctggaaaccagcattctactttctgcctctatgaattgactactctaggagcctcacataagtggatcagacagtatttgttcttttgtgtctggctcatttcacttagcataatgtcctcaaggttgtgaacccagaaaatctgagacagatctcagttaatttagaaagtttattttgccaaggttgaggacgagcccgtgacacagcctcaggaagtcctgatgacatgtgcccaaggtggtcagggcacagtttggttttatacattttagggggacatgagacgccaatcaatagatgtagg

SEQ ID NO: 88011 - DNA, 1052 bp, Homo sapiens
cacattgtttctgataaattcaggatgctgcagagtcatcctgtgataccattctcttgctcctgttggttctgagtttttttcttatttcctgagttggggactgaagtgggttgcgagttgtgccgggacttgtgtagcaggctcgagagcatcatgatgtctgatgtcgggggatggaaggagctgcacaagggctgaaatagtagctcatcatcttgtcctctggtgttatgtgttatctgccagtagacaacctctcctcaccccagcccaagccaacatcattggtctatgtcagcttagcccctctcacagaacagcctcctgtgacttaactcaggtttgaaagaaaggatgttaaccgtcagatgaaaatcactggagtctttattgtcagctttctgctagagccattgtcctgttcatcccccaatgcctctagataaaacttttagaatacactgcctggaaaagctttgcctccctgtgggaatgacagacattgatcgtgtagacctttttttattctttggctgctaggaagcacagcacttcatttgctgctttgtgataaggataaagtgcattcttaaggtctgaatatctgaatatctgaattcttcttccatgttataacctattgttgtactgcactttaatccatttcaaaagaggacggttattaataatcgctacaagtgatttcattcctgtgttgccagttttcttcattttgtttcctggccacagactatatttctaaaccagatgcagtgcctgaaaagtatttttatttgattataatggagactggagaccaggcaagagggaataaagtaatctatttgtagcttgacaatggtcttgattaaggtcttgattgacaagggcttgatttatttttgcttcactgtaaagaaaattgtagcttttctaagatttttgtttcttgaaatacctggctactttgcaagcaggatggaccaccaaggagccatctcatctgctgatgagtctccctcctctgttgaggtggccccatttttccc

SEQ ID NO: 88012 - DNA, 1017 bp, Homo sapiens
caaactcctgacctcaggtgatccgcccaccttggcttcccagagtgctgggattacaggtgtgagccaccactcccagccgcctaattttctttctacattgtccaggtgggccaagggaggacattgactcatgtgggtcctgatgatacattggcagactcttgctgccttttgtgtttgaaattattttaaaggtccagagaagagggtaggtgaattccatgctttttattttcctctcaatagtatcaagagccaagtttgttttgctggttgttgctatgacatagaggcctggggaccactgtttgtgttgctagaaccacacaacagttggttttggtcatgtggcctgtcctcattgccagctcctgataatggctttcaaagaaatgcttgggattttaatccaaagtgattttttgtttcagggaacaggaacccaaatttagacatgaaaatgttcacagtggttggttattcctgggtgataggattgcagatgacttttattttcttcctgtttttgtgagatttataactaagctttcctgtagtaaatatttatgacttgcgatcagataaaaatgcttttttggaaaggtgaaattcttgccttttttaagcttgccacattaaacgttaatgtctgcagcaccacgttggcgtggttctcactccagctgcatcagactcagttcatcaaggagttaccatcacctaaccacttcaacacctcaaccctcaacttatgcacagaagtagagagatgttattcctttatgctagagatcatcttactggggatgttttaatatttagacaagttagaagcagaatgaaggactgccttggttttctttggctggtgtaaccaattatcacaaacttagtggcttaaaacaatccagatttattctcctgcagttctggaggccagaagtctgacatcagtttcactgtgataaagtcaaggggttggaagggccgtgttcttgccgggggctctagggg

SEQ ID NO: 88013 - DNA, 1021 bp, Homo sapiens
ccgaagtgttgggatttcaggcgtgagtgaccatgctcagcctagtcaatgaattgttcgctgaatgaatggatgcctgagtgaatgagagaacacacagaagcatgcatagtctacaggaagtttggaatgggcaattgtgacgtgggtcctttttggagaggagtgaagatggcagtcccagctacttgggaggctgagatgggaggatggcttgagcccgggaagttggggctgcagtgagttgtgatcacaccattgccctccaggctgggtgacagagtaagaccctgtctcaaaaaagaaaaagaagcttcttcctgctgtagcttgctggagagttaacgtgcacatgttcaaagcgctgtctttccccatctctctttttttttttttttgctcagacaagagtgagaatggtgaggcatatcagagaaagaaggcggcagccactggccttccagagggtcctgctgtccctgtgccttctcgagggaatctggcacagcccggcggcagcagctggaggaggatcgcactgctcatcttggccatcactatacacaacgttccaggtgaggtcttgcccgtgagcgtgacagccactgcctgaaggtaaagtcatttgtcagcacagttgtctggctggaaaaggggaaggggcaattgtgacgtgggtcctttttggagaggagtgaaggtggcagtacaaatctttcttggctttattttttgatcgtcatagatagatcatcatatgtgaaaacttcccattccggttagtttaaacaacttctacttcctttttgtttacatatttgttaccaagttatttggagcataaattcataactgttacatgattgctgtggagggtatcttttataaatactgggtatctctggttctgcttaatgctatttgaaaacatagttgacccttgaacaacacagatctgaactacgtgagttcacttacactcagattttcttccgcctctgccccctgagagagcaagacc

SEQ ID NO: 88014 - DNA, 1138 bp, Homo sapiens
caccaggtcttggctgcttgctttgctttggcaatgacctaagattgaaaatggatgagtggcaatttgggagtctagcgaagatgctttgcaaatgaacacattgccgcagggcacccgttttcagcagtgaagccaggaataattttctatctcatgctacctaactcctggaagttatcatgagacccttgcaggtggataaacacagtctggagaggaatatttctccatttgtattgggacagcatacctaaatctgggatgttcagagataatctgggcctctgcttgttagggagaggaagaggacattcccaagaccttagcatggattggcatagaaaccagagagttccacatgcatacacctgtctcagatcagggtttctcagtgtggtctgctgacctcgcacattagactcaccttaagcactgattaaaaatgggattccttccctgccttgagcctagttaaatgaatgaggtagtttttaaaaatgcagatgtagaaaaatctacaggttatgctaaacaaaaaaaaaagaagaagaagaaaaaaaaagcaagctgcaaaactggatacgatctaattcctttggggtagaaatgttgagaaggacatatgccctggtattataatattttttttctagaagaatacattaaaatctgtgaccagttatttgtgggaagaaatacttgggggtaggggagagacagttctggtttttatttcagctttttctgttctatttgcattttaaacacgaacatgtgttactttcgtgctttcaaatgtcagcagggattatccgggcatggggattacatgccagtttcttttctctatgtgctttttgtattatgaaaatcaatttttaaaaattcactgggcgtggtggctcatgtctgtaatcccagcactttgggaggccgaggaggccgaggtgggtggatcacctgaggtcaggagtttgaaaccagcctggccaacatggtctctactaaaaatacaaaaattagctgggcatggtggcgggtgcctgtagtcccagctacttgggaggctgagacaggagaattgcttgaacccgggaggcagaggttgcagtgagccaagaccacaccatggcac

SEQ ID NO: 88015 - DNA, 1030 bp, Homo sapiens
ccctaggagggagcactccagtcagaaggagcatccgggtcacagggagcattcgtgagaaggccctggagcttgtaggtgcttggtgtatttgagggacagtcaagaggctggtgtccagcaagtgttccagcgggcagggaccactagcactttcagatctcaattagagtatgacaggaatccatcaggaggttttattcaggggagttccatgagctgacacacattctaaagtattgtttgggtggctatgtggagaagagattctgggagctggcggacaagggtggaatccagatcagcagtttggaggatgcgtttgtagtgggggaggatagcttgagctgcagaaagagtggcggagttgaatgttgagctgatgggatttgcggataggtaaggactctgagagaaggagaaaggaggaggaggattcttagcctttgggattgagtgatttacagggagtggctggagaaaaacaagtttgggttggaagaacaaaagttctgtgtctgagatgcctctgaatactcaagtggtaacgtcaagtaggcagatggattcatgactttggagttcatggaagacattggggttggagatataaatttgggaatgacgaaagtcatgagattggttgagattgcccaggggagcctgtgtaggcaggagagcgaagagcactgaggaccgagcaccagggtcctccatttggaaatcgggaagtggaacagaatccagcagagggaactgagcagaggtgttgccagtgaggatgcaggaatactgggggagaaaggtttcttggaagccaaatgagggatgttcaaaaagaggggaattgactagacatgtgaaagaaatgctgaaaggatgagcaagctgagatctgagatgggagcactggattgggccacatgggcaccagtggtgaccccgacaaaagcagtctcagtagaatggtggagatgcatcatggcagtaggtttctctccaattacattcaactctttggcgacaagtg

SEQ ID NO: 88016 - DNA, 1053 bp, Homo sapiens
atgcacagtatgttcgtcctaatatctgtggaatagttattcagtactgactcatacgactctgggaagaattttctagctcttgagacatctcaaatcacaaaaacagaaaaatgtgtgtttctttttgttgttttgtttttagaaataatgacttgagtgtgagagaaatggaatttccaaggcaggatgggagcagtggggaaaatatcacttcgaaattctcattgaaaacaattgagaagtggggaagagtacttttcttcacaagcacattcacacttagggtttaggtttgtatttagttaggactgagagaacaaatagaagcagagatctgctgaggagagatggcactttaataagcaattttttttttcgtttctaaatttgctggagtccaggcaagcatgtacacaaatagccacaatttgtaaattgttcctgacatattttctgctctttgaattccctgaatgcctgcaatataattagaaataagcaatcttttatatcagtaataggaaaaaggacatggtttcagaatgcaaataagatgttacctaaacagaaaattatagcatggctgcgactgttctcgttatgacggaagacgggaaactgttgaaagcaataagaactgtgcagtgttgcattctgacatttgtctctgcctttcaaagccacctactgcatacacaggcacaagaaagatgatgcagatgaaaggggaagaaggcagagccctcgggagaagtgctcctcatctttgcggctgtttccttagtgtggttgagcccattggcttgaaaacggagtttcgatgcactttctctgtcctgttgcatagcccctttctgatacagactggaggaggtagacttttccaggggtccagctttccactgcggttgatagccagttgatccattccttcattcattatctgatccatttattcattcactcactcatctgatgggtgtgtgattcgtgctatcctgaactctgggatgacatcagtgtacccaaaaagacaaagctcctgccctc

SEQ ID NO: 88017 - DNA, 1702 bp, Homo sapiens
actggggtcctctcagttcaggccttcatcatctctgccatgaattactacaggagctcccaaattggtttccatgcttcctggtcctttccaaatttctgttgttggagtgctctcactcacccttgaggacttttctgtttttctgtttgtttttttttttttttttttgagacagagtcttactctgtcgcccagcctggagtgcagtggcatgatcttggctcactgcaacctccacctcctggattcatgtgattctcctgcctcagcctcccgagtagctgggattataggtgcccgccaccacgcccagctaatttttgtatttttagtagagatggggtttctccatgttggtcaggctggtcttgaactcctgagacctcaggtgatccgcctgactcggcctccccaaatgctgggattacaggtgtgagccaccgcacctggctgtgaggacttttcttaagcgtcatttcccatgtccctttccctcactccctggtacaggcaaaattgagcattttctcatctgtgtttctcttcctacttctgtcattacaatgaacaaatgtgttataaatattattaaaaatagatgtgcatccccctctgtgaactctttgaggaagaacagccttggtctttcttcatctttcggtacgctgttggggtacagcactaacaaatgtttactgagtgaataaaggattaatgtaggccgggtgcagtgactcatgcctgtaatcccagcactttcggaggctgaggcgggcagatcacttgaggtcaagagttcaagaccagccttgccaacatggtgaaaccctgtctctactaaaaatagaaaaattagccgggtgtggtggcaggcatctgtaatcccagttactcaggaggttgaggcacgagaatcacttgaacctgggaggtggaggttgcagtgagccaagattgcaccactgaactccagcctgggtgacagagcgagactctgtctcaaaaaaaaaaaaaaaaaaaaaaaaaaaggattaatgtgaacaatccccaaatgttctctttttggttttagattacgttatacatttttgaaaatttgttgtaaaaatcctatctattacaaaaatcatataaccagaatgccgttttcatagtaatataaaataacttaaattccctgaagactattgagtttaagatactgaatcatacatatgcacaccaaaaaaaaagattaaaaataatctttaatagggccttgggattatgtgcactttattaagcgctaattctttcaaaattggccatttgtgtatgatctatattagcaattttcatttaactacagtatttggttaaataaaatacccctttccaactattcttcacagagaaggagtttattgaacattctcaactagagttttgctgaaagtaatggaattttctttccttgaactcaaagaatagaaaatagaaaattgaaaaagagaaaaatagagaactcactatggatggtggagaactggcagctcagatgtttgcttccctttagggtaagggtggcagaggctcttcttgatataaacagcatgtttagagggtcttcattccatttagtgggatttttttttttttttgagacagagtttttgctcttgttgcccaggctggaatgcaatggcactatctcagctca

SEQ ID NO: 88018 - DNA, 1041 bp, Homo sapiens
cacctgattttatatgtttgctcagagctcaagagggcagggctctgttgccagtccctgccttccacccacaacccacgcctctaattgtcttaggatttaacactgagccacacactgactatctccaggatgcagtgggccttcgcctcagcaggggcctgtgggtcaatgagcaaagcccttttcctggagtagagacgtccatcacttcccatgcgctccagctcccgcagtccaggcccctgcagtggaattccagctgccgaggccacctcattgccttttggcattcgttttcataaatctaccaggagaaatatttctctctgacttcacttggacacgatttttcagtttaacagcattgctgatattctgatgggtttcctcagcgttgcaacctcctgcaacataatccttctggagggcagcatcgtgtttttttttcgtgttttttttttgttgtttgtttgtttgtttccctctaataggcacaggcatgcaggtgaccttttgaagctcgaattttgtttcagaaaaggaagatgctaaaaacaaggaccctcactgtgctgtcgcctgtgagatgctgaactctgtaattgctgctgtttcatgattagtgtctgctttcccagcacagtgactcggaaacacctgcagcatggatgccgttgtttgttgttgttgcattaataactgcagatgctgttgaagtgctcacccatcaatcattcctagttacttaccactatttcctctgccctggagggcgcgcctgcccccctcacaaatccctttgcccccactctttccctcttgcagtaaggtctccacccagcagtcagtgactgtaaaagtgcaaatcagattgtgtcagagccaagtccaaggacctaaccatagacttccaggatcagggtcctggctgcccctctggactcatttactgtcaccccagcccgcccccttcattcctctttctcttcctcactggcctccttgcagatcctcatacatcctcataatcctgcatcc

SEQ ID NO: 88019 - DNA, 1061 bp, Homo sapiens
ataattctgagtttcccttatttgcaaggcaagatccactctataatagttctgtaatggtgctggaaaaaggccttgggactgagtgttcctcctgggcagaggggtacccactggaagaaaccagaggggtacccactggttgttaagctaattgtacacctggtttacctccaccagctgcatgttaagcctattgtttcccttgctggttttcaaagtatgtccggttattctatctatagatatttgctcttggcatgctggtatggaccagccatctctttgttgatttgtttattcatttattcttcgcttagcaactgcattcatttcctatggagtagtttgctgttaacaaattactacaaacttggaagacttaaaaccgtagagatttattttctcagggagaccatcggtctgaaatcatggcgtcagtagggccacccatgctccctctgaaggctcaaggagagaatccttacttgcctcttcctagtgtctggtagccccagctatttttagcattccttggcttgtagccgcatcactccagtctctgcttttgatgtcgcctggcctctgtgtgtcctctcctcttccttttttttttttcctttttattttttttggagacagagcttcgctcttattacccaggctggagtgcaatggcatgatctcggatcaccacaacctccacctcccaggtttaagcgattatcctgcctcagcctccggagtagctgggattacaggcgtgtgccaccacgcctggctaattttgtatttttagtagagacggggttttaccatgttggccaggctggtctcgaactctcgacctcaggtaatccacccgcctcggcctttcaaagtgctgggattacaggtgtgagccactgtgcccggcctctcctcttcttataaggataccatcactggctttgaggcccaccccaatccaagatggccttatctttatgacctctgcaaagaccctgtttcctgttccccagggaggccctagctgtgtctttatctcagggccccatgca

SEQ ID NO: 88020 - DNA, 1130 bp, Homo sapiens
tcccccgagatggagtctcgctctgtcgtccaggctggagtatagtggcacgatctcgtctcactgcaagctctgcctcccgggttcatgccattcttctgcctcagcctcccgagtagctgggactacaggtgcccgccaccgtgcctggctaactttttgtatttttggtagagacagggtttcaccatgttagccaggatggtcttgatctcctgatctcaggtgatccacccacctcggcctcccaaagtgctgggattacaggcgtgagtcaccacgcatcaccacacccagcctttttttttctttcaattattttaaattcatggtaggttgaatctgtgggttccgactcagagggccaactgtatgtggatttctttttctttggcaactgcatattttaactttctgatgctgatattcagaatttttgacatttaaaaattaccgttgtcaatgggaactggagatgtttgaagaatatagaacagaagattattctgttgcatgcagactgagatacagagtctatcagataccctggttctctgataaaagaagtatcttgatttctggagaactagcagataaccccaccatgccacagagggtcttcatgtcaagttcatggtccgcaacctcagaggagccttgggcgagtcctcagacctctaacatacacttgctgtgctctcatttgtttcccacggtgattagtccaaatctctacctctctccccctaccccctacttcatccttatcctttaggcctttccttctcaacagatgatgtcatctcttatttcactgagcaaactgggtatcccaggaggagactccatccacttcctgcccccttgccaaaaatgtatcttgatttttccttcctctttacttcctggctgcctgccttcaaggaagtcaggtccctccctttctccaggattaatttctccagctcattcttgattttgtccctgtctctccagggagcttgcctccatgattagcttcatcctttgttccacttatgacagtgtccgctgtgtcgacttctttcattcagcttataaagatgcccaaggcttcccatttaaaaaaattaaaaaaggatttttttttt

SEQ ID NO: 88021 - DNA, 3025 bp, Homo sapiens
agacaaggtttcatcatgttggcctggctggtctcggactcctgacctcaggagatccacccgcctcggcctcccaaagtgctgggattacaggcgtgagccaccacgcctagccagctcagtgctcttacattacaggtaaggacaatgagtcctgtagaggagagataataagcaccagatggcccacgaatctcgtaagttcagctcgttaggttgcaccctggtctttttgttctgcccctggcaggtaacagtgccgatgaggtgaggtctttggatcccattagtttcattctgttccttggccacctatagcacctaacccctcacctcatcagagaccttcctgctgtaggtagctggtggtcacagaggagatggagtctgttcagatgaatcagctcaagaatgtcttctggagaaaacaacgcagctccttcactcattaatcctgacctactgataataactcagttggacacttagcatgttagatatttacatcacagtggttcctgcccacttttattttgtacacagcccaataaagagcagccagtggatttccatgacgtccacatgtcacaagggccctagttaaattgtcaggcaaatgaaatttttttcttggaatgtctcctccctcctcttgtccatctttttccatttctagacatttcagtgtcttgcatgctgcttgctggctgtgtatatctcccctgttagctgctctgttgagaagtggtcatgctctttgtccctcacatgctccaggtgttcccaaatcccccctcacttcttccctctagtgattttccccaactcgcagtttcctcccaactccatttaggtaggagcattttgccgcgagataaatcccagagagcagggatccagccttccttgcctttgaatccacagcccagacacagtgcttggcgcctgacagatgcttagcaaatgctgggaaagcagaatgatttcagggcccaaccccggaagtggagaagagagaagtggagaagagagtgtgtgttaaccacgtgtgtgcatcttgagttggcaggtgatgggaaacagctgtgtttgttatgaactggcattggtatctcaatggaatgtggacctattcttcccccgctgggtgtccttttaccaagcggtggaccacttcctatctggtcactgaagatagagtggtcatcccccagtaaatcatgacgtttgtactggtccattcctttctgttaccctctccaacttccttttaatttgcaaatgttttcagaagtgtatgaattgcatcacagtcttaattaaagtctccctatgtgtgtggaacgtgtgggtattcctagcttgagcttgagtctgctagagggattcagccctgtctgggcatgtttggtcaatgagttgggtgggcttgccatgaattgaggtgcggagggagatggggaagccttttgggagagtccttgcctggtaaagaggaatagggtatatatggacccaggaatgtggcttcagtggccagaggaaggctgggatgtatctctcgaacttggccactggtgcagttttgactgttgggttcctgcccaagtactaaggccaggatggttggggggcaggggaagagagggtttgtgaaacagaaggaggatgtaggcctggtggtcctacagtgacatcctggaaaagtggcagcagtgcccagctgctgccatggtaacagctgggtgtggctgcctcccattcagaagaggaccataatagacatggaagggaccgcgtgcaatggactttgatgaactcctgggactggccctgaggactcccagctgtgctcattggaggaaccgtgtaagagcctgcccgagccagtgtggcaagagttagggctgtatggtttcatttatgcttaaggtgatcaaatagtggtttaaggtctcttttttccctcttgacagaaggtttcaagtttgtgtgtttgtgtgtacagatatatgtgtgtgcatgtgtaacgtgcctgtgtgtgcgcgcatttcactgctgtgagggcagctcacaatgtcgtgtcttggaggtgaatgcagtgctgagattaatggagtgctcaaatgcagtgaactccagcatttgctcattaattgagcagaagttctctttgttccaaaagatggagcagctccacacacaatcccttcttgtaaaacaaaaggccagatctcctttgtgtactcgagtattactgggtacggccagacgtgtggatgtgtgtttcagtagatggcaccagactttggcatatggttgtgtgggtgtaggtggctggtttctatttacatgaaaagaaagcgaaggttccctaaaaatgtctacttagcagacttttgaaaaaatggattcggggacatttcacttcatagcagtcacaaaggtgtgaatataggagctactggatgtgagctgctccaggctgacgaggcgtgggaccatctgggcccctggtttgtggttattgtcagactggctcggctttcgcccactgccaggattcccaaggtgctagcatatgagctaaacacccgatgacaggtagcaggggaaaggctggagaaaggccagcacggttgggattgggagtgggatgtctcacttgtatccacatgattttaatttatggaggtgaggatgtatgagttgcatttcccaagagaagggggcacactgccatgtcatgccaggcccacgttgtaccacacaggccacaggaaagcaccaggaagcagaagagtgaggggaaagccgggactagagcctttgttgggattttctcaggaaaagcgaggcagggcagggtaacaattaggtaaagcattaaaacgagctagtttgaacaattctggtgggctacaggggtgtccctagttgactggtacctgggcctgggtggatggtgggcgagagaaatagtgtcccggtgtgagcatttgataaggaggtggttggctagcac

SEQ ID NO: 88022 - DNA, 1050 bp, Homo sapiens
gaaattcattgtgaccacgtttgtgcttgtccacccggctctccgaaagtgaattccagccagagcctgtggtcctagcagggcactggggttaaccagagcatcagagatgcagctgtggtggccgtgctgcccgaccaccctggcagctctgtctccaccccacgcggggtcatcatcacaggcagagggttctggcttctcttcccttgggtttccttctttttttcttttttttttttttttgacggactctccctctgtcgcccagtctggagtgcggtggcacgatctcggctcactgcaagctccacctcccgggttctcgccattctcctgcctcagccccccgagtagctgggactacaggcgcccgccaccacgcccggttcccttgggttttcaattcctcaccttctctttacttctgggaagcagatcaatttctcagctccccacatgctaggtatcatcaaaagcccctctacgctattcatcgttgttgctgtggtccaagttctctccctttctcttccctgtctctttcttcacctttatgatcatggtaaagtggtttgcttggttatttctgtttttttgtttttccaaatggcttacccatttcctattctatagctttattattattattattatcagcaagagtgggcagagactgtctttcggcacactcttctatgccccaacttttcaagatcatgctgtggcacattaacaaatgtataaccatgctccagaatgaatcacgtggagaggcaaattttattaaaccaggtttggaggtccgaattgggttatgagcgtgatttatttttattttattttattttttgagacagagtctcactgggtcacccaggctggagtgcagtggtgcaatcttggctcactgcaacctcagcctcccctgttcaagcagttctcctgcctcagcctcctgagtagttgggattatgggtacataccaccacgcccagctaatttttgtatttttagtagagatggggtttcaccatgttggccaggctg

SEQ ID NO: 88023 - DNA, 2137 bp, Homo sapiens
tccacttgcctcagcctcccaaagtgctggaactacaagtgtgagccactgtgcccggccccgagagttctttttctgtattctgcatagaggacctttgtcagatatgtgatttgcatttctttttctcccagtccctggcttgcctttccctcttcttaacagtgcctttggagatcgaaagtttttaatcttgatgaactgccaatttatcagtttttctttttttttgttttatgaattgtgcttttggtgttacgtctaagaattttttgcataacttaagtttgcaaaggttttctcctattttttttttctaaaagttttacgttttacatttaagtctactatctatttgaagtttcaaaaaaatatggtgtcaggtagagttcaaggttgagtttttttttttcatatggatgttaaattgtcccagcagcatttattgaaaagactgtattttctccattgaattaacctttcgcttttgtaaaaagttcgtgagccatatttgtttggttctgtttttggacccttcattctgattcattggtttttgtgcgtatcctttctcctttcacattttagaatcagcttgccaatatctacaaaaaatcctaatggcaccaggcgtggtggctcacgcctgtaatcccagcactttgggaggctgagtcgggtggatcgtttgaggtcaggagtttgagaccagcctggccaacatggtgaaaccccatctttactaaaaatacaaaacttagctgggtttggtggtgcgcgcctgtaatcccagctacttaggaggctgaggctagataatcgcttgaacccgggaggcggaggttgcagtgagcagagattgcacccctgcactctggcttgggcgacaaagcaagactccatctcagaaaaacaaatcccaatgggattttgactggggttgcactgaatccataaaccaatttggaggaaattgacatcttaataaatatagagttttccattttatgaacatggtatattctccaaagtctttgatttcctttatcagtgttttgtggtcttcatcatacatactctaccgttggttagatttatacctctaagtgttttatggtactattttaaattatactgtattttaaatttctaattgctcattgctagtatatagaaatataattgactttgtatgtgctagccctgtatcctccaacctcactaaactcatttattggttctaagaattttttggtagattccttggaattttctgtcatgtctatgaatagtgacagttttatatcttcctttcaatctgtatgctattaatttcattttcttacctgattgtactggctaagacttgcagtataatgttgaagggaggagtaagagcagacagtcttgccttatttctgatgttaggggaaaatcattgagtgtttcacattgagtgtgatgttacctgtaggttttcggtagatgaacggtatgcatatttgaaaagccaccactgtcctgaaagatgtcacaatatagaaatggtatagatttggagttcagagaataagttctggagtcagacttactgggtttgaattctgactcgactccttagcggctgctagatgttggagttttgggaagataggctaagcgaatacatgtaaaatgcttagaatggtgcctagtatattgtatgctctcaatgaatgttagttgttattctgtttggacaacagtaaaaatagccaaagagctcatggagcctggatgtaggaattttttggcccagaccgtggggattttgatgcccatattggaaactttggagaatgttttggttcaggtgtggattcttattgagtcattgagcacatttgggtccgaacactctctgaatcagggatatggaggaatccataccaaaagaacaggttgtttcatagaaacagggaggggaacatcacacaccggggcctgtggggggtggggggtaggggagggataacattaggagaaatacctaatgtaggtgacgggttgatgggtgcagcaaaccaccatggcatgtgtatacctatgtaacaaaactgcatgttctgcacatgtaacccagaacttaaagtataat

SEQ ID NO: 88024 - DNA, 1013 bp, Homo sapiens
caaagtgctgggattacaggcatgagctgcggcgcctggccgaaattttaaaaaatctgtgtaaaactttcagacctctaagaatgtatccttgtgtcctcactggagaagccctattttaagtgaatgagattgagtttgtgggtttaagctaaagcaattgtttctagtctggatccatggagagctgcagggaattcctggggttcctcatattacacacaacattttgtatgtctgtgcatatgtactgcaataaatggcaaaatagccacaaatttccccgtcagcatccgtacctgacaatgtgacattgcaggtcctcccaacaaaaagtaccattgattcatccaacccttcaatgtggatacccatttacttgctttggccactgggatgatgctttggcctctgtgatgtagagacttgaaaagcatttgacattggatgctgaggttagcgtacgaatgagctccatctagtctgctggaagatgacaggccccaccaagaagaatcagtgttttccagtcaactcctggccaactgcctgctggctgccaggtgcatgtgccatcttagaccatccagcccctcgatgagccaccagctgacctcagatgcaccagtgagcccaggtggatgagcagccatgcccagttgaccatagaacaataataaccggctgtttttttaaaccactaagttttggggtgttttgctacctagcaatagttgtgcgatacatacacatttttaggaaagagaaattgtggcttttgatggatttttgaaggcatctaatatcctccaaaaggataacataggtcagaaaaactttattgataaacaccagctggaggttctcagtctgttgagaagccagaaaaagctcagagtggattatatgggtgcattttaataaagtctgggactaagtctaggattagattaagagtgttggataatcatcgaggattagaaaagaaatacttcattatacttcggttactt

SEQ ID NO: 88025 - DNA, 1027 bp, Homo sapiens
caggttggtcttgagctcctggactcaagcagttcttccacctgggcctctcaaagtgctggattacaggcatgaggcactgtgcccgtatctagtttttgatagttactcagctgattgatttctaacaggacagatctgatgggttaattgcaccgggatagggagtgagaactgaatgttcccagcaacatattcctccccagacatgctgggtcgaggttaactgatcatctcattataaactgaaaggacttcaggacggggtagtgtgagactctggctctgcaggaggctgaggccccaggagacatgaagttgatttaggtgcattctgtgtttatatgagagggagtgggctctgcagaggatgggttaagggaactagttgaaggctggggtggccaaagtaagcaactcagatatgtgagggtgtgtggtgcgttcacatctgatttatttacgattgccaaggcacagcagggggcactgctaagagaatttgcactgaggcttgggtgtgactgccctccatcaaatcgctgggcctctgcgtctcagattcctgatttaggagtcattggtgacaatgcctactttcctcctcatctcctctgatgccctgctgtctcctttcattatcccctcattggtcctgaaaccatgtggatgtgatcctttacagcaagtgtgtccaatcttttggcttccctgggccacacataaaatacaggaacaaatactaacgatagctgatgagctaaaaaaaaaaaatcacaaaacctcataatgttttaagaaagtttatgaatttttattgtgttacattcaaagccgtcctgggccacctgctgcccgtgggccgtgggttgaacaagcttgctttagagggagggctggcaaagtacagcctgagggccaagtcagctgcacctgttcatttatgaactgtggaatcccctgcagctgcttttgcaacacagcagcagaaatgagtagctgtgatggttgtgattgaacacagaaa

SEQ ID NO: 88026 - DNA, 1097 bp, Homo sapiens
gatgcctgcaagtgcgcatttaggtgatgggaatgcatgccatgaactctctctttcttgccatatgctctcttggttttctagggcagctggtgaatactgttctatgcatttgtatgcccatgtgtgttagctgtgtacacagtccttgctcattgaggctgcaggaaaaatatctgtggctttgcagtcagtggcacagagcatttcaagcgtgtctgctctctggcttttgaccagggttcagaaacccacctctgttgtcgatatatattcccggaggaccccgtgggtctggcacgaacacgcgcgcacacacacacgcactgcgtgggctggcttgctgaggggaactccttaagcacggaatggttcttgttcttggtctaagagtggtggggagtcttgagtgcagataggcttggttggaaccttctaggacttagatttccttctccgtgggtagaacaccttttcatttgttaggccataaagttgtaactggatacctgtcctctcttgctgtctcttgagctcagccacatgtttatgaaaaatgcccagaagccaccgtggaagcatattgaaccagtcgatagccgagggtggcaaagatgattatgagtatggaaggggaaagaggctgggagcggtggctcacgttggtaatcccagcactttgggaggcagagctgggcaggaattcatgaccagcctggccaacatggtgaaaccccgtctgtactaaaaatacaaaagttagccgggcatggtggtgcctgcttgtaatcccagctacttgagtagggctgaggcacaagaattgcttgaacccaggaggcagaggttgtagtgagccgagattgcaccactacactccagcctgggtgacagagcaagactatgtcttaaaaaaaaaaagaaagaaagaaagagtaagggaactgagtatgcatctaatcttcactggatcccttcttcttggcaaaggtgactgggaccgtgtctgtcttgcttataaccgtacccctagctgggtgctccatagagcaggtcctggtcatgcctgcgtggtccatctcctctgggattgatcg

SEQ ID NO: 88027 - DNA, 1023 bp, Homo sapiens
gcaactaccttgggtcagaaagacaaaggctgccctcttgggcaaagcagtgagccaaaaaggagtctagatccctgctgactccatgaacctattttcccagccatggtctctagatttcttctacagaagaggggtctttcttgttttttgttttttcttttttttgagaactggcaatgaagacgcttatacagtcttagtctccttttcaaccttggaagcagatctgcagcaataatagtaacaagcaggagcaatgggggtactataatgaccatcttttatgatgactggcgtattaatacaaatcacatttttttgagtccattcatgctatggatgttttcttatgcataaacatagagtagacacgtactgaatagatcacatctgttaagtctcttgccacaagcatcacaacttttcagagctgtctcttctgtgaaaatccatttaatgtagcaagttgattttctttgtggttcatccccatgcctgagacttgcagtaatgtaaaaccagtttaccatcactgccaaaacactcagagagagttccaacttcttggtctggggaaggagcaaaggactgattcacataaataaacaactgttctgaggccacaagtttaagaaactttttgatgaagtcaatgagtccttggatggttcatgttcgctctactgcccacttctttgttttcataataggagtatctcccacagcctttagcaaaatgtcaatttttttcttggtgtcgccagcaggttcctctgttcccggagaaactgcagtggaagacgggggctccagagtggttgtttctggggagacctccgtaagtccttcccctccagtagcacttgagggaggaagctgcaacatggactgcggctcctccaccatcttgcttggagagactccggggtctttcttgttttagccactatgtttcaggtctcaattattctcagtcaaatctaatcctcatagatatggatcaccaaaagcagagaagca

SEQ ID NO: 88028 - DNA, 1001 bp, Homo sapiens
agacatcggggcgcagaagacagtcgcttgggggacttggccagcggcttttgggcacggcctatgcagtggttttttctctccaaacctagacaaactgtcctttctgtcccgaggtgggggacggggacggatcctagatcgttcagcgtctagggagagaagcccctctttctccgctctgcgcccgccgcctgcctctggcaggctcggatctccgggtgcgctcccgcaggagccccagctggcatctcacggcctcgctcccctcgcgccaggtctcttttgtagggggctgggagagaagttgtcacccgtcgcagctacctgaaatctcgggctaaagggcacacgccacgcacacgggcatgaggctgcgaggacacgtccgttccagcacactctacccacagcccccttactcaggcaagggtacccgttgtcgttcattcctactacaatcaccccaaaaggcacaagagcggagaatcacgcaccgggacctaagctcaggcactcggatgggcacaccaccatcagcgcagatgcacacaggtgcccaagtgcgcttctcgctccctccatctctcttatcacacacacacacacacacacacacacacacacacacacacccctcacctttgcttttccgctgcaatccgctagctccggtctccgacacccagcggctgtccccgagccagctgggcgccggggcgcgcagcagcttggctagcgcctggcgccggacgtttggggttcctggctcctcgaccctcttgtgccggctcccgctagcccctcgcacgtagagagctcccctcgcccgcagacccccggcgccaagcctcagactggggctctgggcgctggtggtcttgcgagcgcgcgcgcatgggtggctgcgccgctgggactggcccagccagcccgggcccctcggcacatttccccacgcccccctcccgctacgtcacagcggcttcgctccgcccccc

SEQ ID NO: 88029 - DNA, 1081 bp, Homo sapiens
cacctcctgggttcaagccattctcctgtctcagcctcccaagtagctgggattacaggcgcccgccaccatgcctgggtaattttttgtatttttagtagagacagggtttcaccatgttggccaggctggtcttgaactcttgacctcaggcaatccacccacctcagcctcccaaagtgtgggattacaggcataagccaccacgcccggcctgtagaattagtcttctctgccttgaaattatttctaccaattcttggtcccttggaatcatttccctaaaactcagcatttattcaaggaccctggaacatcttatgttataataattgtaaagttaggtctaaagcattttcttccaaatctttgcttgtttttgtttaaaaaaaaaaatcacacttcgctaaacatggctgctaggaagccctgagctgaacttacagttgaccttacttttactaatggtgtgggattttcctgcatgcaatttctgccacaactttttctgtagtcttgttttataactatacctctttttatttttgtatggatttatctatccaaaatcttattgaacatatttttctgagccacaggaagtacttttgggagtgaggtggtgtgaatttatacagaacaaaagcagcacattaagaaggacacccacaggtggagcacttagtcactcccaccggccaacagcgcttgcttagggagccggatgaggaaagctcatttaaaaatatggtaacatctatgtgtgagatgctgagtgatgctctcagatgaaacccaaagatgatgacatccttgcagacacccaggtgtgtatttcttcatactctagaaaatgatcagtcaatgaaatggatattgtctcttttcttatcgcttgtaaatgtcagtttggggaacgaaaaaaatgccactttatggtgtgaagtgcctgtctacaatagtccttgcagagcggctcagtgagtccatggcattaaagatatgacagttactatgtatacagtcagtgaggaaggcagcacagcagtatctccgagaggtggggccccaccaacactca

SEQ ID NO: 88030 - DNA, 1013 bp, Homo sapiens
ccgccagccacttccggtaagtggatccagcgcaaagagctgctctggtggtggccaggcttcacattacgggtttatggcgtttgtcttctttcctgatgtaccaaagctctttacccaagatgtgaaaaacaccctggcgacttctgtcatcatttttctaggtcaactattctgcatgaaagcaagatgttgctcaaatgccaaggtgtgtctgaccaagctgtggccgaggccctgtgctctataatgctcttagaagagagttctcctcgccaagccctcacagacttcctgctggccagaaaggcaactattcagaaacttctcaaccagccacaccatggtgggtgtggcttctggccaacatttggtccttaaatatgggatggagaagggtgagctgcgggagactgaagcctccagagcgtcctctgtctttcactttgggaaaggtaattgtttcaaagaggatggtttcttcttttaggtgctggtatcaaggctcagatttgctcattagtggagttgctggccaccactctgaagcaagctcatgcccttttctacactttgccagaaggactgctgccagatccagccctgccatgtggcttgctcttctctactctggagaccatcacaggccagcatcctgccggtgagctcttagccaagctttttaaattctggttcactcaactgataatttgctcagcgtctaccgtgtgccagccaccatgctaggctctggggatggagcagtgaactggacaaatagaggcccttccttcatcgaggccacagttgagtggtagaagcaggtatcagactcacaaatatgcgaatatccatttagtgtctatattggtcattgctagaaaggcttagtacaagttgccttgggaacattgaatggaagtaactcaccaaggtcagagaaggcttccctggagaagcctttaacctgaaagctgaaggttgagtgggagtcacttagatgaagaaggcaa

SEQ ID NO: 88031 - DNA, 1047 bp, Homo sapiens
ttaaagccagatacttgacaaggattttagatcttaatgggttcgatggtagggaatacggaaaggatacactgctaatattgtgtctaacaataaagcaaacaactcgatgctgtaagaagacaagctgtttgagctttcaaacacacatgcacacagcacaattcagaaatacccaggaggattcctgcaggcttaacagttggcatcgtactgaaatgaaacgtgtattaacaagaaaatgtcaaacttttggggaaacaaattttctgttacttcccacccaactaaaagggaagataaaaccatcatcaccagaacaaaacagattttctccaaacaagtacaatgatagtgccgggttggcagttaactctttcaccctactaaattcaagagctcatctccaccctgtcctgtatattttctacatttctattaagaggctacttggtagtgtcagcgggcatcttttacaccttctagtagctcaagctagtaaaaccttgtacttctctattgcgccgccattaaaagcagcattagtgcattttgtcattcagttcttaatcagttatttaaaagggagctgatcatgggtggctcggtgggaggtggggacccatccacggatgagcctcttgctcttggcaccaacctgagcttttgtttcgatgtttctggttgatttagcctttcgagtgcttgtcatgctcagtgggagaagtccaaacctccaaaacaagaggaaagaatttagtagcacaaacaggcagctctggggcccagcagaagcctcattttttttttttttttttttttgagacagagtctcgttctgtcgcccaggctggagtgcagtggcgcaatctcggctcactgcaagctccgcctcctgggttcacgccattctcctgcctcagcctcctgaatagctgggactataggcacctgccaccaggccagctaattttttgtattttttttagtagagacagggtttcaccatgttagccaggatggtctcgatctcctgacgtgatccgt

SEQ ID NO: 88032 - DNA, 1029 bp, Homo sapiens
gtgaaagagttaactgccaacccggcactatcattgtacttgtttggagaaaatctgttttgttctggtgatgatggttttatcttcccttttagttgggtgggaagtaacagaaaatttgtttccccaaaagtttgacattttcttgttaatacacgtttcatttcagtacgatgccaactgttaagcctgcaggaatcctcctgggtatttctgaattgtgctgtgtgcatgtgtgtttgaaagctcaaacagcttgtcttcttacagcatcgagttgtttgctttattgttagacacaatattagcagtgtatcctttccgtattccctaccatcgaacccattaagatctaaaatccttgtcaagtatctggctttaaaagttgggagatggtagtttaaaaaaaaaaaaagctcttgcaaaaaccatccagtccctaagcatgggctatgttgcagcctcttccagaacagtttccactgcagtgatctttcagttctgcccacattaggttagcaggctgtggagagaagtgcctgtgtctacccttttcccaagacagtcctcatttccaaattctagttttgtcacaaaggctcatgctgttccgtgtcctcttcaaatctggaccgacagcaaagtcctctgactagagccatcgtgcttctcagctccgcttgtgtgtgccgtgtggactccgagtggcgtcgcgcggagggcgagtgggcaggagggctcaggccaactctaaggcacttttctctacatccaatggcaggttgtccccccggcacgctccacagctggtgacccgacagttcctggctccttgttcagacagcttgtcagtgaagaagacaacacgtctgcaccttcattattcaaacttggctggctctctagtatgactaagtaacatggcaacacatctgtctctccctaaataaatactaccacattatttcttctaaaggtgcctctgctcatctgattctcagccacaccaatctttccagtttcactgat

SEQ ID NO: 88033 - DNA, 1058 bp, Homo sapiens
gaaattaactgccatactacctctcagtatgtagatgttctattgaaagtactctctcctgtgtaacaggagaacaatcagatccaattcagactgtcagtgaagcacactccctaataatagtctctactctttgttatatatttgtatttccagagagaatgtcttttagattcttgtatacccagataacttctgtgtcactattccaccagagtctgcacctcagactttagtaggaaacatggcacagttctgcaagtaaagtaatatgtaatgactttttgtcctacaaacttggtcagtcagcagcttacatgatctcattgacaattccaccttgtagtgtcaacaattaaggtgttgttgaacgctgataaaatgtaagctacctgaactgatgtctaaagcaacaagtattgtgaaattttgggacaaggattaacttgatgcttaaagtaacccccaacagtaactagggggccacattccatcagtgaaactggaaagattggtgtggctgagaatcagatgagcagaggcacctttagaagaaataatgtggtagtatttatttagggagagacagatgtgttgccatgttacttagtcatactagagagccagccaagtttgaataatgaaggtgcagacgtgttgtcttcttcactgacaagctgtctgaacaaggagccaggaactgtcgggtcaccagctgtggagcgtgccggggggacaacctgccattggatgtagagaaaagtgccttagagttggcctgagccctcctgcccactcgccctccgcgcgacgccactcggagtccacacggcacacacaagcggagctgagaagcacgatggctctagtcagaggactttgctgtcggtccagatttgaagaggacacggaacagcatgagcctttgtgacaaaactagaatttggaaatgaggactgtcttgggaaaagggtagacacaggcacttctctccacagcctgctaacctaatgtgggcagaactgaaagatcactgcagtggaaactgttctggaaga

SEQ ID NO: 88034 - DNA, 1043 bp, Homo sapiens
aagtggccattctacattgttatactaggttaggagacgcctttgtagaatacaatttttgtttttgactttgacttcttaagcctctaagtaaatacagttgcagctggctgcaaatcctgctatctgacttcatcagcccggcccattatcatcctttcatgaggtttttatttttttatttttttattctagaaagaggggttgtcccctgctacctgtaggtattggggtatgtgaccatagctccaatggcctcggcaccatcacaagtcttggtttgagtcttgttaatgatggcagctttgtgaacattgcttgttttcattgtttcagataagttatctatatgcatattattggatgtaatttttggtcaaaaaagggatagaactaggattttaagaatcactttaaaatatatatctgtaaacagcattttgtttaatttatacatttttataataaaaatacataataaccacattgcaaaaaagttgaagtgtagaaaaagtcaagcagctataatctttccatcctaatataactactgtgatttcgttctttctttccagtctttattttttttgagacagtctcattccgattgcgtaggctggagtgcggtggtgcaatcttggctcactgccacctcgacctccgaggttcaagtgattcccccacctcagcttcctgagtagctgggactataggcgcgagccaccacgcccagataatttttttgttttgttttgtttttgagatggagtcttactctgtcactaggctggagggcagtggcgtgatctcggctcactgcaaccttcacctcccgggttcaagcgattctcttgcctcagcctccctagtagctgggaccacaggcacacaccaccatgcccagctaatttttgtgtttttagtggagatggggtttcaccttgttggccaggatggtctcgacctcttgacctcgtgatccacctgcctcgggctcccaaagtgctgggattacaggcatgagccaccgcgcctggcctttt

SEQ ID NO: 88035 - DNA, 1027 bp, Homo sapiens
aaatcacaactatctgtacagtggagataatagtatctgcctcttctttcctagatactataaagctaaataatgtgaactgatttgccggattagttatatagagagaaacttcatgtgtgcataaattaatgtgtgcataaatggcttctttcccccattttatttttttattgtttattgttttttgagagggagtttcactcttgttgcccagactggagtgcaatggcgcaatctcggcttgccataacctctgcctcctggattcaagcgattatcctgcctcagcctcccgagtagctgggattacaggcatgtgccaccacaccctgctaattttgtatttttagtaaaggcaaggtttctccatgttggtcaggctggtcttgaattcctgacctcaggtgatctacctgccttggcctcccaaagtgctgggattccaggcgtgagctaccgtgcccagcctgttttagtaggtattattatctccacttctcagatggaaaacttggcacacagaaaaatagtcacttgtccaaagaacacagctagtaagaggcagaggaggaacggagccccagggtgtggttgttgggctgcacgctcctgaccatggtgtgtgctctcccagaagatagaacagaggttctgcgagactttgctaaatatatccaggagcagctagagcctagtcttctctttttttttctttttttttttttttgagacagagtttcgctctgtcacctaggctggagtgcagtggcatgatctcagctcactgcaacctccacctcccaggttcaagtgattctcctgcctcagcctcctgagtagctgggattacaggcacccgccagctcgcccagcaaatttttgtatttttagtagaaatgggtttcacgatgttggccaggctggtctcaaactcctgaccttaggtgatccatccgccttggccttccaaagtgctgggattataggcgtgagccaccgcgcccagccctagttttgttttgag

SEQ ID NO: 88036 - DNA, 1051 bp, Homo sapiens
aaggtgactctccggggtccaggtctcccgcccctccatcttttttcccccctgtcttttcctatttggaacgaagtgtgatcggtcccggaagagagacggtggccctaaagctttcctgtcctaaatttaggagggtggggggatgggataaacgtctcatcttggagagggagcccccaaaggcttttgtgagggcaccgggcggggagctgccggctccccaaggtcagaaagaaaggttgggcttaaccccgcagcagggaaagattcggttagaccgaagaacttgtgccctgaacggttgtgaacacagaagggcagatgaccaaggcgggttatggatcttctcttgactgtggcattaagaacaagctggattctaaactgtttggattgcggggccgtttgactccgaaggcgggaggaaagattttatcgcgatgcactcgctaccttcccgagggagcctggcctcgggacgcgggtcttaaattaggggttctgtgcttgacatgtactactagagtccggactaagttgggatttcttaatttttttctctctcttaatttcctctgcaagaatgtgtggaggagaaagttgggaaaggttacctcagaatgctcttcctgttacggtctttccacaaggatccttctctgaaataattatttcatgtgattgaagttctcaaaagtattctgagtttatttggtcccatagtgaaaacctagggttccccaagctgctgcattggattattgatttgggtcatgtagcaggtggagcataaagcctctccttgtatagaaaagaagagtggactaaatttgaaattgggggcccaattacagacatgccatcggaattaggagcaagatctttagatacagtgaatctgacccgactgccatattattctttcccaaacccagtttatacttacgatattctcttggggtgtctcacatatctgaaaaaaaatctaaatatttcctacaaataaaaattctactgtacataactaatctgaatgcatttatactgg

SEQ ID NO: 88037 - DNA, 1027 bp, Homo sapiens
ggcctaagttttttattctttaccattctgtccttgaataacgtgtttaagggtttttaaacaattttttatactcatataatgactagttgacttgctgtaaccgtaagtagcaaacatctagcttgttccaaatgaatttaaaagatacaacacataagtaaaatattggtatgtacaaactatgtgcttctcataatctcacatttacctttttcaggaataggatgagtgataatccacccagaatggaagtgtgtccttactgtaagaagccatttaaacgattaaaatcccacttgccatactgtaagatgataggaccaaccatacctactgatcaaaaagtttatcagtccaagccagctacactcccacgtgctaaaaagatgaaaggaccaatcaaagatttaattaaagctaaagggaaagagttagagacagagaatgaagaaagaaattctaagttggtggtggacaaaccagaacagacagtgaagacctttccactgccagctgttggtttggaaagagcagctactacaaaggcagataaagacatcaagaatccaatccaaccatccttcaaaatgttaaaaaatactaaaccaatgactactttccaagaagaaaccaaggctcagttttacgcatcagagaaaacctctcctaaaagagaacttgccaaagatttgcctaaatcaggagaaagtcgatgtaatccttcagaagctggagcgtctttactggttggctcaatagaaccttctttgtcaaatcaagatagaaaatattcctcaactctacctaatgatgtacaaactacctctggtgatctcaaattggacaaaattgatccccaaagacaggaacttctagtaaaattactagatgtgcctactggtgattgtcatatttctccaaagaatgtcagtgatggggttaaaagggtaagaacattattaagcaatgagagagattccaaaggcagggatcacctctcaggagtccctactgatgttacagt

SEQ ID NO: 88038 - DNA, 1064 bp, Homo sapiens
acatctttagaaatctgaatttacaaaaagtcatgccattcactttttctgtttttgtgtcaaagaccaggccattatgccagtaagtacagtaagactcaactgataggagttattaaaaactaacctatggtcaggagaagatgctcaatggtcttactatgggattctgtttcccaagttccacagtaagcctgctgtcatcctaagcagggtatgagtgaggtgcagaagtagcctgtggcaggcaggtttatttcttttgatcctgtaagtgaacgagctactaaaaatacaacaggtttggaggcagattggcaggaacgagttatccataaaacgggagcaaaatgtacataaaaccaaaagctcgagtctatgggaaatccacgatcattatactttgctcagctcctaccaacaggtctgggttgcacgtggcagctcctctgtatatggcttcagctgccgctatcaactggcaattaactcaaatggctttctttagcatgacagctgcttccctgtatggcttatttaaatctaagaatatactctgtaccttatgtgtggagtattatggggcagtagatggaataaaataggcttatcctggggaggtaaggtagtaacacaaaaatttaacggtattaccatcttttaatgccatcatgaaaggccaataccaagcaacttaatccactgggaaagggggggtagtggctgtgctgagccttttggaataatggagaagagcaatgggatgtgtgaggaagaactggccccccaccttggtaaaaagacaggtgcctggcctgcctggagctggagtccccagtcagggcagtctaaaagaatggagcccaggagtcgggttttggggggttgaatgccagttcaaaccaatgggggctgctatgtgatgaacagcacagagctacgtaggcaaatcactctacctcaagcccgttttctttttggaaaatgagcaggatagcacctacgccacaggactgtttgaaactaaaaggagaaaacacatgtaaaaaaccttgcatggcact

SEQ ID NO: 88039 - DNA, 1075 bp, Homo sapiens
gtgcctgcctgcactcaccttcatgtaactcgggttgagtaaaagattcatcttgggactaagggaagtggagagagagacgattacagcccagctctcgccctcccatcttctgctcattaacatgctctgcgccagcctgctgcagatttcatatttcagaaccctgtagggaagttgccctcccttagccagggcgtgagggagaattacagaggactggggagaaatgggcattaagtgtttcttctcttattactagaacagtttgtgaaaagatcgacacctatccccagcatgaatacacattaagaggatgggttagagttctgagattgccagggtcaggcagtggtgccaggaaaatactggagcggatgcttgccagatgcttcattttccactaaggaccagcgaaggtatggaaagatctagaactagaaggccaggcctagcactctggtgggagttggtaactgagggatcatacttactgagcaaattggcacttgggtccctcggggcagaagccaactaaatagttgagacacattattctggggacatggcggtatttacacagaggacctgctgagcaaagagaaagtgatgagaaggatccgcttcagcaagaggggaaaacacacatgaaaaagctccctaggaagggtgtggatggtcataggggcttcacttaataggggtggataaatcttcccatcctttctgtaccaccctaaagcatccacttctagccatgagacagggatggggaaaaggaaccttggaatgtgctggagcaggtgtcagctggcaagttctgaaatagagttggaaatgtcactgacatgctgtgtcctggaggactgcatggatatgaaccacactttgttgccttttatttatttaagtatgggaggtacagctgagaaaaagctgacctggccgggtggggtggctcacacctgtaatcccagcatttgggaggccaaggtgggtggatcacttcagcccaggagttcgagaccagcctgggccacatggtgagaccctgtctctactaaaaatacaaaaa

SEQ ID NO: 88040 - DNA, 1073 bp, Homo sapiens
atccaccctttttagactgcagcaaggattaggcatactttccatcttcaaaaagctggtgactcccagaataaaggccagtgtcttctgtgtttgtgaggggcaaggtcaatctggtttggggacacagaagtgatcacaaagagaaactgcttctacagagagtgctgggattttcaggtgactgcagcaacaaggagtgttccttcctccatgtgaagccagctttcaagtcccaggactgtccttggtatgaccaaggtttctgcaaggacggtgaggccttggaagccagggagccctaggggctgtggggatcagggtgggagctctcagcaggggaggggccattttcctgatgaggctgtgccttggagaaaccccaaatagaaggcctttctgtagttctcctccagctctgctgtgacacacaaaacacagcctggtgtggggccataacaggcttgaggcagactgacttgggttcaaatcctaccttcagcatgtatcagctgcatgcctttctccaagttactgaaccacacaggaagctcttgacacagggtcaggcccataggagacgcttagttcatgtgtgctctcttccgcattccacttacccacctggggggtcctgagtgttgcttaagcatgtcctacctttcccattgctgccagccaaatttaagaggcagcttaccccagcagggttcccatgccctaagcaacagggtttctccctctcctttgtcttcagataggtttttcttacggagttcttagtgctgttggttttagggatctgggcgggggtgagggctgctgagaagatcagtaggattgtggggttagcttttttctttctatcacccaggttggagtgcagtggtgcgatcttggctcactgcaacctccacctcccaggttcaagcaattctcctgcctcggcctcccaagtagctggggttacaggtgtgtgccaccatgcccagctaatttttgtatttttagtagagacagggtctcaccatgtggcccaggctggtctcgaactcctgggctgaagtgatcca

SEQ ID NO: 88041 - DNA, 1858 bp, Homo sapiens
gcctcagctccagggctaaggactctcggctcccattttctctgctggcgtttctgctgtgcccagcagtggctgctggggaagcagctgcagcaggagggagacggtcttgcctctcagcccctccctgccccaccccagctcctgccctggaaatctggagccccttggagctgagctggacggggggccagctgcgagcatgtgcactaaacgcagccctttccaggggaagagaacaggatggagaatggaaggaaagccccccaggcttcgtgaattgcaagaagggacccttccaggatgacactaggaacagggctagggcactcgctcagtccctaggggcttgtttgttctttattattgtgtttaaatccttatagagcaatatcaggatggtgttaataggtctgcctcagaatgagaatcaatccttttagaaaacctttatactaagcctcctcttcaaaattcacagtggcgattagcggactggagtctggtggcgattagcggactggagtctggggacatccgtggcaaagacaccagctcaactttagtgcttcccaactttatttagaatgacatggggtgggtgtctggtgtgtgtgttttccctacgcacctcccatagctattaacaactgaggaaggccagtgcagaatatttttggagaacgattttttttttaaataatatatcattcctatggggggaaagccttttttttctttttggctgagttattccctccctcccctcaataccctcagtactgactacttccctttcttttctcaggcctccccccaccgacttttgaggccagggttggccagatttagcaaaaccaaaacagagtgctgagttaaacgcaaatttcaggtaaacaaaagataattttctagcattaatatgccccacgcaatatttggaacacttatgtgaaaaatgatttgtttttctgaaattcacgtttctctctgagtcctgtaactgtccccgaggggattgagcagaagctcgggtatgagccctgaggttgactgccggttatttttctgtcctgggaacagcctgacccacctccctgtctccatgtagccagtgaggggagggggagacacagaaccaaccacagccaggggcgtccccatggcgactgtggcccggcccctcctctcttgcctgactctcctctcttgcctgactctagacactaacttagttccaggttcggtgccctgttggtgctcctgtttccaatagcttaggtcccatggtgggggaggaacctcaggggctatgcagcccccgccagctgccctcgaatcccgtccaggccaattccagattctaaactgatttttttcatgatattgtcaaaacagtgaggaaacattaaaaaaaaagccctaaagcacgcctggtgtctgtctctgctttttgggagggctatttcaggatgggggtggggtctggacccaggtcctagagctgtccaggggggcctgaggtggcttctgtctctctgtccgtgaggacccgcccttcctgcgatgctgtctgcctgggcaggccccttcagagtctggggactcaggtgtccctaactgccatctcttggaagcccttggcacttggtcgcttagctgttctgtgcctccctctcctgctctgtaaaatgggtatcctgccactcttagagggttgaggcacagaaacagtgacatgggctttttgtgggggagggggttggttttttgtttttttttgttttttttttttgttgttgttgttttgttttttttgagatggagtctcactctgtcgcccaggttggagtgcagg

SEQ ID NO: 88042 - DNA, 1027 bp, Homo sapiens
agcaattctcctgcctcagcctctgcagtagctgggattataggtgcatgccaccacgcccggctaatttttttttgtattttagtagaaacagggtttcactgtgttgcccaggccggtcgcgaactcctgaactcaggcaatccacccacctcggcctccccaagagccgggattacaggcgtaaaccactgcacccagccctggccaacccttcttaacaagtccagagcttttccagaagggccttgggttggcagtggcccagggcttccacccctttggagtgactgattgatttctgcggcccggactgtctgtgcgcaggtgtggccaaaaggtgtttgatgttggcctctccctttcactctcccccaccccacgcccctacgtttggattgggttcgaagtgaagaagtcagaagtcagagtggtcagggttgcacttggttagcagtaagtccagccttctgtgttctcattctggttctgcagactcagaggagtttgtccctgtggggggagggaggagtccgtcccttggaggaatggggagctgggttgatgccagagataaggcctgtgggcggagggagaagggttgagcaatctcgccctggaaacagagctgacctgagctctgcgtagctcttctgacctacgtactggaggatttttcccgaccgtgaggaaaagaaccaaattctggagctggggacactttgaggggtcatccggcagagtgtcctgaaggccaactccagccagtgcttctggggtgctctaggaaggccaagcccatgcgtgccctctctcggcagggaactggatggtagtgctggaaggagcccgcatgtggcactggacacagccctttttgcttgagtgcgttgggaaggaaattcagacattagggccgggcacagtggctcacgcctgtaatctcagcacttggggaggccaaggcgggcagatcacttgaggtcaggagtttgagatcagcctggccaatatggtgaaaccccgt

SEQ ID NO: 88043 - DNA, 1064 bp, Homo sapiens
aacggaccaggcatgtcttccacacggcggttcagcgtccccagtcagaaggggcccccggtgtcaagagctgtgctggaccctggaaacagagtggaggacagagctcactctttcccctggtgcccagtgacccctccccccgctccctcctcccgggctccacgctttgattaatgtgtcctcaggttcctcaagccacaaaccctggagcagcgccccctcctctcccacttaggcccagcccacaggcctggcctggccactgcgcctgcttcgttctttctctccctgctaattgcatggcctcctttacttccgtcctggaaggatgcagcctggcaggtgcccctgcctttcgcccagccagagccatcttcccacgcccctgaaccacccctaccctccaggcagcggttctcagagcagggcgcactaaaatgcacgttcccagggtggatgctccgaggggttgatttcctggggctgaggtgggacctggcagtctgcacttagacaaaagcccctggaggccgtgacaaagtggcaccttgagaaacacctgatggagcaggtcacctattcacagccagggccctgcctcccccacctcaccacccaccccctccgcagaacgcccttttgtgtgtaactgcccgcccctcaccccaggaagtcttccttaatctcctgtattgtttctgttgttgttgtttgggctttttttttttttttctggagacagagtctcgctctgtcatccaggctggagtgcagtggtgcaatctcagttcactgcaacctccacctcccgggttcaagcaattctcaagcttcagcctcccaagtagctgggattacaggtgatttctaccacgaccagctaatttttgtatttttagtagagacagggtttggccaggctggtctccaactcctgacctcaagtgatccacctgctgcagtctcccaaagtgctgggattacaggcatgagccactgtgcccaatcgcctcctttaaatgtcctcttcacctcccttcccctcccacccctcatccccc

SEQ ID NO: 88044 - DNA, 1057 bp, Homo sapiens
actatatacaggataatcccaggtgtaaaatgtttaaaaacagaatacattgaccacaaattgtgtaagtttgcatctctaggtaaggaaacgtgaaaggaaagcaaaggcacatgacctcaatattcaggagagaaatcacctggtgccggggaaggggggagatccagggtaggggaaaggtattgttagtgttctaggccttcagctgggaggtaggtgcaggagtgtttattttattcttctgtaaactatacatataattatatttgctcttttgtatgcgtgacatatttcatgattttaaaatgtttttaagtaaacacataaaagcaagaaatatattctgaagtggaatgcacactttacaaggccttttaagatatgacaaagacatcaggaataattttcagcaccttctactgtgccccaggcctgcacttctttgctcttgggggaatttcttgggaatgttggatcagccctgcagggcataacacggcgtattagcaagcaggtacctcggggagtcagtgtggcaagcccttaactgtttttgccttagtgtgagtgagttttcccaggggatcgtggggcctcagtctccgttatcaccgtcattgtctccaccctcccttctcgcctctagcctgcactcctgcactgtctggctgaacagaccgcctcttagcagcctcttgctgctgtggttcagtgcatacatggctgtgtgggtggggcatacacacacacatatgtatgtataaatacattcacccatggcctgctcaacaaggaactccctgggcagatccaagaagcacatttgacaaagtacaatggagagactgtgagggccttggggcctgagagccacagtgaggtgggaagatgttggagtggagaagtggaggaaaggggcaactgcagaacctggaccaaggccagctgtgccctacctgcttccatccacctcaccatataaacttacgtgtatgcatacatacaaccatccttccaccacatatacatgcgtgtatgcttgcaaacatgtaga

SEQ ID NO: 88045 - DNA, 1034 bp, Homo sapiens
ctgaagaccaagccttggagtcagactgacccaggttcaagtccctcccagccacgggaccttgggcaaattacctggctgcacctgctccatctgcctaagggccttaggatactaaacgcaccaggtcacataggtgagcaagtgatcactggtggctttgtctccctgtttctgcagatgatgtgtccccgtatttcaagacagagcctgtgcggacacaggtgcacttggaaggaaaccgcctggtgcttacatgcatggccgagggcagctggccactggagttcaagtggctccacaacaacagggagctgaccaagttctccctggaatacaggtaaactgcccctccccgcccttcctcctggctgccaggaccactgccctgctttgaagagggcatggtgaggagggggtttgtgtgacagtgtggggctcagggctcctagagcctggagttctggaagtgagtggcaaaggcagccctgccccaaggtgagatggctccaccctactgatccctgcagaggatggctgggttgtggaccaggggccagcgctgcctggacaggatggtctgtaccacagtgcataggagcagaggtggtgttgggcacagggactcactaacagcagctgtggctgtggctgtgactgtggccccctgctcactctctcgaacactgccatctccaggggactcttgttgtggggcctgggtccaatggaggggtgggctctgcagcaacctgggatcagtgaaggaggggacatcttctatctatgggaaattcaggtgggacacagagatggccctctcagggcctcttgagcttatcttcacttcctatctgtgcccgtgccatggagctcttgggcctgactggcctttccctgccgggacattgccaggtggggagaaggaagagcagggaaagagaatagggtctcagcaagggtggatctgctgccagcagggaagcagcccctcacccaggccaccctggcctccagcctttcctcgcagccac

SEQ ID NO: 88046 - DNA, 1046 bp, Homo sapiens
ccgccaggcccgtcaagtcccgggagccatgttcacagacgtgtcagctaatgaactaattgattctttcctcctccgcctgcatccgcctgcacaggagagagggcaggtctgaactctgcctccgcctgccctggcaccttcagggaggggagaaaggcggagggggcagctggggtgggtccaggcttcccatctctctctctgcctctcctcaccccccgcccccgacagcactccttcccccaacactttcctgaaaagcctttctggtgtcttttccccagcccctccccagtcccatcttttgagccctggggtctgagtctatgtagggattggcctcatctgagtcccgggttgcacaagcctccttgctctacagcctacctgttccacaccctggccacctcctaacttgtctgatccaacccagtcctgagaggcagaggaggaactgaccccagccgcctcagagaccctctcccaggccccaggcacactgtgaggttggtggaagaatgagaccagaaccagtcctggacagacaggcggggcatcccagggcagccttgcagcgctgggtcaccctcctgagagtagctgatggttgtatcatccagctcagtggggtcttcaattaattggccttaatctggttggaggagcagctggaaatggcggtgctgtcccccaacctcccagtgtgatgtttgtgatccgccttctgaggccccaggcagtggtgggtggggatggggactcctctgtttccggtccctttgcctgcttgcggcagggcatgtttagctcaaacgcaccccttctctcccttcccttgttcttgcacatttcccctcaaccccctcatctctaacccctaccaccggtgtctctcaagtagctcgtgtgtgtgtgcattcatttatttaggaagaaagtctcactgaggtggcgacacaatcactctccacagggtccccctcctgccatgggacccgaaccacatacagtaggggtgggtcagaagcagggcggcaggctcg

SEQ ID NO: 88047 - DNA, 1032 bp, Homo sapiens
tccagccgtgtggcctctgttctgtctcccaagcctgccctgcaaccccttctggaaaaccttggggtgtgcagatctggctgccctcaatgctgcaccccaggtgactccttggctcagtgtcacctcctcagtggggtctggcccacctcccaaactgaacaccgtagcctactcctgacacctgctctcccacccgagaccccttccctggctcagcgttttgctttttttcatgagctccccaggggcagcaatctttgtcttaagggtcccccggtagatcccaaatgcccggatgagggcctggtacatgacaggtgctgaacacacacacacagttgaatgaagaaatgagtgcgtgtgggcctctccctgctctcaggccaggtcccagctaagatatgtgccaatcgcactggttgatcagagtggacgtctcagctgtgcttttctacagctgcctgctagggcctcttctcagcaaggctgtggtggtgaggacaactcctctcttcctccttagagatctggaggatcctgtgaagtcctcttgaccacttgttgtccacaccacttatttggcacttgaatcagtagttgcctcttcttgaggacacatttctcccagggagcatgggacaaagaggccactcatgaaaggggtaggaatgaatgagggaggaagggactgtctcccttgcctgtccagcctcatggtctagcttgaatattggagaccctcaagaagcattggctcttgggccattccaatgcttttccatcttggaagcctggaaaaccacccttctggttcagtcattgactgagctgctccactcagcatgccatgggaagctttccctccgcctgatctgcaccccttctcacccactatgtcaccactcccagaatggagaatatgtttccgtgactaatagagcctgttcccttcccctctccattctcggaactgaaaatctggattctgcgtggatggggtggatagtggctttttctccatggatagag

SEQ ID NO: 88048 - DNA, 1026 bp, Homo sapiens
ggctctacttccccctgccttcctgtattctcatcctttgcaatatgactttgcatcttcccccatcaagagctggagtctatttccctcccatattagcttcctagggctgctgtagcaaattgccataaagcaggtggctgaaacaacagaataagtccaaagtcaagttgttggaagggccatgctctctctgaaggctctaggggagaatccactccagatctctctcctggtgtcaatccttggacttgcttggcttgtagctccatcactccaatctctgcctctgactttgtgtgtctttctcactgtgtctctctgtctctgtgtcttcctctcttcttacaaggatgccggtcattggatttggagcccactctaaatctaggatgtttgcacctggagatccctaattatttacatctgcaaagaccctatttccaaggaaagtcacattctgaggttccagatggacacgcattttttggggacactattcaaactactacaccaccccttgaatctgaactggccatttgtcttgctgtggtcaacagaagctggtagaagtgacaatgtgtccactctaaggccatgaagcctccactcttgaccgtggaacactaagaccacctgtgaacaagcctgaactagcccatggcccagctaggccaaccagcctccagcccacccagcagttgtgcagatgaatgcagctgagctcagtgaagctcagtagaacatctcagaccagctgagtccactgtaaattggcaaaccacagaattgagactgagtatatggttgttgtttgaggccacaccaagtttagggttatttgttacacagtagtcgatgactgattcacaaggtgttattggtttagggcaaatgggagatgagtgccatttctgggtgctgcccacgtataacaaaaaccaaagtcttggctgggcgcagtggctcacacctgtaatcccagcactttgggagtccgaggtgggaggatcacgaggtcaggaa

SEQ ID NO: 88049 - DNA, 1026 bp, Homo sapiens
tcaggtgccatgaaaaccaagcccgctaccaatttttgcaggattcttggaggaggtgttttggagccgatttttaacttaattttttgatgcttctgccagtcgttccctgccaaccttctgaactctccctgccttgctggcttgctaagtgaagccctgaacagaatatggggatgagtgtcaggaggttggtccttccataaactgactcgaatcttcgattacggtgtggcctcagttttctcatctgtcaaatgggagtcattatacctaactcacgtcttcaggcttaaacaagagcgtaggtaaagattctgacacaataccagctacttgtgagatggacacagccgccgtttcctttttcttccctcttgacatttgccaggctagaatacgtcctttctaaaattttgcttaggggtgtgtctcttccagaaagtcttccctctacctaggtgctattgaactttggcatggccctgcccttcgcagcacagggcggtgtctaagagtgagggctggggacgggctttgagattcacatcttggctcccgggctcacctgcagtgtgatagtgaatgagatgtttatctctttcaattctcagtttctcgttagaaacagtacgtgctctgtagggctgttagggttaaatgaggcagcccatataaaacgctttcctgggtcctggcacgtagtatgtgttcaataaatgacagctgttacccatcatcctcatgaaccatgaccctgatcaccggtggtttcctagaggactgcaagtctattctacaactgccattaataaagaaatctttcttcttatttgaaaaacaaaagcaaaacacccctgcccaaacccacctcagtgaaatgctgcctgcctcctctgcagagtcctgccccttccaagtagaaagaattttacttccaggcttaattcgcccaattactccatccgttacaacttactcctctcctctagtgtacccagagtctttgaagacagactgtactgg

SEQ ID NO: 88050 - DNA, 1057 bp, Homo sapiens
acccttgaagaacatggagaaagtatagtgcaatgatatgggcttgagcctcctctacaaagccagggtgcatgtagcttggctttctagcacccacagacctttggcaagcacggtgggaagactccgagatggtcccccgccctgattcccacctcgtggtgctcatgcccttgtgttagtcccctcccctagagtgtgggctggacctagtgacttgcttctagccaacagaagacagcaaaggtgaggaggtgctcttcgatgacaggctgcatcagatgacaatctctgtcttgttagattctagtgccttcttggcttgccactttcatgaagcaagctgccatgttggagaggctcatgtgacaagaaactgagagtggcctccagccacctgccagctaggatccaagacactcagtcccttaaggaactgaatcacaatgaccacatgagcttggatgtggatcttttccccagctgaaccttcagatgagaccccagcccctcaattgcagcctacgagagaccctgagacagaggacagttgagctctgcccaaattcccagcccatagaaagtgtgagataataactgtgttttaagccacagtttaagttttgggataacttgttacttagcaatagataactcatatagcaagttatttaacctttcacttttctatttctcatcttaaaacagttctaatcctactacctttcaagaatgcggagaagtttaactgagtagatgcatggaaggtgtgttgtgtagtgttgggcacctaggaagcaagaaatagcagcttcattattaatttacatcatcctaaatagtaatggctgttctgggccacggcatttagagcccctgtgctggcttgcccttaatacacacgcatttatgcagctcactcccttcatgtccagccctgccctggctgcattcagaataacaatgagatcctaaataatgccccagtaataatgtctgcttacatttatagagagctttatagtttacaaagctcacttatattgcattgactcaa

SEQ ID NO: 88051 - DNA, 1179 bp, Homo sapiens
acgggaagaaaacgtgaggcgccagaacaacaggttctacaaggtgcacacgagggtccctgccattgaatgaagaattttctgtgtggatgcccctgcgcaggtccaatgaaagccgtggagaataagcgttagctcttcaaactgaatctgagctaaaacctagcaaagccaggctggggtctgaggggttgcgggggaagacaggaaggggtggacggggaagaggcgggggtcctaggaggaagggatggggaggagcgagaggagggaggcggagggagggcggcagccaggatggtccattccattcttggagctgcactgttgacttcgaccacaagggggcagggctgctgaaattggaagtgcgaacgcctacatgagtcttgatcctcggcaggcaccgtacccagtttcctccgttgggagggtttaactgcccggaaacggaagtctcgttctttttcgtccttttccccggttgctgcttgctgtgagtgtctctagggtgatacgtgggtgagaaaggtaatctggggcaatccactgccaggtgaaatctggggaccccaggtccgcgtggagggtgtcggggaggagaaggggagtgcgatggggccgatatttcgggggagagcgggaaaacggggttcgctgccagcccccgcgccgtgttaacgccgaggactgtttcccgcaggtcctggtccgcgccagagcccagcgcgcctcgtcgccatggtgagtacagtccctgcctggcgccttcccggggtgggctcgtggggccccggggcgagggcgagagagcctcccaaggatctcctgaggccgggagaagctggtggactgggccatcgccgggagacgtgtctctttcctctctgttcacccgcttcctttgtgttgcagcctcggaaaattgaggaaatcaaggacttcctgctcacagcccgacgaaaggatgccaaatgtaagtggttgctccgaaggttcaagaagagcggtgcctagcctggcaccgctccgggagcgtcttccccggaatgtcaggcaggagacggttaggccgtctgggtgtgtgcctggccctctgggagcagtggtttcatcctgtttcccatgagaaagacctgtggggggcacgttgaggccctggaatttctaggaccatct

SEQ ID NO: 88052 - DNA, 1323 bp, Homo sapiens
gggtgcgtgttgtgcgcagtggctggaggcatcctgaagaacgagctcttactggcccagaatgtcatctcacatgcggaggcctgatttccgggagtggagtgctgaaaagcgctcagtcccagcagacagcccgtctccttactttatcactgcttctatccctttttaaaaagataataggccaggtgcggtggctcatgcctggaatcccagcactttgggaggccgaggccagcggatcacgaggtccagagattaagaccatcctggcaaacatggtgaaaccccatctctactaaaaatacaaaaaattagctgggtgtggtggtgcacgcctgtaatcccagctactccaggaggcttaggcaggagaatcgcttgaacctgggaggcggaggttgcagggagccaagattgcgccactacactccagcctggcaacagaccgagactctgtctcaaaaaacaaagtagaaataagaaagataataaggttgatagaagatattctgtaatgttgtgttcagtgtacccaataaaagtcccaagttggaggaacgggtaatagtgttttctgtttgcacagagggatggtactggaggtgggtgctgtctcctgcatgctgcttactgcttgagtgtatttgcacatggactgtgtcacatctgttttctgtgatacaatttaattcctgattctggtctccggtagctgtcaagatcaagaaaaataaggacaacgtgaagtttaaagttcgatgcagcagatacctttacaccctggtcatcactgacaaagagaaggcagagaaactgaagcagtccctgccccccggtgagtgagcctgaagtcacttcaggggcgggtggggtttggaaggttgctgtgtgtggccatgttgtatcttgttttgaatccctctcagatttcagagcccattttatggtctaagaatctgctcttgctgttgggagtgtgaggaatagttgtgattctcagattatatacagtaccagaaatcatttccttagccagaagagcggttagagctcatttaatcctgttcacgacccttcgaggttggtgctagtactgatagtccccattttttacaggggaacagatgaaatataatagaccaagtctttttatcgaatataatagaccaagtctttttatcaaacactaaatattttaaccgaaacttcgctggtggatctaatttctgaaccttgtgtgctctctttagcttaagtacaaaatttagacaagcagcagcaactcagatgtgtcttctggatggcttacttttgtctctt

SEQ ID NO: 88053 - DNA, 1042 bp, Homo sapiens
gcactcagcgcccgaggcctctgggtactctggtcttggacggtatccctctccttgcctttttcccttggccatggagctcaccacccacagccctccctgctagctggggattcctgccttgtctcctgagtggctcggactcttcatcagcagggcctggtccgtatcttcatccagggtctgaaccagaaaccggagaccagctctggcacccctccctcactgaccacgaggcccaccacttggcctcatgccctgtaagctccatcactcccacccaagtgcctcagcgccgggccctctgtttacagagtaggagcttgaaccctaggtggagcttggaaggatggacgagagatgcagctcaggcagtggggcactcagggcccaagggcagggcacttccagagccccgcactgcagggatgaagagtgacaacaggcctctgctctcttccagtcgctgctgttcctggggctggtggccgccgtctgcctgggcctgaacctcatcttccttgtggcttacctggtctgtgcatgccactgccggcgggacgatgcggtgcagaccaagcagcaccactcctgctgcatcacctggacggccgtggtggccgggctcatctgctggtgagtgtccctggacgctgggcttggggtgtgtgactcagtctgcaaggggccagggactgtttgaccatgttctgacggagctccagctaccttgatggaaaagcttgtccccagatgaatgttgtccctttttttttttttaccaagcatcaggaatcagatgcctggggtggtgatggggtctccagaaaggtctcccaagtggccccccacaaaccctgccccaatgtgggtttgtcctgtgcccagcagctgtgcaggcagcatttctgcaccgacactgggcatctccagtctctgtccctggcccctgccagctgctgccctgggtctgtgaggtcagaagaaagtttgactccagcacaaatcaattccatcttcttgtgagatcaatagcttttag

SEQ ID NO: 88054 - DNA, 1016 bp, Homo sapiens
caggggcctctgctctacgatttagctgataacccaggactgaggagggcagcagagggcccgggcattcagcccaacaggctggctgacttctacagaagcttccccaagagtccacacagaccctccaaaggagttcggtggggcccagagcaagagctggggcccagggtggtgacagccctcaggccacagtctggcctcccttctcctctcttctcaccaggactttgcgatctggaatgaggagagttcttggtgctgggaggggtgccccaggaatagcaagaaggatacatggggtcactgttttcagggagcctgcagtccccttgaggagatgggcagggacacatggtgtacaggcacctggtgagcggattaggcaagaggacgcagggtagtggggacccacatgcgcatggtcagcgtggtggggagcctggaagagctggtcgtgaagctgggaatgggccagaatgatctgcaggaggcaggctggggaccgcgttttagaggagtctcaaggagacacgcgtggccagagagtcctgggaggaaaggcagggaagtaggacaggacctggctgcctcggagcctccttcacccttcacagccggccatcttctacccattgttctagaaacagagactacgatgacattgatgatgatgacccctttaacccccaagcctggcgcatggcggctcacagtcccccgaggggacagcttcacagcttctgcagctacagcagtggcctgggaagtcagaccagcctgcagcccccggcccagaccatctccaacgcccctgtctccgagtacatgtacggcctgcacacacacccaggctgggtagcactgcccggacagcatgttgggtggggtccacagtgccgggtgtggggaggaaggcatccaaggccacccgtggtccccactacagccacagggtgcctggagggaaggcccccggggagcatctagtcacccctccacacccacatgtgctg

SEQ ID NO: 88055 - DNA, 1092 bp, Homo sapiens
tgccctgctctccacaccagaaatgcccccaggtgcttggctgcctcagaggtaccatccctgagctggctgcctggccctgctcacccctacgcctcgcccttgccaggaggggagtggcagtgaggagggggccaggtcaggcaccaccatcaagagagctgtgtgttctctctggtcccacaacgatgactctgcctcttgtcagcccagccaagagcccagacgacccctctgtcctcgttccctgtcctcgttccctgcaggtaacatgagaagggctgatcaggagatgctctttaagaagttcgcacccctgctgacaccagaacagcccaaatcagagttcccagggccagacaggctcttcctgggccacagaggggaggcatcaggaaagctctgcagtggggggctggtggctccggggctgggggatcacaggctggtgaaccccggtgggaacagaggtgaaagcctgccacattccgcctgtctccctaaccctccattgcctcgcctctattccagaatcaatgctgcagaatgtgttagctgcagataggcatggtctcaggtatgaacagacactttgaaacgactttaggtctttcttttctccagtgttttaaacatgttgattatccaaagaattgaaactcctagcacatccagtttttacaacagatttgcagctcattccttaccctggttaggtcactacttttgcagattttgctggcactgatctggagatctgcagatctggaggagacgggaaggagtcgattcttaaataaggatcagtgaggcatcctgtcccaagctactgtttggtggggatctgggttcatctcacccacagagggaggatctttaagaggagaaaaaagccaagagggaaagccagagttccctgttctaggggactagccaaatgcctacatcagctgtcccctccctgttgtctccaagtaagtttgccagaaaaggttttagcaaagtgctacaactgtgtctttataggaggataggcctctgccctgccccacccccaccacctgtccccacccagtgtcccaggccacagga

SEQ ID NO: 88056 - DNA, 1025 bp, Homo sapiens
ttaccatcccaccccatagaaggcctgttctgggaggcagctggattcacctggcggaaactgctggagtccttggatggccttattcggaggtcccagcttccccctgtgacctgtggagacctcagccacctggaatggctgagacaagaatgctggcttttctgtgcatgggacaccattgatttgtcttcctcagtatatgcttctgtacccaggacagcagtgatgtcctgcagggaagtggggacccactggatcttttgctccatgggcaacatcataatactcattgctaacaacgctgggatccatggttcaagagatggagcctggagatgtccagctcagtggcagcagcagacaggacagggcaaccacgtcatcagccagcacacagcctatacagaggtgagaggccccttcttggtggtggcgattctttcctacatggtgtggtgtcagtgaccagggtaggctgctagcccacggtggaagggatcctatccactaaggcagtcacctctgagccagcctgggcaaggtgaaagatgttatgaagacccagccgcacaccttgactttttttttcttttctttttgagacagagtctcgctctgtcacccaggctggagtgcaatggtgctatctcggctcactgcaacctctgcctcctgggttccagtgattctcctgcctcagcctcccaagtagctgggattacaggtgcctgccaccatgcctggctaatttttgtatttttagtagagacggggtttcaccgtgttagccaggctggtcctgagctcctggcctcaggtgatatgcccacctgggtctcccaaaaatgctgggatcacaggtgtgagccaccgcacccggccacaccttgacctttttggtctctgaagtcttcagccctgatcagtccagccagagccaccaggcctgagcaccagggtctctctctctcttttttttccttctgcctccctacccctcaagacagggtctcactctgtca

SEQ ID NO: 88057 - DNA, 1030 bp, Homo sapiens
ctataggctcttgagtgtgtgggatgggaggaaggcaagtgctctgtggtatccctgggggaacctccctgaagagtgccctggtcacagcacccttgaagacagccattggccatgggtcagtgttgagtttggttggccctgtgacgcgctggagctctctttccagtgcggtatccttggccctggtgggtggagggggtctcaggcttgtgtgtggatgatgctggagcgaggaagggagttttgctctggagaagtgagaaggcctggctgtctccccggttgctggatgaagccacttgttgctgggggaaaccagtcagggctgcttgggcctctgggcctctgagcctctgagcccaccaggcctctgcgccccctggagagagaaggagggaggagggaggttcagcaactggactgcactgactcacaggagagctgggggcagggtggctgagcctggggaaaggccgatttcggaggcgattaaaaatatttgtacaactgattccagggaagtgaagcaaaaggcccttttgtccagaaaataatctgaggctggagctgggcttcagctgtggggtgggggagactcagggcggaaggaggttcccctcctacccccctccttgaaccctctgagaatctttaagcagaagatgcaactccaacatggaggggacaaccctgggtgtggagaaatgcacctgggaccatccagaggtgacttccaaatgcccactgtgttcaggcacagcaccagctgtggcagtggattctagaagtcttgttcaccagcttcaaagaccttacagccctggaggggagacacggacatgatttgaacgttcagggatcagaaggctcagtcttagtgcagggtctggggacccacaggaggcagaagtttcctccagggtcctgaggaaaagcctctgaccagagctgagtccatcttgtcagtcccttagccaccatcttaaaaggtggcattgggccgggaacggtggctcacacttgtaat

SEQ ID NO: 88058 - DNA, 1015 bp, Homo sapiens
tttcctaagactctgacgtccagcagcctctctccgtggcccaccctgggtaagccagtccagtgggtggcacttccagccatgtggttgagacagcagggtcctgacctttggacgctggctcaagactttgccagggggctgccaggccggccccggggagcctgctcctcccaggcttgggaatgtttctccccagctagtcagaagctattttctgataccggttgtaggggaaaaaatgtttttgttgaaagggagagaaaggttgctgggaaaaaaaaaataaacttgaaggggagagaaagtttgctgggaagaaaaaataaacttctcccaaaattctccttctatgctcagattgcattagcctcctggggactgaaacactatttttaagtaaaaaccagttcttgggccccacgcagtagagtcccctttgactcttgttctttctggtcactttaggctcagtccccacaaagtaaaacgagatggtagaagccctcttcccgggactgcacggcatcctgatcctcattcctctgtacccaggctggaccgggcccagcacctttcccatccttgtcattggagctgggaggggccggaggccaccaacctgaagcagtggaccgagtgggcccccgtgaagccctgagtgtgtgactggagcgcctagggccacctccctttcctgcccagcccatcttcctggtccccaggtggctgcagctacaaggagctgtccgcgggcccccaggctgcctccaactcccctcttgacacgcccccctccccccaaatcatagtccctgtgtccccaagctgtggttcagattgccttcttcccctctgtgaacaacaggcctcagtgccccgtcttgactctggaccttcctggccctgccatcttggtgtctggcactggcttgtcccaccctctgcctagatggatctcctccatgagtctttggagccaagccagggcagaagttggcccttgcccttctca

SEQ ID NO: 88059 - DNA, 1066 bp, Homo sapiens
ttgtgaatgtgtgtgggtgtgtgaatgtgtgtttgtgtgtatgcgagtgtgtttgtgaatgtgtgggtgtgtttgtgtgtttgtgaatgtgtgtggctgagtgtgtttgtgtgtgtttgtgaatgtgtgtgggtgagtgtttgtgtgagtgtgtatgtgagtgtgtttgtgaatgtgtgtgggtgagtgtgtttgtgtgagtgtgtatgtgagtgtgtgtttgtgaatgtgtgtgggtgagtgtgagtgtgtgtatgtgagtgtgtgtttgtgaatgtgtgtgggtgagtgtgtgtgggtgtgagtgtgtatgtgagtgtgagcgtgtgtgtgtttagagtctgcactctgtgtggatcaggaaaggggtccttgcaggctcgctgagtccctgctctgtgcccagccccgagttggctccaatggggctatatagaaaggaaggcatggccggaggacctctgtgtcaagttgaggacacatttccaagactaggaaccattcagggactctggagtcacgatgacaactccccttccctcagccccgaagcccaggcctggacctccaagggactcagggaagggactcaggaaaggggagttccccctggcagcctcctcgtgggcaccaccgagggtgagaggagccagctcagcgggtcccacccccagggttgcccaccttgaccacaaggaaaggagggaggagttattgggccttccactaggaggagacccggggaagtgagagtcggggatcagtcctgcaagctacggagtcactacagggagaggtctcatcactagaaatagccgaagaacctgcagcctcaaccagcgttaaggaggacgtgccgtttctagggagtcttagtcggggctcaccagcttcctgcattttctgaccggctccaggaatagaaccaaaagaagctgaacaaggaagcagcgcggcaccaagaaaagcagaagtcggggccttggaggcgtgactttcccctcgggtccaggtagggcctggagctgctgcaagtgccgcctgtgctggggaagggaccatgtgg

SEQ ID NO: 88060 - DNA, 1045 bp, Homo sapiens
gtcaggtctgtctgccttttcttataaagcagttccattcccatgataacccattcatcctttaatccacgaatggattaattcattcatgggaactctgcccccatgacccagtcaccttttaaaggccttgtctctcaatactgccacattggggattaagtttcaacacgagttttggagggacaaatattcaaaccatagcaagacctcaggactcagacaccctctgtcacaggtcactctgagtgacagttaatttactcaagtgggacctcagggaccaggacagagcaggacctgagagacacacacgtatatacactccctcttacctgggttaatggtcacttgaactttgaccccaagatcaattccaggtctctcagtcccacaccaataactgtcagcatcatctcttttgagattctccatggtcacggtgaacacgtggtttttctgattgtccctgatggaaactcgattcttctttacctcctgctctgatccatttgttttaacaaggatgttacagtaattccaatcagctccttgacaccgccacttcaagtaggtctcccagcctgagccataagcacactgcacagtcaatgagccctgctccgagccattcactgttgttggaccagtgattttagcggcaatggagtaacctggaaaacgcaaattcatgtgtcgtcacctcccaccccaagggcagggccacagcctcgtgcattgggagtagcagccaaatccaactgccttataacagtcaaggaagcaatacattttcctcaagacaaatctttgtccttcaaaattccactgggtcaaagtcaccaggaaaatcactgaagagcacaactgcagatccccaaagaaacacaaatgttggcattgagcaataatagcttcctgcagttcacccctctctctttccctatggccagcaaatctttatattccaaggaatgctctttggcaaccatctttgtgttatactggtctgatggggaggaaatggcagaaggcccttttccag

SEQ ID NO: 88061 - DNA, 1075 bp, Homo sapiens
atggacatactttggaagacagagacctggtaatcccttttcacccaagaagaaccaagccctggatgaatggatgagcagctcacgtttttctgccccccacccccagtctttctgagactgactttgtcctaggaattgttcgtccctctggaagctagtctggtatgtggatgttccttagagccctggtgatagggaattaggaagtaagtgcttgaactgaagcccttttgtcctaattcactggtatctggggcaaaagcttgccctctctgtgaaaatgaaatgaaaatcttttcattttctgggagctcaaggtcagaccctggcacagtagggacccaatccgtgggctgttcctgaacccctaccccagaccattgccctggatggctcttgaagctggtggcaagagagaactgagagttctctaaggaaaagagcagccaggttgctcctttgttttaaattatttagctgcaccaaattttcagatttgtggcaacaacaactctatttaaaaactccaggcacatgatggatgagctcaatgttttcagtcagttcccagcttccagcccaccctacgggaatcttctaagagttacttgggcttgcctgggtcagcctccaactattgggaccagctaaagtgcaagagctacacaatgcctatcatgatatttggcgtatgtttttcatataaatgaatttcatcaagtcccatacaccacctccaagagaaaaaagatactcaacttaggaagtcagaactgggatgtttgcatagaagtcacgctttttgtatagatgggttgtgtgagtttatttccatggacttctgcctgtgaaataggtagtgtgtgtgtttctgagattctcttgtatgaagctgctgctcttctcacaaagctcatcattttaggtgagactgaatgtgacacccattgaagctgctttggagcccaagatgcatgccctaatacaaccacttttttttttttttcggatggagtctcactctgtcaccaggctgaagtgcagtggtgtgatcttggttcactgcaacctc

SEQ ID NO: 88062 - DNA, 1090 bp, Homo sapiens
tcagacattttctcacaaaaggccccagggaccacaaattaaaggaaaggatgcttaggagaggaaagcctggagagtttggaaaacgactttgaggcgctggactgagtcaccatcatttcctgctgaggttatcctaagagaactagcaggcaccaccactccccacaccagctgcctgctctgggatctgggcaggaccgacctatcagccaaaggagtcccagacggcaccagattgccagtgatgtaatatacacttcatttgtttatctgtaagccttcagagcaagcaagagaggaaaacaagccagtggaaatattatacagggagcagctagcttttcttggctttcttgtttgttcctgagctgacaatagaaatctttgagaattggaactagtgcgctttgaaaacaaaactctcttcacttacagggcatggatttttctgctaatttggattcttttgaggacaaatttgcataccattatcattatcattgtttcatcgaaaaaaaaataaaagaagcacctgtgggatagagaatgagagaggaacacagaatggcgagtatggtcttttgctgttttatttgtctttctcttgtacaattttctggcagggaaggagaacactgttgtatccagacctttccctaggattaataggtgacagtcccatggggagggagctagctgatgtgtggaactctgtctctcatggatgttaactttattttttattttttaattttaattttttttgtggggggacagagtctcactctgtcacccaggctggagtgcaatggtgtgatctcagctcactgcaacttctgcttcctgggttcaagcgattctcctgcctctgcctcctgagtagctgggatttcaggcgtgcaccaccacggctgactaatttttgtatttttagtagagacgagtttcaccatgttggccaagctggtctcgaattcctgacctcatgatccacctgcctcagcctcccaaagtgctgggattacaggtgtgagccaccgtgccaagcctggaggttaactttaatcagaagccataagtgagagag

SEQ ID NO: 88063 - DNA, 1027 bp, Homo sapiens
gaggtcggtgagagagatggacagatcttcttattcccggccaaagctgcagccccaaaggaggcccaagcccccagtcctgtccccaccagcagactttcagggcagtgtcaatgtgaggaaagggttaactccggggaggcctccagcctttgcttggtcagatcagagtccagtgacgggggccggtgcctccccctccctcctctcaggttgtcttggaaactcagccttgctggctctagagagtagtgggtcccccttcaatccctgggcccctgccctccccatcccccaccatcaccctgccaagcctggcgcctccccctgcccaggcccgagccaaacagggcagggctgctgcaccggggcagggaggggttaagcatgctctgctccttggtctggactttctccctgggaagatggctccctggagcgggcaggggtgctcactgggccatactgagggtggaacctcttgggactttgcagtgggtggggcctcctggagactcaaggttgtatgtgtaaaaggagattcacacaaaggtcctgcgactcccatcgccagctgcaagggcccactggggaggccctgtccccttctggcgcaatccaaggcctgaggctcctagaagaggggatggcccctggaagtccctagctggctctgggcatgggaggtggggtaccgccttacccttatctcccaagttcatggaaaccaggtaactcagataatccccttctccactgagggggagactaaggcccagagaagccccagccttcctcctagggatctgatacgaggaagacacagctggaatctggattccactcagctcctgggatactgtcccctgcttcccccaccccttcaccctgcaggtaattggccccctcagacattcctccctcttctgcctgtctctcgggctagaggggctgcagcctctggccaaaggacctgaagagggagaggcctggggacagtcccctccccgcagtccctccaggatgg

SEQ ID NO: 88064 - DNA, 1051 bp, Homo sapiens
ggcctgctctcctgccttgaacacaggagctgtgagatccacctccggggcacaggtgactcaggagagggatacagcctgcaagtgcctggccagtgccctgccaccccttgtgacagagagagtcttcccaagctccctccggacacccccttgaagaagtggagggccagggggatttctgtctgctggcctctcttcctagagggccgggtcagtctcagattcaggctcaggttgacaccggaagggtcaagggtccttccagccctgtttgcgacagccctgttttttctcgctctgccaggattccatcttggcctccctctcacatggcaacactggcctttgtccatttgcaacacttaaaatggtgtgcagtccccatttcaaaaccaaatgctttcctcctaaaatagtaccactcaaggagaaaatatccttttcatgagggtgcagagggagtgatgtgcccacctggcagtgccatgcgtgctgtgagtgccccgccctcccacggtttaccttgcatcggtgtagcacataccagtgacttttgactcccacccacacagtaaagtacacagcgtcatcccatttcacagcagggaaaactgactgagagacgggggcttcctgggatcccggagctgaagcagacagacaacagctcagctctttggcctctcagctctgtcctgccctggtgacacaggcttgctccacttgcccaagactcagttccataggccctgccttggcggtggcccccactgccatgtgcaggctggggcatggagcacctcttctcagccctggaagcctgacattttcaagttggtggggtgacccggctgagcatgttccctggtgagtgagcgcctttgcacgtctgcccatcattgtcaccgacttgattgatgccctgtctgccctggtgcccctcactcctagatagcaaggccagcttttcctgggcactcaagtagtgttagaattaagtgcctcttcccaaggacacttccttcccctgccatggtctctgttcttc

SEQ ID NO: 88065 - DNA, 1023 bp, Homo sapiens
ggaaatcaataatacagggacaggcctgtgttgttcttgcttgcttgctttttttccctaggagctgtctatatatcttagaccaggaatggcttcttgtcttccgtgtgctttccatccccctaccccagccctccctaaatgaaattcaggttgcctgtcactcactcccacactgcagcttgtctctctagctcctagccagggacagcgtgaacccccaccaccccacccattcctccgccactgctgctcctgtctgagcacggcccctgtccctcctttcttcccggagttgctccagcctgtcccttcaccttgctgaggacacctgggtgacgcctccctgagtcaccctgtgactgcctcctccaccctcatccccagtgcccatgctttctcctcctgctcagggagagggttgctgtttttgtttttaatgtcactctcagggacgtgggttcggttgactggcattatgcccaccatccatcatgccccacgacctatgacctgtccccaccttggccaatacctatgcgccagttgagaggatgatgcctagtcccccgtgccaccgcctctatggtctcagtacaggtgccagactgggggactcagtgtcacaaagcagcaggcagtggcttcttctccctaccactcccttacccagctcggaagctgctcatgggcctctgtcaaggtcctgaggggtgacagggtcttatgttcttgcttctaagctggtgaccgacatagcccccttcacagcatgacagttgggtgtctctggccctggtagaatgtgcaggttgggtatcccttccccaaaatatttgggaccagaagcgtttctgatttcagattttcttcagatttttagaatatctgcattatactcacagtagagcatcttaaattcaaaaatccaaaatattccagtgagcatttcctttgaggatcgtgtcagtgctcaaaaagtttcagattttggagcatttcaggtgttggaattttggattt

SEQ ID NO: 88066 - DNA, 1019 bp, Homo sapiens
ccgaggcctaagccctccttgtttgtgagtggtgcagtcagggataaaaacccggtgtgcctcacttcccaagccacctgggctgatcctggccactgacctgtgcgtgcacatgcatttccagtcattcccctcgagaagctgagccccgggcagactcccaaagctcaacagcccagtccatcccacactgtgcaccccgctgcttccagaactcccatttctgggcaaagaactaaaaatagtttttattatatctgttaagagtacatcccagttgttgatttcagatctctccctgccaccttttttattttttatttttttcttcatttcacaaaataaaagtgtcaaaaaactccatagtctgtggaatctagcaacctcccagtagtttgagagtaacatggaatgttcttcaatattttgtgctaactaaaatgaaaactgtatatgccaaactgtttgtcttctgctccgtgtctggctgctccttttatcctgtagatcagtctgtggcatttgtggtggccctgccaagttttgtgaggctgtgctattccctgaatgatgcttgctctgttacagggtgtgtatcataagcagagcctgatgtctttctatatagcgccccagggccctagcagtaattgtttaattaaataaagcactcactcaaaagtaatagccgtgatccttcgtgtggccagtgtcccagccagcggtgctggccctgcacactggctcaaaagcagcacctgtgtgcagagaagaaatagctgagtgtgcgctgtgcagtgcaccctggccctgaggagaggagccacagaaccccagagggtttacagccagcagagaggtgcgagggactcggctatgatggcccttacacagagctgaacgattagggtgcacattaatgatgatatcggatgaattagcataagcccggatgtcttgtggattcgctgacagtggaccaaggaacattttcataagcctcaggcacaaaaggaggc

SEQ ID NO: 88067 - DNA, 1003 bp, Homo sapiens
ttaactgcaatgagcagctcttaattcctctactccctgagcaaccaatttggcatggaaatcctaaccttccccacactccagtctctgctctgtcacatttacccccattttcctttgcaaagaaggttcccatttcccacagaccagttttctgagacagagtttgacttttgttttttgagtcaacactttcccctgttctccaaagagaaatgagaggacccatgctgaccagcacccgcttctctgcctgggtcccatcctcagcccagaacttctttgccctggttttcctagatgcagctcctttccttggtcatcccgggtacttccgaggggcctgccctggaagccaggggctctcgttctccaggcttctcctctcgaagtcaaaaacgtggcccatgcacatcccgatcactcctctccaagcccgtcagaagaggtgtcctctcctgcgaggcttcgtcagggctcctggggtccctccccactgtgtcctttcttcgcagtaaactaagagtcagagacatggctggtgcttcttttggatcctttttgccattatgtctctagcccatgctcatgggcagttcgagggtgggcacatcatggatcttcaatctgtgtttgctgaagagagcaggacgcatggggtccctggaatgacacctgggccttgcctaggaggctcagcattgtcggaacagtacatgtgagcagcagcagggaagcatggctctggagcttttgttccacccctggcactggcacttacccaaggtgaccccagggagcctctgccagtccaggtgtgcccaagtcaggcccggccttagctatgggcggaggccacgtgagcagcagcgtcttccgtgtgcagacagtctgctggtgcggcctgcaccctcctcactcttgtttccatcccccaggcgatcttcactctcctcctcggaccgttcaccttctttgacgtccagaagaccaagtacctgca

SEQ ID NO: 88068 - DNA, 1089 bp, Homo sapiens
ctcctcagaaagggaaggcaggcaccttctctgactggcctctggcagctcaggactcgtgcctgttttatctcagctccaagacaatgacttcctgtgccttcgctctgtcttcctcactccctccccaggtgtcagtgtgcgagggaggggagtggctgtggcccaggtgaatcagtgtggcgaggcctgcgtgtggagctgagatccactatcaggatgagcctgtgagcagccagcagccttggcaggcgacctcgcggggcctcagtgaggctctgcctatgggtgtcctcgggggcccccctcctcgtctctaccccgcattgagctgctcctaaagcatgaggagtcacagcagccacagacctatagggtcggaacggctccgaaaggtcctccacgtcccgtctgacacctgcttcccctctgggacccccaccacgtgcctccttccctcaggcttggccgcctcccgcgacggggatctcatcatgtaccccacagctagtgtgcctgataaccagcccgttctttggttataatttgtcccctgtaccttccacctggactctggtaccctggactctgggctccagaaggacaggacccctgtctcagtgtgctgtccccagatggccagcatagtgcccagcacccaggggaaactcagtccattgttgttgaatgaaggaatgaacagtccagttgggcccatgggtgacacaagacaaatgcggtggcttttgcgttggcttttactcagatattaagagagaagtcttctgcctccccttgtcattttgtagctgagccttccgaggcccagcagccgctcgtgtgacctgtgtcagcctcctcctctgtcctcccctctgcctcctcccagcttctcactgctgctctccaccactcagagcgggactcccagtgtgcaattgtgggtggatgtggatgcggatgttctgggcactgcctgtgataggctcttggggaactgcaggccctgctgggggccgacccccctgcacatctgactgtgaagtcctgggtgtctggtccttagcatgtctggggagcactttctgc

SEQ ID NO: 88069 - DNA, 1033 bp, Homo sapiens
gtcttcatggggcaggtgggactgtggctctaggggaaaccccctgtccagctggggttgttctccccacccaccttccacccagtctgcacctgtcctcactcccccgggcagctctcccaccaggtccttctgcctgggtgacgcgtggctgctcccaagttctaagactcattactggaatcacacctctcccacatcttccaacacgcttcacccccaaccctacttccagggcgggctactccctgcacaatgggagatgcagtgctggcactgccatcatttgtcccagacccatgcccctcccctctcctgccccatcctgcgtccttgtctaagaaacctccactagcagctgctgcctcttcagaggcgaatcccaggctggaagtatcctagccaggtctgcctgtgacggcagggcccaccctcccaccaggcctgggaggcggtaggtgccacctcagagagggcctggctggccccatgacaagaacaagaagtgctaactggtaccagagtccccagatagagctgcgagggccctcgctgtgggcgcgagctccggagtagcaggctggatggagcatcccttctacagggacacagccgcctgccagctgggcctaaagtctggagcttgtctctgaaagggaccgtctgctgccctcgctgccccactggagccctcagggcctcctacagtgcaggtggtcctactagagggaagccatccccacctggcacctcagcggcttggcagtgacatggcagtgggagggctctgaggttcccaccctgacaatggtcaggctgcccgtgctcccactccaacactaaaagcggctcccttaggggctgagcgtgggtgctcagtgttcacgctatatcccttgggcaatgtggggttggatggggcccccacttccattcccatggaaggaggccaggtccccagccacctcccactcagccatgcacgcacttgctgggctggcctcctgggaaacacaggtgactcgaatgaact

SEQ ID NO: 88070 - DNA, 1017 bp, Homo sapiens
gactggccggtgggggtgggggttgggggtgatgcaagagctgtcttccttcacctggctgggggcctgtcacctgcgggatgaggtcactaatcccagcaaatagcctgttagctcatctaagtcctcacactgctgtgattatttcaggcaagaaaacatggctcagagaggctaagtgacttccctaagatcacacagccagttagtggcagaactgggacacgaactcagatctgtctgactcaaatccatgcacttgaaccccagactagcattttcagtatgacttcctagggcagaacccactggctgagttttggaaggcatcagtagactggagggctgggtcccggtcatggctcctgttcttccccagcccttgctcttctgggatgcccttgggatgctcaactaacctctatctctttctctttgtccgtgtctgtctgtctccctctctctctgcctctcttcggggagggaggttttcccctcttctctttcatcttccgtatgtgtgtccctctgtccctcctgtctgtccatctgcctctctccaaacctctgtctctctccctgtgcttgttctggtctctccgcaggaccctccggtggacatgggtggggccctggggccggccctgttgctcacctcgctcttcggtgcctgggcagggctgggtccggggcagggcgagcagggcatgacggtggctgtggtgtttagcagctcagggccgccccaggcccagttccgtgcccgcctcaccccccagagcttcctggacctacccctggagatccagccgctcacagttggggtcaacaccaccaaccccagcagcctcctcacccagatctgcggcctcctgggtgctgcccacgtccacggcattgtctttgaggacaacgtggacaccgaggcggtggcccagatccttgacttcatctcctcccagacccatgtgcccatcctcagcatcagcggaggctctgctgtggtcctcaccccca

SEQ ID NO: 88071 - DNA, 1031 bp, Homo sapiens
gtttacgagattttttacattctttttccctgttgtcttcaatgtgcagtgtggcatgaaattttacactgatagcaaactccgtttgggtgagagatgtttctggtacccaatagtcgtgtatgactggcggctcctatactgggcagcacagatctagagctcattactgggaggcaggggtagtaggaggtttggggctccccagagggcaaggaacctctaggacctggaggtgtgggcagaggtgagcagacagaggccgtgcaaggggagcgacaagcatgtcagtgtcctttgtggttgagatctgacatccctgattggtggtggcagctgaggcatggcatggcatggctaggatcgatcccttgccagactcaaacatgtctctgggctgtcagttctgtcacttctgtcacttctgtgtcactgtactagggaaccgtacacatgggaagatttcaagggcgccaccatgagagcaatattcccttccttgccaaaactcttgtcttcttggcctgaaattctaccacctggcactttagcttaaggctctgactgtggttaaactacatctctcttgggaatgagaaccctttcagctatgatcagtccctcataccttcctgtgaatgagctctagatgcttagctaagagaagatcttgacggggaggctggggagtttgagggaagtagggagagaaggttggaaagagaaatatatttagaaaaaaggaggttggaggtgctaacagcagcatgctcattctgcagatttgactctaagttcctggagggcagggaccatgtctcacccatagggacattccaccatccagcgcctgctgcagggaaggggctcagcacacacgggccaattgatgtttctacactaaagttggtttagtgggttccctggagggatcctttcagtgccaccctggggagaagaggaactttcctgaatgttcctggtagcctcttgcacttccccgctctctggattccttagagagaactaga

SEQ ID NO: 88072 - DNA, 1046 bp, Homo sapiens
tcggatgaggaacttgcagaagcagccgggtgctgccatcctaagctggttttccatatgggcttctctgtgagtgttaagaaaagctgtggtttgcctgtcagagtgagcgcccccactcagggtaaccacagtttctccatagagcaataggacagcaggagtgggctgggacgactcctaccttagcagctgctggggtagaatgcagcctggtttcagaactgaatttctctttcttcttaaaggtgaaatcttgtgctgagtgggtgtctctctcaaaggccaggattgtagaatatgagaaagaggtaaggatgatgggtagccgttgcctataatatgggttctctctttcatgaccacacatctttcacctggtggcaggaacctgccttggatattctgctttccgtctctgtttacattaactaaacacattccccctctttccagatggagaagatgaagaacttaattccatttgatcagatgaccattgaggacttgaatgaagctttcccagaaaccaaattagacaagaaaaagtatccctattggcctcaccaaccaattgagaatttataaaattgagtccaggaggaagctctggcccttgtattacacattctggacattaaaaataataattatacagttctgggtgtgcttcttctctgtggttgagataattaagcctctcttctgagctggcctcactggcagcggggtttttgtttaaatggaaaggtgagcctcgacaggtttgttgggctggttgtctgacgggctgtgtaggcgccacttactgaggccccaggactgctgaaatggcaacaaataacactaggggctatggcagtgtatttcactgtgatgtagtaaagaattgttatctgctgattctcttcaacttcctctttggtttcaaacccctggttccaagggagtgctcctgcttgtccattagtaagtcacaagaacagctggtccaaatggctaggtgtaacagcagggatttacttctctgtgcttcagcttttgag

SEQ ID NO: 88073 - DNA, 1147 bp, Homo sapiens
tgtctgagtgtggtagcgggcgcctataatcccagctacttgggaggctgaggcaggagaatcgcttgaactaagatagcagaggttgcagtgagctgagatggcaccactgcaccccagcctgggcaacagagtgagactccatctcaaaaaaaaaaagttttctggctctaactggaatatttggatgaataactgacactaatgatgaaaaattaactcttttatccactttatctccagcagtttgcaaaagtgaagagaagggcttattcatttagttttcttccatctagctgacagctcaaaggctcctttttgatgttcaaaggtggctttgtagttggtttgcagattaccacttggaatgtgatccagtgtcaccagtctctttgctatcttacctttacgtggtatctttcactattgtagatatttaatagtttagacattttggtaatctagccttatcctcagtttcccacattctaaaaaaatgattgcttactatagattttaaagtaccatgaattatgtaatttgaaatgattcaagtcatggtacctgaacattctcccttcttcgtcattagctaattcctggagagcattataagatttctgtttgatgaccgcaattaaattaattagtcttctagattctgaaggcttgtggatttatacccctttggaagcttttttgttctaggaatgtcaagacctttttgatgttaactatctttccatctgtcctttttatgtagtgaaactgaaaaatggatttgatgttattcaaagacaccctcttttatacttgttgtatgtggctctaagatgaagttggctgtgtgtggattttcgttttgtttcattttgtatttttctttatttttttgtgtgtggattttcaaacatgttacctccttgaacttacctgtagcccctcacacatgcaggattcaagccaagcccaagatgtgggcctcaaccctaccttcggtttcatgacctcttagctcttagtggctgccacctaactactttcctctgtttctttttttttcttttttctttttttttttttttttttggagacagagtctcgctgtgttgaccaggctggagtgcagtgatgcgatctcagctca

SEQ ID NO: 88074 - DNA, 1067 bp, Homo sapiens
taaggacgctggagccaagaggattgttcccgtgccgtgccatggtttcaccctatgtgtgccacaatggacgttagcagctgcttcggaacaccgtccctcctatgcaccctccaagacgtgcagcagatgcaaagggttctagctgcagtttgtcgaattgaggttttaggtaaagcatagagttgccagagtaccccgcattcccatgaatagagcctccaaggaaagggaggatggggtgtcctttgttgtggttggaggttggtgatcattgctctggatttggggctcccggctgccaccacatgcagctttgcctcacctttctccagcagccgggaccctctggagagcttgttttccctccaagaagaggtttgagacaggcggcatcctgcactgagtcagacaagtgggagctgtaggaactgcacctgcagcctcttcttactccccattgaccctgtcttccttccctggctttttcaactggaccaaagatgaaggcacttatggaccctttgatggcttggagtggggaaggctgtttctttgaaagttgccaaatgtgttatgttgtgtctcagagagagttatttctgtgactctcttggaaatgccttgactgaatgtgcaatatttgtgtctcttggtttctaaccttggcggacctgctcccctctgtactgtccccagtggtatgtatgtatgtgctaggcagtctggggaccccctgtgtctctgaccacccccctgacccccgccattactttcttttctggagtgccatgctggcgaggatccggatgcggcagcaccctctttcgggctgcatccacagagtttgtgtccacactttctctccgagcatgtgggtctcgctgagcagtcatggaatgcggtagagccaggggaccctgtctgccccgaataactttcagtagtatggcagatggcacagagaaagggaaggggctctggggacttctccttctatgaaagcctcctcgagccaggtgctcctgggcaccttcagaagtgatgtcctgtgtgctccacagctc

SEQ ID NO: 88075 - DNA, 1045 bp, Homo sapiens
ccttctcacccacacagtggtggtacttcagcagggggctggtgcagatgaagacctgcgtgctgcggagaaggacgcggttaccgccgggagccaggagcccgcccaggactccgcccgcccccctctctccttactccggtaggtcgttcatctcccgcacagcgtccaaggctcccgggatgggctccaggtccaggaaaaagcccggggcttcgtacacactggccactttatcctgaaagacaagagttctgggtcccggcttcccgttcccgcgaggacccgcagggaggctcctgggggctccgggcccgagctcagaggggcggagggggcgtcggtcaggggcacgcgcccaaaggctcctccccagggtgcgctgcccgcgggttccagggtgagagctctgcgcccttcacagagaagggggagacccccggaacggagcgagcgggccctgcccgggtggggaccctgcgccccctaccgccaggtcgggccgcagggcgcggtactgctcgcgggccaggaagccgcggcgttgctccagcggcacgtgcggctcctcagggaagcggcggcggaagccccgcaggaggccggcctcgaagtcggccaggacgccgtccatgtccaccagcacgcgcacgctccgcgccatcgccgccgggccggagctgcgagctctcggggtctggggggcgcgggctcggccggaagcggagggagcgctgcttccggagtccgccgggctgatttgcatagagtgtccgggccgccccgcccaggtcgtaaaccagtgccgacggccctgcggttgcgcgaggccatcctagggttcgggtgcagggacggctttggggggcacttttctgaccctgcgcttcttcgggacccagcctttgtccccatcagccgcctcccactttacggcagacgtacccccgttcaccccacgttactagtaggggaccgaccttccgggggcccaacaaagggatgctctgaaatactgggaagcatctaacgaggagtcaagggt

SEQ ID NO: 88076 - DNA, 1391 bp, Homo sapiens
tttgggaggccgaggcaggtggatcacaaggtcatgaattcaagaccagcttggccaggatggtgaaaccccatctgtactaaaaatacaagaattagccgggcatggcggcaggcgcctgtaatcccagctactagagaggctgaggcaggagaattgcttgaacctgggaagtggaggttgcagtgagccaagactgcaccattgcactccagcctgggcaacagcgagactccgtcaaaaaacaaaacaaaacaaaaaaaaacttcatgtccttatatatttgtgtaatttagaaaagaacataaacaacaaatatgggaaaagatgaacaatggttaattctgtggagtgggagcatggtgggtgattattttgtttatgcttttaggtatgtttccaaccatcaaaccaaaaaaaaaagaaaaagagaaacagatccttgatcttaacaggaaatggctgtcattatgagtattatttctattccctgttttcatagaaaatgtggacacagacttgccaggcagcctggggcagagtgaagagaagcccgtgcctgctgcgcctgtgcccagcccggtggccccggccccagtgccatccagaagaaatccccctggcggcaagtccagcctcgtcttgggttagctctgactgtcctgaacgctgtcgttctgtctgtttcctccatgcttgtgaactgcacaacttgagcctgactgtacatctcttggatttgtttcattaaaaagaagcactttatgtactgctgtcttttttttttttcttttgaagaacaggtttctctctgtccttgactcttgggtctgtgggccatggcatgagtgttttctagtagtagattggagggaaagctttgtgacacttagtactgtgtttttaagaagaaataatttggttccagatgtgttagaggatcttttgtactgaggtttttaacactttacttgggtttaccaagcctcaactggacagaccataaacagtccacaggcaccgttcctgccaggccccaacccacagggagtctctccgcagagccttcttggtgttgccctaacttgccagtggcctttgctcagagcctcctcctgtgacatgtgaacaatgaagaggcctgcgcctcctgccttgccgcctgcaaagcaaagaaactgccttttattttttaaccttaaaaagtagccagatagtaacaagactggctggctgatgagcaaagcctttgctctcacgcagaggaaggcttggatgtacaatgaaactgcctggaactaaaagcagtgaagcaagggaggcaatcacactgaagcgggtcttcctccaggaacggggtcccacaggcgtgttgttttaaataacctgat

SEQ ID NO: 88077 - DNA, 1030 bp, Homo sapiens
gaagtggaaagaccccgcccgactaagcactaaagccctcagagcacagtgaggcatcacctgtctgagtggggagagaactggagaagggctttggaactgataggggtccttccataactattatctagtttccccttatcggggaaaggagagagaaatgaaaggagagatttaccagttttccattctaataaaagatctctgaagtgctaattggtgttaggtcctcagaggaaatgttggggtttgttgtagacgtggtactagcactagagcaatttatcatgcagaatttttgcatagcattgtcctgagttggatagaggtagcagactgaccctgtgcttgattgcaacacaatgaaatgtcacattcggtttcaagtagatgttagctgctatgaactatgactgttttgcgtgttccaaaattaaaataggaagtaaatttttgaatttttttcttttctagggagaaggtgatattcatggtaagtacttctgaagaccaaatttctggctctgtccatggttttaggacagatctgaatcttgatttaaatcatgtcttggggaaagagactggggagtgaaacctggccatgccccaagtgccgccatactctaatctgccagtaacgcgatcaatgctagaaacataatagaagggaaaaaacagagaatcctttaaaattacatatattggctgggcatggtggctcacgcctgtaatctcaacactttgggaggctgaggcaggcagattgcttgagcccaggagttcaagaccagcctggaaacatggtgaaaccctgtctctataaaaaagtacaaaaattagcctagcatggcggcacatgcctgtagtccagctactcgggaggctcaggtgggaggattgcttgagctcaggacgtggaggttgcagtgagcagagatcacaccgttatactccagtctgggtgacagagtgagaccttgcctgaaaaaaataaactaaaccaaaatatatctaaacacacacacat

SEQ ID NO: 88078 - DNA, 1050 bp, Homo sapiens
ttgagttgatattagtgttttgtaaagaatttcagtaattaggtcaaatgaatcctcacacttagtttttcatgtgtacatttgaaatgtgagacaaatgagttctgatcctgtgaaatgaatgtttaattcacctttcgtcatcaatttccctccaatattatgctctagggactgtagtagcattgtcattttattgtctctctaccttccctttttctatattctcacctaattctcataaacttaattttgtccagtaatgttctcctggccccataaactcgttataaatttagtctggtagggaatgatctgcaaagatatacagaaacttcaggattttaagagagaagaaagaaaaggagcaattttttaaaaattgctatttacagtacatggacacatttttgttcagtcttaaatatataatcctgatttagttgtcgtgtatgattctgaaagaatagtaggatcctaaaacattgagatactttctgccttatgatctacatcctttgtttggggatatctcactattacaaatggtctctacaacactgacgtcatccgagttggttactacctgctattgcaggaggaacagagacctttaaaaagtgggactggttagagttttgacttgctcttaagctggtgttcgggtactagtgtctttttcttgattttttttttttttttgagacgcagttttgctctttttgcccgagctggagtgcagtggcacaatctctgctcaccgcaacctctgctttccaggttcaagcgattctcctgcctcagcctcccgactagccgagattacaggcatgtgccaaaacgcctggctaattttatatttttagtagagacgggttttctctatgttggtccagctggtctcgaactcctgacctcaggtgatccgcccgcctcggcctcccaaagtgctgggattacaggcgtgagccactgcgccctgccttattttttttaattaatttatttttttgagacagtctcactgtgttgccaggctggagtgcagtg

SEQ ID NO: 88079 - DNA, 1027 bp, Homo sapiens
cacggccggttttcgttaatcggaaccttcggggagggcttcgctttctcctgtgtgcatcccggctggtgcatccccagggtggtgggcttggccccccaggtgcccggggatcctttagggccccatgcatggtcaggtcctattgtcccattgatgggccacgcgctcctgtctctcccccgtggcatgcggttggtctcgctctcgcgcgcagccattggatccggagaccggatcgatcaggtccggcgggctccttaccctcgccgtgcccccactccttattcggacctacctgacaggtgcatgtgtggtcgagcggggctggtcatcgcgacccttcaccccccattgaggacccaatcgttcttcccctcttcgaagtgcctcccctcttccaagtgtctccccttcctaacaaaggaaagaccccttctccccatccctgcgctcatttctaaggcggggggcgggggcgggcgcggggaacgagccaacccgagtgggttttctgcgcttaaaccttcggaccgtggcctttgcatcctaccttcgcttcctcctttgacgtttgcccagtgagttcatccctggccctggttcccttgcaggaggaggtttcttgttcttgggcggggccggagacatccattgtctctaacgtggtagcgctacctgggaagcgggggatttttcttgcccttcttcccactgctttttgggcttggggcactgggtacagtgtttggacaggaacccttttccaagtccttgcttaacttacttggtggaagggtttggattctgtggaaggtgtccacattgtctcagctaattgcacactgttctttaaggtgggttacagttatgtctgggatcctcttcaaggcttggaagaagcttaaatcacttttttgagcatgtattttacatcgattatgacctgcattcatgtgtggctaccctcggggtcctggccaagtggcacaaagggagccattttgtggggctaagaagacacgtg

SEQ ID NO: 88080 - DNA, 1112 bp, Homo sapiens
cagaactctgttctttaaagaccaagattacattctcaattagaaaactgcaatttggttccaccacatcctgactactaccgtatagttttctctattctttcatttcccccttccccattcctttattgtacataaagtaactggtatatgtgcacaagcatattgcattttttttttttttaactaaacagccaatggtatgttttgattgacatcaagtggagacgggatggggaaaaatactgattctgtgaaaataccccctttctccattagtggcatgctcattcagctcttatctttatattccagtaagttattttgctctcactgttttaacaaaaaaaaaaaacaacaacataaaaatccttgcataccttgttcaattggagaattttaatgtttttcatttatcattgtaaaaccaaggacaattttataacttttttgtacgtagctgttacatgtagggcaatctgtctttaagtagggataaattactctaaaacaaaaaagaatcctagatagttttcccttcaagtcaagcgtcttgttgtttaaataaacttcttgtttaaaatgagctgttttctttattctgagaaatattaaatagaaaattgaggcttagaaaaaacataaataggcctgcttagaagtaacatttcaagaaggaaataaagctacttggtgtttctgacagactgatactgatgccaaacaaagaataacagttttataaatatcaccttgttccaaaagtttctctaggtcccatgttaatatgcaagtatactagcagaaaaattgggccatagtatcgtggatttccaggtattttctgtatattaagtgaggcacggagcatagggtatagggtagcacatgtggcaaggaaaaagttctgattttgcctttgttgctgataaaacactgaaccattctagcctgcacttatcataagtaaatactccctaacctaaaataaagttttcgttccttattcaaggattttttttttgagacggagttttcctcttgttgcccaggctggagtgtagtggtgcaatttcagctcactgcaacctcagcctcctgagtagctgggg

SEQ ID NO: 88081 - DNA, 2073 bp, Homo sapiens
gtgcgcgccgggcgcgagttgggcgggcagaaagcggacgcccgcggacccaccagccccgaacggggattcttggcccagccggccggcgcgcgtgaggaggggcgttagggcgcgcggggtctccaccttctgtcgaccccgcgtcgggtgttgcagtctccgaggcggcgaggagtcctctgggctcgggcttcacctctcgggtaggaaccgcgggcatctggggacccctgcctggggccgcggcggcggggcgagggttcggggcgaatcaatgggctgcggacgggcaggaacctggatgcccgcgggccgccgtcctgggcctgggggtagggggattcccgtggagtatttcccactttaatagcctcaggggcccgaagggggaggggcagcggcttttccctgggtgccaacgaacccctaatccgcgaacaccatgtggtttcatgaagttggaggcacaggtacgagcagagagactttgtgcggcttaacttttgaacgcggcttttgaggcacccggagacttcccgggaggacttggggacacccatcatcggggcacacgggacttgctgcttttagtttggtggcaccccccgcctcccgcgcctttactttctggagcgttttagggctacagaattgcttctgcactcgattttggacaactttaggttgggtcgaaatctacaagaaacaaatcaggataaaactgtgtatttgacccatgacaacaaagggggggaggggagaataagtgctcttaaccgaaaataaaaatgaagctgctaatagaggagaacgttaactgtggtcctgactgagtattaccgctgttccggggggaatcgggatattcttcgattgttttttttgtttgtgtgtttcctttaatggagattggatttaggttattaaactgagtttggtaactttttaatgacaacggtaatgagttttgaatggcaggctgtagatttattgttttgtttcttgcagttgtacttaaagtgcttagaaaagagaagggactctatttttaacttttttggggggtaaagtattttgggagtgatatatgtcattttaggaagtttaacttcaagagaacgttgcaatacactgaataggacccaactttaaacatattgttgctactgatagtattgcatgtaggcttttccgtatctgacagctatctaatactgttactgcaggatttttccgctttcacattgatttcagcagctgaaaacagcagtatgccgttttagcatacagtatgagaaacctgttgatttttgaagcaactagggctgctgctgctttataaaacgtgttcgttgatcacatttcccaaattatacttttatttttcttttaacaggaaggagtcaagactgagaacaacgatcatattaatttgaaggtggcggggcaggatggttctgtggtgcagtttaagattaagaggcatacaccacttagtaaactaatgaaagcctattgtgaacgacaggtgaggaattcatatgtgtacttccactgaataaaactatttttaaaaatcttattttcatgggaacaaaaactagactagcacattacagtgactttttgatgggatgaatatgcacttggcacgtcagttttgtcgtgcacttggtatattgatagctcgtgaaaacccttaggatgatttggttagtattatatgtggttccagtcctgtgccagaaatccatcaaattatatttacaataatttttttttaccaaggaaatgtaattttatgtttataagaaaataagagtgaacttggtaaaattacttataagtcttttattattttattttatttttttgagatggagtttcattcttgttgcccaagctgaagtacagtggcctgagctcagctcactgcaacctccacttcaagcgattttcctgcctcagtctcctgagtatctgggattacaggtgcccactaccaggcctggccaattttttttttgtatttttagtagagatggggtttcaccgtattggctaggctgg

SEQ ID NO: 88082 - DNA, 1061 bp, Homo sapiens
gtagcgaggactcccagagttgggagacgttgtacgcttactgggacctaaatcccgcacgagttcccacccaagtgccgccgccccagcctacgcacgcgcattcgcaccgtctccagccccggggtcctcctgcccctcccgccgtctccgggggccttttctccgctcggcaccagggtgtccccggcgccgcctgatcctgttagcgcggtactctgagtgcagtcagtcctcggcgctgttttccctgatttgctgtcgacgccaggaaggaaggacgcgtgcagaggaccgcagaggggtggccgtggctgagaggagacagcgccgcagcactgagggtttgggcttgcaggcgctgcaggagacgcccaggcggagtcttgtctcgcagccagctctgagcgggaggcctgagcgggaagcattggcgtccgagcgacttctaggagcctggggttcggcgctatggaggagctcgatggcgagccaacagtcactgtaagggtaccccgaacaggcttgctcgtccttgcgggttgagaactgcgtctgcttagttacttcaggcttgtctgcttccctagtggtcgcgaggcgctcgtccccttccctcgactcagttgccacttttccggaggtcgcagtgttaacgaggtgcccgccctagggtcgcagtggtcgcggggtttctgccaccagtcacaaaccccggcctcgaaggtcccactccgtccctttccttcctttgtgttcctggcctttttacttcccttgcttttcctcttgggcattagagtgggttcagcccaagcagaggaatttatatttttattccagccgtattaagctctgcatcgcggcacattgagcttctgcctgtgtggcctaaggtttattcaacgtattatctcaggagactattcctgttttatcgctgtgcattcaattccatttgaactttgaagacagtatgtcaactgtggatgatctgtgatgtgtataaaaaaaattcacgcgctttatgtacgagatacctaccgtttctgctagttgga

SEQ ID NO: 88083 - DNA, 1048 bp, Homo sapiens
aaaactggaatcttgacatttgatttgctttctttttttttttttttttttgagacggagtctcgctctgtccaggctggaatgcagtggtgtgatctcggctcactgccacctccgcctcccggtttgaagcaattctcctgcctcagtctcctgagtagctgggaatgaaggcatgtgccaccacgcccagctaatttttgtatttttagtagagacagggttttgctatgttggccagcctggtctcgaattcctgacctcgtgatctgcctgccttggcctcccaaagtgctgggattataggcaagagccaccatgcccggccacagaaaatttttttagagtagattcacttttggagatgatcataatagatgttaaattttttttttctgtttggtttcagaaaaatcagagatggtgccaagttgcccctttatctatatcatccgtaaggatgtagatgtttactctcaaatcttgagaaaactcttcaatgaatcccatggaatctttctgggcctccagagaattgacgaagagttgactggaaaatccagaaaatctcagtaagttggttgctgtttggtgttgaagcccacactacactgtggaaagccaaatgaagtacattgttgtctttttgtgtgttttatgggttgcgtaaagaaataagagactcctggttctagttgaggcatgagtactggacagtgtacattagcagtgatgggaagacttagcgggaatatgcaaatgctattgatgggctggcttgacaagctttatttatattcatattttacttagcctctaaagaagaaaatttaggccacacaagcatgtgagagtcgttgaatgaggtcacattgttgggagatttgaaaattaatataaacctaacagttttgtctctaaaaaattatggttcagacgttatttgacaacagaccagaaaactctcgtactatttatagattaggattttcttgaattgtagttcataacttcatcattatcagagtggtacttgttaattgtagac

SEQ ID NO: 88084 - DNA, 1594 bp, Homo sapiens
tattgttttagcaccactgtgtcctgtgtcctgggcacccacctggggtggctttgcagttcctgttatggcagaagtctcttcttttcaggtagataggcagctcctttgggtgacagtgattgtcttgcccccttcaaggtgtagctcacaaggaagtgcttgttaaatacttgagtgaatgttcggttccttttttttttttttgagatggagtcttgctctgtcacccaggctggagtgccctgggttcaagcatttctcctgtctcagcctcccgagtagctgggattataggtgcatgccacaccaagcccagctactttttgcatttttagtagagatggggtttcaccatgttggccaggctggtcttgaacttttgacctcaagtgatccacccgcctcgacctcccaaagtggtgggattacaggtgtaagccaccgtgctggccctgaatgttccgttcttatggaacatatatgtcctgaccaaattgtgttgaggggttgtcacctgaaatggagaagtaatcttgtgagatcactgctcggtctcataaacactcctcacttcttgaactcaacattttttttttgaaagacagggtctctctgtgttgtcaaagctggtctcgaactcttgggctcaagtgatcctcctgccttggcctcccaaagtgctgggattataggtgtgagctgccacacctggcaaaactcaagtttttttttttttttttttttttttttgagacggagtctctctctgtcgcccaggctggaatgcagtggcgcgatctcggctcactgcaagctccgcctcccaggttcatgccattctcctgcctcagcctcccgagtagctgggctaattttttgtatttttagtagagagggggtttcaccgtgttagccaggatgctctcgatctcctgacctcgtgatctgcctgcctcagcctcccaaagtgctgggattacaagtgtgagccactgcgcccggctaaactcaacatttttactgagttgcaagtggctctactttacttggagctggaagatgacttacagtatctttttcctcagtagatgcttcatattagatacttttcaaagtcagtagtgactaggtagtaattcactgtctctgaagtacccttatgaacaagtcatcatggtgtctgtggactgaaggatggtgaggaagggaagcctgcgtattcctaagggcaaggtccaggtctgatttatttcggggtcttatattgggctttcccgttaatagactgttcccctaaacttcagtcctttgaataccagcttcacaattcttgctctgtctacgtgtttcatgtcatctactgaatattcttctaaatattgtctcttctttttactcaaatgaagcaccttgctaaagcatcagttcatcaagataggctgggcgcagtggctcacgcctgtaatcccagcactttgagaggccgaggtgggtggatctcttgaggttaggagttcgaaactagcctggccaacacggaaactccatctctactaaaaatacaatatttagctaggcgtggtggtgtgcg

SEQ ID NO: 88085 - DNA, 1309 bp, Homo sapiens
tgttgtccaggctggtcttgaactcctgagcttagatgatccacctgccttagcctccgaaagtgctgggattccaggtgtgcaccaccagccccctggccctatgtttttatcatcattgcatacctggctgcttgctatctagtcattgttggttcctaaacggccattacttatgtagctattaagtatttgtgaagaatctggagtgtggggtagtgaggtctgcattccatgttcacccctttctggggtcagttaaagatggagctgcctggcacagaagtaatatttggtgaaagtgcatttgctttttcctagcacagtctgtcattcaggaccatgtgtgtgactgcttaaaagggataaacctatgtagtcagcttgtctgccttaaagttctctgttccttggataaaggaacttgctgcagatgaagctgaggcttttgtgtgtgatgagagtctctcctcccagctggccctctcctcctccatctccttgactgggtccggctccatgtgtgcgaggtggacagtttgtcggcagatgttctgggcagtgagaatccaagcaaacatgacagcttctggaacttggtaagacaggccgggcccccacctcccaccatgtgtcctactgtccctggtgctgccgggtgggtctgaggacacccactgagcctccagcagtaggctggcttttggagtctgttactatggagactcttttggatcttttcttccctgctctatgggagagtctaaaaccgaggtaccatgtaagaaaaataatgctttgaagacttttccagggtaaaaggaaatttgatttctttgtggatctaaggaagagaagacacaaaaaggaatacaaaaccgtttttttttttttttttttgagacagggtctcggctgggtgcggtggctcatgcctgtaattccagccagcactttgggaggccaagtcaggaatctcttgagcccaggagtttgagattagcctgggcaacaaagtgagaccctccatctcaaaacaaattaataaataaaaatataaaagagaaaagatagtccgactctgttccccaggctgttgtgcagtggcctgatcttgctcactgcaacctccgcctcctgtgcggtcctaccacctcagcctctcaagtagctgggaccacaagtgccaaccaccatgcctgggtaatgatataaaaccaattgacaggggctggggtgcatacagggttggatgtaaatgagcttgcacattactttggatcatcagtttcgaagtcagcatgtcgta

SEQ ID NO: 88086 - DNA, 2597 bp, Homo sapiens
agtgagtcgagatctcaccagtgcactcccgtctgggtgacagagcaagactccacctcaactactttctgagcgatttttttttttttgagatatggttgtgctctctcacccaagttggagtgcggtggcgtgatctcggccgattgcagcctctgcttcccaggctcaagcaatactcccaccccagcttctcgagtagctgggattacaggtgtgtgccaccatgcctggctaatttttgtatttgtagagatggggttttgccatgttgcccaggctggtcttaaattcctggactcaggtgatctgcctgccttggcctcccaaagtactgggatcacgggcatgagctatcatcacgcccggccccatctctttgagggacaggacatgtggggtttcttgctcacccccactcttgtgggacgcggcctgtgccctgattttccttcttgccttggtgtctgaatctgcagcatcgccctgagcaactggtggtttgtggcccacctgacagacctgctggaccactgcaagctcctccagtcacacaacctctagtaagtggccgggaggcaccgatcctcctcttcttaccaccaggcccccgagggtggtgtgaactgaatgcctgaaagggaggttgggctaagggggccctgaacagggcaggccaggagtcttggtcttttgttatgttttattccagtttcggttccaacatgagagagttcctcctgctggagtacgcctcgggactgtttgctcatcccaggtaggaaggaccccatgggtgtgggctatgcgggtgctcttcagcatgcgggtgccattggagcttggactgttctctcccagttggctccttgaaggcttcggaagggtcagtgaaagggagctgtaggtgccagtcctcggagccatgaggcagcacctcatgtctgtcctcctcgaacctttgcagcctgtggcagctgggggtcgattactttgattactgccccgagctgggccgagtctccctggagctgcacattgagcggatacctctgaacaccgagcagaaagccctgaaggtgctgcggatctgtgagcagcggcagatgactgaacaaggtgagctggccctgctcccagcctactgtctgtgggacgcaggagtcaggggatcctgaggtcacactttatgcctaccccagccatcctcctcctcacgagccacactggagacgtggggctgtggacgccaagaggtaaactaagagatgggataattacttgggagggacaggaaagctagggatccactggaacccagacaaaatctacacgccatctggaaaggcctgagccgccccttttctcacacacttgattccacgaggtcagggctggggttggcgctgtttccctgtccaggtgggttgctattgctagctcagcctggctcaatggggaagcagtgctggaggtggctccagaaaagcagagagagtggaatgaggatgaccaagtctgccccttcatttctcccctcactgttgagtaatgtaaacatgagttattaccctgcagagaggcagttgcatgttcacgaccatttctgaaagcatatggtattcacgatccacaggaagatgtgatttgaggcatctggagaggtaatagaagagctgacacgtagggagaaacacgtagggagaaaaaaaatagaagagctgacatgtagggagcaacgttttgctccccttgaagccacacacactcatagagccagtcttgccgtgatgggcacttacactcttagcagatcccagacactgttaatcagccgagtttccagctctgccgatccagctgcatttagagcccaaagagtggctctgcggtggagtgaggctgtgaggccactccggtccccacagggctcaggaatggagtgatttgtggagtgaaagccgtttaccttttcttttcccctgcaaagttcgcagcatttgtaagatcttagccatgaaagccgtccgcaacaatcgcctgggttctgccctctcttggagcatccgtgctaaggatgccgcctttgccacgctcgtgtcagacaggtgggtgccgctagtgttggcttcccagggactgggtggttgaggtgggcctgagactgctgctctgatctctgggccgggccctgcaggttcctcagggattactgtgagcgaggctgcttttctgatttggatctcattgacaacctggggccagccatgatgctcagtgaccgactgacattcctgggtgagtctctgggttttgtgccctgtgctttgggcacaagtgggtagttggggaggttggagggatcacgtcagacttctcccagcgcttccttcatgtattcccattgcatcagtggtcccagaaacatcctccgtcatgtccaggatcatgagtttggctgtcacatctccttagtgcctccatgtttgtttgtttgtttgtttgtttttctttctttctctctttctttctctttctctttctctttctttctttcttcttttcttttattttttctttttttttttttttgagac

SEQ ID NO: 88087 - DNA, 1520 bp, Homo sapiens
gccaccatacccggctaatttttgtatttttagtagaaatggggtttcaccatgttggccaggttggtctcaaactcctgacctcaggtgatccacctgactcggcctcccaaagtgctggggttacaggcataggcatgagccaccacgcctggcctagtcaatctcttttaatccatgactcttgttatgtattttgactctgatgtttccccagatttggctcttcggagttcttccaagtctgttttgaatgctcttggtctgcatctcattgggacctatgagtttggagacagaaaaaaatctcctgctttgtggagtggctggtctgaggtttttcttctcctgtttagggccagggtgacttttgtaggtgtcacttgggcaatttgggggaatatgcaggttactcagtgctcttgtttcgccataggaaagtatcgcgagttccaccgtatgtacggggagaagcgttttgccgacgcagcttctctccttctgtccttgatgacgtctcggattgcccctcggtctttctggatgactctgctgacagacgccttgccccttttggaacagaaacaggtgaaggttgcagcagcagtggttttctttgcttgtcagtccctgctagagcttagttgtatagctgttgccgatgtgcgtgtttcctcctttgtcgttctgcctgtgcgcgtgtattccccttagcgccctctctgggattccagactcacacaggaaacaaacactgcttgatttgaaatgaggtattcgtatacaaagcacactattgcgaagggtatgaaaggaagaacgtccgaacatgggcccctgccccaaccaatgcaggccagggctgggggcagccaagcaaggcaggctctcttccctaggtgattttctcagcagaacagacttatgagttgatgcggtgtctggaggacttgacgtcaagaagacctgtgcatggagaatctgataccgagcagctccaggtcattttcacttttgggttgatggttccacatggaggtgggaaaaggctccctctatctcaggcttccccttccctccagaaacactggctcctatggacacatgtgcctctgttccccttaacctgtgtaattcacacaccaccttcttttaggagaaaatcagggattctagtgttctcatctctacattttgttctttgctgttcatcatttccagtatggccctttggtattgctttcttttacatcgataatttgctggaagctactatgaatgttaagtgccctctacctttggattagctagacccttcgggagtgtgaaagggctccttcctgctcttagctcatgctggcgctctctgctttgcaggatgatgacatagagaccaccaaggtggaaatgctgagactttctctggcacgaaatcttgctcgggcaattataagagaaggctcactggaaggttcctgagaactgcttcaatgtggtatctttgtatggcaatgtatata

SEQ ID NO: 88088 - DNA, 2262 bp, Homo sapiens
gacacatccctttgctgccttaggttaagtgtctgagcatggttgggggttgcggggaaaagggaccattcctctagcacagagagggtagcagaatagagggcgtcctgccaaggggccgcctgggctggatctcacttgctgccctctgtcacaggagaaggtgcggcttcggtataagctgaccttcgccctgggggagcagctgagcacagaggtgggcgaggtggaccagttccctcctgtggaacagtgggggaacctatgaccccagaggacgctgtgatctccaccttgaagccaggcaggctgccctgagacgaggagggctctggtcccgtcactctccatgccctgacaacagtgcttgtagctttgatgtggaacaggggccctgggcatttctgctgagaaccaaactgctgctgtgataacctctcctttggcccctaaaaggacctgtttttatctacctgtgtgacttgaagtggccatatgctgtcaggggtgcggagtggcccctgacttcactgctgtcccgggaacatggacccccaggcttggcgtaggtgtttgcttccttctactggcattcactgaagccactggggtgggggtctctaaagagagactgtcatgggtcattccccacaagagccacatcctcacacctgacagatgcacggcccaaggggctgcagccctgttgcaattccatgcttcccccgccaaccagctcctgctgccatccccagggaggtggcccaggaaggtgcctggcccagaataaggaactggcatactgcaaagtccccagccctgcctctggtggacagcatcgtcctggaatggccacggagtgatgagttgtgtgcttgtccctggcagtggcaggctgtgtcctatggacatcttggcaggacatggaatttggcctcatgacaggcccaactagggataggaaggaaaatgaagagagccagtatttccccttctccagaagcaggtactcagctttctgggaaaagcgtgcctccagccgtggggacaggccatcctactgactacctcttgcttggcatgaaataaactgctatcctccccttggaatctaccgccactctacatcctactgctttggcctccctctcctctcaccagatggcatgtggtgtggcacctgtggctggacacaggaggcctcaggatcacaaatgttacactagacatatgtcctaatgtgctgcccagaaacctcaactgttccccagctactgaggggcactgtcagcgagatgttgggtctggaggtgatgagatcgggccacacttgagctgagtcaccagaccctattgcttcaacagtgcttggcccccgccagcttgtcccagccactctagctgctggatgtgatcctgggacatgtactccaagcctccgtcacaaaaaaaaaatcaccagctgccatagacacgggggaagcttgcggagcccaggtgaacaagctcagcaatcggacatctctggggaaaggaaggtggcacagaccatgttccctggttcctccctgccccttgccaggcttccttattccttactatgggaagaggtcatatcccttccctgcccctcgctgtctttagcaagcaggtttcactgcttcattagaagaggacaagtcaaaagtgaatcatttttcactacttaaggaataaatccaagagctttccagagactggctgctgcagccctgggaatgtctgtggaattactatgtggaaatggaactttgtgttatgctctagacattacagttatttgagtgttactcgttactgttgaggtcagtgcttcgtggcaaatggctgtactggatatcccagctctgctgcccttgttttgctgcatgttaaataaaaccattttcactgtacttggaatcttcctagtatagacgccattcaccctgatggaggaaaaggtaccacctatgaattctagatatacatgaggacagcctatgatagaactgcccaaggtttttgttaaaagtgcgggttcctgtacgcttatattttaagggaactaaataaccaaaatgttaagtgttccagaagaggtgaggcaagatttcagaagcacaagtataccaccaagcgttcttgttcagacttccaagacactgcagtcaccacaactttggggttttttttttttttttttttaaacagagatggagtctccctatgttgcccaggttg

SEQ ID NO: 88089 - DNA, 2597 bp, Homo sapiens
ctgtctcacacacacttggacacctgcagattttgagtaggaccatagctgctgagcagccacgccattgctgtggagggagccttacactttctctgcctccgaactgcacttactaggtcctcattttcttttgccatgtagtacctgggggacagggtgtctgagaaagtgaagaccaaggttattgagctgctgtacagctggaccatggccctgccagaagaagcaaagatcaaagacgcctaccacatgctgaagagacagggtacgtgtctgcctgcccgcagcctccaggcagccctcgaaggctggcccaggcaaggagagaagggaaggtttgggatccccagagtccctcctgaagagaacagcatttgtccccaggcaaggctgagtcggagttggatgggataaggtgtagcagcctgccctccaccctgctaccctttgcaggtcttgatcacagggacgtggcccttggtgtatgaggaggggtgacaaggcaaccacagcctgagtgcacgtgctgccatgtcccctttcaggcatagtgcagtctgacccaccaattcctgtggataggacgctgatcccctctccaccacctcgtcccaaaaaccctgtttttgatgatgaggagaagtccaaggtaaaggacaccctgggcctgggattttctcatacgagagtgggtggcagcaggggaatgtggtttgcactgtgctgcggggagcctctggggtttccctggggtacgggtgctgcctcttcccttcacctctgatttcctcctctctcagcttttagccaagctgctgaaaagcaaaaacccagatgacctgcaggaggccaacaagctcatcaagtccatggtgaaggaagtgagtgggccccggtccttcaggcacggggtggaggagcccatggccacacagcagaagccgctttgccccggacacgggcctgttttgttctcccctgctgccagctgccctacctgtgccccggtggctgagagtgggaggaggagcacaatagcttccgcgggagcacggaagagaggagtgggttgggagcagtgttgtgaaagcagaagtatagactgggccccaggcaccccacactgaaaggagcttccgagcgtctgtacttgtgttgtggggtaaggtgtgacctggtggaagtggaaagacagtcaagtgacgctctctttctcttgaacttcttcactggggcaggacgaggcacggatccagaaggtgaccaagcgtctgcacacgttagaggaagttaacaacaacgtgagactgctcagtgagatgctgcttcattacagccaggaggactcttcggacggggacagagagctgatgaaggtgggaccgccgacggcaaaggctgcctcccggggctgcgctgcccttcaggagctcagccagcatttgctgagcacgtgccttgtcagagacacgggctgtgcacttggcagtgtattcatgaccttactcatctgcacagcagccacgtcagtagagggtggcgtccccatttgcctcctgggatcagctgacttgtccagggtgtaagggccagatggaaacctgagtctgactccagagaccacactctcggtgctcacccctgctctctccctttccttactaccttggggacatcaagacagagaggcttccttgtaaccctgatgcccatgtggtgcaggccatggttgggtggatattttgagttctgaggaacatgccagcctggaaggcaggaggggactgacttcccctgacccatcctggtgactgctacctagacaaacatcctgggtgatgtggtgtggtggtggtggctggtggcaagaagacgtgcgctgtgatcccagctttgctggtaattgaccgtggcaattggcatatcccggtcattttctgggcatgaaccctgaatgaatcagatgatctctaagggcctttgtggtttgatttttatgtccgagtctctttcaggagctgtttgatcagtgtgagaacaagaggcggactttatttaaactcgccagtgagactgaggacaatgataacagtttgggtgagtgaaagagcgacggtcagggataagccaggcatttggatatgtgggtgggaactgtcacaacaggagtgagaagtctctctttcctgctccaggggacatcctgcaagccagtgacaacctctcccgggtcatcaactcttacaaaacaattattgaagggcaggtcatcaatggcgaggtggctaccttaaccctgcctgactcggaaggtgagatgctctggtccccaactctaggctcctccagaccagcctcaggcccctatcatgaagctgcgggtgtaggctggccagcgtggtggtgttgcacaaggcccaagggagttctttgccattccaagcaatcctccggcttcccggaggcctggagatgtgggtaggaatttccccacctgctttctcgggcttgctttgcagcatcccctggcagagatgccgttggattaggccagaggctgtagcagtgacctctgtgcctagggtgctgcctcc

SEQ ID NO: 88090 - DNA, 1008 bp, Homo sapiens
gctctagcctgactgcattcaggtcctggaaagcgaaaagaggaaatatcatctggttcacatgcacccctcagtcatatttgctgtagaacgaattccttaaaacagtgattctcagcagggcacggtggcttgtacctatagtcccagcaccctgtggggcctaggccgggaggatcgcttaagggaattcaagaccagcctaggcaacgtagtgagacattgtctctacaaaaaataaaaaaatcagccaggcacggtggcacacacctgtggtcccagctcctcgggaggctgaggttgaaggatggcttgagcctgggaagttgaggcgaaagtgagtggtgatcacaccgttgcactctagcctgaccaacatagcgagattctgtgtcaaaaaacaaaaaaaaaacgtaacaaaacccagtgattctcaacagggccctccagggaacatttggcagtgtctggaaacatttttagttgtcacacatcggggtgggggtcctcctggcatcaagtaggcagaggccagggatgctgttcgacaccctataaagtgcagagtggccccccacaacgaagaatgaccagcccaaaatgtcagccaggcctcacctgagaaaccttgctttaaaatgcagaagccaagaaagagagcctggacagtgcactcccccttagaaaccgcagtgccagggaccacaggcagcacaggaaagccaaagcgtgagttagggagataagcggagggaggagaaatatcctgtcatctttctcacagataataggatttaaacatccctcccattccctgcacaattgttggtgagcttgtggaaaaaacccaggacaccaagtcagagaaactttgtccctggacctcacctccctcattgtaaaacacgaggccagaatctttaaggaaggcaccttccaggactggcatccaggccttcttggggtcggggtctcggggtttcttgctttagtccctgcccagcttcc

SEQ ID NO: 88091 - DNA, 1024 bp, Homo sapiens
ggatggagagctgggcttccgccggggagattttatccatgtcatggataactcagaccccaactggtggaaaggagcttgccacgggcagaccggcatgtttccccgcaattatgtcacccccgtgaaccggaacgtctaagagtcaagaagcaattatttaaagaaagtgaaaaatgtaaaacacatacaaaagaattaaacccacaagctgcctctgacagcagcctgtgagggagtgcagaacacctggccgggtcaccctgtgaccctctcactttggttggaactttagggggtgggagggggcgttggatttaaaaatgccaaaacttacctataaattaagaagagtttttattacaaattttcactgctgctcctctttcccctcctttgtcttttttttcatccttttttctcttctgtccatcagtgcatgacgtttaaggccacgtatagtcctagctgacgccaataataaaaaacaagaaaccaagtgggctggtattctctctatgcaaaatgtctgttttagttggaatgactgaaagaagaacagctgttcctgtgttcttcgtatatacacacaaaaaggagcgggcagggccgctcgatgcctttgctgtttagcttcctccagaggaggggacttgtaggaatctgccttccagcccagacccccagtgtattttgtccaagttcacagtagagtagggtagaaggaaagcatgtctctgcttccatggcttcctgagaaagcccacctgggctgggcgcggtggctcacgcctgtaatcccagcactttgggaggccaaggtgggcggatcacaaggtcaggagttcgagaccaacctagccaacatggtgaaaccccgtctctactaaaaataagaaattagccgggtgtggcacgcacctgtagtcccagctacttgggagcctgaggcaggagaatcgcttgaacctgggaagtggaggttgagtgagccgggaccgtgccattgtactccagcctgggt

SEQ ID NO: 88092 - DNA, 1103 bp, Homo sapiens
agatggagtttctccatgttggccaggctggtctcgaactcctgacctcagatgatccgcccacctcggcctcccaaagtgctgcgattacaggcattgagccaccgcacccagcctccttttttattttatttatttatatatttttttgagacagagtctcactctttcgcccaggctggagtgcggtggcacagtctcggctcactacaacctctgcctcccaggttcaagtgattctcctgcctcagcctcccgagtagctgggattacaggtgcccaccactgtgcccatctaatttttgtatttttggtagagagtgggtttcaccacgttggccaggctggtctcaaactcctgacctcaagtgattcaccccacctcagcctcccaaagtgctgcaattacaggcatgaggtaccgggcccagcctgtccttttatatttagagagcattctattctagtgatatgtgatttctcttgtgtggcctgatttccaggcactgcaggccctagccttgagttatttgtagaagcaggaggatctattgtcccagctcctcagcatcctggcagtagagtatgcaaaatgagaaagactccaagcaggtagatgtcagactattcagagttactaagagtccctagaggctgacacacacacacaaggacaaagttactaagggcagcttctaagtgtatccttcctagcagatcacatctttctgtttgaatttgagtatagtatattattttaggtacatcttccaatatggttgcttataagtaagatatgtaaattagccgggcgtggtggctcgcgactttaatcccagcactttgggaggctgaggcgggcagatctcgaggtcgggagttcaagaccagcctggccaatatggtgaaaccccgtctctattaaaaatacaaaaattagctgggcgtggtggtggccgcctgtaatcccagctactagggaagctgaggcaggagaattgcttgaacccaggaggcgaaggttgcagtgagccgagatcgtgccactgcactccagccttgatgacagagtgagactctatctaaaaaaaaaagggccgggc

SEQ ID NO: 88093 - DNA, 1044 bp, Homo sapiens
ggtgaaaccccatctctactaaaaatacaaaaattagctgggcaacgtggcatgcgcctgtaatcccagctactcgggaggctgtggcaggagaatcgcctgaacccaggaggtggaggttgcagtgagccaagatcgcgccactgcacttcagcctgggcgacagagcaagactccgtcttaaaaaaaaaaaacaactaatacttgccattcttctttctccttccttactgagggtttcattccagatgtttgggagcctgaattttcattttcagagataatttctgtttcattttaacagagtttaacataatgctggttgtttgaagttaaaaggagtcttatatccgtataactgataatacttcgagtgaaaccgttcacagacctaaaagatagcataattgtcttgtaactatctttttaaagggaaaaggaaatgattgggtttttttgttgtcttatttcttttcaggttttgaacgaagaatgtgatcagaactggtacaaggcagagcttaatggaaaagacggcttcattcccaagaactacatagaaatgaaaccacatccgtaagttaagctccattagtcttggaagggttggacccacctccttgtttcaaacactctttttaaaattgagatcactgggatggatgtcatactttttattcacgtttctagggaattaacaaaggatattgattgtgcatgttaatagtatataataatatatcatagtcaataatattatatgttttagattgataataactgtcagtgatcttcaaaaataaaacgatagttggtgcaggtccgtaattctttttctgttaaatatgtcttagagccagatgtgttttataattctgcattttttttgagttttagaaaaggtacttagatgattttgtgtttatatgtgctaatgctgtgggacggtatcttaatatctttgtatccccagagtacggtgcttggcatctaatagttctcaataaatgtttatccctccatcttagtgttcctacttacaag

SEQ ID NO: 88094 - DNA, 2193 bp, Homo sapiens
gctgcagagatttgggcatatccaaatagaatacaggcagcaatgaagtttgtgcagaggttggctctttctaaagtgaaactgtagagttagaacaatatcaaaaagcaaaccttgaggaatgccaaactttttttttttttttttttttttttttttttttttttttgagacggagtcttgctctgtcgcccaggctggagtgcagtggggcgatctccgcttgctgcaatctccacctcccgggttcacgccattctcctgcctcagcctcccgagtagctgggactacaggcacctgctaccatgcccggctaatttttttgtatttttagtagagatggggtttcgccatgttggccaggatggtctcgatctcttgacttggtgatccaccctcctcggcctcccaaagtgctgggattacaggcgtgagccaccatgcccggcccgctagtttgctcttaagctcagcaaaaattcagagttgtgatttaataagcgtgagacttagtaaagcattttgtaaatagagtataacattccttgcatttgttgtacttttggtttcctgaaataatagacagtgtatctatcactctcctcaccacaatccacatagctttccagagtagaaaagatactccatggagaaagtttagaagcagaaaatgaaatgagactgtgtggaagtaaaagtagcctatcctctgtaactgattttagaggtgacctgtgacctggcagttccttatttatgagtgggtacagggcacacattgaccaaagaagatagtttaggtgaggtgctaccctatctttgagaatgggactcttggctcttaaaattagaaaccaggagatctatgggatggaaaatagccttccctttcccccaaatcaaacagatacacatactttgtgacaggaatagattatgaaatatggtgtccagaacaaactgtctgctgggcttttaaaagggttttatactttctgctgggcacctagagcacttactctcccttctgtctccttttattacccacctcaagcagtcataatttttttcctttccattccctaggcttagccctcttccttcctctacccccaaaatgggaaagcctttagtatttaactgtagtactttatttggctgtcagtatttgtcatattagtaattgggtgagcttggctggaggtggggggctgttctgccctttttaagattggcccacacaccattgtacttaggtacccacacaggagcagagcaagttggctagattttgaatacaaaagcatgatattgtgggtgggagcatgtatagttttagaatttttaaagtaaggcaaaaaccatgtacctaatgaggccagtggaataaactttacaacagatagaacttctgtttctgtttaacacccagcaataaaaatgctaagaacagggataaagtgaaaattattaagcccttgtatctattgctgactggtaaaaccaacacatcaaaaaatatcttttggctcccaacttgttaatagtttctgacttacgtgtgttctgagtgatttggtggagtgaatgagctaggtcttgatttttccctcaaaggattgaaatttggttcttggagggtgaaaaaacaaaactcaactcttcatgcataaagcacagataaacagtacagtacataaatatatgtgtattttcatctgtggtatcagaatttcatgagaagtggtaattaaggaaaaaatgtctacaaagacatggcggaggtgatgatgattaataaaaagactgagatatggggctctcccctttgaggacctgtaggacctacgtatctgtgtcctggagaggctagtggcccttctttatttttctcatctctaaaactgggcctgagggtgatgaatggtgtcactagctgaagtgcttcaggaatgccagtgggtactcttaggattattatggcacaatgtatgtggttctgacacttaaccaggaatacaagcagtgctttacatactttccttgtattggagagcctagtggttgcattaaacatgagggaaaaaatctgaaaaaataccaagtatgacaagaaatgaatattattttaataatcccttttttttttttaataaagacacagactggtctcgaactcctggcctcaagca

SEQ ID NO: 88095 - DNA, 1010 bp, Homo sapiens
gtcactgcccaataaacattccaagtttccactagtttttgtttttggacatttgttccatccaacatcgtggtggcattatattttagtagattgtccaaacatgggtaagaaagatcaactatgaaaggaggtgtcgaacacattggctttcccacctgaatttgttctttattctttggatgtataaaaaacaagaataaaactcacagggagagtttgaaggaactgtgaagattcgttctaatttacatagtttacacaacccatagccctagggaaagtgccaaagaacagctttgcagaggactgaagtcctcctgggaagaagagtcccttcgcatcagatggctctcttgagtttactttgctgctaaaaaagtgagctggattgaggggaaggttttctatttttcaagctttgccagaacacttggcttaacaaacagctgtttgaagtcttaattgtgtctctgtatttccagggacgcgttctgacctcttattagcaacacagctagggctggctggcatgctttgtggtgccaaacatagctgtaccagcctggaaggtatccaaaccgaacaagatattgaagtcagaaggaacaagtggtacaaattctctcttagtcagagtttggaaagccttcgtattgaaattcatgcggacagatttgacacacttctgaaaatttttttcatcaactgacatttcagttcttccaggcctggaatagtgggtttcagtcaacaaggcaccaatatctttttaaatttgcccatagtagccagcttttggggtgtatgaatattagtggcagccttggagcttgaacgttgcatcaatgacctctgttaacagctaaccatatgatatccacaaaataatgaatttacatttctcatgggccctggctttagccattacctcgagagtcagtctgagcatcacttttaagcattcattcattgagtgtccctgtctcttagtactgtgatggtccatg

SEQ ID NO: 88096 - DNA, 1070 bp, Homo sapiens
gtagctgggattataggcatgtgccaccacgcccggcttattttttgtatttttagtagagacagggtttcaccatgtcggccaggctggtctcaaactcccgacctcaggcgatccacccgccttggcctcccaaagtgctgggattacaggggtgagccaccatgcccagctatcagttttattaaaagaaaaaagttacattcagatagtaagcagtttacattctgcatctagtttaccttgaaggatattctaggaaggtgaagtgctctgctgaggagtggttttgtttcttaagcgttgagatttaacctgattttaaatcttaggctgaagttcactgtgactgtgctcaggatcataaaactttgagacatttgaaaaactgacccaaaatgactttttgaggaaaaccttcgtccttttggcagctactcccttaattttacctccttctggatgtggaatgagagacatctgaagtattgtaaagaatactggctctaggcgagacctgcctgcttggaatcctagctctgtcacagacagatcgggcattgcgatcttgggcaatttacgggatggctttgtgttttggttctgacatctgtaaaatgggaacaatagtttcctaccttcctggggtcatagtgaagactaaaagagccaatatgttggtgttttttgttgttgttgttttctttttgggaaggagtctcgctctgtcacccaggctgtagtgcagtgtagtgtagtggtgctgtcttggctgactgcaacctctgcctcctgggttcaagcgaatcttctgcctcagcctcttgagtagctgggactacaggagcgtgccaccacacccagctaatttttgtatttttagtagagacgggctttcaccatattggccgggctggtctcgaactcctgaccttgtgatccgcctgcctcagcctcccaaaatgctgggattacaggcgtgagccacccgcccagcctatgttggtgtttttaaagcagtaactagcataaagtagacagtaattgctagcttttagttttattaatgc

SEQ ID NO: 88097 - DNA, 1070 bp, Homo sapiens
ataaaagcttgtgtttttcttggctcggggagggagaggacactgggatgtaaaatagaaggaattgcccttccactgcaggtttcaggcctggtgtggttggaatacatcagaattcctcccaccattgtagggcaggcttgagacagtcccagaggttctccactgacaagacccctaaatagtctacactagagcacataaaacttacctaggagttgcaactgccatttaggggcttatgtatacatacttcaaactgtgcttataggaattaagagacccattttgagctctcagatctgtgctcattccattctagagccagcctcttgctttcttcagctctagtggagagccagcctggatcatctaggtgtattctaccctctctggcactaactacctttaccagtttcttaaactactttaaaaacaggtcttgagttcacattgagatcttcaaagcattctgtctcagcactgcctggcctatttcagtgtcacactgactgagcatctcttgagccagatactgggataagttgctttgagagttgggagagaaatataagatgtactttctcccttcagaagctccaaaatctcaagtaagagaattgagattaatatgtgaaacagtacaagatggtatataaaaatttttttagaacaggaaaagatcttttaaaatttatttttatttatttttttatttttttgagatggagtctcgctctgtcacccaggctggagtgcagtggcgcgatctcggctcactgcaagctctgcctcccgggttcacgccattctcctgcctcagcctcccagtagctgggactacaggcacccaccagcacgcccggctaattttttgtatttttagtagagacggggtttcaccatgttagccaggatggtctcgatctcctgacctggtgatccgcccgtctcggcctcccaaagtgctgggattacaggcgtgagccaccgcgcccggcaagatcttttaaaatttcttaagttagacttactcttttacagatgaggaaatggtggcccatataggt

SEQ ID NO: 88098 - DNA, 1174 bp, Homo sapiens
ctgacagtttaaaaatcagcttctataccatgtgcagcttattttgagccccactatttatgtgaggattcgctctcccccagcacatgttaattatgttgtttacccaattgactgtagcagtttgctcttttggatgtgtaatttattttaacgaggatgagtgttatcaaagagtatgttaactttaaaggaggaaaggctgaagcttcatgtttgagtgttccctgtgtctcaagttttgacatttttccttctgagccttagactgattgttggaatttgctacctcatttgtttactacccctgaatgaaattcttagaattttatgaagagaaagcaagtggagatgtagaaatatggttctttataaaaggacgtgcagtctttttacttttaagttatgtggacttattgatagtctttattttgccctcattgcccaaggcgtagagttctactctgaagttaactgcccagtaatttcttaatgttagaaatgtaggttgagcctcatagaagatgatgctgcagagccctttaaagagaagaaaactttgtgtctgtgtgttcatttcaaagctgtgtttgtgacaccacacttttcgagggtattctcaaagtcaacactaaattgtcagaaagcagacggaaccattttctagaaactaggtttctattttcttgaactagagaaaatatgcccagctagagatcagggcaaagttaacttagactacaaaattcctcagttttcattggtgtatgggagaggtaatttgatgtttctgtaggtgattactgttttctgtagataacccacttgtgatggtataagatgggctactcaaatgcccacatctatagcctgtacaaaagcccttttgggctagtattttttgtttttgatacaaacttagattttttcataagtttatcttagaaacttgaacctagaaggctggtggttcatatttttctctaaatctgtcccattgcacattaagcactgaagcaacaaattaaaacaaaactaggggcatgcggtctctttttaagaattttttttttttttttttttttgagatggagtctcgctctgtcacccaggctggagtgcggtggtacaatctgggctcaccgcaagctccacctcccaggttcatgccatt

SEQ ID NO: 88099 - DNA, 1798 bp, Homo sapiens
gttctcgcgggacaccgacggggagcggaagccaggaggtattgctgcttcggcgaccgggcggcggcagcggcggcggcggctgtggcagagtctgtgcctgtggcggtgacggcggcgggagcaagcgctgccctcgcagagcagccttggggtcgccggccgctcgcagcgttgtggaggggcgggccggacgctgagcggagcagctgcgccacggtgagtacgggaggctgcgctcggcgcctctctcgtgccttttcctcttggctctacagcgggagtgggccccgggggaaccgggaccggccccggggttcgcgtcggggcggcgaggcttgggacgtggagcgcaatccccggggctccggactctacgtttccccttttggggcgcttccttcctggggaccgtcctcctccggctcttggctctgggcagtccgggggaagaggtcggggttctctggcgaggtcccctgccttcatcgggagggtttgcacggaaggggcccgggaagcccaggcgggccgaacgccgaccgagtcagtctacccgagcctggcggcgggggactggtgtgggctgcagctgtggtgattgatgtgccttcgacctgcacggcaaccacgtcaccatctcctggcgtctttgggcttaattttgtgcgggaatccactttggggtggaacgtttgctgctggagccgggggagatacctttattctgacacttaaaaaaaaaaactatttgaaaaatatttgtcaagaaaaattcagcagtagcaggttggactgcaccgaggaaggattgcggcgagagcgggcgctggtaattttcatttgcagcgcgccctctctatgattgtaagccacacatgagttatggcttgtttagaaagtttttcaaggctggcttcaaacgctgtgaaagtgcagtttgcaggggactgaagtgcacttgaggtctgtctctttttgatgctgttgactttccgaaatgtcagacacatgagagaaattagcattagtctattttggctttcttactcctctttctccagttatttccttccttctctatctgcttctgtcctttccactagggacacgaaatgcttgtgtaatgcaagtcatttgccccttcctccccccacccccccctttttttctaatgtacttccccttcctccttgtagtccccactctggcgtaatttttcgaggtttcttccctttcgtgctgttcgttttctctcatttcaagattccgtctttttcctcgggaagagactctctttccttgctttcgttcctttacttttgcgcgtcccctgcgttccctgcagtcagccagaagggttgctagagagccgtgggaggctgaagtcccctctctgagaacggggaggctcaaaagattgaattcatccctaagaaatcagtcctgccactaggtcgcaagtgtggtttgcttgtattatttttgtcttttactctttttcttttaagattatgcttctgtgcctgcttatgttttcttctagtatgtctttataataggaagattgggtcagctcagtgactttttttttttaggcagagttttgctctttttgcccaggctggagtgcaatggtgctatatgggctcactgcaactctgcctcctgggttcaagcgattctcctgcctcagcctcccgagtagctgggatcacaggcgcccaccaccatgtccagcgaattttgtatttttagtagagatggggtttcactgtgttgcccaggttggtcttga

SEQ ID NO: 88100 - DNA, 1014 bp, Homo sapiens
cccctattctcaaatcctgaccaatcggtggcctgaactttagctctctggccggcgcctctgttgcccggaagggaggcaagcccccttagagttgccagtaacggacatggctgcggcccccggaggaggggacgtgaagtgaggagggggttgggaggggagaggacgcgggcgaggaagaccagccccggggccccggtaagtacgagaaggcccgtggcccgaaagtggggagcaagggggcgtggggctcggccttgcgcgtcctttggattcttggccaaggaaaggggagtctggggtctgcacccagagaacggcttaaggggatgcctcctgagggggagtccagggactggctctagtctccagctcttgaccattgccttcccccgagtcttcagactcttgctctcagccctggattggtccattgtggggtctctcgccagaaataaagcctctcgccaacaaagaatccctgccccaggtctgtcgtgcctaggccctggcccagagggctcccaacgccgacgccctgagtatttatttcgaggcccctgggagtcctcatccccgacctaaataaagaccgttgtcccgcctgcgcgcgctctccgcagccgcccggggtcctcgcgcggccgtccccagctggatggagccggccgaggggctcctggcagccatccctgatcttgcagtttggagcgggcttttttttctttccgcctttccagaagcgttttcaggctcctcggaagctcaccatccatgccatcggataaagtgactcctgtggaatgccctcgttcctgtaccgcacacccctggagcccaggtctcctggttcctagcatgccacgatgcggcccctgcccgctgcccagcgccagatgcaagcaaagccccgctctttcattggtgtgtcaccgcgggctaaactttggcgttgccttggtcacgtgctgctacatcccaccctctctcctgagtttttcggtggctctt

SEQ ID NO: 88101 - DNA, 1019 bp, Homo sapiens
caaacattgcaagtcttagctgctatgttagctctaacttccttgctcactggttctctttgtcaaaactgcaaacagggaaactggtggatactgtggagtagtgcaatgaccagggaggtgaagtacaaaccatcttcttcatcatcagcccccaaataattgagagttaactgcccttgaaccaccagaccaccatgccccttgtttgtggtgacttgacatcagatgagactgggagagccaggccttgacagtgaaatggaagagaaaccccatggcatttctattttgagaagttgctaggtgtgccagctcctagtgctgagaaccagccttttggaaaccttaactcctgtagaaactaatgagaaatgaaggttgtgatcgtcctgttcctgcctgctgctctctccctaagttgggcttgagaaacagtttctataggagagggaggagtcctaatgtaaataccacctacacccaaggctgtatgtatttagcttaatctgatgaatcaggttgaactcgtaccttagcagtctaagcctgaacgccataaagcctttaagtccattcctggtgttcaagtgagaaggttctgggtcaggcgtggcactggttggtaaatatgtgtcaatatttcttatcttactattgtgttagtgttgtttttacgatggtgtctttctttacccaaatgataggatttaaaaatattgtttaaagcccgtttccaagcaggcctgggtttgtttatagcagcacaggtgaactagagggtaggccatggctgaaacaggaatgcttttcttccgagcagacccgccagccagaatgtgtggtttggtgatcaggggtttgtgtaataataagctttgcctgtggccactgagacggtagtaaacagtatgggtcacatggcatgacaagtaggttaagggccagatttagacactgatggcctgcgtaaggaggagcaaaccacacactgcttgctttgggtttctctagctccc

SEQ ID NO: 88102 - DNA, 1029 bp, Homo sapiens
gctcctgtttcctccctccttctctttcctcttctcccctccctcccgcccttccagggctgctgcctcctcctccctccctgaatctgcagcgtgactagaaataggctgaattaatcagcagattgaagctctgctctgctgcgcctgattctgtgcagcacccggcttcttgctcacacactctcagctgtctccgtctcttctctcctcttctctctctctctcttttcaccctccccgctttgagggaggtgttggaagttcttgcagctgactgcttgtggctcagactctggcccatgctctttaagcaggcagagctatggatgccccatcagggcaaaggcaacaaagtgagtatgctggcagggcttttacgcttctctttaaaatgctgtgttccctgctttgtgtgggagtcttcgggttagcggttgctgtgagagtcctgaagacaatgcaaaatgggaggctgcttgaatgagcatgggtagctgggacctgggaaggggattgggaatgagagccagaaggccagtgtgcctgggtagctgccagccaggtgcccgagtcacccagagcaggactggacccaagcctcccaggggataccctgccaaggcatgtgaggacctgggtttccatgcacaggtgacagaagctcagggccaggatgccatccctcctcagggccaatgaaggcactttgaaggcacaaggaaggaccatgtggggaactaagacaagagccaccagggtggggaggattttttcctaggtcctggtggctacaggaggtggggaagaatgtgggtgaaagtactaaggtcagcatgagccaggaaaaggaggaagcagctctgctcaaggctctgatttgcctggctgcagacagtccatctgtgtctggcccaactcagaagagtgtatagtggctgaatctctgcttccgtgattcgggcattgtgtggagtccagctttgtgtcgcttccatacctgcactgacgacgacagtggggacccag

SEQ ID NO: 88103 - DNA, 1230 bp, Homo sapiens
caaaagatagcatctctatgttagtttccctctctccatttaaaaaaagatatattttaggccaggcacagtggctcacgccagtcatcccagcactttgggaggccaaggcgggcagatcacttgaggtcaggagttcaagaccagcctggccaacatgatgaaacctcgtctccactaaaagtacaaaaaattagcccgacatggtggtgtgtgcctgtaatcccagctactcgggaggctgaggcgggagaatcaccagaacccgggaggcagaggttgcagtgagccgagatcgtgccactgcactccagcctaggagactaagcaagactctatctaaaaaaaaaaaaaaaaattgtccatgcaatcaaagactggcccccttgcaataaattgggagatcagtggtgagcacagcctgggtgggcagggagctcgccaggggcagtggggaaagtgagttggggaacatggaataaaagaaaaagttgttttgttttttaatttggctgtaaagagtagggtaggaggctgtgcacttgaacagtttgtaatttggtggagatggacatggtcacaccttgagaggccagagctggtaggggaagagatgtgaggatcccagaggaggggaaggatgaagggccagggaaggggagggttggggcccgcgtgccttgcatagccttggcctggcagtgacgcccagcgcctcctgcttgcctgcagggcgagcctccctcagccctgggcctgtccacgcggaaggccctcagcgtcctgaaggagcagctggaggcagtgctggaaggacatctcagggagcggaagaagtgtctgacgtggaaggtgaagcttcttctcggggctaccagggcctggctgggatggcagggaagtgtgggaggccccttctcaggactctgatgtaccctgtcaccctggacagtgtgacccaactgaggcctcatgaaatatcagaaagaagccaaggttcccctcagagtggctcctgagcctgcttgctgcaggagcccaacaggctggagcccagccgaggtcaaagagaggggaccaaggcggccatgggggctgggaagggtgccgggggaggcagccagattggagtgggacaggcctctcattgtcccctccctgtccgaacttcccaggaggtgtggagaagcagcttcctccaccacagtaaccgctgctcctgcttccact

SEQ ID NO: 88104 - DNA, 1056 bp, Homo sapiens
gaccacaagagtcagctggcactgcagcaggaagaggaagcacttacggatgccataggtggcatgccgagcctagggaccaagagggacagattatggcctgggtctacctggcctctcccaggcccaacagctgacacactttagccaagagccagacgcccaggatgcttctacgaggggagcagaggcgaatgtaactgcctgggagagcccgctcggagggctggggaatgaggtccccgggttcaaacaggtcctttgctgctactcccaccccaggcgggtcctgtcctgcgtctctcctcctttgcctgccgaagcacccacctgttcgataagccggatgatgctgatggtctcctcctggcgaaaggtcagggaacagggcaggctgttgagctgccctgacagctgcaggggagaaaggccatccgaggcctgggccatgctgatgctggtggcgtagccaaaggtctcccaggagcaacgggatgggtacaggggatccagggcaatgctgctcagggtgggggacacacacacttcagctgtatctcccacaggactgggcaccccaccctcttctcccaccatgcccaggtgcattggtcccagccagggcgaggtcggctatagtacacacccccagccccacgcaggcccatctgatcctccggtctgggaggtagaggctggcccgcaggctccagggtcccgccctgacctgatgtcgctctggaggaagaggcagctgttccgcaggttggcagagctgcccaggcagcaggtcacctccccgtactcttgcatgatctttatcatctcacacatggctgaggacagcgtataagggcaccagagtcaggcaggcagagcaccaagtgggcactgggcagagacccatgggacaggagagcaggaggcgatgggaggtgggcccctctttgaaacaatcccacccccggcagcgggatcatgtgaacatcggcacttctgactccaacccacaagattccccagctgatcccagcccaggttcctttactccctgca

SEQ ID NO: 88105 - DNA, 1102 bp, Homo sapiens
tcccgctgccgggggtgggattgtttcaaagaggggcccacctcccatcgcctcctgctctcctgtcccatgggtctctgcccagtgcccacttggtgctctgcctgcctgactctggtgcccttatacgctgtcctcagccatgtgtgagatgataaagatcatgcaagagtacggggaggtgacctgctgcctgggcagctctgccaacctgcggaacagctgcctcttcctccagagcgacatcaggtcagggcgggaccctggagcctgcgggccagcctctacctcccagaccggaggatcagatgggcctgcgtggggctgggggtgtgtactatagccgacctcgccctggctgggaccaatgcacctgggcatggtgggagaagagggtggggtgcccagtcctgtgggagatacagctgaagtgtgtgtgtcccccaccctgagcagcattgccctggatcccctgtacccatcccgttgctcctgggagacctttggctacgccaccagcatcagcatggcccaggcctcggatggcctttctcccctgcagctgtcagggcagctcaacagcctgccctgttccctgacctttcgccaggaggagaccatcagcatcatccggcttatcgaacaggtgggtgcttcggcaggcaaaggaggagagacgcaggacaggacccgcctggggtgggagtagcagcaaaggacctgtttgaacccggggacctcattccccagccctccgagcgggctctcccaggcagttacattcgcctctgctcccctcgtagaagcatcctgggcgtctggctcttggctaaagtgtgtcagctgttgggcctgggagaggccaggtagacccaggccataatctgtccctcttggtccctaggctcggcatgccacctatggcatccgtaagtgcttcctcttcctgctgcagtgccagctgactcttgtggtcatccaggtgaggtggggcccgcacaggcattgcccccgtgccactcaccccttcactcaggggccagctgaaaatctgaggaaggaggctggggttagcagtacagtcaaggggtccccccagagc

SEQ ID NO: 88106 - DNA, 1049 bp, Homo sapiens
agattcggtgagctgtcagcagggcgcctccctctgggctcaggcatgttccctaaacctgttactcccttggcgacactcccccacctttccgctgcccatccctccctcctcctctggtgtcctgccccggcccctggtctaaggatctttgccaacctgtactttaatctcctgccccaccagggtccgagtccgctaccagaagcgacagaagctgcagtttgaaactaagctgggcatgaactctcccttctgagccactggctgtggtggctgtagttgcccccgtccctggggctaaagccagacccatttctgaacaggggagtttgtatcatgaatgtttccaggtttgctcctgcacccgtggcactggaaacccagctccccgtgtcagaccccgctgtcttcctgagccctggggctcactgtggaggagctgacggcctgggcccttggccagtcctggctcttccctgggcctcaccagggacactcttgaatgtatggcctcaggcgctccctagaggggccctaaaccccctcacctgtgagctaccccctttagggatcccttgcccccttggagatcccttgccccccagtgcctctgctcgtgggtccctggacacggccttgaagccaaccttctttggaggagcaacagcagcagccttggccgacgcgtccaactcccaaggctgccgtggagggcaggggggtggtgcttgcctggatgtggccccgagtgcctcccctccctccctctgtgggggagtctcccgcctgaacctgaagatggagcagggcccccgcttcgccctggagcctcttcctgtgcctggctcaagctggctgcctgtcagtcttggggaatctggcccaggtctcctcagcctctgccccagttctgggagaagtttctactggtgtatattttttactggaaatgagccttttaggaatgaatgtagactggtttgtattaaaatgtgtcaattgctaagaaatacctgtggctggtctgtaaggccactccagggtct

SEQ ID NO: 88107 - DNA, 1050 bp, Homo sapiens
aagcgggtgggcatccctgcagcccgcctcccctccgcacccacccccctgcgcccaggcttctcccggacaccgcagcctcctgccgaagaacccccgcaccctcttacctacagccagcttcctcgggtgggcctcagcccagacagcccaggtacatcctcccagggggcagtgctgggcactgtgtgggcgtgtggcctgggcaagctgccagacagctgtcagagcgacacttgggactctgaccccttggcttctgccccccacagcaggtgacaggaatagtgtgggcagtgagggcagcgtgggcagcatccgcagtgccggcagcgggcagagctctgagggcactaatggccatggccctggcctcctgattgagaacgcccaggtaggatgatggggtcacggaccaggtcagggctcactccccactgccagttccccaaatgctgagttggctcctgccctgtctcctccagccactgccctctgctggagaggaccaggtgctgccaggactccacccgccgtccctggcaggtaggaagggtcaggggacctgggttggctaggagaggtgcaagtaaggaggccgagggtgggcaccccttcctcctgccacctttccattccatttttctctctccttgaagacaacctgagccaccgccctctggccaactgccgctctggggagcagatcttcacccaggacgtgcggccagaacagctgctggaggggaaggtgtgacctccacggggtgcaccgtgggcctcgggggggaaggtgtgacctccacggggtgcaccgtgggcctcgggggggaaggtgtgacctccacggggtgcactgtgggcctcggggtgggtagggcagggtagaggcaagagcctctgtatggactgaagccccgctcaggcaggtcctgagcccctggtgggggctagggccttggtccagctcctgctaattctgcccccttcccccaccccgcaggacgcgcaggccattcataactggctaagcgagttccagctggaggg

SEQ ID NO: 88108 - DNA, 1035 bp, Homo sapiens
gtcctaaactagatggcagactgagaaatgtgactcccctccccagtaccttgttttctgtgtccttgtagccgtggtccttcagcatatctctgtgctgcagacaacacaccttcctgatggaggtgcccggtaagtttccaagcagtgccgtctctgcagtaccttgaccgccaggagttggtggttaggaactggctcctgaagtagggtgtaaactagaggactgttccagggactcctacccctacgcctagctctgagcaataactagtgttcgtgtgtgtctagggaagagggagaataaccagtgggttagcccaagggttcagagcccccaaccctcaagtggcacctctgtgaggctgcttcctggaactggtggagggaaagggtgggatggaaaagaaaggttggggagaagagttcatgtcataacgtttctcattgtattgtcaggctgttggagaagtctgggggcttggaaatcatctttgatgtttaccaggccgacgctgtggccacattccgaaagaataaccctggcaaaccctatgcccggatgtgcattagtgggtacgcagtgagccagcactgcccctcccccagctgctgccagttctcctgtgaaccaagtgggactcctctgtactcccctggccagcgtgccaatctctgagaggaacaggaggtccagagaggctaagtgacctacacaaggccacacagccagtttgtgctgccctactctgagctcctcgttgctggcattttagggtagtctttctccaatgccattttagtctaggactcacccagcagaagggatgtggattgtggggatttacaggctaagagtggtgagcaccttgctcttcctagcacctccccaaccagtgctctggggcgctcttcatcagagccctgtgttttggagacagaactcatgggtcagaattcttgcaccccaactccttccgtagaatctcttctctgggagccctagagcttaggagtgggctatggctgggtctc

SEQ ID NO: 88109 - DNA, 1045 bp, Homo sapiens
ctgcgtcggaggggatgggacgtcgcaggcttcccgaagggaggagggaggacggcgcgccatcggcccttccctgggcgcagcggggtgcgggtggcgagaggcgccacctgcagctgggcggtggagcgcgctgcagccccggcctccgcgccctttccgctcccgcctctcgtcgctccaacctcctccctcgcttgtgctaaaaattccacccgctgttgcagaccctccggccgacacggaggaggtgggcgcccccccgcacccccccccgaggaaaggcgtctcgccgcgacgccccggtccctacaccatccctctcgtggggctggaaacccggccctgcgtcccccggtcaccctctctgggctgggctctggcagaggagctggcccggatccgcccctccctcggcagctcccgggagttggagggacggctcccctggagtctgggaggcggcccgggaccgcaggcgttccgggaactatttccgcttgcgggaggcggcgggacactgggcgcggcgcgccgttctgcgtccaggtgcgcgcaggtgaggccggggcgggcctgcggaaccccgaggccgttcgcgaggccccgccccgcgcttcccggggccgcggattggcaggagcgcagcccccacccccgagggtgcccccgcccctgcggcgccgagctggggggcgggccgggggcggggcgctgggccccggcaggctcgccctttatgtaaatagcgcggctccgccccaggctcgccgcgccggaggtgagcaggaaggagacggccgcccagcagcccgtgggcaggcgcggcggagcgagcggggccggcggcgggcgccgagggacgccgaggcctcgggcgggggctggcccggggttccaggtgagatgcgtgccggactcgcccagccgggcccgccccctcggggcttccacctggggcggggaggccagggaggcccaggacccctgggctgtcgggccagggcgggagggctgcgcccaggtccgcgcgcctcgcccctgt

SEQ ID NO: 88110 - DNA, 1024 bp, Homo sapiens
tgaactatgatggcgccactgcactccagcctgggtgacagagtgagactctaactcaaaaagagaaaaaaagtctctaggggtcagaagtttttcagcgaggacctttttcaggaattgagggcagcagtggagggcgcggcttctcctaaatggaccttgcattccagtggcccttgatgcttcccttgctccttgggagggccaagagtgagagccggttgcctgggagtctttcctgtggtggggatgtcggagagtgcaggattaaacctgctgtgagttctgccccagctgaggagtgcttgctgggtacaccctcctcaccctgctgggtggcagggcagagagcacaggcctgtgctgctctgttggcattaggagactttctaggaatgccattgtgccccctttcaaccttgcttggggagaggatgtcctctcctgccaggacttcctggccccgggaccctccctttggaagacgaagtgctgcctgggaccaggtggcccatgagcccctgcccgcactgtgggagatctgcgcatctctggcaagagcctccaggagccatctaaggagtttagtttccccggggagctattcggccttcctggtctttccagatgagtcaaaagcagctgttgagacctctgagttgggggccagaatggaggcccaagagaccaatgttctttctcctgggccggctgctttgagcagcactggcagcctggactcatttgtcctcaatcctcaactctgagaggccctcttatctgtcttaggtgatatcgttctcagggttcctcctggggcgaggcacgccaggtctgcttggcaacgctgttttcctctgtcaggagcagtttgcagagagaaaactggggacagggcaggagacgggcgtcccccagcggggccaccagcactgtttgccctccccagccctggctccctaggaattccaaggagaccctcgctcactgtgcccgtggccatggctttgctcaggtccctttg

SEQ ID NO: 88111 - DNA, 1027 bp, Homo sapiens
catctgcaccccgcctcctccatccgcaccccgtgttatgctggagggtccctggcgtctttcctgcctcctagcccaggctctctgccatctgtctcctgtcttggcagaaagtgaccaatgtttgtcctggcttgaaatgttatgacctcattaaagggccttatgggcttgttttccgaggagtcaggggaccccgtccatggcatctcccctgctgggcagtggtcggctcacgggcagctgttcttgtcacagggctgcccccagtgccacacagatcaccgtggtcctgccacattcctcctgcgagctgctctacctgggcaccgagagtggcaacgtgtttgtggtgcagctgccagcttttcgtgcgctggaggaccggaccatcagctcggacgcggtgctgcagcggtgagcccagagcccagctgctgttaactccatcccctcaagttaggcatggcttctccccttggtcccaggactctgtcaggagctgtcatttctctgctgggaattccatggggctatagcaggggaggctcttggcttcctacctgtcacctactgagaacctattggcctgtcataggttagcatcatagcactaaaaagggggctttgagggtccctcgtctaaaggccccaaatgactgtgtaatgtcaccgactgtcagtccagtgtcctttgcacttgccatgggtttcagaaccccaggggctccgcagcggggaagtcgggcccagacctccctgtgtcactggggcagctcctggtgccaccctttgcggtgggtactttgctgaggttccatttgctcgcaagctccgtggctaaaaagccttgaccgccacaggcatgtgggtctgttgagatcgtttcagaagctttgctccttgttgatgatactacattagagagggagttggatcaggtccgggtgggagaaggggacggggcccaaaaaaagagaggagatagcatctgacaagatcatgttggggccgggtcggtcatggt

SEQ ID NO: 88112 - DNA, 2801 bp, Homo sapiens
cccatggctgtgccatgctgggggccattccccctggtggacggcatcggaggctcacggcactcccctcgcccaggttgccagaggaggcccgccaccggcgtgtgttcgagatggtggaggcactgcaggagcaccctcgagaccccaaccagatcctgatcggctacagccgaggcctcgttgtcatctgggacctacagggcagccgcgtgctctaccacttcctcagcagccaggtaggcagtgcccaggacatggcaggcgccatgttgctctcccagggccccaagtggcacatacacactgtgcagaggcatggggtgcaggcgatgggaacgccgcctcggtccagcgtgctgccctctgtccctctcctcttcctccatagcaactggagaacatctggtggcagcgggacggccgcctgctcgtcagctgtcactctgacggcagctactgccagtggcccgtgtccagcgaagcccagcaaccagagcccctccgcagcctcgtgccttacggtcagtgtttcacccgccgggcagggcccacccccagtgcctcctggattcaggtgcaggttgctcaattctgaagcaaactccagggccagagagggtaaaggctttgtccaaagccacacagcagggttcgcctcacccagtttcttggggaacttctcggagcaagattcccaagcacaggtctaccatgtggatgtggcatgagctagagggatctgtgcctgtggggactgacacttgtctgagagtttgaggatccgttcaagccgattcctttcctttcaggtccctttccttgcaaagcgattaccagaatcctctggctgaccactaggcaggggtaggtatccatgctggtcctctttcctctccagagccttcctggagggctagaaaggtcacttaggcctctgcctgggaagttggtgccagtgaacactctcaggtcccgtgttggggtcttggacaccagggaggggagacagggtagacgctattcacgtctctcagcggcccaattcctgccaagttcattcttgctcctttcttccaccttcccagagagacggtactgagcagcaggtcttaaactcctttagttggcagccctgtttcttcagacaaaatcactctgggtgatgttcaaacagaattggtgggggcacccagcatgaggcaggagtggctgctgagactcagagcccccagcctggatgccctcaccttacctccaagtcctcctgggctgtagcagttggaaggagatggggtccagtctcccctgctcctggggaccttgactgagtggtgactttgattgccggcctgtggctgttgaggctgtgccaggagccccagcccactgccgctcctctgtgcctgccaggttgcccttcaccatcttccagggtggcatgccacgggccagctacggggaccgccactgcatctcagtgatccacgatggccagcagacggccttcgacttcacctcccgtgtcatcggcttcactgtcctcacagaggcagaccctgcagccagtaggagagcttcgggagtgggtgcccagggttaggtgtgggaggcatggggcaggaccatcagtaaagacagggccaggtgcagtggctcctgcctgtaaccccagtgctgtgggaggccaaggtggtaggatcgcttgaacccaggagttcaagtccagcctggacaacgtagggagacccttgtctctacaaaaaataaaaaaattagccaggtgttgtggcacgtacctgtagtcctagctactcaggaggctgaggtgggaggatcacttgagcctgggaggtggaggttgcagcgaaccaggatcatgctactgtactcagcctgggtgacatagccagactgtgtctcaaaaaaaaaaaaaaaaagggctctgcacagatgttcctaagcctaccactgtcctgagtcccttagcctcactgcaccccaaggtgcagtgtcatcaagccctacagctcctttctctgcctccctgccaccctccccagctagagacccagcccagccacacctcctgtctgccccgggctctctgccctttccagactgtaatgggacttagcccacagggggctgatctgtactgttggatttaacacccaccccgctgaggcaagagggtcctggcttagagatggcaaagcccgccttctgggcagggcagaaggtggctgtgcagcctcctggagctccagcaggaccggcagagccctgagtcagcctcgtaaattgtgtgacaggcaagaccagaaagggctgatgttgaaacctggagaggagccctgcaggagctctccaggagggagggccctctcctaatgatgctggcctgaaagggcctgaggccgaaaggtgagggggcggggctgttcaggacacctggtctgtgtactcacggcctctatctaccctgttcaggggaaccccaaacctgcttttctttctttctcagcctctcctccctcctcacaccctggatgctgagagcagggcccagctctgctctttccacaacatttgggccatgttggcacagagcgggggcctcttgggctatggtggccacactccccgggctaactgagttacctgattcccagcggaaaggtcaggaagggagggaagaaacttgctgagctacaaattcgagactgctggggctttctaggacaggccaccttcctgcaattgtccctctgtgtccccaactccccgcagtcccgcag

SEQ ID NO: 88113 - DNA, 1025 bp, Homo sapiens
gagatggaaaggctttgctcaagcagccaagaacagggctttctggatctgcagatgccctggctccaaccctggagcttctgattccacagagctgggctgcttcctcctggccccggcccctgacccttgccctgtaccccagcctttgacgacccctatgccctggtggtgctggctgaggaggagctggtggtgattgacctgcagacagcaggctggccaccggtccagctgccctacctggcttctctgcactgttccgccatcacctgctctcaccacgtctccaacatcccgctgaagctgtgggagcggatcattgccgccggcagccggcagaacgcacacttctccaccatggtaggtctggccctggccccagccccagccccaccgcaagccaaactctcccatggacttcttggtctctttttctaggagtggccaattgatggtggcaccagcctgaccccagccccaccccagagggacctgctgctcacagggtagggtactttgatgctaccccacctcttcccagtaggatatgtggggtgggagcagagccctgaggtggacgagccagcccctgggcatcccggctggcatccctctcacgcctggcaggtgggttctgcccacaggcacgaggacggcacggtgcggttctgggatgcctcgggtgtctgcctgcggctgctctacaaactcagcactgtgcgcgtgttcctcaccgacacggaccccaacgagaacttcagtgcccagggcgaggacgagtggcccccactccgcaaggtgaggccaggagcctgggacccaggaagggcagaggccagctgggtcctgtccccgtggctgctcacagggcccctccccttctccaggtgggctcctttgacccctacagtgatgacccccggctgggcatccagaagatcttcctctgcaagtacagcggctacctggctgtggcaggcacggcagggcaggtagcaggctgggctggggagggggagctg

SEQ ID NO: 88114 - DNA, 1050 bp, Homo sapiens
gcccgggcaagggccatcgaggcgctggttgagctattcctgaatgagcttaagaaggtaagtgtggggcacgggttgagaggccgggcagacagccctcaccgatgctgcatctccctgtccgtcttccctgtgggggcaggggctgggagtttgggccaaatccctggaagtctggggtgctaggtggaggggcaggccagcagggggagcaggtgggcaggcaggacagggaggcacaggcagacttgctgctccaggccctcgcctgcttgcccacaggactccggctatgtcatcgccctgcgcagctacatcactgacaactgcagcctcctcagcttccaccgtggggacctcatcaagctgctgccggtggccaccctggagccaggtatcgccagaggccggcaggggctcacacagggagggcatccacttggcagaggctgcccgggggcagagggtccagtgggtgagccacatccctgggtgccttccaggctggcagtttggctctgccgggggccgttccggactctttcctgccgacatagtgcagccggctgccgctcccgacttttccttctccaaggagcagaggagtggctggcacaagggtcagctgtccaacggggaaccagggctggctcggtgggacagggcctcagaggtgaggaagatgggagagggacaagcagaggcaaggcctgcctgagactgaggaaggaaaggggtttgaccactcccgaggctgccatgcggtgggaccaccctgctgtccgtctcctgtggctgcccctctgcccgctcctgatggctcgccttgtctctccagcaagactgtgcactccttgcaggcaggggctgggctggatgctgctcttgtgtcccacgtggtacttagttcaaggctgccccagcagatgcttaataaacagctcttcactttcctggcttctggtcttgctcctttggtgtctggctggggagggatggggctggggcaggacccctgggacagggcactggacactcaggtggcaccag

SEQ ID NO: 88115 - DNA, 1021 bp, Homo sapiens
ccatcttgctcctgaagggctacgaggcagaagagggggcaaggtctaagtgaccacaagtgggactaactgggggccagcagggagtccgaccttctgcagtgggtgggctgcctcagcaggcggaggttcctcaccatcctgggtgctcatgcaaagaccacatggcctcaaggatggccgcaggccaattgcagggtggagggccccgttcgatgaccttcacggtggttctaaaccagctctgccaaggcagcggcaccgggagtgactggcctcactgacgtagccatctcagcgagaaccggctgagacctgggacaaggcaacgataattacagccaaaggtctggcaccagcccctggccacctgtccccaccaccacccctggattagagcaactgccttggtgaactggatcaggctgggttgggacaaggttgtctctggctcctctctaaagaggcaccagctccctcatgcccacaggagaggcagaaggggaaagccttctggagtggcaccttgggcctcttgggcaccctgagacaggaagaggctctcctggggcaggggtgggagtggagaggactttcctggtcaggctagagaaacagatgacgccagcaggggaggggctggcttgagcaacctgggcctcctgaccccctcccaacagacaggacagaaaccctggcaaaacctggagggacacggtgcggcctccccctctggcagaacaggcatgagtgtagaaactgggctggtgggagaggttggggggcctgggggacaggggggcagttttcacctctgactgaccctggccagaagccccatgaacctgctctcgggagaacctgctccttctgtccccacattgatggaaggcaagagtaccagcttggcatcctatcccagtctccccaccccgagggagctgtgccagtcccaagcacccaggcaaaacccagtagtggtacctcaagacaagggaatggaacagcgaagccagaaacc

SEQ ID NO: 88116 - DNA, 1012 bp, Homo sapiens
ggctgcacctggaccttcctgcctctccgctcagggcagcagcagtgagtgcagcagcagctgcaggctatcagcagcaacagcagaacagtagctggagggccgggagagagcacgggactcaggttgggggagagaaaggatgcccaccctcctcccagagaaacccactgcctgccagggtctttcccccacaggtttggtggaggtcagaaagatccgagaggctggtgagaggtgcggacggtccccatgccagccgccagggccaacctcctccatgttgtgtcttctctttcactgcccaagcctggctcccgtcatccccgcgtttgggatcccggggtactgctgggcccagtccccagcaccgcccatcacccaagcagcatatcagaggatgagggaagtcccttggcttcccccaagggacaactggttttcctccttgatccggcagacacccgccacctctgccagccctctggctggcaccatggtgtggtctctcccagatgccagggagagccatggggtgctgagtgccccaactaacctgtgaaaaggatgatgactgagaaggccacgatctccacgggctcagcctggggcagtctctgcagcttgagcagcagcctctcgcccacggcgcgcatctcctgcacgaagtcggtggcagccatgccgcgctggcttcctgttggggctcctgccgggctctgctggggcagagagaacacctggagcctccacggctggccccacactcgtcgcagcaccgagattccaccctcgcacccatccgcagcccgcagaacaagtttgtcaggtctcacacattgcacccctggtgacttccacctagtggtggccctcagtccccacccagctgacacagctcagggtggaggaagccggtgaggacagtgagaccaagggcttgcttcgggggctgccggccaaggcggcggctggtggtggtttctggcttcgctgttccattcccttgtct

SEQ ID NO: 88117 - DNA, 1059 bp, Homo sapiens
agtaaattttagccatcttcatcatcatcttcatcctcctcctcatgatcatcgtcatcattctgaatcctattctttggagggggctgagaatggacaaatttttgaatttcttttcttttgtatgaaaacacttactctctgggtctttaacctaaacctgtcagacaagtccgtggacactagaaagtgaaaccagagggtgagagcttcccctccctgcctgctattgccagtgtggcctggactgccagctggaaatggcgggggtgtggcaggggctgggatcccctctccatgacatgtttcccaggtagacagggctctgctcccaggtggccagagcacgggtcacgcaggccaagatgatggaagcatgtgaaaaacacagacttcttgaggctctggggaagccccggggaggcacctcgggatgctctgtctggacccattggcatttctggagccatgtgcctcccctcccctcactcctgggttcgtagctctacctggaaagttctctggaagaaaaactcagctgaaaggagggggtaaggaaggaaaggtgctgcttctcagcaagaccagtctttaaaatgggtccctgttgccctggttggtcccatgtttagaggggcaaataataacgggtcatggtgatggggctctaaagatatgcccagcaccgagctgagtgctagacataggtcatcttagtttatcctcacagcaaaccccaggaagcagtaccaggatttgctccatttcaccaagggggagttcggcttagggaagttgagtcacgcagctgacagggtgagggtgtgagcccagacagcacacaaatgggggagggccacagggtcaggaggcaggttacaggtgacattagggccttcctctggcagtttgtgaagacccactggtctgagtctgctagtgtgggatgtgcaggccaaaggtgcaggcagttgacagagtaaagtgctgttcctgagcttagctcctgcctttgggcaaacacagtctctgccactctgcagagtagtgcctcagcct

SEQ ID NO: 88118 - DNA, 1561 bp, Homo sapiens
agactggaccgagggcctttgccccaggccatcaggccgcctcacctgtggctgggctgggctgtcctctgtctgggtgacgtgtggactgcggacctgccccgagctcaggaagccctggggctgggactggcgtagggctcacttcctgtgttgtggggtgaatgattaactgcagccctggctggcgcctggtgcctcctggaactgtttctgggggaagtgttgctccccccctgaggcttcccattggtgcctttgtctgctccctgggcacggcctcagcaacattgtgtggttggtttctgcccactggcacaatagggaagctgggaagaggggatcaagcctgtgccctggtgcttgaaacctagtggccaccatatactcctttaaaagctaggatgtgagggcccgctatggccaggaaccatgccaggcactgtgtgtccagttgtgagatcagagaggcgggccctgccctccaagggcttcccttctagccctcgggtgcttatcccagctggtaaagatctaggagctttgagaaatgcccaggccccacctggtaccacttatatcagtctctggggttgccaggatgtcgtattgtttacacatccccaggtgattctccccaggtgtggccagggttggatgacagatggaggcagatttagaacagtcgttcttaactatcatgggcgtcactgacccgggttacctgatgttttctgtttccttgtgtgaaacttactgactaaggcccttggcatgctgaacgctcacagcagtgggccagtctctagctcaccctttgcgtgcagctccgtcagttaagtcagatgcttatcaagagtcaagtgttggttcccaaacctgttcatggcagttgtacttgtaattacataattgaatttaacatcccgggaaccaatgaagcaacaataatagctgaaaccccaattttacatgtggggaacgggcacagagaggttaaataacttagccgaggtcatcagctagtaagtaactgagttggagtttgaatccagcagcacacagtctgagcgctgaagcacctgtgctgcacctcagagcgagtggagaaagaaattctttctagaaatacctattgactactttgggatgactttggaatcactcagataatgttcctgttgaaaaagatgcagacatgataactaaacatcagggacattttgtaaaaacccagaaggttttcacacccagcttcctttgcctttaagttccaatgactttaagtttttgttctgctttaaagaaaccaaaactagaaaataacaatccaggagctgtggttggcaagcccacactcaaccaaaactagaagatagcaatccaggagctctggttggcaagcccacactcagagaaaaggccaggaaggccggccaaggaaaaggtgtatgtttccatttaatgtgagatatgtaaaaaagtaatagatgtgtagagaacttaggtgttctttaacaaaagttgctttgaccagctctttcaattaactgccggcccc

SEQ ID NO: 88119 - DNA, 1050 bp, Homo sapiens
catgtgctttgaactcacgcatctgttttacctgcatctgcaggcgatggggcaggggccacggaaagagtctgagggctgcttggtgtagtcaggttgtgtccaggcatgcggagctgtgagtgcctgcaggagagacacccaggaggagtttttacattttggtctaaaaagctcttggattcatctcatctcatggaatgatcctgtcggatgacgctgacgtgattgcttcagacttagaggtgaataaattgaggtccagagaggtcacagtcacgaagctcatggtagactgaggccactaaacacccgtctcctgattttcagtggcgtcctcatttgcatacacctgggccatcttggtttttgcaagaaaaaagcgaggaaatcagagaaactctttgggctgtgtgtttttatttccacctcctcctgttgaccagtgagtcggtggcttctggactgaagctattttcttctccaaactgctgtctctaatttggcctctgtggcaagaccacgcccagcaaaagtggtcggctgcagtgccaggaccacccttgcctgcagcctttgcgaccagagcccttttcaagcacaattaatatgggagttgctaaatttggccttcttaggcttcttgagcagagctcttatttctggtgaggaatgaaagggccaagtgttcctgttcattgtgagtcctgtttgctgaaaaaagctctggggctgtctgaggctctggaatgctctctggagggttaactctgcctgtccccagggtctgctccgcctgccaggcaagggaacaggtcctcccaagggcctctgccttcatttctcctgtcaccttccggggagctgggacttcttagtgcatcagtggcctggttgccaggggctggggtccaggcatctgtggactcaaggagtccaggtgacggtgttgcgctgcctcttgagcagcctcgtgcctgtctcctttgctacatgtgatgattctgaaatccaggcagcaggctggaataaacgctgctggtatgtctg

SEQ ID NO: 88120 - DNA, 1024 bp, Homo sapiens
tgggattacaggcgtgagccactgctcctggccgatttttaaaatttaaaaaaaaattttttgtagagacgttgtttcactatgtttcccagtctggtttcaaacttctggcctcaagcaattcccctgcctcaccctcccaaagtgctgggattacaggtatgagccaccatccctggccttcttaacttctttcttgacattttatttggcactttttataatggtgcccttagttcttgatcacaaatcttgcctgaagttcagtaggtgctggagaaaggagaacctgtgctattattaacaagaaagtctttagacacataatcacctgagcaacatgagccagaatttaagtttgcagaaaacgcaaggaaattgaagttggtgcttagcataagacaggcagagttgagtctagatgtcaaatctgactgcttagcaagttttaattaaatcacttaaaatatattatttgtttgaaatttttgttacatgttggtatgtaaatgttagcattaaaattctttccagccaagcacggtggctcatgcctgtaatcccagcactttgggaggctgaggtgggcggatcacaaggtcaggagatcaagaccatcttggccaacatggtgaaaccccatctctactaaaaatacaataattagcagggcatggtggtacgcacctgtagtcccacctactcgggaggctgaggcaggagaatcgcttgaacccgggaggcggaggttgcagtgagccgagatcacgccactgcactccagcctgggcaacagagccagactccatcttaaaaaaaaaaaaaattatttccacaacaaacagaaatgcgttttgtacatgatgcattttgggagatactttcatgcctttagccccatccattaatattgataattcagagttgactgaaattattcagaaaagttttgcaagttgttttctgacttttctgaagtacacacattctggcttaatattcataactcttttctttagtacgt

SEQ ID NO: 88121 - DNA, 1055 bp, Homo sapiens
ggaaagaaagttttggcgccagcatgcaggagggaaaaaaaagaacccctgaaaactgtaaatgcaacctgctttctatgctgagtgaaaaacctggaacccaggcctgagaactcgccctgcctgagaactggcaagatggtatgggcagacccatggccccatagttcaaagtcagtcacagctctcctcgggcttgcagaacaaaacactcagtagtgataatcttctctgcctagtatttagggtatgtgggacttggagcctgcacgtaaaacaagcccagggagccgttaagtgtttgggtttcagttgtggagggaagggaggatctgggtcctagagtctttctgggtacagttgcagccttttcttagggctggaaggcttcctggggaagttggctggagaggagggtacataacacttaacggtcaccccttctaaaatactgtaatccaggcaacaaatccttgggagatgacagggctttgtgagtcagggtgggggtcacatgaaaaacaaaacagactttactgctgtccagtagcagtcactaaagagcggggtgggagggacccaaaaaaggtgaagctgggaagattgtggaaatgccttttgtgctcaggctccccttctcagccctacatcacggctgacagcctcgtcattcctgcctgctccttgactgatgtgcttcgctgttcctcattcactcatgtgcatttcaagttttactgtggaatgaaaagttttcatggaataatttctgttcctcttgaggagccctcagaaatcagaacacaaaatccaaccctcaaagtcacttgatatagttcttttggagggtgatggagaagggtttagataaagcttgccagcttcaatgttctgcaatccccagtggctgccaggcctttaggagtcctcgtggcatctccaaggactacaaatgatccccagcatgagtcttctgtgatactcttatcttagtcctggccctgtcatccttctgcttgagctggcctcagactctcttccacatagcaacatgt

SEQ ID NO: 88122 - DNA, 1022 bp, Homo sapiens
agggatacaccacagtttgtttactgattcacccatgaggacacaaatggatctttaagcggcatcgttttgattactcaccattcctcattgacgagtagctagtttagttcctcttactgaagacgtaattagttgaaggacagtggcttccattcatgatgcagtgcctgtcagcccctctacctaagcttttgtccactctggtgtcaggactcaggttgcttaccaggtatgggaagtgtgtccatgcatgtagacagccccagcttttagagaacaagcaggagagcagagaagccaaaccacaggcatctgcagcactgcagccccttgacagagccgagcatgcacaccctgtctgtgccctccagggcctcgcagatgcccacggctgagcctggagcagtggtgctggtgtggcagtgcacgtgggttctctctgtcactcaggagctggagatactccaccgtcccctggggccccccagctcgctcactccctgccatcccataagcccgtccaactagctgttcctgcacagatccctccctggcagctgtgggtactctgggtgttttctgacttgggcacgcaccagggcaagtcacgctgacagctggcttctcaagtcctaagtgcggctgcctctgagaacacacccatcagacccaggcagcagccacagacccagcgctgcttccaagagactgtggacacatcgctttactggcttgaggctctgtctgcttacaagaaatgtggggctcagctggtcgcagtggctcatgcctgtcatcccagcacttggggaggctgaggcgggcagatcacgaggttgggagttcaaaagcagcctggccagcgtggtgaaaccccatttctactaaaaatccaaaaaaaaaaaaaaaattagccaggcatggtggtacttgcctatagtccaagctacccgggaggctgaggcaagagaactgcttgaacctggcaggtggaggttgcagtgagccgagataacacc

SEQ ID NO: 88123 - DNA, 1163 bp, Homo sapiens
gttgcagtgagatatgattgtaccactacgctctagcctgggttacagagtaaaacccccatctctttgttttatttttttatttcattttatgtattttattttcctttttgagacaagagtcttactttgtcacccaggctggagtatagtggcgtgatcttggctcactgcagccaccaccttcgggttcaagcaattctagttcctcaatagctgggtttacaggcatgcatcaccatgccagttgcttttgtatttttagtagagacggggtttcgccatgttggccaagctggtctagaactcctgacctcaaatgatctgcctaccttggcttcccaaaatgttgggagtataggcgtgagccaccgcacccagctgaccccgtctctttaaaaaaaaaaaaaaaaacggaaaagttaactgctgtatacatttattccctctgcctgaacttttcttctcccaagctggcacatggcccaccccttccggtcattcagtctcagctcagatgacacctcagagaggccacatccgaacactcagttgtactgttttcatagtgtttatccctacctgataacattttatgtgcttatgtttttttgtccatgtctgtcccttgttctaatccccacctacagaatttttccttcttctctcaacagcctccttttctgaaagagttcggaacatgtcgcctgatgaaatcaagatcccgccagaaccccctggcagatgttcaaatcacttgcaagtaagcatgagactcggctactgaggtcggatagattagatagcctgggttacgtgtttggtttggtcttaatcttaagagaccatggcagggaaagggactgaggcttctataaaagaaactgacaggtgggaaggatcccacagtccactttacctcctgttagcctcatctcaggagttggctcctacacccaccgccatgtcccgtggtgctgctccagcagggcggccctgtcttgccttcagtgaagtcctaagcagagacagagaaaagaacgtaaccttttctgtgcagccctactgggccagtggtagcttctcagaaagagctttgctaagaaactgaggaaccctcagaatgtaaaataaattacagaaatgaaaaagtcacaggcatt

SEQ ID NO: 88124 - DNA, 1029 bp, Homo sapiens
ctctccagattgagtttgtgacgggcaccaaaaaaggcaccacgaccaacgccacgtccaccaccactaccactgccagcacagctgttgcaggtagattgcagagctgccctgcctcctgccacacacatggagccagggtctccctggcttgtttgggcgacagacagcacgtggatctgggcctgggctcagccttgctactttgagaagcacctttggagtctggggtgggccacttcggggtctgctccctagactcccgctggcctgcagggggaagggaaagagggcaccgctcattggtggatcgtgatcctgatttctgctttatctccagatgctcagaagagaaagagcaagtgggattcggctatcccagtgacaacgatagcccagcccaccatcctcaccaccacagccaccctgccagctgttgtcacggtcaccaccagcgccagcggctccaagaccaccgtcatctctgctgtgggcaccattgtgaagaaggccaagcagtgacctgaggggccaccctaggacttgaaaggaccgtgcagcccagtgaccactgcccagtgggaggcgccactttgtatatttcaggactgggacctactccccagatgccacctgagaggagcttctgtttggcattccagatggaaggacaggcagcacgggagccaggcgctgtggacagggtctgtccacgcaccacctggggtctgccgcctattaaaagtgccgtattcttacctcttggcatctcagatgcactggcctctcctgcattctgtttgcaggcaaatgcttcagctcacatgtcccccaagactcaatagtcttggttgggactattgcctcagggttgacaacagggtgatggaggcctgggacgctgttcagaggggtgacccaagaagtcaccgttgttatccgtgtatgcctctgggcatggacaggcgggagtccccgagccccacgtatgccccatctgccgccttgatcccaaaacccagccagttc

SEQ ID NO: 88125 - DNA, 1071 bp, Homo sapiens
ggggtggggcagggtgcggtcaagtttggaagaactgttggtccatgtgggtgctaagggttccgctggtggtcagtgtccggctcacaaactcctgggtcacatgccgggtgagggagccgcctgcctccaggtgctgggcccccagggtcagcccatctgtggaggaggaggcattagatgacctggcttggggtctgcccttctccctctgctagctccctgtcccaggagagccgggatcccctagccctcagtgctcacccactaggaagggctcggtggcgctggtgtgggtggtggtgatgctgctgtactcgctttgcagcgggtgctggaagagcccggcacggctgcccagctgcgggaagggtcctggggtgggcagataggccagtcagagggtggtgccagaaggaggcacggcccgaggaggggtgggggtgaaggaaaggacaggtgcctacctccatcctgggactctatggtgatgatgccctcgcgctctggcccgaagccctcagtggtcctggcctgcaccttgaacttgtagggcacgttctcgctgaggcccggcacggtcagccggctctcggggctgtctccatccacccggaatgcggtggctggccctgagcagggaagatgccttcagcgtctgcggccccctctttacccctcccctggccactcctgcccccggggtgggcagcacctcctccttgggccatctcacaggtcaccaggtagccgacgatatccccattgggcctccgtggccgctcccagctcagctgcagcgagtctgggctcagggcagtgaacaccagcgggcctggggcactgggagtgctcaaagtgaaggcggagcctgggggcagtagaggaagagcatcagcctgtgggtgggtggtgggcatgatgggggcagctctggggctgggggaggcaactcacctggcaggggacacagtgggctctgcgggtgcacctgggattcaatggtgatgacaccctcacgctctcggccccagccttcctggctctgggcccgcacgcggaacacgtagg

SEQ ID NO: 88126 - DNA, 3135 bp, Homo sapiens
ttattttacatcggaaaatatttacaaaaattttgttaaagtagcctctctgggtgcatagcattcgcttgatgcctgtgagtttagactcctgctcattctgatagagaccaatgcaattcatttgcattgactttctattgcagagctttggaaccaagggaaggatccaaacatagctccattttatccaatcagaagggccgcttagtgctaaactctgattcgtccattcctctttgcatccatccaatcattaggccactttaacagccaatcagcggcgtagatatgcaccaatcatggaacagtgccgaagcacggcctttgtgtcgggggatgtcagcgcgtcggcgaaagcgcccaccaatagaaaaagtcgttggtgtatgcaaataagggttctatgacgcagagacgcagcgtgaagcgtgcctataaaaacggaggcgacgcgggggcttggagcgcagagcggtttggtcgttcgttgggcggtgctggtttttcgctcgtcgactgcggctcttcctcgggcagcggaagcggcgcggcggtcggagaagtggcctaaaacttcggcgttgggtaggcgttcgtaggtttacccgcggcttcaggttctgccaaccgttggcgccgcgcgccgcggccgttgggagccgagcggcgggggctgctcgggccgctggcgtcgggtcgggtatggggccgggaggtttccccttggggctttgttccggaactgtgtccccgccttttcccggcggtgattcagaggtcccgacgccgggttccgggcagtcgggcctccgcccgtcgaggaagggaagtgactcctccccgcgctccccctcccgggggaggctgccgctcctcgcagcctgagtcattaggggagggggaggaggttggcggccctcggccatctgctgccgcgaggtggggcgcggggaggcgggaggcccggcggtggggccaggatctgttcctccccccgcagccctggggggcggcccgggtgagcgcggcggccttatcttcggggcgtctttcttaggtgaaagaaaatggcccgaaccaagcagactgctcgtaagtccaccggtgggaaagccccccgcaaacagctggccacgaaagccgccaggaaaagcgctccctctaccggcggggtgaagaagcctcatcgctacaggtaggtcgggcgggggaacaatggcccggcggtggccggctttgtgcggcagcgtccgctcactcctcccctgctcgctgcaggcccgggaccgtggcgcttcgagagattcgtcgttatcagaagtcgaccgagctgctcatccggaagctgcccttccagaggttggtgagggagatcgcgcaggatttcaaaaccgacctgaggtttcagagcgcagccatcggtgcgctgcaggtaagacaaaggcctggagccgggggagggctgggcggtttccgctccccgagtgggattaatagtgcggctctcgtcctcaacaggaggctagcgaagcgtacctggtgggtctgttcgaagataccaacctgtgtgccatccacgctaagagagtcaccatcatgcccaaagacatccagttggctcgccggatacggggagagagagcttaagtgaaggcagtttttatggcgttttgtagtaaattctgtaaaatactttggtttaatttgtgactttttttgtaagaaattgtttataatatgttgcatttgtacttaagtcattccatctttcactcaggatgaatgcgaaaagtgactgttcacagacctcagtgatgtgagcactgttgctcaggagtgacaagttgctaatatgcagaagggatgggtgatacttcttgcttctcatgatgcatgtttctgtatgttaatgacttgttgggtagctattaaggtactagagttgataaatgtgtacagggtccttttgcaataaaactggttatgacttgatccaagtgtttaacaattggggctgttaagtctgaccatacatcactgtgatagaatgtgggctttttcaagggtgaagatacaagtcttaaccacagtgtaacttacagtttcctttaaaaaaaaaaaaagtaaacctggcagctatagaatacactatgtgcatttataatagctattttatatattgtagtatcaacatttttaaattaaatgttttacattcacaagtggtggggagtcttgtcattaaggtgtgtgtaatttagagtccagttggttttcttctgactgcacttgttctcatagtagtaaaatgctatgcgcatttataccttgcataagtcctcattctaccacatgttaaccctctagctgataatgcaaacactaactgggggattttatttataagggctctagaaaaaacgagttattcacaccagcatcatcttaactaacattctgaactagttagtgcagcttttcattgtgttgtgtggttggtctcataactaggttgagtttttctcctctgctgaggaaacagtaccgaagttctttttcttgtggcatttgtattataaaaacttggtgtgggggaggagcacaaaactccagcccactgaacctctgccaattaagatggtgttgggttaggttacatctggttactgtcctgggaaaatcatttttatagagatggccttccaagtggttttaaaatttactgaagtttttaggtcaattatgtatgttgactaaatttacaaataaacttgtttatccaactaagtgtccaaaacctaaattgaatgtactaagttttcacatgtcccattatctaggtccttgtatactaatgttttgaacttagatcatttcaggtgttgtttggtggataaaggaaccttttatttataaagatactgtagaaagcatgtgaacagctctctgcttgattaagatgccataatagtgctgtatttgcagtgtgggctaagacaaagtatattaataagcttttcagcccccccactcccgttccgtagtgtagaagcccacaggtgtagaactcagtcttaaacttcagtatgaaaccagtttccttgtgcgatgatggccactaaagcatagtac

SEQ ID NO: 88127 - DNA, 1562 bp, Homo sapiens
agattccgtgcagtttgcgcaggaagccttttgtgtccctaaggctcgtaggttgtccacgagggccacacttgcttgaattcacagtcgacgtagataaacatgcaaagatggaaacgtgtccgtgcgtgcccatgaccgtttccctcgcgggctgtgcggagcctgagtctgggagcccgaaggtgatgggttccaagtatgtctgcaggctcagcagaaatgtagcattagagggagccccaaatactgacactacaggagtccagcaggatgggaaaacctcttcctggaagtcttgcatctgtgtgcttttaggtcgctgtcttcatttccttcaagccacgttaagcattccctagagttaggtgatgtgggagaaagatgaataaggggcggtttctcctgttaagcaaaatgttgctttccattttccctgatgctctgtgaatgcctctcatccccatgggctcctgagtgatgtgcatgtttaaaaggatccccagctgcgagaggttttggaacctggggggttgaacagctcttaagttgttcagtgaacgaagaacagaatcatctgttggagtagaaagaactcaaaccagtcaggaggaactcttgttatagaagaccttgggaaactgttctggggttggggaacattggttataggaagtgtatggtttctttgtgggattctttgttgttggctgaaatcatttaagcttcttgactacagtctgactcacgttaaccattccttttctgatatggacattgctttcctggtcctttcttactggagatctttcgcagtctttccattgattttggtgagatgttcttagctcaaagactactgatgagttgaatggtgtagtcttgattttcgaatctggaaacttcacgtaattggaacttctttataatctctggttgctcagatcactgtttttagcaaaataaacacattttgagtcacgagagtcttggcttcagcaacttgtgtttctgtgttgtgttgtcattgagcatactatggaatctgtaatagaaaggctttcttattttggaattgacaggtgaaacaagtgaacagctgattaaatgtcagtatctgagtctttgtcctcttgatgctcatttgtttaaaacctgtctttcctgccgggcgtggtagctctcacgcctgtaatcacagcattttgggaggccgaggcggatcgcatgaggtcaggagtgaagagaccagcctgcccaatatggcaaaaccccgtctctactaaaaatacaaaaaattagctgggtgtgctggcgggcgcctgtaatcccagctactcaggaggctgaggcaggagaatcgcttgaacccgggaggcggaggtggcagtgagccgagatcgtgccactgcactccagcctgagcgacaagagcaaaactccgtctcaaaaaacagaaacaaaaacaaaaaaaaagcctgcctttccattccttgtgggtaagtatagagtaatgggacctggctcttgaggtgtcttaggaaatcaacaggagtaggtga

SEQ ID NO: 88128 - DNA, 1363 bp, Homo sapiens
tcccacaaaatccccgttaagtgttaagtgcccttgctaagggtagattcttaaacttaacacctagttgatatttgctattatctaaattattaaagtcaagatttgcttaatggttaagtttttttgttttaatccagctatgttagatactaaagaaggcttccccacaacccatatgcatctgctttgactggtggtttctatcatcctacaaagactgtgacttattggtgagggcagctggacaactctgagagcaacttagagaaatccatcttgggcacactctataaaggagctccttctctgcaaatagcaccccagataagtgcacaaaagcaagataccctcgtggacctacacgtcctcccgcttttcaacaccctgatgcctgaaggtgaggtctctttcctgtgtgtcttagaagccatgagcacgcttaggtaactagagccctgccacagcctgagcagcacagcacacatctgcaggctttcctgccagacctttacctaaaggtaatttttctcattaggagagactccaggtcaagagtgatgacagtaaggttgcatttaaagctgcattacattaaatagtggactggtctagtgattattttcccacactgggcaatatttgcttaatgattaagtttttttgtttttgtttttgttttttttaatccagctatggttgatactaaaggaggttttcccactatccgtatgcatcttctctgttttgagattgcaactatggacagttatggctaatcctagtagattgtcttcccttttaacatcttggatgaatttgggtcacactaattgttatgtgaagatggatgttgaatgtaagtttctctgccattcttagccaatatataaaaattacattagcctaattgctaacaatgccaagaatttaggtttactatccctctggacaatgtagcttcttgttttcttaccatatagataactctatagattcaccccagccagtcatcttaaaatacctgcataggcagcagaggtatctgtggagaaagtgcatgggataataggtacagggtgattttgggagtgatggaaatattctggaattagatatggtgaaggttacataatgtgggtgaatacactaaaaaccactgaaatgtacaagtggtgagtttgagtgctctctgaattatatctcaaattgttaaaaagttaattaaaaaatcagtgtatatgagtccctcttaccatagagagggcttcaagcgcatggcctattgccaaggctcagcaacagtggttcagtgtgggaaagcctgtggtttgcgcaaagctccttggtgcccttttcccag

SEQ ID NO: 88129 - DNA, 1131 bp, Homo sapiens
tcgtgagtgttttaaggtttacatgggcatttctttaaggacaggccatgtgttttaggcatttaaaatgatatcaatggctatactatattagttcaagtaatcacaacaaactttttattatttctctataaaatccctcaactttcaccccttttttctttgccagtgtgtagaatttgacagcagtatcaagagctgaggagaaggagaagatggaaaggagtctagcaacttaaaaatctcacagcattctctgtgaggtgaccttttttcctgttggtggctcaatttctttaggacataaagaagatactgaggcctgtgacagcctgtgacagtatcatcaagtcgtatctgaacttattgaactgtttcctccccttccttattctttattcacagtttgcttttcatgtgcataagttgactcatttgtttcctgttagcatttgaaacaccatatagccaccataagtcctgacaaaatgacttttaataaggagggggaaggtccatgtcccaccttcctatgaaattttggcctattcacaagtctacccccacataagagaagtagttatgttctgtaaagaagaggttgataaaaacctttagcatggtgttttgtgacttagaagttttaagtagtcgttcttatatctaagcatttattaattttggtaagaacattactatacgtttctgatgtcacttttactgttaagaggtgccaggcatctggtgacctgtcacttcaggatttgtgtgaatcagaccatctaaatataatataaattagagactggtacttgtatttcctgattaaaaacaaagtaacgtctgttttactattgaagtaagagtactttataatgaatacaaaaatgtatattaaatatccagtagagcatgctaaagtgaacatttctgtttttatttcagcaacttattttatggtattgtagttatggcctgtccgaaactctctgacatattctaaacagctttcagagagtcactgaggcttatttgctactactgttgtttttcctttagctcagttaagaaatgtttagttagccgggcatggtggctcacgcctgtaatcccagcattttgggaggctga

SEQ ID NO: 88130 - DNA, 1131 bp, Homo sapiens
ttcagaccagcctgtttcaggggctcagtagccacatgtggctttcggctgccttgtgggacagtgtgggtctggatcctcagcatgatactgtaggccgccaccagtctcagagacagagctccagtttgtacctgttaacacctctttccaccccaagatactgccctgggtctccttaacctctttccaggctcaggccctatctctgagatgagaatggaaaataaatcgagggccctgggcgggagaagcatattcttgatgcagaggtggtccccggccatgggcattgggaccgcctggctgagacggcataaggaagtgattcaggctttggagttgtacagatcagcgttcaagacccagctcctctgtgttttagctctgtcactttggtgggtttaccttacctctctgagcctcagttttcttatttataaaatggagaccatattactggtatcttctggtcaccatgaagattcacaattactgcaaagtgctggcacagtgcctggcacacagtaaatgcacagacatggtgttactagagatgtcgtaggaaccttccctttatgtgcagggggatttgtggtctcctttggaagggacccaggagcatttttggagggacagagctggctggggcctgctgacccctgcccctgactcttgcagagccacccctgagtgacgacctgcagccttcctcagctgtgtccagccccacccagccaggtcctgtcctgtacatgccatctgccgccggagactcggtgcctgtgagcccctccagcccgcatgcccctgacctcagtgccgtacgtgtccatcctggggagtgggtgggcaccatgcctgacagagccaatacttgcctcctaggccctttcagcctgggcttgggagaccatcctggtatttgtcctcaggccagggggatctgtcttttccatctcagcattcttcgtcaaaagtccaggcccgggggtggggtagggcagtccccagagcctgtgctgatgagcctgtaggactggtggcagggacaaagcctgaggtcactcccctttccttcgtgagcttcgggctccccgagtggtcactgctgctcgttggcagatgaaa

SEQ ID NO: 88131 - DNA, 1048 bp, Homo sapiens
ctaggtgcccgctttgtgccaggtcctgtggcaggcactgaggagacagatgacaacatgctgctcctgccctctagagggaaacttcccacccagtggacatttgtcaagcacctgctatacaccagccactgagtgcccagagacccgcccacccccactgatcccggggctgagacccttgagttgtaacatcaggggacaagacccttgtccgaggcagggaccctggatggggatgtgatttctcctggaagtatcaaagaagattcagaaaggagaggcatttgggttggacatgactggcagacggtgtcagaagtcaggagtcaggattggcataggaagcagctgaaggaagggcacaggggcttgggagaatacggacccagcgtagcatgggcgtgaagatgcagcgtgggcagtagacgaggtggtcagggtcagatagtccctcgggaggtcacatcccactcttctctgtccctagagtctgctttggatgacctggacctgaatgagtttggcgtggccgccctggagaagactttcgataacagcacagtgccccacccaggaagcatcaccatcggtactgggtgtgggtgggcagggcagcctggaggactcctcgggttcctgcctggctcaggccccttgctctgtgtggcccgcctggcttccgctgccctcacccagcccgtcctccccgggcctctcttgcaggcggcagcttgctgcagagctctgcacccgtgaacatccccggctccttgggcagctctgcctccttccactcagcatccccgtcccctcccgtcagcctctcctcgcatttcctgcagcagccccagggccacctgagtcagtcggaaaacacatttttgggaacctcagcatcacatggatctttgggtaagagagggagtggttcactcaggagaactggggcaggaacctgcgcctttaggaggtgcctctggccaccccatctacggcatatcagctaggctgggggttagggcagaggccttgggcgaggaggcag

SEQ ID NO: 88132 - DNA, 1044 bp, Homo sapiens
aagtgctaggcacgaggccagtgcaggtgagagcaggggtctcagttgccagggctgggcctggtctctttcacagcatggttctgttctgcccagtcaccccaggctccgagaggctggctcgcaccagccaggttcacaggggaccaagggagaagccagacaggttaacccctggcttcgggtgcccttcctgccgggcagaggctccagggaggcccagggctggcccagaaggctgtttgcccacagaattagaatggtatggaatgggggtttctgagggcacttcaaggtttagtggctagaagaatggcacagaggcctgtgccactgcgggccggctgtgcatctcctcttgtgtgtgtcaggggatgttcctgagggcgggatgggaagcacatggcaccaccgctctcactctcccccagcagctgcagacaccaggagctccctccccgagagtgccagcattttgctcgggcccagggaatgagcccttcagagttctgattgggtttggtggcttcccttatctcattcctgatcccagaacagcacatggatttctcagcgccttccagtttgaagaggctgttctctgttacgttgattctgtcagctttaggtgcttggtgttgcatttttcggacttgccccatattcggataggatctgttttttttttttcgagtagggtctcagtctgtcacccaggctggagtgcagtgcagtggcatgatcctagctcactgcagcctggaactcctgagctcaggtaatccttccacatcagcctcctgagtagctgggaccacaggcgtgcaccaccatgcccagcttctggtggcgtctagacttagctccacttactggccacacactccttcctgcaccatgtgactattgagcacaggtgtattgatacaggtgtaagtgcaacagtccctgctgtccagcagctgtggccagtgtgggaagcagaggtgcccagccattgggatcctcctgagaatcatagaggggcctacctggacagcagag

SEQ ID NO: 88133 - DNA, 1159 bp, Homo sapiens
atgttaatttagtcttggggagaacagcaagggctggaggccagtgctgcagggccagccccactcctgacacctgggcccttgaagctccttgaggggcaaggcccaggagttccagccctcaggttcctgagggtccaccctcagtccttccccccgccgcccctccccggactccccacaagagcctccctggccccagggccgcctaccaggctggtactcattctatgaccaccgcccccaaccagctgcccccagctctccctgccccctcccctctctggcagctagcagggcaattggcggggaggagtgcggactgaggactgaggaccaagggggcccaggccctgccctcctacccggaggggctccgtttgcattccttggtgctctctgagtgcagctggtgtcccgccctgttctgggcggacgcctgtgtgcgtgtgtgtgtgcctgtccagtgtatattgtgtcttagcttccattttaaaaattgttctgtacagagagagatgcagcaggggcgggagggcagagtgggcggaggggagcagccgcacccccagcaccgggtgtctgcggtaggaacaagagggctgagagggtctggtcctggcccaggctcccccttgggctcagcacgaaagggctttcaatgaattaagtgaaaactttttccttttttacaaaaatgcaaaaatcaacaaagctccaaacctattggaaataaaatatgaacttgcagtggtagcttgtttacatgggggtgagggggagtgggtcccaaaagagggcctctgaactatgaggtgggccaggagccttgcctcagccatggaaacggctgctgcccacacccctgagctgtggtaaggcagctggagagggctggaaacttcctgggcccatcaggccccaagacagttcaagtgctctccgacctaggcctagcggttgatgacacagggacccttagccttggacacagaggccccccaggccctaggactctttagggctgtgtggtcagcggtgactggcaatagggcccgtaactgtttctcagaggaacagtgtcttcccaactgggcatggtggcgcatgcctgtggtcccagctactagggaggctgaggtgggaggatcacttgagc

SEQ ID NO: 88134 - DNA, 1049 bp, Homo sapiens
ggggtttcaccatgttggccaggatggtctcaatctcttgacctcctgatccacccacctcgacctcccaaagtgctgggattacaggcgtgagccaccacgcccggcctggttctgtcttaaatcatggttgtcactgggggcctggcctcctccctgtctccagccttgtttgtgcattccgttagtgtgctggggagggttcctcactgaggttgagaggtgtgttggataggactgatcccacctgccccttgctggtcctgtacccaccctctccccagcctcacctggggtgggaggcggagggggaggttgggggtgggaggagctggggtggggctgggtcactgaggccgcccctttctcaagagcgtctttgcttcctcctccgccaccgccctgccgtgctgtgtccgcatccctccggccccgccccagcctcctgaccctgctctggacccacacactcacagtgctggtggaggcggccgcctcccagcgcagctcatccctggcttccaacaggctgaagattgccctgcaggtaacagaaccggtcacagcaatgataaccctggtgggagggtgcctggggtcacctctgatatctcccccagaacctggagatctgcttccacgctgagggctgtggcctgccacccaaggccctgcacactgccaccttccaggtaggggctttgggtgagcttccccgtaggaagtctggggagcctgccttttggcactcacctatgtccagggtcggctacataatttatggggcccagtacaaaatgaaaaactgggccccttattcaaaagttattacaaattttagaacggtgacgacagaacctgaaaccaagcctgggtcctcctaagcacaggggccctgtgtgcccgcatggggggtggggtcggggaagcacgcctgtgaagccagccctgtctgtgcctctcctgctgtctgtctggcctgagggtggccccagcccgttgtcccatgacccaatactttccatttcaaacggacatgttacccttga

SEQ ID NO: 88135 - DNA, 1161 bp, Homo sapiens
ctgcaggcagtggctggcctacagccgcctctaccagagcctggagttccccagcagctgcctcctgcaccccatcaccagcatcgagtaccagtggatccagggtcggctcaaggcagaacaggtaggcatgcagtggcaaggggcactgagcaggcagggctcagggaaggggcaggggagcagcagcagctgtctaggcccctaaagcatctcctggctcttcagcaggaggagctggccgcctcattcagctccctgctgacctacggcctctccctcatccggaggttccgctctgtcttccccctctctgtctcggactccccagcccggctgcagtctcttctcaggtcagtggctgccttcctcttcctcggtggggtcagggatgagggagcagctggggtgcctgcaggagtgggagaattgttggaggagtgagtgcagtgtggggcagcaggcactttcgacacagctctttccatcttgcagggtcctggtacagatgtgcaagatgaaggcctttggagaactgtgccccaacaccgccccattgccccagctggtgactgaggccctgcaggtatggtactcgcgctggggatgggggagaccagcgcctgggcctggcagtccctccctgctcactgcctctttgtcgacagactggcaccactgaatggttccacctgaagcagcagcaccatcaacccatggtgcaggtgaggggctgggcaagggggagggcagggggtcacggggggtggtgcctgcctctggcagccctgcccagcccacctctgtctctgcagggcatcccggaggcaggcaaggccttgctgggcctggtacaggatgtcattggcgacctgcaccagtgccagcgcacatgggacaagatcttccacaagtgagcagatagccaggtcgggaggtagtggggcattgcctcagagccggaaccatggggaccctggtgtatgccactgggtgacacctgctgcctttcctccagtaccctcaagatccacctcttctccatggctttccgggagctgcagtggctggtgagtccctcccccgtctctagggcatgccctccaacagagctgtgggccccgccctccacacctttcctttgcaggtggccaagcgggt

SEQ ID NO: 88136 - DNA, 1014 bp, Homo sapiens
gaggtcgtaggcactctctctgcttccttctcaaacctctgtcctgccagggacctggacactgtggagtctgtccgacagaagcttggggagctcacggatctgcatgggcttcgcaggttcgtgttgcagggctcacagggaaggggttggggctccttttgccctccatcccccaacatgcacactggatgctggggtgcaggctcctttggggtccaggtggctgcggccgggggtggattccagcctaatcccttccgacccttgctgcgtcccccttatgggaccctgcctgacgcaggatctttaaagaggcccggaaggacaaaggccaggacgactttctggggaacgtggttctgaggctgcaggtgaggaggatgaggaaaggggcccaggagcgaggcagagggagggggttgggaggggttctggggagaggctctgtgtcctcacaaagctgagcctggggtccacctcctgtcgcctccgctgccccgactctatgaggttctgacgctcacgggctgggcatccccgcctgtcaggacctgcgctgccgagaggaccagtggtaccccctggaaccccgcactgagacctacccagaccgaggccagtgccacctccagttccaactcatccataagcgggtaggtcgggtactgggccagtggccatgcccagctcttgcggcggtctgctgggttgcggggctggctgcacccagtgtgaggccctgtctgctcacagaggcctcattgcagagagccacttcggccagccgctcgcagccgagctacaccgtgcacctccacctcctgcagcagcttgtgtcccacgaggtcacccagcacgaggtattgccctcctggggctgggcgcagccggggctgcccttcaggtcctgacactcctccacctgctcccctcaggcgggaagcacctcctgggacgggtcgctgagtccccaggctgccaccgtcctctttctgcacgccacacagaagg

SEQ ID NO: 88137 - DNA, 1038 bp, Homo sapiens
gcgcctattacaacccaggcaatcctcacaacgtctacatgcccacggtgagagggcttggcagtgccggtgcagccccacagccgcagatgctgggagccgcagggggatgaccgcaccatgttttaaaccttctaatgcaagtctctcctttctcccttctttagagccagccgccgccacctccctactacccaccggaagataagaagacccagtaggccctcctgcctccctgcctcccaccctcatctctctaccctacccctcccatcggggctgtgctggggcttggggaggggagggggcgccttgttctccctccaggtctgatcataaacaattaccaggaactagcattgtgggacattagggcccccggcctcgggagaggtgccgcccagcttcccatgccagcccggagcccacagtgctgcccagcgtacctccctcaccgtctggggctcttctgggagcacggagcatcccctgttcctgtttcactctcagcttctcccctcgaagggactctctggccacctcctccaccgcagtccagctccctcagtctggcacccactgctacactcagcctcatgagccacttcagaccagccaggtgtcttcccgggccctgccagaccctgctcacattccctctgctggtctgtgctggtctcagaaggccaccgcgcccgcattccactcagccagggtccagctgcagcccccgccacccttccttcccttccctgtcctgggtcatgttgttgccaccctgtgtgacttttgaagctgtaaaatgagcttccagggcttgggtggcgtcggggcagggccgccgaggctgggaggaagcccttctgccttttgctggtgtttctggaatttgctttccctcacctctcacttccttctagaaggagcttcctgactggaaccagagaatgcatgtctgtccacttggtggctgctgggtggggccgggaacaagggcccctgaccctgtgtgctggccgggacctgccaccagccccc

SEQ ID NO: 88138 - DNA, 1991 bp, Homo sapiens
ttctcagttctggagagttcaggctggagacccccctctttcaggaacccatccctgccttgcctctgcctgtccttccctagcttcgtaggccccttcacttaggcaacactgccaccaccccaccacgtcagtgacaaagcagtctgccctgctcatagatactatctgtgaccagcacgtttttctcccgtgtgcgtgagcttggcctctccaggctgcggtgagccctttccctttccaaagctctctccaggagtgtctggcacagagagagccatggggctgctggaccctggcactgggagaggattcgtcactcccaggaagcaggcgggaagcatggcagcgtgggctgtgcttctagtactgatggcctcaccctctctccctgcaggtcatctttctgtccaagggcaaggatgccatgcagtccttcatgatgccattttatctcatgaaagactgtgagatcaagcagcccgtatttggtgcaaactacatcaagggaacagtgaaggcggaagcgggaggtaggtgatgggaactcagggacacgcatggggcctgcagggaggtgtcctgggaacctctgactgccgccgtgggggcgtccccttcagacccttatcgccctagccatgacctcttcccagctctgggctgccagctggtggggtttgattgccaagaggtggggaaaatgctggcatgaaagacagcagctcagatcagcttttcagagcgtgaagtctgcagaagcctgcggactgagtcaagatgcttagtgcaacttggcgagcgcatacaaattttagactcaggaaggagctgcatcaggttcttgagaggggccttttcatgagagccaggaagaggcagctgcctctgggaagccagagtcaccctgctttggggctggctttttggcaggccccagagacctctgcattgaacttgccttccccttgacacccagccaggcccgcccttgctattgagacactcttggtccccctttgggcagaagccaggctagaggggccggagtctgtccttgggcccccttaggacgagaggtctgctctgaattttaaggtcggctgttgctgagtgggcttgttcctgtgaagctgccgagtgcttgactgggggcggagagaaaccttgatgtggccttggcacccgtgtacatattgggccaagggtgggaggacaggcttgttccaggaaggagaggccattgttccaaagggggaagcgagtacagcagggccaggccaggctgcagtgctggctcctatgcaggcagcaggctggaaaccatggcaccaggaagtccccatcacagtgcaggcccagcccccgcaggcctcccgggcgttggatgaagtcctggagaggaaaacagccatctctttgggcataagttttcttttcctgtgctgtttattcactgtccttcccctttcaggtggctgggaaggctctgcttcctacaagttgactttcacggcagggggcgccattgagttcggacagcggatgctccaggtggcatctcaaggtatccaggctccgaagattaggggctaaagacacactaaacatgtaggggtttggtatgagtttgcttccttttcgttttgctttttcaagaactcaagaggtaagtgtttgggcaccaggctgaccaggcctaggagttgggaaggaaagctgtcattggcatcagctctgtcctgtacctcagagactgcgtttccctgcctggggcaggtggatgacgttttgacaaagctgtttggactcaaggacactttactatggcctcataaaacaaacactaaaccaaccattcgactgcggttccgcagccattgaaaatgaccgagggatgggccagcagacatcctccgccagctcactcctaccccagccctgagcctccctcccggcctctgtccaccctccagccttgcccttgacct

SEQ ID NO: 88139 - DNA, 1059 bp, Homo sapiens
ttggggtggcggggtgaggggctctggtgccccactccacactctcatacgctctctatcttctcatagctatcagctggcccagcggaccttccgcacttttgatttctacaagaaacaccaagaaaccatgactccagccggcttgtccttcttccagtgccgctgggatgactccgtcacctacatcttccaccagcttctgggtaagggccatggggctggggcactgggtgggcctgagctcccaggcctcgcctgccctgccagggagaagctttgttaggggaaggctgcggcaggtccctggtgggcaggcctcagcctgagggggcgcaggccagcagaccaccccgtacccctcactcttcttgcagacatgcgggagccggtgtttgagttcgtgcggccgcccccttaccaccccaagcagaagcgcttcccccaccggcagcccctgcgctacctggaccggtacagggacagtcatgagcccacctatggcatctactaaggagccagagtgtgcgcatttcagagcatgggattgatcggcagcaagagtaaagacacagctccagaggcccacactgtggggtctgggccctgccttaggcagcccccctctttggccccctcccgtcaggcccagggcttggagtgaaagtgactctcaggtggtggggtggggaatgtgaataaacatgatttcttgccgggcttggtggctcacacctgtaattccaacactgggaggctgagaagggagggtcgcttgagcccaggagttcaagaccagctggcaatataatgagaccctgcctgtattttttaaaaaaagggatttctgccatagctggcctgggtcggtgctccagggccagaggaccccgatggagcttcatgggtgggaaacgggctgcctcccaccccactaagtgcgtcctcacctccgtcttctgagggtgtcaggggccctgggatccgaagcaaaagcaggcagtgggccaaaaacaggtgtggcccagggaagggagacatcccaatccagcaggttcc

SEQ ID NO: 88140 - DNA, 1060 bp, Homo sapiens
actacaggtgcaaaccactacacccagctaatttttgtatttttttatagagacagggtttcaccatgttgcccaggctggtctcctgagctcaagcgatctgcccgcctccgcctcccaaagtgctaggattataagcgtgagccaccatgcctgggcccttcgtctctaaactcatttcttcacctgtaaaactgggataatggcaccacatgccttactcagcgtgaggtggactgtgacagtcacgtgggagaaggagcgggagaggcctagcagctgtggcgtcccccaggtgctccttgaaccactgggcgctccttccctgggcccagactgggcggccttccatcttggtagcttttggctctgaacaccaggccagggggcagaggtcaggccagtgaccccaactttgagccttctggttaactggggacagtgactgggaggctggtttccgtcatttttattcaactgttaccagcctatgcggcaggaccctctggggatttgtgcctgaggcgttggccgcccctgtgccaggctgggcacacactccctgacgaggtcctggagacttcaggacgcagagggaaaagcagccaaaagtggcctggctttctagcctcagtgactgtggcggacccaccggctcccggggcctggaagcggctgcatggccttgctgtcaagctgatgctctctggagccctgtcccccactcggagctcctccagcccgcttcccgtatttgcagcatgtcccggcgttcacagagcttggctgcctcctctgtcccaggagagagatgcttagagctgtcctcccagggagtcatgtcagcctctagggtgtgcatggagctgaggggacactcctgctgcctccctggagtggtaattaaccgggactttcctcctcccagaaccaacatcccgggtaaccgggtggctgaaggacaggtgacgtgtccctacctcccccccttccctgcccgaggctccggcatccaccgtcttgccttcctgctcttcaagcaggaccagccgattgactt

SEQ ID NO: 88141 - DNA, 1075 bp, Homo sapiens
ataaatattaaaaatttaaaaattagctgggcatggtggggcatatctatagtcccagctacttgggaggctgaggtgggaggattgcttgagcccagctggtcgaggctacaggtgtgttcacaccactgcacttcagcttgggtgacagagcaaggcacttgtctcaaactaaacaaaacaaaactataatgataacagttgtcattatggagcatttcctgtgtgccaacctcaatgccgaaggctttgtttatattttacttatttatttatatttagaaatggggtctcacgatgttgcctcggctggtctcaaagtcctgggctcaagtgatcctacccccttggcctgcggattagctaggattacaggcatgagccactgtgcctggcctgctttgtgtattttttaagcttttaccctcacacagccctgcaaggaagggctacaaggaatgtttacagacaaggaaactgaggcttagagacatgaagtcatgtgctcgtaagttccacagcaaacaagtaaccttgccaggattgagactgtggtctgtctcactccatacctgggctctttcatggcccctgctgactcccagagccaggcagagtcagggacgatgtggggaggggcctcagtgacggctggctcagctagcatccagggctccacctccctctcagctcagggaaggtgaccgcccatccaaacctgccttgcaggaccgtgacttcttggagaatgaacagttcttcctggagaccctgaagaaagggtcctacaatttgacatctcattcagcctgagtgggaccccagccgattccccaacagagggttcggaccccagaactgtcctgttcctccggctgcctccatggaggcagtgcctggggaggattctgagatgcttgaggcctgatgacagctcttccgtggacagggtgcaagtgcatcctttccaaatgtgccagcccggggcagcccctgcctctggggctctgtggtgtaggctatcttaccatggctttggctgccctgccccaaagccattggcttggatctgagg

SEQ ID NO: 88142 - DNA, 1154 bp, Homo sapiens
aggtcgatgcggccaccagtgccacctcccacacgcggtatgtgcgctgccccaaccatgcccgcctgacgttgggggccggaaggtccccgagaccgtcaggagggggtgacccagtcttcttccaggtccctgaatagcatcatccaccagatggagaagttctccagcagcctgcacgagttgtcctcccgcgtggaggcctcgcacctcaccacctcccaggagcgggagctggggatccggcagcgtgacgagcagctgcggggtacgccctcccctctcagccaccccggctcctggtgggaagggggagcagctgctgagcaccctgtgggttgcccccagcactgcaggagcggctgggccagcagcagcgggacatggaggaggagcggagccggcaacaggaggtcatcgggaagatggaggcacggctgaatgagcagagccggctgctggagcaggtgaggcccgtcctcctggccctcctgcccctcctgccacggggcctcttctccagggcacccgcaagtgtagcggcactcccgtgacctcacttcctcaggaggtcaaggccccacctgccgcttcctgcctctacatctccctgccctggccaggctctcagcactgcccacctgagcatgcaggggccgcctggccaggccccccaccacgccctgtccgctcctcagcaccgcaagcccctcggccaccttggctgccctccgcagtctagcccccgcaaccatcagctgcacttcccacttcctgacactcgaatctgtcacattagctgaggcctgacattgggacagatgctcttgcccattaaatgtcatcctagcctcttcagctctcacagagacatttgaattccctagatacctttcatatataagcacatgctttatttaaataatgatgaccttagccaggcacagtggcctgtgcctataatcccagctacttggggggctgaggcagcaggatcacttaaggcccagaatttgagaccagcctagcgagaccataaataaatttttttatgccaggcaagttggctcatgcctgtaattccagcacttcaggagtccaaggctggaggatcacttgaggtcaggagttcgagaccagcctggccaacatgg

SEQ ID NO: 88143 - DNA, 1087 bp, Homo sapiens
caccacacctgactaatttttttgtgtttttagtagagatggggtttcacatgttggccaggctggtcttgaactcctggccttaagcgatctgcccaccctggcctcccaaagatctgggattacagacatgagccaccgtgctcggcctgatttttctttagacctgtgtgcccatggctgtcatttgatcctgttcctgttctctgtgggtagaactgtccctggttcatgtgatggaagtcaaggtctctgtacttcgtggtgttctacagacagcacgtggcctgccacctgagccggtccaggagccactgctcactgggcctcagctgactgtgcagggtccctgggcatcgtgacgcccagctgcaggctgctagggggccactgggactggctgtttcccctgcctgacaccctcctttctgtcttgaagtaggttcttcgcagacagtggcgcagaccccaagggagaaccaggctccaaacagagccctccaatggcttccagccccatccagcccaggaagggaggagctgactggttgggcctcaaggacgaggacttggacctgttccctgcctcacccaccagagaggcccatcgggaaagttcagtgcctgtcacgccctcagtgcctcctcctgcgagccagcactccacgccagctgggctgcccccctccagggcaaagccaccaactgaaggtgcagggtcccctgccaaagccagccaggcttccaagctgcgagcctccaaggaggagaaagaggactggctgagccatgccctgtctcggaagaagtcccaaggcctggccagagagcagcatgctgggacctctgagggcctgcatttggcggggacagcgggccatcccccttctggcaggtactgacttaggctgctgtggctagtagggggaggactggctggggacttgaggagcccctttgccccttcacctgttgcagcctcagtcagcagttggggaacaaggcagggcgccgtggccacagaggccgcttcttggctttgctactctgccttttaggcactgcagagagagcctctggctcccag

SEQ ID NO: 88144 - DNA, 1029 bp, Homo sapiens
aaaaaaaacaaaaacaaaaacaaaaaacagtatactatttaacatggcaaactctttattagtagttcttctctctcctttccccacaggtccacgaatcttacaagcacctgaagtcactgcagtccaagctctgaagtgtcacaaggacaagtttaatctgcttcagaaagcgcctgtgtgcaactcaaattttgtggaatctttttcgaattcaaatagctatagagcaaatgataaattgacccctttttataaatggagggaaaaaatgaacagatttcagagattaaatgaaaaaaagcagatgttttaagtgcaattaacactgaaagagacctgttaaaccattcagaaaaagcttaagaaatgcgatatgacttccttttgtaatgctgctgatcccagtagactatgacttttgataattagcagaatttaactactgagtagttgattattttcacattttaattgctaatcactggctatataagtgtttttaagcaaaggtatttttgaagtggtgtagaacccttccaagctttcctgctcagtgttctaccagacttaccctggggcctggcttaaaagcaggattgaagaaaagggactgggggaaggaaacttattggaaaacttgatgcgaatgagtttctgcttggcacagtctctgcctgcttgctctcctttgctgatggattgcatttatcaaactattcatgctagcatttttccaacgagggaacttattccgcacgggcctactgtaggaccattgtctcgtgtaattaggaattttccatttgaaggattgctaaattgtcacagtagtaggaagtatagggaaacctctcagctgtggcactgttgtagctttggagtgcagagtgtaactctgggacaatcagatttcacatattctgtcatcttggcataagccattaaaagcttggagattactgtatttggcattaaaaaaaaatgtcacttaggtcagcactcccagacgtagcacagaaaaaccct

SEQ ID NO: 88145 - DNA, 1019 bp, Homo sapiens
ggtctcattcactcatgggcacccttctgtttcgtggttgcctgttggatgaggtccagagataactaaatgttggtatttcctgaaaagaagtatgtattctgagaacttcttctggttgaaagtagatcagatatgaagatctgtggggtttgttgttcagtatttttagtgttatcagaaatactgtaccatgttgattatttgtcaatcaaggaaatgtaagtggtgaatgtttagccaagtagaacagcttagatgggcatgggtagtgttctgtattcttctggccagtcggacagctgtgcttcttcagtttgcatgtgtggcagctgtgttttgacagtggccaagatgttagaggaggggtgtgttttctcattggttctcgggctctcagcaccacagatgtcctgacagatctgtgcttgtcctctcagcttcatgccctcaccgctggactgaaggctttcacctcctggactgcaaacactggcattgaagcatgtcggatggcttgtggtgggcatggctattctcattgcagtggtcttccaaatatttatgtcaatttcaccccaagctgtacctttgagggagaaaacactgtcatgatgctccagacggctaggtgagagtcaaatcctcgattcctcccatctgttcataagaatgttctagtccttttcctaggttcttgttcccatggtttttcttcaccgtatatatatatttgttcctgaaaggtatacttttgccttccatcctgactcacggtttttatttcgtggtgaggctagagagtatgaagcacctgttacatagcttgcagttgtatcaaggatagagttactgggctgggcacagtggctcatgactgtaatcccagcactttgggaagctgaggtgggcagatcatgaggtaaggagttcaagaccagcttgatcaacatggtgaaaccgtgtctctactaaaaaaatacaaaaaaattagccgggcatgatggcacattgcctgt

SEQ ID NO: 88146 - DNA, 1058 bp, Homo sapiens
gctccttatttctatacagctgctgctttttatttggtgttgaatagtattttacaggattttcatgagactccaagtggaatactatttgtttcagttgtgcttttgaaaacattttgtccttatctgttctgtttaatgttatctgcttttctgtaaaagctgcttctttgatgaaagatgtctgtgtctgatttgttgactcccactcgggaaagttgtggattgcacataagttggttattcaacttggaagcttctaaatgtttcaaagtgtgtttaatgaggtctaagcgttatgaaagcagattggtaaaaggttcccaacgtttgctttagtacagtatttttgtagagactgccacctagaacatttttctatgactcttttcaaataattttgatatatttgtgttaagatttaaaacataagatcctgtctatcccagtacacataagaaactggaaactcttccttgccacattaatgaaccagcaggactaagttaggcctgccattggaaatctctagggtcaactgagaccttattattggacctttaggaatttttaaaagtcacatttcaggtcatttccccaataacagttatacttttatactttttttttttttttttttgagacggagtcgtgctctgtcgcccaggctggagtgcagtggcgcgatctcagctcactgcaagctccaccttccgggttcacgccattctcctgcctcagcctcccgagtagctgggactacaggcacccaccaccatgcccagctaattttttgtatttttagtagagacggggtttcgccgtgttaaccaggatggtctcgatctcctgactttgtgatccgcccgccttggccccccaaagtgctgggattacaggcgtgagccaccgtgcccagctttaatttttttgttgtttttttagtagagacggggtttcaccactttagccaggatggtctcaatctcctgacctcgtgatccccccacctcggcctcccaaagtgctgggattacaggcttgagccactgtgcctg

SEQ ID NO: 88147 - DNA, 1426 bp, Homo sapiens
aaaacctaaataaagcaaaaaaaaaaaaccacacacattctaaaaaattcaaccaatcaaaccagcaaataacaccaacaacctccccttccaaaaattagagaagtttttatgctaaaacttaggtagaatttgcttagtggattaaatgtaaatacgaaatgaactgtgggaactgtggccttgaaataattagaagaagagagatcatcaggttctgctgctggctttttaggtagtaaaatggtaaatcttatatttaatttcataagaagggggtttacattttcctgaccttctccttgaaggccaaagctgtttggcaagaaggggttgtaggatgcagtttctaaaggaaggctgagatccttttctcttctctcctgtagactacatttggtcaattttgtggaacctgtgggcctcaattactccatgtttattcctaccttgctgaatcagggcaccactgctcagaaagagaaatggctgctttcatccaaaggactccagataattggcacctacgcccagacggaaatgggccacggttagtccacattgagggtctgtgggtaacccacctcaggacatcagttaacagtgattgctggcatttgacttttttctgctgctacctgtttgggattctatttttaagttgttaagtcaaaattcaacttcttgttttctcctagacattttccctggaaactggtccagggctctggcctataaacgtcattcactgttatttcctaaagccttttattattgaacagcttgaaaagatggggtttacagtgcagcggggaaccccattatgttactctgggtctaatgagtaaagactttgttggaaattcttcagagggttagtgcctcagcaatatctggaaagcgcctctctgctctaatgcagttaaagctgtggattttaatgggggcagcaggcagtggcagctacctgtctcatctcattgcccactagcagggttataaggcagtttggaaaaaagtccatgattctcttcatctgacttcagtctttttagacattttttcccctacatgtctgggaactcttgtgttgccagtaattctttgttaaattgttcctaaatatctggcttccttcaaaaagttttgcttttgatcttaatgtgaaataggtttgttttcatagacaaggccattggcaggtttgagtgtttggaatttgaactgcccagcctcatgtctaattatcaaaatggcaggagtaaagaaagggaaagaaaaagggatgcagatatcagggaaacatcattttgtgtttgattgctgatttcagtgtgtgaattggtttaaggaaaatgttatttattgtcatctccatgggtactgcagctttctggtcatggtttgatgttccagacactttact

SEQ ID NO: 88148 - DNA, 1039 bp, Homo sapiens
acctctgcccccagtggccctggcccctgggcagcccttcctggccgccatgtgtacccagagcctgggactggctgggctgggcagtgacccaggtgggaaagggtggtcttgccctctaaggcccggcacaagtgagaggcctgggggtccatgttgggctgggctgggcgaggggtggtctctgacttcctgggggttctggctgggatgggcagggggctgggtgggagagtgtgggccctgccctccgaggccgggcatgggcgagaagcctgggggtcctggctgaactgggctgggtgaagggggccccctgacccccttggggtccgggctgggctgggtgaggggcggtttccgacccccagccaggttcccaggcaggatgagctggggttggggtggctaggccgtgggccttgggagctgggcagtctgggctgggctgggctgggcagggcgccacatggaagctggaggagcaacgggagcgctgggcgtggggtgcaaattgcccggtgccttctgtttcccaggcagctctgtggccatggatatgttccagaaggtagagaagatcggagagggcacctatggggtggtgtacaaggccaagaacagggagacagggcagctggtggccctgaagaagatcagactggatttgtgagtgctgggacggcccctgagttacccaccctgggccatcacaacctgggcgctccctgatccgttccctctttcctggagtccacgtttaactcctctgggtgctgcccagcagcccttacctgtcctctccccagttcactgccttctgaccagcctttgccggggccctgactgtggagtttggtggatgacgtgccaaggagcacaggtctccattgccggggccctggtcattctgtggggttaaggagaagccgatccccctggctggaagtgcccttcttggcccaagtctctgcccacggctgtgcccttgtttcttgcagggagatggagggggtcccaagcactgccatcagggaga

SEQ ID NO: 88149 - DNA, 1074 bp, Homo sapiens
aagcaggattagtaacaaactaggaatgcatgctcattatagagcagtggaccctaaatttctaaggaaaccccccacctccctcccttctcttacccaacctcaaagcttcttgcataaagcttcctagatgtcagatcatccctgggaagagggttgaggaacctgttgctgtaaagagtagcacccgtgggtaagagctctaactcgtaacatggccaacaggcctgcaccccagtcctagcctgccactctcttagcctctctgggtttcagtgactttgactacaaggcagggatgtggtagcccctcctcgtaggaggctgtcgggattgagtgattgagtgagatggcccctgtaaagctctgaaccaggcagtcggcactcaggaatgttcaccaagggtgttctgtgaccgatgctacatacgtctctttgatttgacttccagcctctggttgaacggtttgagacattctgcctggacccttcccttgtcaccaagcaagccaaccttgtgcacttcccaccaggcttccagcccattccctgcaagcctttgttctttgacctggccctcaaccatgtggctttcccaccccttgaggacaagttggaacagaagaccaagagtggcctcactggatacatcaagggcatctttggattcaggagctaaccaggctcttcctcgggggcgggggagattctgactcttaatctgtattgtgagaaaatcccagcaagttccatgatattaaatccaggtctgcattggcccggggcaagagtttaacatcttcggccctgcattcctacatcttgtgtctgtacacgttcttaagcagcgtgtcaggagagcaccctgttgtcttctggtaaatgtgtgcagggtcatcctgtctcctgtacctcctgggaaaggggccgctgctgtctggtgccctgtgagctgtgattgattgcctttggtcagtaatgcgttcaggagtccacaccaggcacagatggggccttgaaacgctttgtcatgcttcttcagtaccatggatttgaaatgaactcatccttg

SEQ ID NO: 88150 - DNA, 1024 bp, Homo sapiens
gggattacagatgggagccactgcccctggccccccgttttttttgttttgttgttgttgttgttttcaatttttagagtcaaggttttgctctattactcgggctggagtgcagtggtgtgatcgtagctcactgctgccttgaatacccaggctcaggtgatctcctgcctcgtgagttgctgggatcccactctctgttttttgtttttttttttttttttttccactgtgtggttcttgaaaaaggatgcagaaggtataaatcaagctaaaaatcaaattttgtgataagatctcatgcgggtcccctgcaaacttgccactggatagtagccaaatggagggtcccttgaagcccaagccaaatggccctgctgtggccacgcccccacccgccccctgcttcctctgggtcagccccaacttgtagtccagtcctcccagttcctccgcttctctgagtataacttgagctgacttgtggtgcattccagctacctgacttacatcaagctatcaacggcaatcaagcgtaatgagaacatggccaaaggtctgcagagggctctgctgcagcagcagccagaggatgacagcaagcgctcaccccggccccaggacctgatccgactctatgacatcatcttacaggtgacccttgaggaccgggaaggcaagggcctgtggttttcctttgcctgtgtcggacacaaagtgacttaactttgtatcacggaagggctgtgacaagcaggacctattagtagctgggaagagacaaagatcttacaccagttctgcagtctgtgagcccctacctctcagacatgctgatctgcagagaatagtgaccccagatcatcactgagcacttgacctgtgtaagacgctcccaggtgccatagagcatctgagacctgagtccatgccatctcggcccccagggagtttgtcagtcagtaggactgtgagacacacacagtcaaggcatctgagtagatgctaagcaaaataaaagctc

SEQ ID NO: 88151 - DNA, 1050 bp, Homo sapiens
ttgggtcacatttgtaaaaggtaattgtgttggcatacagtagagcttgacaagtttgttctggaaggaaaagataaggaaagttctggtgtgctgtgcttcagtgtagagtgtcccaagtccagtctgtaaggcccctcaaggggtgccaggtcctgagcagagggtgaagcgctgcagggaagtagcaggaagctgtgctgggaagagacgtaaagcctttgctaagtctcagatcagttatgcagacagctttttcagcatgtttgcttttaaaaatagaactcccctttccatatgaataatgaatgactaaggctatgagaaaccattatatggtagagaacagtaacaattaaaatgatatctggtgtggcgtgcgtgagtgagtgtgtggttgggggactccatgtgcgattttgctcctctcccattaggtgactatggtttgctcaaaggaaagtctcttactttgatctgcccttgtttaggctgaaagcgaagaaactaaggagcgcctgtttgaatcaatgctcagcgagtgtcgggacgccatccaggtggttcgggaggagctcaagccagatcaggtaggaccctcagccgagccctggttcttgctctgggcgggtccaggtcagcctgtgtccccttctcaggtggaccccagtgctctgagtgcactgctcgcttggccactgtttcgtttttgtttttttgaggtgaggtcgtaagggagcaaacaagggcctctgggctccatcacattgagaaattaatttctccctcccctgttcctcctaatggtttcctatatggcctgtgaagcctgtggcctccaattctgtctccaggtggacttctccagtgcctcccttttctgaaaacactatccctgtggttgattcaggcatctaggctgaaaacctcagatctatttgtctcttttgtccctgtcaccaaacccaccttcttctccctttgcagggcctcttgcctattgttgcttcacctgtttctattagccttttctcgtgtgcctaggcaacc

SEQ ID NO: 88152 - DNA, 1471 bp, Homo sapiens
tggatccacagcacaagggaaagagaagcaccaagaatgggtttccagacaggcgctggcactcctcatgtgggggcagcagcagatttggggagcggatgcgtttagtgatggtatctgtgggaccccgaggctcttgggctggtgtctgctgggctgatggcaccagctagtagcaaacctcaacagctgcgtaggtgcaggaggagaggaaaacggcaggtgacggggactggagcctcacactgtcctccctccaggcagccttccatcccaggaaccctgctgggtggccagtcctttcctgccccgcctgggcccccacagaaaacattaacactcggccagaacgaacagtcttctcacttccccccacctcttcctgccccaatgaaaatagctcagcaaggcccaatttccttttcctgtctattgtaacatataggcaaactttaaaaccaagtaattaaaatacaaaagtggatcccagggtaagttcgcaaaacaaggaacatctttcatgtccctccctgtccgggagccacagtggcagtgactgtacctagcccagggggcaggagcaggctctgcacctgtcagcacctgcttctctccgttctcacacacgagtgctgtggctcgcaccgtcatcggagtctcaggtgacacgcatcctgctccttccgtgccggctcctgggctgccctgctggagacaccatctggatttggccaaaggtctggctcctgtaatgttcattttctcttccccaggtgcctggcaggctgatgacaatgccgtcagtcggaatgcccagcgccggcgcttgtcatccagcagcctggaggactctgagacgaggccctgtgtgtggggccctttggctgtctgagccccagcctctgcacttgggctcccctcctgccctgcattccatccatcctcactcagctgctgcctactgggcatcctcagcaagatgctggagactttttaccctcctgtgacagctgttacaacctgtaaccacaatccctcacctctcagagggaactggaaccctcctttctccgtgtgacctaaagccactcaatgaactgcagctcacgagaccttttgcagggactctggaatgtcctcacggtatattgatgttcaggtggagctggggtccatgggctaatttcttacacatcttttttctccttagggggtagaacaagaaggcttagagtttggcagctttgttacaaacatccctctggcatttcctggtctctggcacatcataaccaattggaaacctgcagtttggggtagggctggaggatcgctcctgtggaaagggagagccatactgcacggacgtagcgtttccctctacaagcactaggagcacctttctcaaggacaagaaatggtagcaaccaaaaggttggttgaaggaaacaatccttccttctggtggcag

SEQ ID NO: 88153 - DNA, 1019 bp, Homo sapiens
tttgcagagccatgtggtcctaaacacacccagctcacacccaaggcagatgcaggcatgagcaggatgacctccccactggcgctccctagcttctgctggttggtcgcagcctcaccagcctggcctctgcccagctctgctcgctctagtattctctgttgagcctgtgtcccacagccctcctcagtgatctgacttgttagggagcagcagacagaaagggctctagggaaacagcaggaaagcgcgagaacacagacatgcccacacaacgtgattcctttcttgtccactctttatccgcttaattattgtcttttttttaacatatgatttgattttttttgtctccatccttaagatttttattttaaggacagcaacgcagagaaaaacacagccagcccctctctaactgcattaactccgttacaggccagaggacgtgcgcatttctaggtatggagtgtgacaataacaatgactttgacatcgcaagcgtgaaagcactggacaataagctgtgctctgaggtctgcttacctggtgagtgtcagtctgctgaacatgaacttggtgggagacgatccctgtgctcttacccctgctctcaccctggtacacccatctcctgccctgcagttcctgccaagaaggcctggggtgtgctagtgctggagaccagttgctgaaggaagtaagaaggcctgggagagtccttgagctttttgcaatgagccagccttgctctgagtgagagtattaggataggaagaaagaagcaaaacttaacgatttggcctaaccactctccaccccacatcacggccttgcaggtaccatgtcaggtggcccagtcttgttttcatcaacaggaagtttgagcagacagacaccacctctctacgaaggtcttggaaggattgcctgcgccctttaaaagtgaagctgtagctcctcagaagaaatgtgtttcagctaggatcagagaggaatgtgaaagccagcgtttcaga

SEQ ID NO: 88154 - DNA, 1042 bp, Homo sapiens
cttcagccaatcagtttactcattttgccgcttcatagactcacagggccttccttctgtcctagggaaatgatgttatagaggaagaggatggatcacccacgcaggaaggtggtaaaagatctggtcctttacttcctttagttatctttctttcctgggtattctttaaggggtaaagaaaagggtaccggtatgacgtggtggcgctgctcagttgtatggggctgttagaggaaagatcgtcttcttaatggtacatcaaagcaagcagagcattgatgatctctatgacctcctcagctctttctgggcctcagagccatggatgtcaggtgcgggtgctgcaggagatacatacaggtccatatttacctgaagtagattcggaagctctctaagcagctcccatcatcagcctccctgctgcaggttttcagtggagccccacagagctgttctggcattctcagtgttgaatagcagtagccatttcttccactggggggagggggaggactatttggcagctggtcaggtcttgctttagttaggaatatggtcaacattactgtaaaagaggactctcgggccggcagacgtactaaaggcgtggtcaaggagacaggtccaagtttcttcaggagctcagcttaggcaagtattttaaaggctgttgtaataatcttcctttaccataattcaggcctcagttacatcttcagttggaagaatgttgtttccagtaaggctagaagagaaggaatggcccacagagcaaggacgtaggaggaagaaggagggcaggaaagtctcccccaagcagggaacactatgtgttccaggagccagactcttccccctgctgctctgaggcccctccctcaggggcacctccagagcacacgtatgcccggcctggatacagacgcaccagcagatgtcatcctattgcttctgctttagcgctggccatcgcttgggaagtgttggaggtgtgcatgtggacctgacggctcccacctggccaaggagcttgaag

SEQ ID NO: 88155 - DNA, 1050 bp, Homo sapiens
tttctgtggcagagtaaaggggagggtattttacagatgaaaatattgagaccctgtaaatggcagtggtttttcccaagtttagatagcaagtcatcagaggagctaaaagtaaaacttagcgcttctgacacccaaaagaggtctccatccctctctggttctatttccctagtcctacttaagatttgggtttcgagccaggcaagttagcccagacctactcggctactcaggaggctgtactcctcctctgttaaagcgtcaacaagaggatcgctgaagcccaggagtcccagcccagcctgggaaacataatgagatgctgtctcaaaaaataaacaagcaaaaaatatttgggttttcccctcagctccccttgcagtaagttctgttctttaaatggacgttggatatagctgcttttccactggactcctacagatccacttcccaaaactcttccgtgctgcatgaagaggaagatgagcattcctgcagcgagtcggagacacagctctctcagagaccgtcggttcagcatctcggagaggtaattgacattcctctcctcttcttgggtgttgtactccagggacttccctcctacctgcatgcctcatcaggtccctctgctctcattcactcatcaaacaccttgtcagcaccctctgaggcagtggcaaaggtttcactggattcatgcattcaacagtgtatgcagcctgtattatttgccaggcactgtgctatatgctgaggatagtagctgggacactacaaaagtccctgcccttgtagcatttatattcttgctatctggggtggggggcacaaaagacaataggtaaaaaaatacatgtgtgcctgatggtgctgtggatcagcatgtgtgacatgtgggaagggagtgtcacggctggaagtgggggctgccattcttaaaaagcggtccaggagccaagaccaagggaagtggtagagctagctatgcagatatacgaggagagagggccctaggtctgggaacagcaaggagaaagtcctggg

SEQ ID NO: 88156 - DNA, 1160 bp, Homo sapiens
actctgtgatcattcagaatgaagaggtagacctatgcttatgatcattcagagaagcccacaatatattgctaatttttttaaaggtaaattttaaaatattgatatgctactctgcaaatgctgagtctctggttttctagatgtgctgaggaagtgaagagccctggagaagaggccagtaaagctaaagtccactacaatgttgagttcacctttgacacagatgctcgggtagccatcaccatctattaccaggccacggaagagttccagaatggtattgccaggtaagatcaggagaccaggagagccacttccttcccagattattaccaggccacggaagagttccagaatggtattaccaggtaagatcaggagaccaggcgagccacttccttcccagatagggagagtccatgtcttatccactcagcaagggcggaaaacattctttttctgcagccagatgagatctggttcctgaatttagactttcttctacaaagccctaccctttaccttttcccttcaaattgtgccatcttggtatagtgacaaatggtggtatagtccttcaggtccttaacatgctgttaaaaatctagtaagctacctttctttggatgtgtgggttgaatagaaaagtttaacgttgccaagcaagagcaaaggaaatggattataaaggaccctttcttctcttcgctagaccctgttgataattgagaacaggcatgagcagaggaagttgtcagacccatctgtgccggatactgacttttgctttgcctcccacttgtatcaatagctacattcccaaagacaacagcctccagtcggagactgtgcagtacaagcgaggagtgtgtcagcagttctgcctgccctcccacaccgtggatccctccgagtgggccgaagaggaggtgagctgcctctggggagggtttcccacatccactcagaagggcctaggggctacttaggactcggtctgacagcaaaggggctgctcggatgcttgaaggccatgcttacctttcagccttgtgacttcatcatgtccttttaaagctctgcttattttgcatcaaggatatacctaactttgttaatttttccattccctaggaatggaaatagcccattagcct

SEQ ID NO: 88157 - DNA, 1037 bp, Homo sapiens
cttcagctctgtacacatgatggggccctcttttatttgcggtccctaaactcctgggataccgcatggcctcaccgaaggaaagggcttgcaggtctggttccctgtcgtctgaggtcagatggaaaagccttttgtgattaactcggccacagtgtgtcctttggtatttggaacttcagcggtttttttttttattattaattctccaggttttgaacactgaccgaaataagcttcatataatggaaaaagaagataaatctggctctttgggccccaaattgcatcccagttttcccgctagctgtgaccttgagcaggttgactcagtatgtcggagtttcagtttcctcacttaattaggagagttgtgccttcctgcctcacctcttagggctattcttggcaaactgtaaagcgagggacagctgtgggtctttttaaacacaccaccttctcctgctttgtttctgacacagtttccttacgccgccccacctccccaagaacccgtgaagactctgagaagcctggtcaatatccgaaaggacacactgaggctcgtcaagtaagttcccagaggctggggccaggtcccaggcaccttcctttggggaggctgggggctgggggacagacttcccaaggaactcatacagcagtttccggcagccccagagcttgcttctctgggcctcagacaggagtgcgggcgctactttctgctgagatcaggccgtccacacccatgttgttcagcactggatgcaatcgtctgtgtttgtgaaaaactttcgcttgcctagaaatgcttagtatccttattttatggatattttttaaaagggaagaagaattattaagggaaaatgggaatttttgcagctactccaacaagccaatgtaaaaatgggaaatttgaacttagaatatcaaatcctttattttattgctatattttctttttcttttctttttttttttgagacggagtctcgctctgtcacccaggctggagtgcagtggcgcaatct

SEQ ID NO: 88158 - DNA, 1207 bp, Homo sapiens
tttttttctttctttttatttttctctcttttgcggcagggagtggctatggaggagaaagagtaaagaataagggaaaagacgcatcttttttttgaaatgcaggtaggagttatggataacgcccaagtacctgtacaaatgaaaatgattaactttgctactccagaaaaaaattttaatcccaaagtcatttattttggctttagaatagactagcgtttgtgtcggattttcctgcctaattactttttgcttaagcttatttaaaaattgttttaaattcctttagtatgacagcctaggaaagttgggggaggagaaacaggccacagatgggatctgaactagaatttcagttttaccatgtcaaggcctcctgatgcactgcttgcaggagggcaaagttggagtcagctttgtggaaaactgtttggcaaaataatttttaaagtcttaaaaatatgcttactctttgatcctgtaattccacttctaggaatttgtccttaggaaataatcaaacaagcatgcagaaatatagggacaaggatattcaccacaacatttatagctgcgaaaaaaagtaaaaccaacataaaatattgaataatatggaattgattaaagtatgctattatctgcaatgttatcaaaattatggactttaaaaatgtttaccacatctttttaggtgaaaaagaaactgcaaaatagtatgttcagtgtgaaacagcacatagatatagaggtggacaggatggatggatagacggacggatggagatacgtattccataatgttaattttggtattgccgagtagtaaaattagggatagttttgtacttttttgtgtttttcaagttttctgcttaaacatatattactttgtaattagaaaaaactatcatttttaaaagaatgtatggttaatatatcaatgaaaaagtaaattactgcatcatgcccacaaagtgagtaatctgaatgaagataatttctattgaatgtaagagtcacattcatacctgtgaattataagcaattatactgcgtacattaagtcagatgcaccttaactatggtttaactatattgtttcccaagtaaaataaccatattcaataaaaacctgtgagggcacaatttgattataacttgggtgtcctgttttgtgataccacactatggaggtagactcttc

SEQ ID NO: 88159 - DNA, 1047 bp, Homo sapiens
agaaattgctctaattattcattcagagggttaacttttttgtttttgtttttttgaaacagagtctcactctgtcgcccagactggagtgtagtgctaggatctcggctcactgcacttctgtttcctgggttcaagccatcctcctgcctcagcttcctgagtagctgggactacaggcatgtgccaccacacccggctaatttttacatttttagtagagacagggttttgccatgttggccaggctggtctcgaactccttatctcaggcgatctgtctgcctcagcctcccaaagtgctgggattacaggtgtgagccaccacgcacagcccaaaaggttaacattttaaaaatcagctttttttttttactagatttaggttgactgttttctgcttgtttgattttttttgtttgttcctctctaggaagctattttgccagccacttcattatgggaggagagaagtttgactcaactcatcctgaaggttacctgtttggagagaacagcgatctgaactttctggggaacagaccagttgtggtatggctgtaatcagtttactcctacttggagcttaagtggccaattcaaaaaatgtaacaaaaataagtttgcagttgcttgttcagcagtttgtagcttggtctgagttgagagagatgcactagaagacaaactgcagcctccttggttgtatgggatctcttgttgctagaggactggaagagctcctggagtcttgtgagggagaggatgagtctcacaaattaagctaggacagatctctccctgtcacctctttaggcaacccttttccaagggcttaccttttttttttttcttcatggcacttaacaccaaccttttattgatttgtctctttctctgcttattgtctgcctcctcctctagaacgtaagtttcataaggcaaggactgtttttactgtagtatcccaaacctagaacaaagcctggcacgtaatgttaagcccttaataaatgattgttgaatgaatgactgaaaatttttctc

SEQ ID NO: 88160 - DNA, 1008 bp, Homo sapiens
gaaggccgaggtctcccccgccccgggcgaattagcccaaggggcgtcctgccgggtctagcagggtcaccgagggcaccgagcccctccacgggaggacgggagcggcctccattgtaatcggccccgtgacggggacgcgtgcccgcagggaccgaggctcctggggagcggggctgcggcgtcgtaggcgaggtcggcgccccgcacggacccggccggcccggcccaaagcctacctgcctcgcggggtccgagggccgcgagggaggcgacctcggcatccaaacaggcacttgcgccaggtgctatccctgcgctgccgtctcctggcctctggaaaggttagaattaggtttctcctggaaaagcttccattgcctgctgaaggatggaagccaaacaggcatttgcagtgctggtgcttttgcagaggctgtcagaagccggggggtggggggggtggtggtggtggaaagtaacagaaatgtttgggaatctgagtatcagagttactcggattgcccctttgctagcgtagtggcaagcctgggttttggagtgggaccagctctgggacagggcagaggtattggaaacgtatagaagtatgtttgttattagaatcatcccttcacttaaatgtctctagcctctggattgtggtatcagcattggaggtggaggaggattttgacagcaaagcagagaatcacaaggtagttcagttatgtgagcaccggccagtatgaattgcatgacctagccggtgtttacttttaattgcaagtagttttattttaattaattacttttaattttattctcaagacttctgaggatgaatggctgcgacattctgtctgcttaggacccgatggagattttggtgatttcggaatgaggtgtcagaattggagcagagcctcgtctctttttggtagaatagagacatactgagatgagctggtttctcagcagtgtgtccagtgtctgccaggtgaaagc

SEQ ID NO: 88161 - DNA, 1038 bp, Homo sapiens
tctctatgtggcccaagctggtcttgaactcctggcctcaagctatccttccgcctcagcctcccgaagtgctgggattataggtgtgagccactgcacccagctggcaatttcttttctttttttttttttttgagacagagtttcactcttattgcctaggcggagtgcaatggtgtgatctcggctcaccgcaaccttcacctcctgggttcaaacgattctcctgcctcatgggattacaggcacgtgccacctgtaatcccacacctggctaattttgtatttttagtagagacggggtttctccatgttgatcaggctggtctcgaactcccaacctcaggtggtccgcctgcctcggcctcccaaagttcagggattacaggcgtgagccactgcacccggcctggcaatttattttggacaaagtaagtcaaaggaaaaagatcaaaaaacgaaacactagagaccagtaacagcaaaatggcaaaaccagaagtcatgagtaactgataaatggttgtcccgtacattactgtagattcccatagttggaagcttcccagttgataaggagggcttcccagttggaagtggagaaaggcactacagacttgaagtgggaggacaaaggtacaggggacaatgggttttcttgagaactggccgagagggcatatctggttcaaaaccctcattttacaaaagcagagagaagctccagagaggttcaggaacttgcccaagcttacacaggcaggccaccacaggcctgccagccatcatccctgctgttctctggcggctgtttgaggagacaggcctcgctggctggcggggaactggggaagtcggtcacgatgctgtgatgcaattggcctccacccccacccttcattcattgtttcctgctgccgagaagtcatccccagagggtggggggggggcagggagtagtggagggaggaggggaaaggtctgggtggggccaggcctctgcattgggtcctttggcctccccctgaggacccctag

SEQ ID NO: 88162 - DNA, 1129 bp, Homo sapiens
gattacaagcatgagccactgtgcccggcctaaatgcattttctacttaaaatattttcaacttataatgatgcgtttatccagacataaccctgtcataagttgagagttatgttgagggtctgtatatgtctatttgcataacggtttgcttgggtactttaatttgacaccctaggagcatttctcttgaggctggaattcttcccttatgatctgagagttttgcatagcactggggctcactgtgtttctgcatggagaccatgccattcctaagatttttgtcttgtgttctgaggccatgtaacttttcctttgcataaaattagttaattttggtttataaaaactatactcggtggaacaaggttttgtagtttggaacttaggctgtgggaactcaatgttagataagcttttctgtgtaaccagcttggagaacagacttcagtaacagcgtttgttttccatcactgtgtgactaggtggtggtgacgaatactgtccctcatgaggttcagaagctgcaatgtcccaagataaagactgtggatatcagtttgattctttctgaagccattcggagaatccacaatggagagtccatggcctaccttttccgaaacatcactgtggatgactagctttcacgagggtctcgaccctggacctcctgagggaaacatggaaaaagcagtgccatgagtgatacagtgtttccttgcaagggaggactcgaaacagcctggagttagatatcttcttttgcccggattgatggggaggagggattaaaagagtcaggaagaagacagagctaatggataaatatcataacatggccttacatgtctgctgtcatcagccctgttccttaaaagttctagctgctttcttaaaaataatctgaaaatcttattgatactaaagaggagttaaaggcacataaagtcttaactctataatgttcatttagttgtttcagctccagggaaatggaggtattgatgttgaacctggttagggaagctgagcgcctgtggccctattactatccagttggcctctcccaaatcaacttcaagtcttttatagagaatcgtatttttctttcagaaattgttat

SEQ ID NO: 88163 - DNA, 1003 bp, Homo sapiens
acaaaactcagctgggtgtggtggcgcatgcctataatcccagctactcgggaggctgaggcagaattgcttgaacctgggaggcggaggttgcagtgagccaagatcgcgtcattgcactccagcctgggcaacaagagcaaaactccgtctcaaaaaatacatacatacatacatacatacatacatttttatatcagttacatgttgaaattataatattttgggaattgcataaaataaaatgtattaatttcatctgtttttaatgtggctactagaaaattcaaagtaacatgtatggcatgccttctatttcttttggccaatgctgctgtttctgagagattgcaggttcattgagggggaatttgcatggtttgtttgttttttgtctgtatagtggttttgccaccatttccagggaattaggttgtgattacatttctctagtgatacatgaatgactgagatcttgtaatttgttttgttttgctagtgatgatggccaaagagaagccaccgataactgtagttggagatgttggaggccgcatcgcaatcatcgtggtatggttatatgtcatccatgtgcagaggtggcactcctggctcttggtcagtaggttgtccactctgggactgtatttctaggaacgatgatccgaatggatccatgtatcctttctcacccaaactcccttgtgccaagtggcagaaacctgtatccaggtgaacatacattaaagtataacctacagataggaaatgagcacagtactcccgtgagaaaattcagcaccttcaccttcatcatgtggattctaggttctttaaaccagctcacctaatcatgcttgagcgttagggccgaaagatgaactgaagatgagctgttccgttttcacaagtaagaatgggtgtccccgtgcagactcgttctgcatgttgacatactttttttcccagctctaaatatctgctggctagtgggtcatgagtc

SEQ ID NO: 88164 - DNA, 1032 bp, Homo sapiens
ccaagccgtaatctgcatttttagctttttattttcaactgactttagacttaaagttgaaagaatagtacagatttccagcatatgctcttcactcggagtccccaaatttaacatttatatacatggggtttttttttttccaccatttgagggtgagttgcagacgtaatgtcccttcattcctaaataccttcgtgtatatttgtaaagacaaaagactcttatataaccagagtatcattatcagactcaggaagctaacattgctgtaacactgtaatctacagaccttactcaggtttcaccagtggtcccagcagtgtcctttagagcaaaagaataaacttgttttcttgttcaagacctaacccagggtcacacattgcatttagttgtcatttctttttagtctcatttaatctggagtggctgctttattctttgtttcttatgaccttgatacttttgaacagtgcgatcaagtgattttgtagactctcccttaattggggcttgtttgtgtcctcaggattagattcaggttatgcatttttggcagaaaatcacaggaaacacatgatgtgtcccattactggtgatgtgcattctgataagttggttaaggtttctctggcaggtttctccactgtaaagttactcttttttttttcctctttgtaattaatactacctcatgttaagactatgttttaactgtaaatattctgcttctcatcaaaatgaacatctactgatgattcttgcctgaatcaattattgactgtgattgttgtcagtgttcatttttctaactctatcattccttctacatttattagttgaccttctaatgcaagaaagctttctcttcttccctattcatttcttcatttatatcagtatggattcataggcctatttcattcagtgggttataattcattgtcgtcacaggaataccttaaatattgcaggttcagttctgcaccattgcagtaggtgaatattataataaagtgagtctcatga

SEQ ID NO: 88165 - DNA, 1415 bp, Homo sapiens
gaggttgaggctgcagtgagccatgttgacgccactgcactccagcctgggtgacagtgagaccttgtctcaaaaaaaaaaaaaaatgtctagaatcagatacaatcccaaaccctaactcacgtgccctttgagtcatttacatgctggcctgggcctcacattctcatttatataaataatgcctttgtatgtccctgaaacgttaaatattttcattttatggttaaaaaatgatgccgtagtgatgcgtgggatttcttcctgtcagtttcaccatttccctttgtccttctagggcccagtcctatgcggagagactgcgtctgggtttggccgtcattcacggggaagctcagtgcacggaactggacatggacgatggtcgtcactccccgcctatggtcaaaaatgctactgtgcacccaggcctggagttgccatgtaagatgagctctgtgtttttattttatttgtaaattgaagaaagtttttttttgttggttttgttggttttgttgttgttgttttgttttgttttgttttgtttttgagatggagtctcactctgtcacccaggctagagtgcagtggcgtgatcttggctgactgcaacctctgcctcctgggttcaagcaattctcctgcctcagcctcgtgagtggcaaagattacaggtgtgtgccaccacgcccagctaatttttgtatttttagtagagacagggtttcaccatgttggccaggctggtctcaaactccagacctcgtgatctgctccagacctggtgatctgctcgcctcagcctcccagagtgctgggattacaggcatgagccactgcacctggccctgaagaaagttttaagtagtatgaatggctaggagttatcgactatgtagatatatgctgtcttgttgttttttaataatggaatggtatttgctatcctccgcctttttttttttttttttgagaaaggatctccccctgttgctctgtacagtggcacagtcatggctcactgcagccttgaccggggcgcaagtgattctcccacctccgcctcctgggtagctgggactgtaggggtacactaccatgcctggatagttttctgttcctttttttttctttttgtatggagacggggctccctgcattgcccaggctggttttgaacttctttgctcaaacaatcctcctgtcatggtctcccaaaatgccgagattacataagattacagacatgagccccatgccaggcccgatttcctcttttgtaaaaggaagttgtgttatacacatttgtagactgtgtatggacggttctgcgtagcactcagcattcagacggtgtttgataattttagcttcagtaaaaaagttgtatgtgtgatggtgtgaaatcttaa

SEQ ID NO: 88166 - DNA, 1307 bp, Homo sapiens
agctggcctaagcccaaatccctgggaggctgccagcaggtgttgggtaactctggtcaccagcagttgcttcagatgtcactgcagtaacggggtatgacacaggagacccaggcaaatgtgagggtgggttaactgtgctgtgaataggagtaacctcagatgaaagctagggcttactcagctacaaaaagtcagaaagcttcccctgccttcatgaggtgccattgtaagctagtgtgatggtaaaattcccacaacacccatctgggcagcccatgttaagttgataaagtcaagatcttttctagggttgatacatggaattaatccccaaatacaaactttgactgtttcagagatgtgaatacagctgtgatggagttgctcatcatggcttacgcactgaagactgcctgtgccaggaacattattggggtcatcccctacttcccctacagcaagcagagcaagatgaggaagaggggttccattgtgtgcaagctgctagcatccatgctggcgaaagcaggtgagtgtgcgcgggggccctggggttccagcatgatcctttagggctctttcctagttggacttagctcatacctcagatatccaatctgggatctgagtgtttgtttccttttgaacagttttggctaaggatatgtgagctcggttagaaattcttttttttcccttattcgctttgtcctactttagaataccattgctttagtgtcttctcttctctgtcatctgtcacatattttctatttcatcttgtcatcgctaaattcttagctggcagtcttggcattcttatgtgatcttttgatcttcaggtctagatttctatatctgctttgttagctaaattccatttttgttcatagtattcaagctggattttcttttactccctctcccccacccttgcctttctacatagtggctcattttcattgctttattctccttgtgtggcgggggcacgctttctggcctgtaaatcaatgtaatattttacaattgggtttctattcatctgatgtctgttctaaaactttaacgtatatttgggtcctcggaaagaaatgtatggtcctccctcaatgtccttataggattggttccaggaacccatctcccgcttccccggctcctcagcagatacaaaaacccaaagatactcaagtcttccatataaaatgccatagtatttgcatataaccaacacagtcatctgtagattatttataaatacctaataccatataaacactatataaattgttgttatgctg

SEQ ID NO: 88167 - DNA, 1095 bp, Homo sapiens
tctgtcacctaccagtcctgccaactccccagggaccacatggcgctttgccagctcccactccccgggaggaggaagcgggggatacatgggggctcctgtcctgccttatctgactttttccccctgcagctatgagcaggtcaccaatgaagacctcctgaccaactgcacgctattgctgtgccgccggctgctgtcacccatgaacctgctgtctctgcacacggcttcggggctgcgcctcttctctgtgctcagcctggcctggggcttcattgctgatgtggacctagagagtgagaagtatcggcgtctgggggagatgcgcttcactctgggcaccttcctgcgtctggcagccctgcgcacctaccgcggccgactggcctacctccctgtaggaagagtgggttccaagacacctgcctcccccgttgtggtccagcagggcccggtagatgcacaccttgtgccactggaggagccagtgccctctcactggacagtggtgcccgacgaggactttgtgctagtcctggcactgctgcactcgcacctgggcagtgagatgtttgctgcacccatgggccgctgtgcagctggcgtcatgcatctgttctacgtgcgggcgggagtgtctcgtgccatgctgctgcgcctcttcctggccatggagaagggcaggcatatggagtatgaatgcccctacttggtatatgtgcccgtggtcgccttccgcttggagcccaaggatgggaaaggtgtgtttgcagtggatggggaattgatggttagcgaggccgtgcagggccaggtgcacccaaactacttctggatggtcagcggttgcgtggagcccccgcccagctggaagccccagcagatgccaccgccagaagagcccttatgacccctgggccgcgctgtgccttagtgtctacttgcaggacccttcctccttccctagggctgcagggcctgtccacagctcctgtgggggtggaggagactcctctggagaagggtgagaaggtggaggctatgctttggggggacaggccagaatgaagtcctgggtcaggagcccagctg

SEQ ID NO: 88168 - DNA, 1132 bp, Homo sapiens
cagttccgggctgccctgctagaggcaggcatgccggagtgcacagaggacaagtagctgccaggcacagaggaaagagcatcaccgtgggagaggccagccgccgcctgctcactcccccccggaatcacccctcttcccatgcccctctgtccccactgcaaacccactgccctcttctccccaaggtgagtttgatgctgaagtgcaagaagtgtgttgagatgctgccgtttctattttgaagcgagctttcaacaggcgggtcccctgtggcaaagaaaatcggaaccctgttgccgattttccatttgtcaccccagcagaatgtccggcacttgctcccttgctgccccttctcaggtcagaggcgggtgttccagggcctgccgcggggctctctgggccggttccctgcagacccgcaggagagcacatgtgccttgcatgaagtgtgggttgcgccaacaattcccctggtccctttcaacctgtttagttcaactcaagcctccctgtgtcccagaccctcctgctgccaccaccacccaggtcctccctagtcctccagcgtcaacactatcccttgggagttgtagctgctgtcactgactcccggctatacatggcctgtcgaccacgttatagccctcaggcctgttgaacttgctctctaagagaggttgggaccaggctaggttccgggtgacgcccaggagaggtggtggccttcacacatgcacatggagttgaggaccagggagctgcagggaaagcaacagctataggtgccttgctcttctgtcggaggctgctgggggcaagagcagctgcacaaggccagggcaagtgctagggcccctcccccatcacatggtcacactgggacaggcgtgcagctcactgaactccaagcgagccagccctctcttggactagaaggcctactgtcagcccttcgcttacaaactgcaggctcaatccgaaggggacggccggcgggggctctcctagtgcccagagacaggcccagaggtttacaagttttctaagcttttgataatgtgaagctccaggccgagaggatgctgttgagcacattgcagctatgtaatttttggtgtatgtatgt

SEQ ID NO: 88169 - DNA, 1027 bp, Homo sapiens
tggcacttcccttctgcccccagcacttgtacaacatagagtctgagattgaggagtcagactacgattcggtagaaggcagcaccagcggggcatcctcggatgaatgggaagatgatagtgacagctgggagacggacaatgggctggtggaggacgagcaccccaagatagaggagccccccatcccacccctggagcagccggtggcccctgaggacaagggagtggtgatcagtgaagaggcagccacagctgccgtccagggggctgtggccatggctgcccccatggccgggctgatggagaaggctggcaaggacgggccacccaagagcttccgggagttgaaagaggccatcaagatcctggagagcctcaagaacatgactgtggagcagctgctgacgggctcgcccacctctccgactgtggagcctgagaagccaactcgggagaagaagtttctggatgacatcaagaagctacaggaaaacctcaagaagaccctggacaatgtggccattgtagaggaggagaagatggaagcagtgcccgacgtagagcgcaaggaggacaagcccgaggggcagtcacctgtgaaggctgagtggcccagcgaaaccccggtgctgtgccagcagtgtggcggcaagcctggcgtcaccttcaccagcgccaagggcgaggtcttctccgtactggagtttgcaccctgtgagtcagcccttgcctggtcttcgccttcccccgccttctcggggctcctgtttgtgtcaccagatctgggtgcagggtggttagtcccctcgccagaccccagctactgccccagggcaaaccatttccctgtgtggtcacagtgctgaggccagcagcggcgagtgggaagtctgtgggtgtgctcacctgtccagccaggttggcagatggagctccagggcctctccatgagggactgactattctcttcccccctctagcaaatcattcttttaagaaaattgagttccagcctccagaagcc

SEQ ID NO: 88170 - DNA, 1067 bp, Homo sapiens
gcagccagcgggcacaggcgtggagagcatggtcacccatggagacaccgctcacggggactttcctttggccccacatcccgcagggtctcttcttcgatgattcctatggcttctacccaggccaggtgctcattggccctgccaagatcttctccagcgtccagtggctgtcaggtgtcaagcccgtgctcagcaccaagagcaagttccgagtggtggtggaagaggtgggtccgggcccaagggtaggagatggagtccttgacctccacaccctggagctgagctgctgcccctttccttcctgctcttgagggttgagccccgctcctcagcatctggaccctgttgatctcaaagggctttggggataaagggaacccaggctctggtcatagtgaccaaaagacagatgtgccccagcccagcctgtacaggctgagcaaggtgggagggtggcaagtggcagttccagtggcccctggctggtatgagcagtgacactggtcctgggcattgggtgggggccgtggttacagttggggcctgctctgatgtgtctgtacttggtgctgcactaggaagatcagtttcctgctctggaggtcaagtgggctttgggcagctggctaaagagagtgctgtcagagcctgccctgactggcgtgtcccacctgccatccccaggtgcaggttgtagagttgaaagttacatggattaccaagagtttctgtccagggggcacggacagcgtcagccccccaccctctgtcatcacccaggaaaacctaggcaggtaagcatgcccttactgccagcaacccaggggcacgcgtgggacagggctctgggccctggtcacatgcctggggaggcttaagaacactgctggcctcccaggagtccagcccagctcacccccacttcttccccaaccagggtgaagcgtctcggatgctttgaccatgctcagcggcagcttggggagcgctgtctgtatgtcttcccagccaaggtagagccagccaagattgcctgggaatgtccagaaaaaaactgcgcc

SEQ ID NO: 88171 - DNA, 1016 bp, Homo sapiens
taccgttctccttatctgccgtggcctatttctgttgctcagtttctgatctgtcctggcatggggagaaacgttttcactgaggatatctgctagaggctgatgctttacttgaggcactgtgatggtgctgagcaagcactccagtggcacttggggtcttgttcgttgtgggagagtttcttgtactacctcgggctgagttgatggtagaagacgaattgtgctatttagggcatgtgggcgcattggcatctcagaatcgcaactttttggtactcactgtgtcccctggtggagaccaaacctctgttctctgttttaggtgctccatgaacacggaagatggcgccaagctctacgacgtctgcccgcacgtcagcgactcggtagtgtgctccatccaggccagcacccttctctgattgctcagtcctctggaaggaggacttcgtagcaaagacctggacccagctaaacagagcggtttcctagaaaaggggcgggtgcgcgccagagggtctaaaagtttgggtataggcagaaagtattagaacttttttttttttttttttttttgagacagagtctcactgtcgcccaggctggagtgcaacggtgcgatctcggctcactgcaacctccacctcccgggttcaagtgattctttggcctcagcctcccgagtagctgggattacaggcgtgtgccaccacacccgtctaatttttgtatttttagtggagatgaggtttcaccatgttggccaggctggtctcgaactcttgacctcgggtgatctgcccacagcctcccaaagtgctgggattacaggcgtgagccaccgcgcccggcagtattagaacttttatttgcatttttggtagcttttttttctcatcctttaaggttccactttgtctctctcagtacaggatgatgtgttagttacaatagtacatggacacacacagcaaacaagtagatatacagggggtgcgtgagcaaacaggttt

SEQ ID NO: 88172 - DNA, 1018 bp, Homo sapiens
atttttatttttactgtatttattttttagagatagggtcttactcttgtcacccaggctggagtgcattggcacaatcagggctcactgcagcgtcgaattcctgggcttaagcaatcctcccacctcagcctcttgagtagctggggctccaggtgcgtaccaccgtgcccagcttgaccccatttttaatgtcttgaaaagagacccttcctcagcccacatccaccccctcacctacctcttcctccttttcctgctcttcagccgtagttcctgaatgagctccatgctgtgattcctgtttcctgcattgccagatgttctccaggccccgccattggggattctgcccacgccacccattgggactgctgagcccaggtcagcagggacacttccccgtggcactggatctctcagcagcatcaggcattgctagccactcctttcttgacacttgttcccaattcccatggcttttccttcagctgtctctagtgactcctcagaggcacccttctgtgttccaggcacttgctggggtgcactggtgcccagtgcctgcccttgtgtggttcacattctaacccccatggggcacacagactgcaggtgtgggaacagtaagtgctgtgaagaaaaataaagcaggtggatagagaatgaggaggagcaattccagacagggtggccagagaagcccttctgaggaggtgacatctgagcagaaacttgggtgcagctatctgggggaacatttgagccatggctgttccctgtggtggccacacctccccaagcctggcgtgcctcggcttcattgcagatggaacctccgtcctgctcggacacctgcaggactgtctcgtgttccagatgtttcattggcatctggcacagcgtctgcccacccagtggttattcagtttgctgaatgggcgagggaacaactgaatggatggtctacagcatatgatgaacgggaggaagaggccactgggtgcccagaccttat

SEQ ID NO: 88173 - DNA, 1040 bp, Homo sapiens
atgcttgtgactgtcactttgtttatagccatcctagtgggcatgcatgggtattgcattgtgatttggcatgcattcctagtgatgagtgatgctgagcatcttttcatgtgcttattggccatgtgtatatcttctttagataaatgtttattcaaataagtcctgtgcttatttttgaactgagttttctgttggtctgcttattacaccctgcatttggatcttccctctctcccatggagtctcgcaggtgggctacctcttgtggcaggtgcctgtcagtgtcattgggatctgtgctagccattttgcattatgttgggatttaaccccctttcctatttcagtatgcttaagacccttagaaactgaaagggctttaagtcctaagtctttccaggaacacagatgtaattgttttaaatctggggctccacaagcatcctaggatgagaaaggggttgctaaataggttttcttggacagtgggcaagctttcaaatatttaccagtcacatgtaccgtggcatgctgggtataagtctttctaaggcggagaccatacaatctatttcttttgagtctctctcatagtacaattatagtacttcttacacagtgggatgatgaaatatttgtggattgacaggaacatactttgataactgagtcctttccgtagcagtttgacgggtctaagacatggttgtgccgaaatgtgcatgagagtgtcgggtgtgtgtgcctggcgatagggggccttgagtttccaaaggctcttggctgctgctgcctcacagattctccatgctgtgtggctgtctgctgaggggcacatgtgctgctatttatgtttggtgactttctcagtgattgtttttagtttagccttttaagaatctaatctaattttgtgagtgtgtaaagtgtggatttatccatgcctgctgcgtgacactgacagggagtgtcttccaccctaagcctggatcagttctgactgtcatggttagatcacagcaatccatgggacttaa

SEQ ID NO: 88174 - DNA, 2117 bp, Homo sapiens
atgtattcaaaatattatatcaacatataactcatatgataagtactaatgagagactgtgcgttctttttaccatagtggctactggattgggtagcactgcttcagagacttagataggagagagaaccatcgctgtgatctcctactcagcttttttccctcatagcacctggcattacctgagattatactacttcatgtcctgtttactgtccccagccggaaggtaagagaagcacagaagcatctctgtcactgctatatcctcagtgactggcccaaagtaggtgctaggagagatttgtttagtgagcacttgggaaatggcagattgcacacatgcgaatgagtggaattagtgggtgaatgactgatgcacataagggagcgagagcctagttccacctgcaggacacagttgagatgctgaaggatgtggtggggagcattaggagatgctgtcatggaggtgccttttgagttcactcttgaaagataagagcttggaatagcagcagtggagggcagggcgtcctgggcgggaagtccagtgcgcataaaggcaagagaggcaggaagttcatttcagtggtttcagacttaggcctcagaactcctttaacttaaaaattattgaggaccacaataattttttagctttgtgagcttttatttgtatgggttgtttctattaacatctaccatttaagaaaacaaacttaaaaaccaagaatgcctgggcatacattctattggccatcagagcagtgacgtcatcacacatcatgtagcctctggaaaattccactgcagactttggagaggatgagaggaaaaaaggcaaataacgtcttggtcttgttatagaaaatttttgactttggacctcctgaaagggtttcagggatccctgggccatattttgaggaccactgagctagaggtggggtggaagaagtcaggtgagagagtgctggcaggcgaggctgcacaggactgtaaataacgataacaacaaaggtttgttggcacctgccgcgttctaggcacagtcactggagaaccccgtgaagtaggtgttcttacttcacagaggaggagaggttaaggcagtgagcagaaaggcttgggctaaagccaggcaagcgcctccaaaccacgccgtcagctgcccctggaaaggccactggtgtcatgcttgctgtgtgtgtgcaggtctttggatgactgactcaggagttgggatttgttttttacataaagaggacttacatcagagtttacaatgggtgatttggcggcagtttacaaggtggaatgtggggagctaggaagcctggaggccagttaggaggattttatggggcagatgagttgtgtcctctgtgccctcggtgtgcatggcgtcacctatgcatgcatggcgtggagtgctagaggtgctgacttctcacacaaaatgacccggaagtgtgaacaaacatcttcattccgtattcagtggaagaagcagtgatctgttccagtgcaagaggaaacactggttatgttggtcttactgatggatttaagggatttttcaaggataattttaatgatgttcaatttgacttagtacctaaccccccagtaaaatctgaaatctatcgaacctaagagaacagtaataaagctttcaattattagagtagtgaggtagagagaaaggtgaggtggttggagaaggtttctcagatggggcgcaaaggtgtgaaggacgtttgaggaataacaggtaaagcatgtgtttcacagccttgcacgtacagctgagccggggtgtagtgggggaggtgggagacagagcaggagtagggacattagtgtgccagggctttgaggtgatcagaagagcgacgaggagcctttaagtttttcttttttaattgtagtaaaatatgcataacaaaatttaccattttaaccatttttaaataaacagttcagtgccattaagtacattcccattgttgtgcaaccatccccaccatccacccccagaacttttcatcattccccactgaaactctgtctcaattaaataataactcctcaaaccattaagttttatagct

SEQ ID NO: 88175 - DNA, 1089 bp, Homo sapiens
atgccagcagccacttaaaccttcatgagcactggctagacgtggtgggtccttctggtctccacctgtcatggttgggcagaacagccccctgcgaggtaagggagcaggactgctgtctgtcagttcaagttcagccttcgtttcggaggcaaagcgtttatgctttagctttcttgtgctttttcatctcttttgcattgtcttttgttttaagttgccatgacattcagggtttcaccaggtttgagatatagtgcctctaaattagggctgtctgtgatcaccctgcttttatgaagctgtgtgtgtgaaacatccctgatgacaggtccctcgggaattggctttgcagtttatttttggctcctacgctggccagcatttccatggggaaagctatttaggtgtagcatcatggcacgtgaagtttgtctcacttgtctgggtgctgggcccattaaaagcaattgttcttagtgatgtaatgtgaagaagttatataaggttaaccaagatgcaggactaagtgaatctaaattgcgttttattcagataggatcacagcacttgtagactcttaacagctgttctgtgattttattctttgtcccttgatttttccccttctagccctcgggcctcagtgccctgatggtgcttctgtctggctgctgcctgactcaagggtactttccccagatgaagggtgtgtgttttgtactgtgattggaagccaaaacccttgggtgctcttcctggctgtcacctactctgaatgaccttgaccaagtcactgcctcattttctccctctgcaatgaaataagaggtctatcttcctaaccccgatatgatcctgctcggatggaataaccagaagtgtagctgggtcaagcctaggatggccacttggttattagcagacagcattctgatgtctgtcagagagagccagccctgtgccttcagaagatcacttccatgagaaagagggtgatgctgcaccaaagaggcaccttgggaagcaaaaggtgcacgaggcgggttgtggggaaggtggttgtttcaggggcataggaattcctaa

SEQ ID NO: 88176 - DNA, 1087 bp, Homo sapiens
cgcctgctgttttctcacgacctggtgtcgggccgttaccgtggctccgtgcacttcgggctggtgcgcctcatccacggcgaggactcggactcggagggcgaggaggagggccgcgggagctcggggtgctccgaggccgggggcgcgggccacgaggagggccgggccagccccctgcgccgcggctacgtgcgcgtccagtggtacccggagggcgtcaagcagcatgtgaaggagaccaaggtgcggcgggcgggggctgggcggcgcgggcggcagggggtcggcggccgggccgaggccagggaaggacggcgtgcagggccctgcccggagcggtgccactgcagtggccgacgcgggaggacagccccagtggagggtacactccatgcaaagtcattgcagcagctctgggcgcacacgccagccaggcactgctggcccgggaccgggcgggccctgggcttcccgacttgaggggacttctaagacatgttatgctgtggtgtcggcctcgagatttagagacgtggaccgactcccgtggggactcaggttctggggcgcgttcggcgttacaccagtgcggcgttttgctgacccccaaggagctcggtactgcattgtgcatccagaaatgaaggccgtgccgggtccgtgcagggaggggttgtgggcattccaaaacaaagatagaggtgaaaatcccagccgaacccaagaagttcactagcttacaggctgcattatggtgaagccacccagcctctttttgttttaccctgctgcctccttttaattgctgcagggaactttgtgagtaaaatcattagcaatcagagccccggtatgaatagtacttgggggggaggattctgacagctgcgaccgggattgatgactcctaagtgcatatggactccttgaaaaaaataatccagaaccctgggtagaggggagtcaccaatttggaaacccgaaggttttttcttgacctgaagctgttaagcagacatctgactcccgtatggtttttggggtgatgctagtgagtatagcagttttacaaaacaaagaggct

SEQ ID NO: 88177 - DNA, 1471 bp, Homo sapiens
caaatgaccatcctgagggacctggagaagctggccggctggcaccgtatcgccatcatcttcatcctcagtggcatcacaggcaacctcgccagtgccatctttctcccataccgggcagaggtaaggatgtggaggatgggaccccttccgcacatagggggccagccctgctgctcctattccacccacctgggatctgccagagggacacggtgcccctcctgtactgggctccacagcggagggacagctaatctgggggcttactggctggtctcttaatcccagtgagagggaacagtgatgctcttgagtcaccctgtccctccaccgcctcatttatcttcctaaccgtgcccactgcctgacagtatgctaggtatctgcaggtcgagcggtaggaaatggcctccgtgcgccgtcggcagtctgatcagttccacctgactgatctagtttgttcagtgtccgtcctctccccaccgtgtgcggcctggaacaggcttgtctgtcttgcttattgctacggacccacaccaggcacgtacacagtaggcgctcagtgtttgctgaaagaatgggcggagcaggcccagctttggtccagcagctccagccgaccccctgcccctcagcctcaggggtccccatgcctgccagggaggagctgatcgatgggatgacccagggtgcaggcccggcccaggccacccacctgatgcctgaagccacgtctcccctgccccgccccaggtgggcccggccggctcacagttcggcctcctcgcctgcctcttcgtggagctcttccagagctggccgctgctggagaggccctggaaggccttcctcaacctctcggccatcgtgctcttcctgttcatctgtggcctcctgccctggatcgacaacatcgcccacatcttcggcttcctcagtggcctgctgctggccttcgccttcctgccctacatcaccttcggcaccagcgacaagtaccgcaagcgggcactcatcctggtgtcactgctggcctttgccggcctcttcgccgccctcgtgctgtggctgtacatctaccccattaactggccctggatcgagcacctcacctgcttccccttcaccagccgcttctgcgagaagtatgagctggaccaggtgctgcactgaccgctgggccacacggctgcccctcagccctgctggaacagggtctgcctgcgagggctgccctctgcagagcgctctctgtgtgccagagagccagagacccaagacagggcccgggctctggacctgggtgcccccctgccaggcgaggctgactccgcgtgagatggttggttaaggcggggtttttctggggcgtgaggcctgtgagatcctgacccaagctcaggcacacccaaggcacctgcctctctgagtcttgggtctcagttcctaatatcccgctccttgctga

SEQ ID NO: 88178 - DNA, 1066 bp, Homo sapiens
ccaattcattgtgaagagcccgtctgttcagctgtgtcctgcccttgaattgaggttccggggggcagtgtttgggacagactccttacactgtattttcttgtcccccaccccaggaagaaatgagctccatgcctgatgatgtctttgagtcccccccactctctgccagctacttccgagggatcccacactcagcctcccctgtctcccccgatggggtgcaaatccctctgtgagtgctggggcagagtccctcctccaggccagccaccagcctgggggcatccccagacctcaccctggcccccaagccccttctgagcaccctggtggggtctgggagtattttggtgggggattcaggctgaaagccaccatccccaccaggaaggagtatggccgagccccagtccccgggccccggcgcggcaagcgcatcgcctccaaggtgaagcactttgcctttgatcggaagaagcggcactacggcctcggcgtggtgggcaactggctgaaccgcagctaccgccgcagcatcagcagcactgtgcagcggcagctggagagcttcgacagccaccggtgaggtgtcgccctggagcccccaggagagcctggaaggttccaaattcctctgggccctcctgaagcgcccccttactcattcagcaagtgtttcatgagcatcttctgcggatcaggagtgtagtgacaagctcgaaggcgcaccctgtcccaagggttgtgcacatgacctgggaagggccaggggtgcttgctgcctctcttccaccccatgctttctgagcctggtccccagccttgctcccagacagcagtcagtcaacaaatgttcattgagtgtcactgcctgcaggccctaaaatggaacccccagagggtggagcagggagggcagggtcggtcagaggacagttagaagctggggccagggctgggcgccgtggctcacacttgtaattatagcactttgggaggctgagtcagaaggattgcttgagcctaggagtttgagaccagcctgggcaacatagtgagaccc

SEQ ID NO: 88179 - DNA, 1056 bp, Homo sapiens
ggcgccagatgtaggggcaagacgattgggcagagatttaaacctccggaggaagagaggagactgcgcagggcagtcccgcctgcgtcccagaagtgcctgcagttcagacccttctctcccctccactttctcccgggtgagcaccgggcggaccggggccgaagtttgttggttgagccagccaaggtggaaacaggtgcgggggtggggatgagggactcacacagcagggctggaccggagctcagaaattggacccaggagtcctgacttctggatggaggggctggggaaggttggccctgggcttgccttttacctgtttggcccctcggatgttcccccagggcattgggatagagacggataagttccctagggtacagaccccgccccactcccacgccagggcgcaaaggaagcctaggttttggccctgccccattccatgaaagattaacggagggggctctagggttggagctactgagagggtggcagcgggtgtgtctgaggagcagaaggcggtggggagctgaccccacttggggagaggctgctgttgcctgggcggctggcatcaggcccccagtgtgtgccatttgctggtaatataatgagaccagcatctgccttattcgaccctcactgtccgtagggcaggcagtggaaagggaggcgtgttttagagctgtggttctcaaccaggggcgactttgcctgccatgggatatttggcaatgttggagtcattttgggtgtcacacacttgggaggggaagtgagtgttgttgttactggcaggtagtgggtagaggccagggacgctaccagacatcttcagggcacggaacagcccacataacgaggaattatccagcccaaggtgttgggctgtgctgaggctgagaaaccctgcgcagcagctggtccatcaggttccttctcaatgatgctccctcactggggaaactacctcagttttccagagtggttaggggaggaacttggaataaacctgaatgagatgaggggtaaggcagtgtgagggca

SEQ ID NO: 88180 - DNA, 2095 bp, Homo sapiens
tcactaacccagcgaaccaccccaaatgcccctatcctcccccaaataaaatccgcagagcaattaacaaagatactcggccaagccccggtttcctcatctgtccctgccccctcgaactttctgtgcttccccagtctcgaccagggacaaactgtgttgaagctcaatgactttctggcagaagtgaacctccagcttcgttttctgacagccgtggttcttcacaggcctggtttcccactccggaccctccactgcccctggtggcggccaccatcttacccccagctccagggtcgcgctgaggacgcggccagcccccagccgccgtagttttgaactacatttcccaccagccctttctcaacatcgcgagagttccggagagattgccgagaagacttgcgcgcaggggcggtctcgcgttcttttcgaggtcggccgcgtggctggaagacatggccactccagtcggtgttgagcacggcgagcagtctcaggcctttagtgatgatggtaaggctgcctgggtgggaaaacggggtcttccttgacacgacactaacatacttggcttcccttcctcagagacgaagtggtgacgataatctcggtttctccctcatagggtggttaggagggttaaaagtactggatgagaaaatgctttccaaacgttgagaaaatgttactatgtgaagggagagagctcaagcccgtcctcggcgtcatagggccggcttctgcgggggagagcgcctaacaacctgggcagccccgtgcgcctccgccgcgcgtgtgctgagcgtcatgcccaggggtcttcggtgcccgcgcacgggcagactctgacgatggtggttcttaattcagcatcaggagtgttaacgtgtgaagacgtgattccgcttggagtgtcttgaggacggccccaatcggtagttcatatttagctttacagataggagtcaataggattgtaaacttctggaaagccgtagttttaacaacgagccttttttcctcccccagaggcctttctttgtttggcatctgcagagacggtgaaaagcagagctccaggttgaaggatcagagtaatagatggagcccttaacatgagtaagagtgggtgcaggcagggcctgagtggtcactagaaatgagaaagcacagttggtgccatcacatacattcacctcctgctttattctgaagttcaagtatgagaatacgtgttgacatacaagccagctatggtaagaaattactcaaaattcagaatgctaattattttaatgataaaaatgagtagcgtctttgcccgtgtgatttggggccactaggtgtcattgtaaccagcgtggatcctcgttagggcatgcagggatgaaagagacatggcaaatgaattttggatcgctaggatttaggaatctttgttattggctgagctgaggatgatttaaagttatccctgtctgaaatggtatcttttgtgaggaggtctgacttgctgaggctcagctgtttaatacaaatctggagaataaaccttaaggtggtttctgttagaatgaagcctgttatccttctcttttagattaaaggtggtggctgtggccttgaaaacagtcatgtgaaaactcatcaccttaaggtgttaagtgtaaggatcttcatgatgaaatttctgtaaatggtgagatttttagtactttcatagacttgaatatgcttatggtcctctttaagtattggtttgttagttttggggatgtgttggtcttccagggttacgattgcccagataatggaagtagtatggaattccttttgatagggtccttgccaagcactctcataaagagcattttttgtttgtttgttttgagacagagttttgctcttgttgcccaggctggagtgcgatggtgcgatcttggctcagcgcaacctctgcctcctgggttcaagctagtctcctgcctcagcctcccaagtagctgggattacaggcatgcaccaccacgcctagctaattttgtgtttttagtagagacggggtttctccatgttggtcaggctggtc

SEQ ID NO: 88181 - DNA, 2518 bp, Homo sapiens
ctgtctgaaggcaaagaaaggcctttctgtgtggaatttgaatatctgaaactcagtttcccaagtttgccttacagaaattttaagttacttgagagttactctgtgtgtatcttcttaagtagttttttttcttaatttctcttcccaggtgcagtcagcctcagtttccaaagccggaaaaggatcctctagtagccacggtgtggcagctgctctgaaccaggacctggacccggacccaaagtgccatgtctttaatgtgagtaagtagacgaactggtaaacaggcttggtttggtttgggggagtggtaatcttttttgcttcccctgctctggacttaaagcaatgggggcagggagactttagtagcattttgttgctaggtgtctgcaataagagacgaaactgaactgctttgccggaaacaagtgaaatgattgctttcctgtttgtaagatttgtttacatctttcgtatccgtaagaagtcccacaagcctatgatggttagttatccctgtctgaaaatctggactgagggaaataatctattctgaggcttaagggtttggctccatggttttttttttgtttttgttttttttcccctttttttttccctcagcatatcctgctgagagcccagtctagagcatcattcctctaaaacgtgaaaagcaaatgagtgattgtcctgctttctctagtcctttgattatggctctgaggatacaggctgtatgaggtggcaggaatgcacaagtacccaggatttgatttatgcccttattgtggaatgaaagtgcttgttacatatttcaagaaaatgaatgcgctcttagaaacagattggaatgtaggatgtatgccagcttgtggcaatgagaatgcttaatgactctgaccttgcctctgctccagggtcctgacatttaggggaaaccacggctgtttggtttctatgtgctttgttaaggacgccagggaggtctcctaagtttgtagcttagatcctgtctgaatgtcacgactggcatgtgagcaagaaagaaaccaagtggtgctggagagtggggtgcccagctttgttcccactggaatgccaggcttgaagtgcacacagattgcctttcttttctgttgaaaggggaggtgtgggccgggcgcggtggctcacgcctgtaatcccagcactttgggaggccgaggcgggtggatcatgaggtcaggagatcgagaccatcctggctaacaaggtgaaaccccgtctctactaaaaatacaaaaaaattagccgggcgcggtggcgggcgcctgtagtcccagctactcgggaggctgaggcaggagaatggcgtgaacccgggaagcggagcttgcagtgagccgagattgcgccactgcagtccgcagtcctgcctgggtgacagagcgagactccgtctcaaaaaaaaaaaaaaaaaaaagaaaggggaggtgtgtgcaaactctttgtatttaaggttgtgtttttgctggacaccaaagaagctgtattctgggtgagatttaatgagcctaaaaactggccccagtagtttacagcctgcaagtaaaacagtgaaaagggtagcttatcaagtggttattgtctgctgagtggacttgactacagaactcaagtaaaccataagatttgacttgaaatgtttctatccagagggagtgctttctgatagttgtttactggcctcttaccagaaactgctccctcagagatactgtctccttaaaatgagtcatcctggatctccaccagcctgcaccaaaatggtgtgatagtgccccgttacgctcccccaacgcgcacatgcctgccggtggtgagagtgagtgctcttggactgactgcctgttctcccaaattagttgttatatagcattcagttttgagtcacttccttggctgttacttcaaattattcttctgttttataggttagctcccagcgatgccagatgggatcagcacagccctgcctctgctgctaattgttcctctaaagtaatcgccatgcgttctttgggcttcatctttaaaggaatgaagcaactgagattattctggaaaaccttttggcagttagtgaaattagagtacaactaagaacattttcagacctccactgtggatgacctgggtataatctcacaaatcgatgggactgcaaggattgtaaactgaaatgaacatgattatactctgttggaagagcctaagaggaaactgatgccatgagtttcagagagtaatgcttaaccccagttacacaggatgccgtcttgtgtttcctcttgtttagttacccactacagtgattttgtgatctgctaatgggttgccacccacaaccattgctttagcacttttacttcaaatcaatgaaggattgataaaagttctcctggtgtctccgcagagtgccttccaggaacagatctttgcatagaatatcagtggtttccttttttgt

SEQ ID NO: 88182 - DNA, 1880 bp, Homo sapiens
tcgtgccagtaactctgaaatctctcttaattcctgctgtccaggcagcagaatgccatggtttccccaagtaggtagctgctttagcagttaaagcccaaatgtctgttctgttgatcagaggtctctgaatttctgaagtggtgtttcgtttctggtgactgagttaatcctttacaatccctcttgtaaagtgtgctaatagaaagaatccacctttcaaagctgcagaaccagaccgtgccctaaattgaccaacgtaactgatgtgcctcaggaagtctcttgccagctgtccctgtgaagacccccctcctcccccccagctgctgccttgcacactgaagcatctcagactgtgcaaagccgtgtagtcatcaagacagtaaatcccagggcttggttaagtgctgtgtgataacttgtttggatgagacttaacttaaaaccacttacaataaacttgggaaactaccgtcagctgagttcaaatttactgacgccatgatatgaggatgaaggtttattacctggtgacatcatcctgttggtgacaaggtggtgatacatctctaatgggacttccctcagtggcaggcaggctgccaagcaactaacccccatcaagtgccagaccctcccagtgttctgagagtcatctccatgctaaacagcctgcgttttatatgatttctctacccagccaaaaaaaaaaaaatggtccatcatgtacgcagttatctagtcttaagttatattctggcttttttctcccactttattatggagcagaagtaagcctatcatgttcttagaaaggctcttaagaggtgtcctggagtccttgaatcactttagcatctggggtaggatgtgccaccaggaggatttgggctggagcgtgtgtgtttgcctttgacctggactgctgtctgatcttgctgaacactccaccgacatttcctaaagttgctcagtgccaatccagcaaagcagtccattttcccttggccaagattgagatgtattgttttagatacagaagagttcttggatgagccaaggacaagctggggtgtcctatattgaacagacctcgatgaaaatcttgaattcaccccagtgccctctgttggcaagggaaggtgaagattgaaaagttaaaaaagcttttggccacttgagaggatcagggccgcaactcttgaagaagcaaagggctcagtgcattggggtcagcgctggtacagctgaaggatgccggccttgtgcaggtccctccacagggcagcttccagggacagatcgtggtttgcataaaatatcaatggcttcatttttcgttcgaaatagtggtcggaaaatttccagtagttgcttgtgatgaatccataggcactgacctgggcaaggatagtcgctggattagtatttgttgagcgtctagtgtgtacagacacttgggtgaagtgacatgagtttagaaaggtgtccgtctgctgaggtgaggataatggtctagggcttattcccacttagcaagtggggagatggattcaggggtgactcactgtgtccccacttggcatagctggtgattgccagagctggatttggaactcaagggtggaggcaaaagcccattactactctctccatcctaactggggactgcagtcaagacactcctgcatcagaataggaaaaggccctgtgtggtggctcacgcctgtaatcccaacactgggaagctgaggtgggaggatcacttgagcttggaagtttgagaccagcctgggcaacatggtaagaccctgtctctacaaaaagtaaaaaaaaaaaaaaagagctgggcgtggcagtacatgcctgtgatccca

SEQ ID NO: 88183 - DNA, 1029 bp, Homo sapiens
gcagcactcttggaactggggattccacgaacagaggccaagagtcccagctccgaggtaagggatatcaggggatcctgttgggttctgttatcctgtgttctgccggcatgggcttctggaagagaaggcctcttacctggtcacaggtatgcaaagctgtcagcagcatgagagccccggtactaggcatatataggtctccaaaatgtgtgttaatcaactttgatttcaagaacctggaagcaaaaagagacatttcagctcactagcttgatggctatcatcacacttcacaactacacattcaaataggtgggaaaacttcaaaaactgagggccttctactccagtcagttctttattcggtccaagtggactaaatacaaagatctttgagaccttaggtaaggttgggggagggggtggtgagaaaggaaccacaggttcccccttttggcaacagcttgttttcaccccaagctactaagtaaccacactgccaagggcataggtggcctgtttatttagcctgagactgcagtttctctctactccacatcttgattaagtaggaatcacgtgtgagggacagggagctcagaccctgtgaccggacccacacagtccaagagtgaggccagggtgtgaccacgggctctgccctcaggcctgagttcacatcgagctgtgccaggccgatcacctgacctctcagagcctgtcttcctctgtagcacgggactaattagaggggcttcatttgcctccccacatccacacacccctctccaactgctccctgccctgggattcgagcctctggtccacagcagggtttctcagtctcagtgctgttgacacttggggccaggtgcttcttgtgatgttcagcagcatccctggcctctacccactgatggcacttgccgccaccacccttgtgacaaccccagacgaggaccatatgcacatccacattgagaacccctggcaggagggagggaagggggttgaggctggtccccg

SEQ ID NO: 88184 - DNA, 1049 bp, Homo sapiens
gagggcgctgactggatgtgggtgggtgtgtaaaagggggaaggaaggggacgctgttcttcaggcaccccactccgtacctttctgtcaggtagctgatgaagtccggatgtagcagcttgaatttactggcagaggcttctggtccaaaataggcgtgcggcctaggacccatgatagaagtggacagagcgcccagagccgtcgtattgcaagggggagatggaggggagggtcagggcgccggagtagccgcggtaccctgagcggtaggagcggggctgggagtagtagcgggagaagggggtgtagaaggtggcaggcagtacgttggggaccacgtgcggcttcccgctcaccaggacctccacgggcggggtgtaggagagagaggaggggggcatgaacagaccggggggagttgggaaggggcagttaaactgggggtggtgggggggcgggggaaggagaggtaagtagagtgagtcaggagggggtgggggcttccgggcagggcagggagagggacaggcaaagcatgggttttggggaagtggtgctgtggggggctggaaaaaggggggctccttcagaaagcggggcacatagggggtgatataggacgggatgttctgaattggcccgatataggaagatgaggtggcagggctgtagaaggaggacttggggggcacagcgggggttagggaagggtttcgagagagggatttgaaaccagactgggagggagatttggaggtgggtggggtgggggtttgggcagccccgcggggcacgtgttggacctgaggactggggttcagggacgaagtccgggaagagggctgtgaggcatttggggtgggagggtgggaggggggccgggaggaagagccccgagtgggggagggggaaggggcaggctgctggcctggaggggtgacaatgttgttggaacgggactgggagggagactgggtaggggatggattaggggtgtgggaaggggagctcattggtgttggggaggcttaggtccacccgatgtc

SEQ ID NO: 88185 - DNA, 1011 bp, Homo sapiens
cagagccccctctacattatacctgcacccaaacccccacaggcctccgattcttttcttttgcaatatacagtcttttttatttttgagatggagtctcgctctgtcactcaggctggagtgcaatggcacaatctcagctcactacaacctccgcctcccgggttcaagtgattcttgtgcctcagcctcccaagtagctgggattaggcacgcaccaccacgcctggctaatttttgtatttttaatagagacatggtttcaccatgttgcccaggctggtctcgaactcctggcctcaagtgattcacccacctcacccttccaaagttctggtattacaggtgtgagccaccgtgcccagcccagtcttttttaagccctgagctcacttctctagcaccagtcttaagaagataaggtattcaagttcttaagacaagtgaaggccgccaagccccctcttccactgtcagcttttcaattctccccccacagacatctccttcccctcccaccctctgtgcttcttgggaggggctagggtcaggcctcaggggagatggggcaccagaaccagcctagggaaggccccaggtgcccccgatgccagccctcctcatggctgctccccatctgcacccacagtcatcgcctccaccctgagccttctgaacggctcagagagtgccaagctgtttgccccgcccagggacacccctccaaagtgtatccggtgtgccgtggtgggcaacggaggcattctgaatgggtcccgccagggtcccaacatcgatgcccatgactatgtattcaggtatgaggggtaggagctggggaggggcgggagggagagttgcctggagggtgggggtgtctcccccaggggcagtgggctatggcagcagtggcctgggcggctcagcagttgtgaccagcacacgggcatggacaaggcaaaaacaaacagtaggccctgaggacggagcatgggtgcccatgcaggggac

SEQ ID NO: 88186 - DNA, 1062 bp, Homo sapiens
gggccctgaagcttctcaaaccttctgggcaagcaagggcatcttttcagagcttggagtttgctccagggtgagcagtttaaatgtgacttttataggaagtagatattttgaggagtagaatataaaattcacaggactatttaagatacaatcttaagactccaaagaactgttcagctggctacaccccatgagtacatatttattcatccttctctgctgttgggccacaagaaaccctattggtcaggtctgagaggccctgaagggacggatgctcagctgtaacttagggcgttccaaagagctcctgcccagcaatctcatgagagtgttctcgtttgctcttcttccctcctccccactaatttgagggtgctcaaaactgccacagggtagtcgaccactctacctttcctgtccaagaattcgatgccttggattgaaagaatgcttcaaatgatgtggtgtccctgggggaaaaagcagaaaaaagcaggggtcagcagctctgacctaccccttggaagcttttggactgaccgacccccttagctctaggggcggacaaagtctgtctgtgcccatcgtggtggctcacatctgtaatcccagtgctttgctggagtacagtggtgcaatctcggctcactgcaacctctgcctcctgggttcaagtgattctcctgcctcagcctcctgagtagctgggattacaggcatgcgccaccacacccagctaattttgtatttttagtagagacggggtttttccatgttggtcaggctggtctcgaactcccgacttcaggtgatctgcccaccttggccttccaaagtgctgggattacaggcgtaagccactgcgcccagctctgtgctcttattcttgccatgtctttctctttaggcacacaggatactgtcactttcttatgttttgcctcactgtgtaaactcaaagatcaaggcgtccctcagcaagtggcagaaatgtggagtttataggaacagtgagatggtggcttaaaatatatgaaaatagaaaagattgccagc

SEQ ID NO: 88187 - DNA, 1506 bp, Homo sapiens
cattccagcctgggtgaaagagtgaaactcctggccgggtgcggtggctcacgtctgtaatcccagcactttgggaggcctaggcgggtggatcacaagttcaggagatcgagaccatcctggctaacacggtaaaaccccatctctactaaaaatacaaaaaaattagccaggtgtggcggcgggtgcctgtagtctcagctacttaggaggctgaggcccaggctactcgggaggctgaggcaggagaatggcgtgaacctgggaggtggagctcgtagtaaggggagatcgcaccactgcactccagcctgggtgacagagtgagactccatctcaaaaaaaaaaagagtgaaagtttgtctcaaaaagaaaataaaagaaaaatgtgttctctaaatattatttttacctcctaaaggaggaagagaaaggatcttgctgtgtcagcctctattattagtgtcccttctagagggcagtaaggggatagtgttactatcccctcccaatgcccaattcccaggcgctaggtggcccctgaatcagggcagaaggaaaacatgaaggaaggaataggggtccttaccctttcaaaaggtggccaggcttctctcagacccctcccttcaccccagcagccacaggtggaggggactctgggttggcagcttgcaagagaaacaaaggtctcttgttacctgcttctaggtgctgagatgcctgagccacaagggaacccaggatctgcctccctttggtttccaggtttcctataagaccctggagggacggcccagaaagagcagagttgatcccttcccccatccctcccttgccccttggactgtccacttgtctgcccacataatcccgtagttcctgctcatgagcacaatatgaccccctctgggaaggaactaggacggtggtgctcagcctaggttgcctatgagaacccccagggaggcttgaaaaaccccattgctcagccccgaaatcctgagattctgatctgactgttctggggtcgggggagggcattggtgagtccagtccctaccctcccaccccaaccaggtgattctgctgtgcagccaggctggagagcctgacggaggagctgcgggacagggcagagttgagacgggtgggggacaggggtagagctgtaaaggagatgatggggaacccccaagttcagttttgctgccctgaactacccaccctcagggaggcctggtgtgactttagagtatccctggtgctcagccacttctcccagccccgctcctactgatccttccagcccctccctctcaggaatccaagtgcctgggacacctgggagggcgtaggaaggggaccagcctgcacatgcccttctgggaggttttaccagcctgaggaggtatacagaccatgtgctgcgtttttcagaaagctaattttactcacaacttagatcatattctcttttttatttttatttttattttttttaag

SEQ ID NO: 88188 - DNA, 1037 bp, Homo sapiens
tgtcgttgttgttgagacggagtctcgctctgtcacccaggctggagtgcactggcacgatctcggctcactgcaagctccgcctcccgggttcacgccattctcctgcctcagcctcccaagtagctgggactacaggcgcccaccaccacatctggctaattttttgtatttttagtagagatggggtttcactgtgttagccaggatggtctcgatctcctgacctcgtgatccgcccgccttggcctcccaaagtgctgggattacaggcgtgagccaccgcgcctggccaagataaacagagtttcttacaactgtgcatggatagatcaagagtccactgggctggtggcagatccctggtggcagcaatacaatggcgttgtcccaaatggacagttccagcagcaagatcttggatgtagtctcactgcctggtcacatgaccacttatttgaagtcaactttataccttatgaaagcactcagaactggattaagaaacagaggacgtaactgagactttatgtgtgtgtaggcgtgggtgtgtggtgagggcagtgccacccagtgacctccagctggtactctgaaactgtgcatgcctccccagcctccaatctactctggctgagtcctcttgggaaactcccagaggctgcactttcccccagaatgcaagaccaggcaagctctcctttttgctgctggtccctagtgacaatctctcacctcagcaccaaaacaaagcaagtcctcacctgctcctttccccagggagccctggatctcagatgtacttgccaagtcctgtgtgattgcctccctggctgctgtcttacttcagagaggcagttgtggggacagacagagtcagggacatctgctccagccactgttccccgagaatcccgtagctgggttcccttggaataaaaaaaggaagtggggaggaatgccaaggaagaggacacttcgaacatctctgagcttcacacactccaaacggcagtagagcacttaagagaggggac

SEQ ID NO: 88189 - DNA, 1054 bp, Homo sapiens
gagtcttgtagggctgagctctgcctcataatgagcttggggcaggacaagacaaagtctagaagcagagcccaggaggtgaggagagggtgggctgggcttcctctcaggaggggcttcagagctgggagccagagggaaggcgtggtggcaaaaactcaccgtctgaaggcctcctatttcgaagctgtatttttcctcaaaatcccaccgaggctcagatttgaagttggcggccttcagtctttggtttctctgcgtcgtggggctctggaaaggggcagggggtggggtggcctgaggtttcttctccttaggtgggatgactgctgtggtcactcctttctgtctcgtccttgttgacactgctcctgtgggagccagcattctgtgctgacttttgggaatgagcgtcttggctgtggttgccgctttgccctggtgcttctctgacaccgtcctggaggccgtcagcttcctggtctggcccccatttccttgggtcgtctttgtgtcctggctcttccatgattgtgcctctgtcctgccagaggccatccctgcatcttgccctctgggtgacagtgtgttcaccatggttttctctttttctgggctcttccatgctgccctctgtgctgtgtggggcaccttgtcctgctcctccggcggtgcctggttggcctcctttcctctgtctccggtggtgtgggccttgggctgggtttgtgtgttgagggcattgttctctggcactggctctgcatagatggttgtcctccttgcccttgtgggtgcctgggacttaggctttgccagggactgtagagacctttctttaatgttctctgtgcgttgatgcctagggacagagataacctttgatgaaggctgaagattgtggaaacaggtcagaagcataagtagttttttgtttttttttttttttttgagacacagtcttgctctgtcacccaggctggagtgcagtggtacgatttcagctcactgcaacctccatctcctgggttcaagtcattctcctgccccaccc

SEQ ID NO: 88190 - DNA, 1168 bp, Homo sapiens
tgttgttatcaaaccactaaaaccacaggccagctagcagggtgctctctctccgcctgtcaggttccaccctcccggcctccatgcctctgatgcctttcccagctctcagggtccagtcgagttgcagctacaagctgcacgtcccctaactttaaatttactagctcagccaacagatctgcatctagaacctgaagctttagtggttgccagttccagcactccccaggagcttcagttcacaggctctcatgacaattaggaagtgggactggaagcagaaggcccccaattagttccccgacatgctgaagtggtcagtctcatccttgaactactcacagatcaaattccttccgcctggggccagaaagcggtcaggtctgtaaatccagaggcagctgctgcttaagatcctgcttgccactgtctgcccgcctcctcagctctcccctcgggccggagtttcacacacttcatgcctctggtggcgtccctgggttccgctgaagctgctgtgggaagtgccacctccagtttcacagtgtggctaggacagtgggcttgcaggctggtgacagctcccctgagcaagaggcctcctcctcctcccccagagctagggaagctggcagggcttggctggcttcacagcttggcaggagaaagaacaggcgcggctgtcagctcctctccatcacttcttcccaccttgtggtctcagagggaaaatgaacccaggctatagactgggctggctctgatagatcaggacccacccctccatttgaggtctgcagggctgtcttgactcctctggaaatggacatgactctagaggaaggtgctagtgtggtaaaacagggaaggggaggaggaggccaaggaaccccagctgtggggtagttctggttcttccatctgatgtatgcaagaaactacagacaatagacctgccagtgtgaatttccagctcaggctggaaatgcgtgctgactgtgaccaccaggagagggcgtcagagggacaagatcagacctgctgggttctcagtggtcccagggctggcagtgtgtcttggttcataaaagacgggcatgcagttggctccatctggaagcgtgcatcctagggtgccagtatcccccgaggggacaaaactcag

SEQ ID NO: 88191 - DNA, 1057 bp, Homo sapiens
ctcagcctccctgctgagagggccagtaagggtggtggcttctgttctccctggactcttgggcatctgaggcccacttaccccgccccgtaggccactgcgtgctgtgatttggtcacaccgcaggccttatgatacaacaggtcttttgtcactggatacagtggatgccagataaggtttctgaaggggagggctgctgctcttcagttcagttttacgctcccagtgaggggggaccatctctgttatttgacacctcgtatttcttacaaatctaattgtttctactcttagaaatagaatctaaccaatgcaactctgatcattatgtgctgtgctgtggaaaggaaagatttttttaaaaatcaactgggaagggttcaggaagtaaaactaggaagagaaactttttgtcctaagggaataaaactaagactaacttaaggaaaattgtgcctcgtgtattggtggcacggctggctcatttatgcaggtggtagtaaattgtgtgtagttagtataattttccttgcagaaaaacatgggcaccgtattgggtttctcttgttcccagcctggggttttgtcctcaccattgtacagtatccattctgaacggacacacctggcattcccaggtgtttctgagagacacaggcctcgactctgagtgagtctttgtgagtgggtatggctgtcagtgcactgagaacaacacttcttgcctctcaggattttgaagcaagagcaccccgagttggcagtcctcgcagactcggttgaccttcaggagtccacagggatagcttccgacagctccagcgactcttccagctcctccagctccagttcgtcagactccgactcagaggtgaggccttgctctctggctgactcctggagcctccaaggctcatgtaactcagtcataaccaggtgtgactcttcctcctcctatccaggagaaggatatgaaagtttttccacgttgttctaagggttacacagttgtcaccattcctgctgagtggtgtatcttgcccattttacagct

SEQ ID NO: 88192 - DNA, 1094 bp, Homo sapiens
gaggctcacccgcaccccgcggagtttggggtccccgaggcgcggattccggggcgggtctgcttcctcccgtgctgtggccgcccgtctgctctggcggacgacgggagtcccacgcctgtggcgctctcaactagaaggcccgtcgtccctgactcctttgggcggcgggtcccctaggggacctggctgtcaaggctcatggggggtggctctaggaacgacgtggcctcacgcacgcgccctgcccccaccccggaggagccagacgagagtcaacttccttcggtttgtcattaccagttggccttggggacacccttatctgccactggactttttttttttttttaactggacaggtcttttttaattccctcaggataacgtggaaagggcagatgctttacagctgtctgtggaagaatttgtggagcggtatgaaagaccttacaagcccgtggttttgttgaatgcgcaagagggctggtctgcgcaggagaaatggactctggagcgcctaaaaaggaaatatcggaaccagaagttcaagtgtggtgaggataacgatggctactcagtgaagatgaagatgaaatactacatcgagtacatggagagcactcgagatgatagtcccctttacatctttgacagcagctatggtgaacaccctaaaagaaggaaacttttggaagactacaaggtgccaaagtttttcactgatgaccttttccagtatgctggggagaagcgcaggcccccttacaggtaaagtattctgcagctaagtggttaaaatccttttcttttttttttttttttttttttgagacagagcgtcactcttgtagcccaggctgcagtgccgtggtgcgatctcggctcacagcaacctccatctcccgagttcaagcgcttctcctgcctcagcctcctgtaactgggattacaggcatgcgccaccacacccagctaattttgtatttttagtagagacggggtttcaccatgttggtcaggctggtctcgaactcccgacttcaggtgatctgcccgcctcggcctcccaaagtgctgcgattgcaggtgtg

SEQ ID NO: 88193 - DNA, 1059 bp, Homo sapiens
tccagggttcaagcaattctgtttcagcctcccgagtagctgggattacaggcgtgcaccaccaggcccggctactttttgtatttttagtagagatggggtttcaccacattggccaggctggtctcgaactcctgacctcaaatgatgcacccgcctcagcctcccaaaatgctgggattacaggcgtgagccaccatgcccagccgaaaaaccactttttaaatgaaaaaaagttccaggataatctctgtaccttaagacaaaaacaaaacaacattcttagctcacagaccttacaaactagctaaattacccgatttaaaaatatttaacaaaagctaaaaacaagcaatatacacatgtcaacttaacacatctgaacataacctagaactctggaaacttcaggggcatttgtacctctaagatggccttgcctggcagagatcttctgtgaaaccaaaggtactgggccaggaccacagcacagggccaaacatacattccatactggagatgcaggacctgaaaagaatgtttttgtgtgccataaataatttagctgctggaagttggaatcattcatacagcaatttctgtcaggcattggcatccattacaaaaatggcagccctgttcaccaatccacgacctttggggatataaaactgcaatgcaatgtgatagaaactcttgatagcactgtttattcaacaagtgcttctagtgtcacagtatcagggatcattctcagactggggatatagctctccctgagcacatatcctactgtagagaggcaacgagcaagcaaataagatatttctagtcaggggccgggcacggtgactcaggcctgtcatcccagcactttgggaggatgaggcgggcggatcacctgaggtcaggagtttgagaccagcctggctaacatggtgaaacccctgtctctactaaaaatacaaaaaattagccgggcatggtggcacgtgcctgtaatcccagctgaggcgggaaaatcgcttgaacacgggaggcggaggttgcagtgagccg

SEQ ID NO: 88194 - DNA, 4288 bp, Homo sapiens
gccaccatgcccggctaattttttgtatttttagtagagacaggggtttcaccatgttagccaggctggtctcaaactcctgacctcaggtgatccgcccgcctcatcctcccaaagtgctgggatgacaggcctgagtcaccgtgcccggcccctgactagaaatatcttatttgcttgctcgttgcctctctacagtaggatatgtgctcagggagagctatatccccagtctgagaatgatccctgatactgtgacactagaagcacttgttgaataaacagtgctatcaagagtttctatcacattgcattgcagttttatatccccaaaggtcgtggattggtgaacagggctgccatttttgtaatggatgccaatgcctgacagaaattgctgtatgaatgattccaacttccagcagctaaattatttatggcacacaaaaacattcttttcaggtcctgcatctccagtatggaatgtatgtttggccctgtgctgtggtcctggcccagtacctttggtttcacagaagatctctgccaggcaaggccatcttagaggtacaaatgcccctgaagtttccagagttctaggttatgttcagatgtgttaagttgacatgtgtatattgcttgtttttagcttttgttaaatatttttaaatcgggtaatttagctagtttgtaaggtctgtgagctaagaatgttgttttgtttttgtcttaaggtacagagattatcctggaactttttttcatttaaaaagtggtttttcggctgggcatggtggctcacgcctgtaatcccagcattttgggaggctgaggcgggtgcatcatttgaggtcaggagttcgagaccagcctggccaatgtggtgaaaccccatctctactaaaaatacaaaaagtagccgggcctggtggtgcacgcctgtaatcccagctactcgggaggctgaaacagaattgcttgaaccctggaggcggaggttacagtgagcaaagatcgcaccattgccctccagcctgggcaacagagcgagactccatctcaaaaaaaaaaaaaagtggttttttaaagaagatactgggtgtgatggctcacacctgtaatcccagtactttggaaggtcgaggtgggaagatgacttgagcccaggagtttgataccagcctggtcaacatagtgagacgctgtctctaagaaaaaagaaaagtgtgacagagatgataggtggaccacaaagcctaaaatattgactctctagccctttagtttgctgaccgctattctagatgaagcccctgaactgccttccacggccgtggcagtctttaaggccattgttttaggtgtcccagcagtgtcatgcagcctttttatattcaggttgctgtaacaaaataccataaactgggtggcttacaaataacagaaatttatgtctcttgccgggcgctgtggcccatgcctgtaatcccagcactttgggaggccaaggcgggcggattgcctgaggtcaggagttcaagaccagcctggccaacatggtgaaaccccgtctctactataaatagaaaaaattggctgggcgtggtggctcatgcctgtaatcccagcactttgggaggctgaggcgggcggatcacgaggtcaggagatcgagaccatcctggctaacacggtgaaaccccgtctctactaaaaatacaaaaaaaattagccgggcctggtggcgggcgcctgtagtcccagctactcgggaggctgaggcaggagaatggtgggtgaacccgggaggcggagcttgcagtgagccgagatcgcaccactgcactccagcctgggcgacagagcgagactccatctcaaaaaaaaaaaagataaaattagccaggcctggtggcacatgcctgtagtcccagctactcaggaggctgaggtaggagaatcgcctgaacccaggaggtggaggctgcagtcagctgagattgtgccactgcactccagcctgggcaacagagcgagactgcatctcaaaagaataaagaaatttgggtatcagttctggaggcagtgaagtcccaggatgaaagtccttacaggttcagtgtctggtgagggccagaattctggttcagacagtgtcctctgtgttcttaagtgtcttgtaccttaagaagcaaagcaactctccagggcattttataagggcactaatcatgagaactctgcctttatgtaattgcctcccaaggcccacatcagatgggtaattaggatttgaacatatgaattttgggtgaacacattcagaccgtagtgtagccctttctgtttttggaaatgttgagattagtgtaaaaatgtatcccattctctttctaacctcactacctggcctcagactggtgaaggcttggaaaaaccaattttatcacatttgcagaaatagactttcacaccatacttaagaccaaaggctaaatagacaaaccagaagcttaatattaacatcccactcttaacttttactacaccaagtaaatgaaattaggggtaggatttggcacacacctctggtcctagttgtaattgctgggcactcacaataattctatctctgtgtccttccttgaactggaaaatgggaagcttgtgtttatgctaatacttatgaaggcattccctggtattatttcttagtgtctgcaaagcatcttgccgctttgaaggcccaactggaaaatctttactagaaagccatgttgcagacctgttaggttttagctacagaaaagcaatcaactatagaacatgctaacagaagtgaaaattaggctgagtgctgtggctcatgcctgtaatcccagcactttgggagactgaggctggtggatcacttgaggtcaggagttcaagaccagcctggccaacatggtgaaacccagtccctactaaaaaatacaaaatactagccgagtggctgggcacggtggctcatgcctgtaatcctagcactttgggaggccgagacaggtggatcacctgtcgggagttcaagaccagcctgaccaacagggagaaaccctgtctctactaaagaaatacaaaattagctgggcttggtggtgcacgcctgtaatcccagctacttgggaggctgaggcagaattgcttgaacccgggaggcgggggttgcagtgagccaagattgcaccattgtactccagcctgagcaacaagagccaaacgctctcaaaaaaaaaaaattagctgggcttggtggccagttactcaggaggctgaggcaggagaatcactggaacccgggaagcagaggttgcagtgagccgatattgcaccactgcactccagcctggagaacagagcaagactccgtctcaaaaaaataaaacaaaactgaaaatcatggcagaggaatcaagtgccccaaaactacttctgtgtgcatagcaattaactgccagttacgatacatggccctttaatattgaaattgaaggttaagcttttaccttttagcagagtagattcataaggaatgtacttttgtcatgtttatagtaatgttcagttacggtacattttatacaaacccagaaagactgactctatgcttatttaaaaatgcaagaatataatgaaaaagtactaagattcccaattatttgcagttccaagtataattgtgaaatgccatctttcataacttattagattggagctggagtgagccttccaggaattttggctgccaaatgtggtgcagaagtaatactgtcagacagctcagaactgcctcactgtctggaagtctgtcggcaaagctgccaaatgaataacctgccacatctgcaggtggtaggactaacatggggtcatatatcttgggatcttctggctctaccaccacaagatattatccttgcatctgatgtgttctttgaaccagaaggtaagcttttttggctcaatagtacatttggccagtgatgctatatgaaaatctattcataaatcctttctcctcagattttgaagacattttggctacaatatattttttgatgcacaagaatcccaaggtccaattgtggtctacttatcaagttaggaggcaagtatggatgacccttactttttatatgtaacttaagccttactctaccctacccatgcgatacataatttaagaatagaatacatctgaagcaaaacagaaaaggcatgactttaaaagaacaacttttttttt

SEQ ID NO: 88195 - DNA, 3998 bp, Homo sapiens
caatcagaaggtttcatttccgggtggcgcgggcgccattttgtgaggagcgatataaacgggcgcagaggccggctgcccgcccagttgttactcaggtgcgctagcctgcggagcccgtccgtgctgttctgcggcaaggcctttcccagtgtccccacgcggaaggcaactgcctgagaggcgcggcgtcgcaccgcccagagctgaggaagccggcgccagttcgcggggctccgggccgccactcagagctatgagctacggccgcccccctcccgatgtggagggtatgacctccctcaaggtggacaacctgacctaccgcacctcgcccgacacgctgaggcgcgtcttcgagaagtacgggcgcgtcggcgacgtgtacatcccgcgggaccgctacaccaaggagtcccgcggcttcgccttcgttcgctttcacgacaagcgcgacgctgaggacgctatggatgccatggacggggccgtgctggacggccgcgagctgcgggtgcaaatggcgcgctacggccgccccccggactcacaccacagccgccggggaccgccaccccgcaggtacgggggcggtggctacggacgccggagccgcaggtaaacggggctgaggggaccgcgggaggcggggcggggcgcgcgggaggcccgggcgacctcacaaaggtccgcggcgaagcacgtggtgcgggcccggacggggcgggggtgcacgccgcgtctcgcgaccctccggccaccccgcgagcttccgccgtctgcgacccgggagtggccggggtgtgggcggcgcggggcggaggaccccgcctcgcgactggggaaatggcgtctggcggcgagataatggcggcctgggcgggagcgcgcgggcggggccggccccgctgcctggaattaaccccgctgtgcttgctcgtcccgcccgcagccctaggcggcgtcgccgcagccgatcccggagtcggagtcgttccaggtctcgcagccgatctcgctacagccgctcgaagtctcggtcccgcactcgttctcgatctcggtcgacctccaagtccagatccgcacgaaggtccaagtccaagtcctcgtcggtctccagatctcgttcgcggtccaggtcccggtctcggtccaggagtcctcccccagtgtccaagagggaatccaaatccaggtcgcgatcgaagagtccccccaagtctcctgaagaggaaggagcggtgtcctcttaagaaaatggtaatgtctgggaatccgagacacataaccctaattcataaatgggatttggggtaggtctttttgagtcgtgttaatgtaagaatgactcctatcattaggagtgctgctcggaggttactcacctttgggagtaatactgaagagaggggtctgcagaaaggatgtgtatgaagcttagataataatggctgtttcgtaaactgtttgagacctattaatgaaaatgactatttcttgctgtttttatccaacgtctgcattttccccctttaaagctgcggtctcctgtttgataaaagaatattggccagtattgcagattttaactgatttggctgatcctccagggaccagtttctgtgggcgtgtattggagcaggtttgtctttaaatgttaaagatgcactatcctcttagagaaacaatcagttcaactattgttgtactgactgggacttcatattctaatggatgtggcaaaagaattgcaataagaagcagtgaacatttggaaccccaaaagaaagttacaggtattgcactgggtggggaaaggatagtgtgtctttaactcttaaattgtttggtcctattttttaaaaaggaaagggccctaagtagctcagatattaaagtagtattctcaattaccaaatgtttcatttgaaacaatttatcttaatgaaatatagaccaattctctgatctcgagttgtttttgtttggatacagcccttttttttttctttttttttcttccccttacctttcttcaccttggttatttggccaggaatacgtaaattcaaacttgtacatgctgatggtagcctttgtgaaattttcctaattgggccttttaaaaacatggctgggtggaacatttctgtaccctactggtttgaccagagccttagtaagtacgtgcctgaaactgaaaccatgtgcactttaatggaaggtaagctgaacttctttcttttcaaacctagatgtatcggcaagcagtgtaaacggaggacttggggaaaaaggaccacatagtccatcgaagaagagtccttggaacaagcaactggctattgaaaaggttattttgtaacatttgtctaactttttacttgtttaagctttgcctcagttggcaaacttcattttatgtgccattttgttgctgttattcaaatttcttgtaatttagtgaggtgaacgacttcagatttcattattggatttggatatttgaggtaaaatttcattttgttatatagtgctgactttttttgtttgaaattaaacagattggtaacctaatttgtggcctcctgacttttaaggaaaacgtgtgcagccattacacacagcctaaagctgtcaagagattgactcagcattgccttcattccttaaaattaaaaacctacaaaagttggtgtaaatttgtatatgttatttaccttcagatctaaatggtaatctgaacccaaatttgtataaagacttttcaggtgaaaagacttgattttttgaaaggattgtttatcaaacacaattctaatctcttctcttatgtatttttgtgcactaggcgcagttgtgtagcagttgagtaatgctggttagctgttaaggtggcgtgttgcagtgcagagtgcttggctgtttcctgttttctcccgattgctcctgtgtaaagatgccttgtcgtgcagaaacaaatggctgtccagtttattaaaatgcctgacaactgcacttccagtcacccgggccttgcatataaataacggagcatacagtgagcacatctagctgatgataaatacacctttttttccctcttccccctaaaaatggtaaatctgatcatatctacatgtatgaacttaacatggaaaatgttaaggaagcaaatggttgtaactttgtaagtacttataacatggtgtatctttttgcttatgaatattctgtattataaccattgtttctgtagtttaattaaaacattttcttggtgttagcttttctcagaatatgtctcggtctttttttcccccatttatttgaaggacctattcaattttgtgattgtggctgactgcatagtatggaagtggaatgtttagtgcctatcatttcctaagttaaagtggaaatgccagttgaacacctaaaagcaatgctttaagtggcacttttcttgaggttgtgatacccccttctcaacctaatttatatcctatttaatgactaaggaacaatccaagtacttgtaatacgtattttaatttttgtttcatatgagtttaagtgttgtctaggtgacatcaaaatctaaggcaaacagacttgaccatcttcagacccactgcattctcaagctgaagtggtctgctcatagtttgtgtgccaggttgctcatcagtattgatactgtcccagaacaggttgtaggtataattcagagactgtcctttgcaaaggaaatgaccagcatttcaactgtatgtcttcctggaagggtagattctgctatatcttctttgtctgcatcaaaagactcaagaggaatgtggacacatttcatatcccatttgtagagtaaagcttcaagtgaccagtcagcacttaaaaaaaaaaagttgttcttttaaagtcatgccttttctgttttgcttcagatgtattctattcttaaattatgtatcgcatgggtagggtagagtaag

SEQ ID NO: 88196 - DNA, 1043 bp, Homo sapiens
aagcgcttccttagtacttggatggttacagctgcttttcctcccccctccctgtcattggtttgccttctgcagttctgttgtcctttttcttttctcataatggacttcagtattaagtacattatgaacttttactttattctcttgctgagtacttggagtcacacttcccaagggtgggagggagactgcaaaacattttcgttgattagttttatcttccacacagcaaactgtcatcaggagcttaaataggacagattttcacggcagtggatataccaggtattgtaccgtatgattgattttgctttatatttgacagtagttgcttaaatctcatcagaatcaccagcaatagaatattgtgattgaataagtggtgatggcattttctcttctcagtgcctagactgagagaacataatagaataaagctgatgagtttaggtttcctgtggaattaggcactaggtttgaaatcctgactctacaaggtatttattgcattgttatcttaggtaagtgtttccgtgagcctaatttcctagttcagacaatgcatgtaaagcacttggcacagtgcatggcattgaataagcactctagtattgtcatgattagaattcccagtcctatagaagatgttgtgattcttgaaacatttggtccttctgtttttgtaattcatgacgattaatatacgtatgtcaggagcttttagatttttgttaaggtgattagtcccaattttacagatgggtaaaatgaaaagaccttcacaagtcactagaaccttgtgattggacctgagaatgtaatatgtacaggtatatatacacaaacaggtttttcttttttaaaattagatttgttaattgacaaatgaaaattgcctgttatttattgtgtacaacatgttttgaaatatgtgccatggaatggctacattgagctgtagaaacagtttcttaatttctctagagttagagattggatcgtggcactcccccgccccccacaaacccataactcatact

SEQ ID NO: 88197 - DNA, 1050 bp, Homo sapiens
gcacaatgcaagtttcagtcctcagagctacagagtcagaatcttgggaagtggtgcccagcttctgtatggccaaaaagctgccctgtgattctgatcttgagtccactcttaaagctgctccatgataattctttagggaagtcagtgctttgctgattgttgactctctcaagagcctaacggttaatcatgccttttgaagtactttgttgttttgtttgattctattttttttcttccttttcatgtttttgttataagagctggaaaatgtgctgaggaaatgcatctgtagaatgtatttaagcacttgaaataaacgttttatttatagggcaaatgtagttcatgccttaagcattttaatctgaaagttatatcccaaagtgttcgtttactggcattattgacaaggggtgttttggttgaaggaagttttagaatgtttgttttattaactaaaatctaattaagtactcttaaatttttgtgtttacagaaaagtcttttaagttatgtgtcaccaaggagatgctccttcttagtattacaactgcttatacaggtaatggaattactgttcttattttctcttgctgcataatgacaataaggagttgaaaacgagccacgttattatttctcacaattctgtgcagtgactggactcagtgaatggttcttctcatggtgtcacttggggtctcttgtggctggtttccttcacgtgtcgccttcactgtggtcagatgataggctgaatatctctctttttgtgtagtctcagagctgctctccatctccacgaccccctccataagatcaccttgtgatctggcaggatagccagacaccttagttaatggactgatggctccaaaaaaggcaacaggaaagaataccagaccttcttaaagctcaggcttcagtctagcccagcatcacttctactggattctgttggtgacagcaaatcacagggttggcccaaattcagtgtggaaggattccacacaaggttcagaaaaaccaggacacgtggctctt

SEQ ID NO: 88198 - DNA, 1069 bp, Homo sapiens
caggagctcagtcagcactgcaagactgcacttttctgaggcaggaggtttggggccctcatccagacaaacacgtagctgcgctgaggactgccgccagcatccatgggatttgtgaaagttagagaaaggctccctctctgggtagccacagccctgcgggagcacatttgtgtcgatgacaaaaggtgccccttcttcctggcaggtaacccaggctgggtgcacgggagcccacgctgacctcagtcccacctgccccttgctggattgccttgtgcagtgaaaaacctacgttaccgtacagggccatcctgctcacttcctttctgagagtctgtgctaagctctctgcacttgtacagttcattctgggctctaaggaactggggtggccggttgggcaggtgggtttcttggggcccagaatctgaagggctcttctctcagtaacttaggggtaccgccaggccggggaagctgcccgctcaccatgcccctgcccttcgacctcatctacaccgactaccacggcctgcagcagatgaagcggcacatgggactctccttcaagaagtaccggtgagagggcggccagagggtgggcacgtggcccacatgccaggggagaaagctcctccttcacgccctgcccccacgtccccactcagccagctgggcccaggtgggagaacatactgtcctgcatcctgccctccgccctcccctcccctcccctgccacttccgtgtctgcctcccggctaactcaatgatatttaataaaccacccagggagttgctccatcacccctctgctgctttgaggctgggggcaggaggccggggtcatctacatggagcggagctgaggaattgaagagaagagtataacggaacaggacattaacctgggctgtgaccctgctgtggggaccttggggtggggagagcagctcagcacacccctctcttcctccaccccaccctctctccgtctggaggaaggccaaggccatcgctccctgtctcactgcagccagtgggatgtggggcttaatttagcacag

SEQ ID NO: 88199 - DNA, 1465 bp, Homo sapiens
ctagtccccattaatcacaccgcgcgggctgcgacccctttaagtccggcttggatgacccagatccaaagtcatcgactctctagctgctatctctatggtaagttatcacttccggccggaagttgctgacggagctacttccgcccaggggagtgggaagtaagtggagacacgtgctttggcctgttggaggggaaacccgctctcgcctcctggtggtcgccgactcgcagtccgcaggatgactcagggcagccctgaccacagttccgccgccatcggccctagcctgcggaattgggctcgccccgggacgataacagagctctgccgggggctggaggcactgaccgggtgaccagagacccagagaccagaccccctccacggcgcccgggatttcggggacggcttctcccatcgcaagtagggcttggacgggaggcgacaaaagagaacttggtccgcacacagccaccgaaattggaatgaggagctgtagggaggccccgtagccagcagaaaagcattggggtccctggctgggttagcccaggtttctaggagtgtggtaagcgtcgaatgacttttgtccttttaaagcacattatgttactttttcccccaaggtttcaacagaaaatgagaaatatcccccgacgattggctgaaaacatgcagcaaccactattttcttcctgcccctcgttgatgagagcattcgaagtgacctcagcagggcatccaggtatgtcaagcatggtgacaaagtgttcaggtcagacggtctggggaaaggctcctgtgttgttgagcctgccaagttgtgggtgcagcatggtaccaggcagcccaaccctgacctaaagtaaattcccggaagaagtctttcctgggttttgaatttgcagtaacaggtgtgagcattctagcagcagtttgatgatcatgtatgatactgcaaacaggacctacgtttaaagaaaatggttgtagttagtatcagagagcccttgcttttcaaaacttcataaacaatgttactgtcatgtctttcattcaataaacatttgttgatacattggcctgacatcatgttaaatgttacggatacagagatgaagaaaacagtcatggcccttgttctctgggaactacaacccagttagggagacaaggttaaatgatcacacttaagagggcataattcagccaggtgcagtggctcatgcctgtaatcccagcactttgggaggccgaggcgggtggatcacctgatgtcaggagttcgagaccagtctggccaacatgatgaaaccccatttctactaaaaatacaaaaaattagctgggcatggtggcatgtgcctgtaatcccagctactcaggaggctgaggcaggagaatcgcttgaacccaggaggtggagaggttgcagggagccgagatcacacacaccact

SEQ ID NO: 88200 - DNA, 1851 bp, Homo sapiens
tgacttcaggtgatccgcctgccttagcctcccaaagtgctgggattacaggcctgagccactacacctggcctgtttatggaatgtaatattgattttctcggctgtagtttagcctgctccttcatgaagcagcgtcttccttctgtctttgcctgttttttgttagcacacagattgagaagtgacatcatcagtgcaattaagtacctacaggggtaagcacattgagtcatacgccgtggagggaatataaagaaaagtatggtccctggtgttaggggcttagaatctagcgatgtcagtaggcactatggaacaacaggaaaggacattttctgttgaacccttcaggggatgggaccctctcggggaagtaaaggctgtttccatctgctgaaatgtgacaaaaggcgggaagcatggaagaatgtggggagctccctagtgagagctgtactgagtaatatgtggctggagggaagggaagaaaagtaaagttggaatatgtaggttgataaccaggttgtagggcccttgaatgtcaaagttcaagtggcttttttaacaagcaggtttctaagggcaacgtggtggtctacagatgacagcctggagaaagatgggttagagccgggcgtggtggctcacacctgtaatcccagcactttgggaggctgaggcgggcggatcacctgaggtcgggagttcaagaccagcctgaccaacatggagaaaccccgtctttactaaaaatacaaaattagctgggcgtggtggcacatgcctgtaatctcagctactcaagaggctgaggcaggagaattgcttgaacccgggaggcggaggttgcggtgagccgagatcacgccattgcacactccagcctgggctaaaaagagtgaaactccgtctcaaaaaaaaaaaaaaaaaaaaaagaaagggaaagatgaggttaggaagtccttgtgatgtctttgagtaggaggtgaccagcccttggctcagtggtacctgtagacttggaagaatgaggggtggctgggggcccattccccgcagggcagaatcccagggtacctcccatgtcatgttctaggtggaaggtggattttagattttagagagtatctcatggagctcacagttttaaatattcagacttggtaaagtagaataagaactgatgcatatacttttctttgcaggtcagtttctggaagacttgtgtgtgtgatgaatgaatatctggttttgtctctgctgggcctgtgtgcctggaaaggaattgttttggcctaggatcatccaggtttgtttggtttagttcttgaccacatattttttgaatggtgactgcttaagaccctgttgtgtatggctataaatagatacacgccaaggtgaccacatactctgtggttcctgtgcccgccggccatgtgtctgagtgtgtagcctctcatcatctaaaggaactttggctgcagaggggaggcctggtcccatgggaagttttgggagcgcagcagcaggtgggttcaaacgacccagcaagtgcctccttagcacttagaggcggaggccaccacgttgtccacgtggggtttctgatcccagctccccaccagcctgctggacctcgggcaggtccctccctgtttgtacctccattacttcttcagtaagatggggacactgaagatgaccatgcctcccaccagattggtgctttttttgttttaataagggacagagtctcactatgttgcctataggctggtctcaagctcttggcctcagttttcctgcctcagccttcaaatatgctggggtgacaggcatgagcca

SEQ ID NO: 88201 - DNA, 1044 bp, Homo sapiens
ttggggtcttgacgggtgctatttgccacggaaagatgccttcctgctcccagggcaggagagccgaggtaagacttactgtaggctgtcgttttttttgtttgttttttgtctttgcgatggagtctcactctgtcgccaggctggagtgcagtggcatgatcttggctcactgcagaacctccacctcccaggttcaagcgattctcctgcctcagcctcccaagtaactgggattacaggcacatgcccccacaaccagctaattttttatttttagtagagacagggtttcacatgttggccaggctggtcttgaactcctgacctcaggtgatccgcccgcctcggcctcccaaagtgctgggattacagacatgagccactgcgcccagccaggctgttgtttttttacctccttgtttgcacaatttgggccactcacaagagtgtataccctgtgataaacagttacctacattctcctctgcatgcttgtctttagaggaaggaaatgtattaattgcccaaagtaatatattgtgttaagatgtgatatatactggggaaaaaaaaagtgtatattgacatttctggaataaaccactttgattcccagttactgactcgttctcctgtgtggtgtctttcctgtatgcagaaggccggcttccccacaggggctgggggtgacttgtctgtccttggaatatgagtctttgcaagcagctgctgcccatgtgcacagttcctcgaggagttggttcaatcttggtttgggagtttgattggaaggattagatcctaggctcccctgagcagtaacatcttatttatagcgtggaaaatggacagagctgttgatacttaggagagctttcctcattatcaccccgaggagagtgcctgagtctccaagaggtcattgttggtctgcaagctcttaaggcagaagagtctgccagtaacagggaaatcaggacaggatgggaatgagtgtcccaaggcagtgacagaagctgaggctgaaccttcccaggaatc

SEQ ID NO: 88202 - DNA, 1068 bp, Homo sapiens
tcacctgcagtcagctcccagcccagtgtaggccatctcctctgtgccctctggtggctcattgtcctcagagcccagacagttccagccactaggaggccgtcttggaaccagcaagtcgcatttgccacttgacactgtccatggggttttattagtagctaagcagcagctctcgcatccacttcagggtggcgtgtggcatgtaggagtcctgcttctttgtacatgggaattgtggactcatgcgtgtgtgtgtgtgcatgtgctgtgtgtgtgcatgtgtgcatgacggtgggggtgctggggggacggggtgagtggaaacttagtttgagtaatgaaggaatcttcacagaagcaaatcagaatatgggatttgtttgccttttacattttgtttaattcctgattttaaagcctgctctatctggtacaggcccttattttttcagctttttatgggaaaagcaggttatttgagaatctgtccagaagttgcataggggatggcctccacgataaggacatgcaacacgtgtttctgtgtgcagcagaggccgtgtttttcatgccaaaccccacgcggctgtcaactgtgtgcgtggtaggcatggagatcctggttgtgccgtctcagctccgctctgaaggcactgtgtgggtgctgcgtgactggagagctgtgtggaggccatgtgtgccccgtgcagggatcaggagggcgggggagggaccgagcagccctcttgcccggtcgggtcagccctagtggctgcctgcacactgtagacgtcccagggcctgtgctgtgatcacctgcctttggaccacatttgtgtttgctcttagagatcgagctcctcagtggtacctgaagcctttgcttccggaaagcgcggtagggttcgtaggtagggctagtaggtagggttagtaggtagggctagtaggtagggctagtaggtagggttcgtaggtagggttcgtaggtagggctggtaggtagggttagtaggtagggctagtaggtagggttagtaggtagggttcgtaggtagggttcgt

SEQ ID NO: 88203 - DNA, 1028 bp, Homo sapiens
tgaagaagggctggggccagcccaggacagaggaaggcgaggcaggcacgcaggaactgggctttttaaacccttaagcccaaggaaatcgtagcatcgcgggacagggaaaatgaaagactttggaagtcgtcaggaatttgactctgtgagttggtttccaagagtctaagttaagcatctccaagtggatattaaaaaggagcagcaagcctcggggcggcgggggctggaggaggtggagagaggaggctgccggaagccgcactcgggacctctgcagccaccgaccagaccgggcggccgggactctgggactctcgcaggcagacccggtggtctgccggactcctcggggcccacttcgggccctctctcctgcctcctatttttggatttctctcctttgctccctttttcctcccgttttgaagagacaatgctacttcagtttggagcacaaacatatgatcagcacatggaaatgtggtaattcggatgcattcgtgattgcaacagattgaagaaattagaccagacaaagagtgtttttagaggaggaggaggaggaggaggaggctgagagagggagggcgacgggggtgagaaaggggaggccgcctctgagcgggacgccgggactcccgccgctgctaaatatatccgtaggaatggagagggaccggatctcaggtacgcagacagccccctccccatcggccgccccccactgccctggactcggggctttatttatgcctgggggaataagcatgcaaagggcgcttttgctcatttttcacagaaatatttcttttctttttgacggttccaagctcgtgggatgaactccgtctcagaagctaagctctcctgagtctggcttttatttaaactcggctctcctctctcctggctacttccctttcattttccagtgtgccattcttgcatgtcatggccactgtcaatgctgaggctgttggcgccgaaaccttgggagggtgtgggggacctgcccccctggc

SEQ ID NO: 88204 - DNA, 1059 bp, Homo sapiens
gtgtcttcttccagtaacgcagacttctgcacgtgttctctaggagaaatcccgtcactcgctagagctctagatctggaagaagctctgcctctcttctctcctccagtgcagtgtgtgtgtgtgtgtgtgtgtgtgtgtccccacatgcattacacccttctacagaggaaataattcccgtccaagtgcaaaggttgggattggagcaggcagcatgtgggctaaaggagcagagaggaggaaacgggggcgggggtgagggtgggaacaggaggtgggtagatgccacgaggcatgccttccacaactagaagggctggtggagatgaccagaatgctccagacagaccttttatcaaacttccaaaattcaatcttgtttcatgaagcctgaggaccctgcagagtgaaagacaaggaagggctttcctgcaggggggtgtgtgtgcctgtgtgtgcctgtgtgctgtgtgcccccatgtgtgtgcacgtgtggacctgtgtggtgtgtgcctgcacatgtgtgcacgtgtggacctgtgtggtgtgtgctgagtgtgtatatgtgtgtgcctgtgtgctgtgtatgcacttgcacatgtgtacacagatctcattttccttttttctggcttactaagtgccagaaagaatttccgtgagcctctccacccttcccaaggctgcacatggagggacttgcgcaggcacatgtgcgcgtgcacacaacacacacacacacacacacacacacacacacacacacacacgagtcaggggcgagcactcctgtggattgtacctaggcctggcaggaaaccgggttctgggaaactgtaggccccacctttggcagaaaaccatgtttttgttgctgctcgttgaagggaacattaagtggggctggggacagtttatgttgagaagagcaaattttgcctatggcactggggacattgagtggctcctgtcccgggctctggagggcttgggagacacgtctgcagctctgggcatctctcaaggtcacgggcggccacactcaaggttaggccc

SEQ ID NO: 88205 - DNA, 1022 bp, Homo sapiens
tctgatgtgagtcaggccttgagctggttggggtctgggtcccactttggttgtgttttgctgtgggcaccaaggaagcttctagcagcctcatctccctggtatgacctagctccagggactggatttccccaaatgctcctgcccagcctggagcctcctttccagctgggggagggctgaacgacccctcactcttggaggctgccggagcccctcctgcctgcatgcggccgctgccgggtggacaggcctgcttgtgggttgaggctcccagcagctggggtggatcatttctcctcccaagaagctttgggagaagcagctgagggggccagcgtcctcctgaggccaattccctgcctcccccagcgcaggcgcgaagccatctttgcttgtgtgtttgccacagacagtggagggcggtgcaatcgtgacgcctgcttgttgcactttgcgtccttgaggacgttgacccctggccggtgctgggcgcttgctcttcagtcatcttgccctgacctggcgtggcaggcccgagcactgctcttttacaaggaaacaggctcagaggccttgagtcacttgcccgggctcccccagccaataattggctgagccaggatttccatccagctctgtgactccagaagtccaagttcttcccatcacgtcagggccaggaaaggattagaatgcttttctacgtgccgattatttggatgatctgtgcagcttagctcgttgtagttgctcaataaaaatgtggaatgaatgggcctatatgtcccattgtgtgactcagagccaatgactctggctgatcctcctgttttcattccgtggcccagcatctccctttggggtgtgtgaccttggaagcagtgactctctccatcccaccttgaatggtgtctgcgccgcagcaggggagcagctggggattgccagcgcctgttgctggtgggctgtgcgccagatcccgtcttggatgtgtgggtgattgtcagccacatgtgtgt

SEQ ID NO: 88206 - DNA, 1161 bp, Homo sapiens
ggacggggtgacagggagagcatgcaggagtgggtttctggctttccagggcgagtggaagaagcgcctctctctcttgtaggtgacagacctggggggcccttcttgaggatgagagcctgttgcttctcaagttctgtgtctaacccaggtccccaggtctaccccagcccctcggccctgcctgccttgtggatgatatagtttaagggtagagaccgctggcctggagggaaggctaggcctcaggttagggcccagaagggagggagaagcccttggggcagctccctttctgctcactcactgcctagctccttccttcacaccttccttcggaaacgtctgctcctgacaaggtctacttcctgctctcaggaggcccttattgtggaggaagggaggcgtcgcccgtccctggcttctctgacagccgtgttccatccccgccctgtgccccttctcccggacagtgccttctccagggctcacccaggagggtgcagcggtggcccccggggcggtggtcgtggtgggggtgttagctgcaggggtgccctcggtgggtgggagttggtggcctctcgctggtgccatgggactcgcatgttcgccctgcgcccctcggctcttgagcccacaggccgggatcctgcctgccagccgcgtgcgctgccgtttaacccttgcaggcgcagagcgcgcggcggcggtgacagagaactttgtttggctgcccaaatacagcctcctgcagaaggaccctgcgcccggggaaggggaggaatctcttcccctctgggcgcccgccctcctcgccatggcccggcctccacatccgcccacatctggccgcagcggggcgcccggggggaggggctgaggccgcgtctctcgccgtcccctgggcgcgggccaggcggggaggaggggggcgctccggtcgtgtgcccaggactgtcccccagcggccactcgggccccagccccccaggcctggccttgacaggcgggcggagcagccagtgcgagacagggaggccggtgcgggtgcgggaacctgatccgcccgggaggcgggggcggggcgggggcgcagcgcgcggggaggggccggcgcccgccttcctcccccattcattcagctgagccagggggcct

SEQ ID NO: 88207 - DNA, 1029 bp, Homo sapiens
ggcacctccttgtgggaccccttgggtatgagggagggagccacctgggccacagatagacccccttcctgtatccaggaggttcaggatggacctgtctcatctttctttctggtgggaagagagcattcctggccatggggaatgtggcctggacagagccacctagcctctcccctcccccaggcagggccctgaaagatggagatggctctgctcctgccaggtcaacagccagcagtctggtggatttccatgcagtccaggcaggatctccttctgtccccaccccccaccccatgtgcaggaagctggttccaagcagggacccttggccccgctttccacgtgggtgggcagtttccctgcgaggggcaggccaggcccctgccctatgtcccccagagaccgatgttatctacagtaagagcatacaagtctttttggctccaaaccaggcctggaggggtggtcttctcctctgtcctctgcctcttgccccccattaaaggtcagggaatggagtgctctgtatgtttgctggggttgggttttttcctttggtttaaaatgaagggctggaatccctggtgcagactgcacggtgagaggtgctccttgggatccactcgaggagcattactgctgaatgccctgccaggccaggagcatcgctgggggtgggagaggcagttggcttatttgtttatccaacagccatccatgggtaccccaagggccagctctgttctaggcactgggggtctaggcatgggctcaggagaaggggtagaacgggagggcttcctggaggaaggcttcctaaccagagaccggggtaggagtttgccaggcaggtgatgctggccagcttctcttgccattttccttttctttttttctttttctttctttctttttttttgagacagagtttcgctcttgttgcccaggctgcagtgcagtggcgtgatctcggctcactgcatcctccgcctcctgggttcaagcgattctcctgcctcagcc

SEQ ID NO: 88208 - DNA, 1078 bp, Homo sapiens
tcaccctggagttcagcagaacctaaaccaggcagatccgtgtaggttcacgtgggggctctgtggccactgtggctctgccgtcacctccagcccagcttggcgcgctttggatcatgtcattcagtgccggtcctccaaacctctcccctggctctgcaggtctgggaagcagctggctcctgggtgcagctgtgaccggagcctgaactctgctccctggggtcaccgtcccctgtaattaggctgcagctcatattggctcgggcagaggccatcggctgcccgccttggggccacaacacagagagccccgtgattaatggaggctccacctgggccaagtggcccctggtgttaggcgcttttttttttttttttttttttttgcattttttaagtgcttgtaacatttcccctaatggacaatgagacgaggagggagggaggggtggcttctctgcccaggcagatcaggaatggtcaccgcctgtgtgtgcagtgacaggtctgggaacagacaagggagagcttgtccgggaggctggaccctcacaccgatgctgcctgtgcctggcagctctgtcccgggcctcagaacagacactgaccaacacgctcctcagggtctccaggtccgggtcctggtccccggcagagcttcccatccatgggaagaagcaccgagcagccttgctggctcctcgcagggagctgggatgcatttctaagagcagcatgcgtgaagcccggggtctgggcaaaggagtgtttggggaagagtctgctgttgttggagggtcggaagtagaggggaaggaggggcacgcggtaggctgaggaggtggctggcgaccctgtggtggggacgagggggctatgagcagaccaggagccagcatcacgtttctctgtctccagaatcgaggacggagagctgccagagaggccctggcggggtgtctggggccacctaaagggcgtgggtggattaaagctgaggaaagcctcattttgggggactccgtacttaacctttgaggccctcagagctgcagcctgtggtttttcgaagtca

SEQ ID NO: 88209 - DNA, 1139 bp, Homo sapiens
agagagaaagaagcctcctcctaacacttgagcaaagatagtcatcagaatccatcagagtggcctcctgtggctcttccctgggtgctgacccccctggtgcatttgaagttttcagggatactattgacgctccctgcacctccatccaggggttagtggaaatggttcttttcctccttgtccagaggtactgtggatgatgaccccaggtcccagacctcagtcattgggccacgtgtgcagataagcctgggcagtcagtaacctttggccaccaagctggcctcctgcggactgggccggcactggaggcgggtcttagctgctagcactgtggcccagccaggcctggccttgggaaggcagagggggaggggactgggaaagggattgagctgggggtggggtggtaccctggttcttccctcccagacctttggcaggtttgaactatctggctgcggctctctaaggagggagcgcctcctccgccttgatgtggactttgccttctgttcacgttgtccctgtccctaaacaaatgtggctctctgtggggagcctgggggccgccctccactgacactgctgtttcctggcttccctttgcaggctccgctcagcttcactgcgcctatttttaagcctttccttttggacggttttgcttcctgagaacacacccctccccatcaccccaactgtgtcctcctccctatccggagcctgctccacctgccccaggagccacctccctcctccaccaagcagcccaggccaattctggagggctaatttgtgtccctccagaagcaggtcctgagacagggatttcagtgggaggggacaccaggggatgcctgagtgtgggaatgggccaggcagggaatccagccaataaagggtgcctcaccagctcattgtgaccacaggtggctgcccagcccccataccgggcagcatggggagactgcagaccgtgcccccagccttgtcccacctggggttgggtaagggagctggggtttttatacttcagttcttggccaaggactgcactgctcactccttccagccttccgagggcttgggcactaggaaaggctctgggtggagacacggaaataggccatgtg

SEQ ID NO: 88210 - DNA, 1058 bp, Homo sapiens
ggtcagcagattgagaccatcctggctaacacggtgaaatcgtgtctctactaaaaatacaaaaaaattagccagacgtggtggccgggcacctgtagtcccagctactcgggaggctgaggcaggagaatggcgtgaacctgggaggtggagcttgcggtgagccgagattgcgccactgcactccagtctgggcgacagagcgagactgtctcaaaaaaaaaaaaaaaaaagaacaatatcgatggttttattccctgaacatgctaagtgatccccatgtagtataagcatctcagaaggcaggaaaatgtaatgaacaacacccaccgccattcattccatccagagatcgttattttctgcccgggtgtgagtgtgtgtgtgcgtgcaaactgcacatgtgtgtatgaaatggaattaggatctttgtatacatcttgtgtcctgctatttttacttaatattctcggcatttctcatcttcaaaaatgtgattttaatgatggtgcaggcctttgacatatgggtttagaaaatctgcggaaacccggactgtttccaggttttgtcagtttaatgctgatgcaaatgtcctcgtacgtaaatctttctgtacttctgattatttccttgggataaattcccagaagtgggccaaagcacatgaacggtcttcaggcttttggagcaagttgagatcggtggggattggagaagggacccagggaggcttttgggagcttgcgagattggagtctggctttaggggacttgaattcacagatgaaggagatggctggcaaaggtgggaacctcctgctctatgggtgggggggtgacactgctttaccttccagtgacagcatggggatcctcccaacatgacctggctccgcatctttctgacactgtgcacggtccacagttgtgatgctcagctgggagcctcttctgtgtccttcagttgcattaactccttgcagacagaggaggaagctgtccggtgctcctccctgctgcgtgggtcctttgaatctgcccagttgggcctgtgg

SEQ ID NO: 88211 - DNA, 1134 bp, Homo sapiens
ctctcagacctaggtctagagtgggaagtcccgcatgtgctgggggaacaggaatcaatgcgggaggattggccaggcccggtgtgtctccttcgtggtgggacggggtggggccagagaacagagcctggctccagagcccaggaagagaacccctcccctcgccggcctgccaagcaccgtgcagtggtgagaggaaaggagggctggtccgggaatgcagcgggtgccgagcagctgtggaataccttaaatagagcgcagctgcggggaagggtggggccaggaggcaggcgctgggggcggtttctctgctccgccccctgcagctctgtggccctgaccacccagcctggccccaggatggagccccggcccccagacacatggcactgggtgaggccgcctctcagcacttgtcccaggaagtcagagcagctgccagaagagagaggagctgtgtctgtacccgccgcctcccaggcccgggacagctgccgggattgagggtctgcacaatggcgagcctgtccggaggggcgcgccgcggccagacagccatgctctgtgcggtgtggacagagggcacattcagccctggaggagcgcactcagactccccgcctcggggcccaaagtgtgggcagcccctaaccagaccctggattccagcagacagcctgggaggatgccatgtggtccaccctgacacactgtctcacctgtgacctcatttctgagagctgcagggaggcgcttcctcagttggactccacttcctctccggggttttctgtgggtgttataagtgactctgtctccttcagtccaaggggggctcctggggtatgggctgtaactgacaggctagagtagcccatggccagggctgagcttccttcccgttctctctgaacactgggcccaggaaggggttaaagtggagatgctctgattaaagttgagggaggcatggagctcccctgaccctgtccccccatcccactgctgctactgggtgtactctgtggagccccaggactcttaaagaacccagagtggagattcccggtctcatccagtgcaggtgagggggaaagtgatttgtccacagttacatggctaccatcagca

SEQ ID NO: 88212 - DNA, 1053 bp, Homo sapiens
tagcagcctgccctgtctcttctctgccgatgttcctgaaactttcctgcctctccttacctcttggccagagagagactggagaccctgtgggaacccccgaggggagggagaaggccgctgtttgaacggaggtggtctttccctctgcccctccccaggcgggtcacacttgcaggcccagcctcctgctgtggcagcgcttggggtgtcggctgcctcctgggcacgagttgggagctgagggaggcgctttcaggaccggagtggcaacccagctggaggaggagtaacaggcccgtggtcagcagcagccgccgcagggaccccggcgctgtacctgtgccccagctgacccctcccgcttccctagggtgggccggggatggtggtctgttgcccagcccaggaagaagaggggccgtaatcagcagcagccacctcaggggaccccagcgctgtacctgcgacccagctgacccctcccccttccccagggctggctgggaatggtggtctgttgcccagcctaggaggaagaggggctgtggcttccactctagaggtctctctcccggtccctcccccggtgctggtctaactgcaggcctgccttaggccgtgccggcacctgctgactgacgcttagcggatgctgataggagagggctgggatggggaagcagcaagtcccggtcactgtgggctcgggttacagatggttgaggcacctcctggccatccccaggaagcaaggccccacgcagcctccgactcacccactgcccgtgtgtatttcaggaggctgcatcccccaaggcccccaccaggtaacttcattgggctgggtgtcgctgcaaaaccacccattgggtgcggtggtcttctggtggggggcatggctggggaggatgcggtggaggagaagccagctccgtggttggggggagggcggactatccgtttcctgtctgtcccctgaactggagctcatggtccctcccccaggtgcctgggccatggaagaggtcacagccctgccttattcctgtg

SEQ ID NO: 88213 - DNA, 1041 bp, Homo sapiens
tgtcctctggccaccctggccttggtgcctggcccctgtgaaacagagatacctgggcagtcccccacttgtgcttgcaagcctgtgtggcttcagtgatggctgattctgctccacccagaggacctgggaatcctcagcccaactgtccagaggagtctttctcagtggggagagcctgagctgtcctcctggtggacagtcctttagatctcaggcggacttccctgccggccgttcctcctgctgcccctgctcctctgtcccccatctgtctcccaccctctcccctgcagcagccagctggcacggggacctccccttccctctgggattgtgaatgagacgactttcctggtccttctgggtctagatctttctggcaacagtcagtgaaacccttgtctcaggtgggaggagaaggctcagtatgtggtcacaacaacggtcctaaccacatcactctcaaacgctggctttcacttaccccttgccctgcccaacagttactttcatcatcccattttccagattaggaaatcaaggcgcagagagcttcagccacttgcctgaggcccccacagttaagtgtctggatttgaaccctggagcagcctggctgctgagctgtcctggagacggggtactgtgcagtggtcggggtaggggtggagctctgccgtcgctgactcccgggctacctggagtgataacacagcccagtgtctgggcccctgcctgagactttggctggatgccaggagcccgagaccttccagctctttcctgtgtaaggcgccatggggtgaaatgaaagaaaaccccagttagaaggtgtccccctcttccttcagtccctcagctgccctggattttgaaataagacaccgcccgtctgtggggtgagcaggaacagattggaaccgcatttctctccccccagtcacagctgccaggagctcatctttctctgtctcctccccctgccgcctctccccacaagactgggctggatgctgctgggaaagtcaacaggaagtc

SEQ ID NO: 88214 - DNA, 1052 bp, Homo sapiens
tggcagagaatcagagagggcatccaaaaaggccaacagttcggtggggagaggaggcgcaaggctggttcctgttttctgggctttgatcgaaagggaacaggggacacatctggggacagtctccttcctggaggaagaagggcttagggtgctggtgtggagtttgcacagatggggataatgagctggagggtgctgggcaggagctggccagtaataggctgacgagggaggccctgctggctgggcctggttttcaagtgagcatcctgagctgcggggacccagggggtcttagagacctcagagctgagactcgggaccacagaggggtgggctgtgctcagggcaacacagcggatggggcagatgttgcgaaacctgtctctctgcctctctttctcctgctacagaactggatcctcccagctcatggctgtcaaatcctttagatgcttctgggttccatgggcgccttacactggcttccctgtaggacagcagaccctgggggttggctctgatggtattcaccatggggtaccccatgcaagcacagtgctttcacgcccagcctcccagcctgtggagtaggcctgtgtctggccagcctcactttgtggccagaggagggagacagtggttctggagacaggagctggcctggggctgccctcccagcccctgttctcccagctcatctccttgccttgcgggtgctggccaccctccccccgccagctccatccccagctttctctgcccgagccgtgacctgtcagtagggggcagtggaggccttgaaagtccttggagaggactttgaagcagtttttacaaatctgtccctggaaagtctctcctgtcacacccccagcggctccctccctcctaacatttttcctggggttgtcatgcagcggggggtggaggaacccactaggccgtggatagagcagagccatgttgacacaaaccctggctgaacccacatgctccctacagccagcggccgatcactggaaccagggaagtgacctcatagcaag

SEQ ID NO: 88215 - DNA, 1029 bp, Homo sapiens
tctcattcacttgttcatttattcatggccgaggccccgtctgtgtcaggcctggtgctgagaacgggggtagagagatgggggctgtgccctgctccctgacccaagggttccctttgcaatgtgaagttcttggagactggaccctcaggctgttccaccagcccctcctcaggccagcttaacccttccgtgctcgttttctgagctgttagaggaagagagcgggaggaaggatggagtggggtttttgtggggactgagcggggggtgtgtgaggccctggaaatggtgcctgcggcactcacgcagcattagcttttgctgcagttgctgtttggagaatattcttggatttcaggacactgatgacagaaggtggaacgctttttctggaagccatcaagaggggaccaccgcggcggctgagcagagttgctgacttgtgagctgtggcctgaccacagtcactgttctcatgagcgaggccccctgtggtccccctcccaggaatttctggccccttggcaggggacagttcagggctgggggtgggtagtggtgtctgcaggccctcttggagtcagagaatcccctgtcgccgtggcggggctgttccctcctgcccctcccctcccgctgtgctctcagctgctccgacaggatgcttttggcctgagagacagaaaccccaactctgaatggcttcagccctcaagagaatttggagcttttttgtgcaaaatgagatgttctgagcatcgaggatgctgtgggggatcctccatcccaccatctccagccgtggtgtccctctcggtcacaggatgctgcagccacgttgcagggaaggagagcctcccttcctgtgagcctagggagcccctccatgcagccccttcactggccattgcctgagacccgacctggtggctcctgccccaaggagcagaaagggggttcgctaggtcagggtggggctgggtgcgaggaccccccccggccaacagggtctgcttaggtgtccgt

SEQ ID NO: 88216 - DNA, 1037 bp, Homo sapiens
gggtggcctgcccggcgtccgcacagggtctgctggtgggtggctgaggctgcggtgaggtctccatggctccctcgtcctgcacatccttcccttgttgtgttgtctcgctagcatatgagcccgtactgcctctgagtctgcagcctgttttccttaccaggtggctaagcagggtggcagccagggtggcagagtcccattggcctgcaggggaccctctgtgggctgcaggtagtcccctgtggttgaaggtgccctggcaggacctgcaccatgacccccgtcaaagctcacgtccaaggcatttgtgggcacccccgccccagacgtgagggttggcatcttctcttgcacgtgaagcaaaggcctgtttgaaggagcgtgtggaagcctgggtgtgatgaaggcaaggaccggtggctcacccctcttgcacctggaccttgggtggcaggcctggggccttcagtccttaattcaggagggtagccagtcgctggaactaagagtgaacttcagctgttgttgccatagctggagggaagaggggaaaggaggcgctgcaggggagcagagacctcacccttcctctgccgacatcaggctgccggtgctggacggggccctggcaaccgtggcaggagtggtgatgtccgatgatggtaacaagggcttcctgaggaccccgagctgtcttaagggctctttacctggagtaagtatcccctttaatcctcccaacaacactgtgaaattgattctgttgttattcccatttcaccgatgaggaacccacagcccagagatgttaagtaacctgcccaagcctccctctgagcatggcagagggagggtccgaatgcggaaagtctggcttcagtgcccccatccctaaccactgtcatttacctcttcggccagccctctgattgcaaaacctgaggcccagaggagtgcagtgacttggccagcttcgcacggcaggttagtggcagagctgagcagtgtctcccatgccctgattctgtggcttc

SEQ ID NO: 88217 - DNA, 1062 bp, Homo sapiens
gctgtgggataggctggccaatggtgctccctcccctgtgacccttctgttgggtgggtcacgaggaaggactgtgggtgttgcccacagacaggtggacatgtggcaaggacaccttgggaccttctttctgacgccccttgaagggggcactttctcagctttgagatgagtctctgtggatgtgggaagttcactatctcaagagcagcagccttggaaaatccaacacagaaccccgagtaggggcgggaaggggtcctgtcccgctcactggctgcctggcagagttctgcacaaggaagcgcctgtgttgctgtgggcggaggaatggactgagggctacattcgcttcctgttgccgctgtaactgcttatcacaaactcagtggcttaaagcaacagaggctccttcctttacagtgctaagggtcagaagccgatcagtctcaccggactaaagtcaaggtgttggcagaatccattcctgcctcttccagctttgggtgggaggctctgctggagttccttggcttgcggctgcatccctccagcctctgcctccatcctcctacagcctcctccttctctgcagtcagatctccctctgccttcctcttttttttttttgagacggagtcacccaggctggagtgcagtggcacaatcttggctcactgcagcctccgcctcctgggttcaagcgattctcctgcctcagcttcccgagtagctgggattacaggcatgtgctactacacctggctaatttttgtatttttagtagagacagggttttgccatgttggccaggctggtcttgaactcctgacctcaggtgatctgcctgcctcagcctcccaaagtgctgggattgcagccatgagccatcacacctggcctgcctccctcttaaaggacgcttgtgatttggggcccacctgggtaatctcttcatctcaacatcttcagttacatctacagagtccctgttgccacatgaggtaacacagtttgggaagggagagttattcagcctaccctaggggcctgtggtgtatc

SEQ ID NO: 88218 - DNA, 1016 bp, Homo sapiens
ccctctgggtcccagcacatcccaggcctgcagggagggggagaggaagagactgactcactggccaggtcccccaggggctggagaggctggagaggcaggagctggatcagatctgaatccagaggctctcggaggaagagctcagggtgagctgcgcccccatcccctgcccctcctctcctgctccttctcccttccatggtcccagccagcaagcacctggggtagaggggacaaacccaggtggctgtgttccagccctggctgcaggtctgaatggctttctggggtggctggccatgctccctgagagcccagctgtggcgatgtctgagcaggtaggtgggggagcacctaggaagcaggggtgtcaggcagagcacaaggagagagggtgtccaggtcagtttcaggacctggctgagaggagggggctcctcacgggcaccgcctctggcaagcacagggacaagggcaaggacggcatggccagaggtccctgggagcctcttcccctctcttcttcctagcagctccccctcactcttcccagggaccctgtcactttcctttagcgtgtggcagctccttggcgtccctcccgtgccttcaggttgcttctgcgccgggcctgccgctgggcgcccctatctctgcctgccccctcctcctgctcccctcgccctgcccccttggagcaattccccaccgagcctcccttcccaggcagtcgaggtccctccctacctctgccccgcgctctgggaggctccttgttccgcgaccacaaagcccctttgatcctctgctcggctctgagccatgtgacccggtgggcgggccgcggctctcggcgcgtccagcgcagcccgacgttccgctgctggggtgagtcctgctcctttgttcttcccagccttgcaccactggctcgggggctctcaggtggcgcggccgcgaggcggaccctgatggccatggtggcggtgccgggagccacgctgtccctgggc

SEQ ID NO: 88219 - DNA, 1031 bp, Homo sapiens
tcactcatccacccatccactcattcacccatctatccatccactcatccacccatccactcattcactcatctgtccatccactcatctacccatccactcattcacccatttatccatccactcaaccatccactcatccacccatccactcatcatccgtccactcacccatctatccacccatgtatccatccactcatccacccatccactcatctgtccatccacttatccacccatctactcacccacccatccactcacccatccatctacccatcctctcatctatccatccactcatctacccatccacttatccatccatccactcatccgtccatccactcatccacgcatccactcacccatccatctacccatccactcatccacccatccacttgtctactcatccactcacccacccatccactcatccacccattcactcatctactcatccactcatccatctatccactcatccaccaattcactcatccacctatctactcatccacccatccatccagtcattcatccatttgctcattcatccgccaacccatccattcacctgcctgttcatccacctacccatccattcatccatctgtccatccatccacccacccactcacccattcacacacccatacacccatccatttatccaaccatccatccccatccttacttcagaaagcatttgaagttgctggggtgtgcacttggaaaatgcgtcataagctttcataggcctctctttggcttcctcacttctttgattggtctttctttcggacatgcaggattctgagcagctcttctgggaggtgggtgcagtccaggtaggctgcctgcaaagctaggaccgagggagccacatccaaggcactgtgggttcccaaggcgatggcactgtgggcccactgcttccagacctcctcaactcccaggctcctgagcaggaggactcctggggcagggcctggagacgggaagagaaaacaattccagtctct

SEQ ID NO: 88220 - DNA, 1057 bp, Homo sapiens
aagcggccccaaagccacatggtccatggccagatgcagggctgtgtctttgtttatttaaaggtcctggaagcccaggggagagtatttctgaagggggagcaggagcaggagcaaagccctgaaggcttccaggctgcgtggcctgggtgggggccacgtgggggcacagagagaggagccctggcctccaggtccgcctgtgggtattgctctcagcagtggagatgtgtggacccccccttggcatttcccaacaaggaattatattgttcctttgttcccccaattccataagataggaattcctgtgccctgtggaggctgagaagacggggaggtgcctgtgaggataaaccagcccccagtttctggcttccagagtcttttcctctctcacctctgatgcctcaggcctggggagcctccctccgacaccctctgaccgctccagtgaaataggccgagagggatggcttgaatcggctggggatgcaggctgcagccagggggctcagtgggcatttcctgagttcggttcttgccccgcaagtggaagggcagttgaactgaagtctcccactgcccctcctggcctggaagcctgcctcccaccttctgggcagagtgaggagtgggcgtgggccgggagggctgcctcctgtctgggagggctgctcacttgcctgtcacgggggatgagccccctgcagcctcccgtgctgtggccctggctcccacgccggctccactcccctgtggctgcccctgctgggtgcccaccggtcccagggaaaagccactcccctcccggaggactggcgggaggggccctgcctgggagcgtgccgtgtggtccctgtcttagcgcaggatgcctgaggccagatcctccctgggaggcaggatggggcaaaagtctccccgcaggcagagcagggcctggatgggcccaagcagggacgggggcacagaacagcagccgcccagcctgcgtgggagctgagggccaccaagggcagctccagcctgtggggactagcagaggcaccacctc

SEQ ID NO: 88221 - DNA, 1050 bp, Homo sapiens
aacccgagcctggggcagcacacagtgtggaggtcatgtggcaaacaccagtgggtgggtagagcttgccacagggatgggcccatctctctccctccttatcccagatcaccgcagacctgctgtccaacggcatcgacgtgtacccccagaaggaatttgatgaggactcggaggaccggctggtgaacgagaagttccgggtgagtggatccactaggatgttgttcccaggggacccccagttcctgctgaagggtgggttgggggtttggaggaccttaagccatgaaattatattcttggggccagagggcactgagcccaggtgtctgtacccagtgctgtcaggctgaggctctcgtttttgggggaccccaggctcagggcagctcctcccgggggcccaggggagggaattgccttcccgcacatgtgtaaccaataccgtctgcccgttccccaggagatgatcccatttgctgtggtgggcagtgaccacgagtaccaggtcaacggcaagaggatccttgggaggaagaccaagtggggtaccatcgaaggtactcgccgcaggcgccggggctccagacagatgggaagacagtctcttctgctgacccagagcctgtgggccacgcctgagccagggactcgtggaacctcatccactgccttgccccacccagagggaggggtctccttgtccccattcaacccttgggaaagtgagagggcaagtggcctgtgcagatgcctccaccccagacctccccccgggcagggaaagattcagggagacaggagctgggatgggggccgccaagttctggatcctggtgcaggctctttcataggcacctgtgtggccctggacaaatcgcccaacctctctgggcctagaaaaggggtgggctgtagctctgtgagccagatggaccctcggccccttaccctgctgaagttcctgggaccctcacaccttagtctcttgagtggctgttgtaaccaattagcacaaacgaggggacttaaaacaacacaaacgta

SEQ ID NO: 88222 - DNA, 1041 bp, Homo sapiens
ggtaacaccctgtgggccacaggttttctttaaaatcccagctccgattcctgcttcatcccattcccagcagcccagccccctgcctgtcttcaggcccctgctgggacgtcctgctctccctggtcaccccagtggtgcgggggcccactgccctggcttctccactgtggcttccttccatgctcctatttggcctggtcactgtgccatctcccattagccaggaactttctggagagcaggagctgagctgtccaggagcaggagctggtgctggtcactccagtatcccccagactgagggcagtgccaggtgtcctatactcagctgcagagcaggtggttcccctgccctcctgcccatggggctgccctcagactctgcttttggcaccagcatttctgggcagggggagagaggtggggtccgggcagagtttctccactgggacattaaagcccctcctgtctcctctcctagttgaaaacaccacacactgtgagtttgcctacctgcgggaccttctcatcaggtgagagacagggtgcttgggtggggctgacggcttcacccctaagagggccctacagcgggtgggggcagtgggtgtggggccgaagccctgggcagagtgggtgccccctgccacctgcctgccctgccctcgggaagatcttggaagcccatcttctgaaaaagaaaacccactgggaaatgaagcaggcagtgaagatccttttcaacccctgcgaagttggctggatgggaaggctgagctttgatccactgtggtctggcccgttagagctgcccggtggccactaagggcccagtgaggcctcatgtgcaggccctgccggcagcgtggggcgtctccagctccgatcccactggcctctgacccctacccctttcacctggctgaggcttctccttgtttcccttgagtccaggcaaggaggggaagccctgatggagagggtgctgggtgggtggtccctggagtgtgggccctggcctgggcaggttcttcctca

SEQ ID NO: 88223 - DNA, 1874 bp, Homo sapiens
cgagtgagtcagtgatgaggccgcggcctccccgaggttgtggggaggctgcactggagccacaggcaggggtgagagcacccactgaattgacatgaccctctgtccccaggcctggctccccgagggctcagaagagcagcttcggtgtgcagatcatccgtctgtgtggggttctcagtgccggaggccttggggtgggggccaggcctcgcacttgcagaggagcccagtgggctgcacgctcccctccatccccatcggccctgtcccctggagtgtgtcagagcccaggggagaatgcagcccaccaggagcacctggaccccctgcccgccacatggtgtggccatcactcagcccctacccctgccctgctcctaagggtagaaaactccagggtcccctgccaccgactgcccagccactccaagccccctggcagctgcccctcctggagcagaaagtgcctttatctcagccatccgcagactgcttggccagatgcggggacaggctggaatgagggaggcgtcttcatctccctgccatccccctctcacgccacccccgcccccaccgggctgcaggtgctgctgatgcgctgggatctgattgaggataaaaaggaaggagagatgacccctaccccctcatcccccagttttgaaaaggtctaagcaagtgagtctggtggaggagctgagggagggagccatggaaggtgccagaaggaaggttggcgggggcacgtgtgggccgtggcttgggctggtcagagtggcgtgagctgcccggcgcctgccctgcccaagtgaccagggaagtgtgtgtgtgtccatgtgtatgcgtgtccgtctgtctgtctagtgtctgggtttggcccaagactgggctgtagttacattaatgcccagccagccacccctgccactcacccttcctggcccaggccttgctgactctctgagctggggaggtgggaggccaggcgagcctgactctgttgatctacccgtgcctgggcccctcccctcagagcccatggtaacgaacccctagaaaggagagaacgggcgtcaggggtgcacagtccacagctgaagagcaaggtttcgtggcagcacggcccggcccctcaccctctgtccccacgaggggacccatgggggctgtctttgcagggcacagatgaccaaagtcccttcctgcttcctgttacctgtcttgctcctggggagaaagaggggcctgatgagactccactcaggtgcacacatcaccaggtgcatctgcaggcaccgggctggctgcttgcagccaggagaaggtcagcgagaaggagtgtatgagtgtgagtgtgtgtgcatggaagttggggcactgggcgtctgactccctccccacccaagagaggaaggacccctcaccacccccactggtgagacagtttactttgccaacttgccatgtttttgccaaaaccaagattttgaaggaaatgagtggccagcgccagggcccaggccatgtggcctgcccagcctcaatgtcacttggtggcggggtggggtgggggtgggcagcagcatcccagccttgagatgcttcactttccttctctgtaaccagactttgaaaaattgttcgtttcatcaggctctgttcctcaatggccttttgctacgtgcctcccgagaaatttgtctttttgtataaatgacaaagtgttgaaaatgtatttcctgaaataaatgtttcaaatgcagaaacccagaaggctcctgagtgagaatgttttttctgcccctgaagtgcagttctttgggcctcgggacaggttggggtcagctgcaggtgggcaagaagcatgg

SEQ ID NO: 88224 - DNA, 1037 bp, Homo sapiens
cactgtgactgtcacagcaccgtgacggcattcaacagcaccttgactgcattcaacaacactgtgactgtcacagcaccatgacggcattcaacaacactgtgactgtcacagcaccgtgacggcattcaacagcaccttgactgcattcaacaacactgtgactgtcacagcaccatgacggcattcaacagcaccttgactgcattcaacaacactgtgactgtcacagcaccatgatggcattcaacaacactgtgactgtcacagcaccatgatggcattcaacaacactgtgactgtcacagcaccatgacggcattcaacagcaccttgactgcattcaacaacactgtgactgtcacagcaccgtgacggcattcaacagcaccttgactgcattcaacaacactgtgactgtcacagcaccgtgacggcgttcaacagcaccttgactgcattcaacaacactgtgactgtcacagcaccgtgacggcattcaacagcaccttgactgcattcaacaacactgtgactgtcacagcaccgtgacggcattcaacgacaccgtgactgcattcaacaacactgtgactgtcacagcaccatgacggcgttcaacagcaccttgactgcattcaacaacactgtgactgtcacagcaccgtgacggcattcaacagcaccttgactgcattcaacaacactgtgactgtcacagcaccgtgacggcattcaacagcaccttgactgcattcaacaacactgtgactgtcacagcaccgtgacggcattcaacagcaccttgactgcattcaacaacactgtgactgtcacagcaccgtgacggcgttcaacagcaccgtgactgtgttcaatgccaccaaattgttgacttttaaaatggttcattttattttatgtaaattttaccttcatataagaaaaaaagggatgagttggtccctcaaaccccttccaggtgtcaaattttgtggattatcatctcatgtgttcccatcactgcactcccccct

SEQ ID NO: 88225 - DNA, 1032 bp, Homo sapiens
gcagtggaagtgatactttgcgactgctgaggtgagggtggaaaagccttctggcttctgcctgtgtccgctgcctggaagacaattagacatcacctctcaataagaggagagtccaagacttggcagccatttttaacccaccacaccaagtagctattcatccagattggcttgaaaaagatggagtccttgggaatctattggaccttgaaatctatcagaccttgaaatctatcctccacatgtaattcccttccttcacatgtcagcccactgaaattatgtttatgttaggcaagttatgttatgcagatcaaacgcccccagtcttccaagcctttggggatgagtcacagtcacgtgtacagccaactgtgcaggtgtgtttatctttatctgtgttagcgcagaacctgggcctcagtcagtttgtgttctctccccttccaccatccactgggggccctcacatgcccttgatggtcagccctgacctcttcccatcactcctggctgccaccttggtgtcataatgggtggcctggacctcaatccttgcctgatttctttggagggatggggaaaccatccacccctcgctgttctgtggtcttgggggccccatcctaggctgcctgagctctggaggacagcagggaggagtgcaggaggctcacctggccccacactcatcacttttctttccaggacaggccgagagggtgcaggtacttgtccttgagccctgtgactccattatctcagggaaccagaatcctcccctcaggggccccatccctccctggcatcgtgttctccagtcttcacagatgtgcccgtgggtgcccctagccaggtccagacgtggcccacgttctcctcctggaagtctactcagcctccttgtaaacaggacctaagaaaacagatgcaggaagacttttgcacctcagctcagcccagctgggacccagggacctcaaaagccccttctctgcaaagctcccgtccatcccccaccatcaccaa

SEQ ID NO: 88226 - DNA, 1046 bp, Homo sapiens
agatgggtggctggatggaaggaaggatggaagaaaacatggaaggatgtccatttgtaaatgaataaaaggacagatggatggatgagtgggttaatggatagaaggaaggaaggaaagatggatggatggatggatggatggatggatggatggacagatgaatgaatgggtggacggatagaagcaaggaagggcatatggatgggtggatggaccctttgctcaagatactccctggaactgcagagaaaggggttaagcaagagggtgaggaaagactggttcaatacttcaggaaggctccacatgaaatttccacaggcactaaaaccacccagcagctgtccagagtcctggtgtccctgcttaccctagtgtctctgcccacaccttggagatgggaagtggaggccaactggggaataggaggaacccagaaaacctcagcagtcgccagagcaaaccaccttctgccctaagccgtggaaaggcttagaggccaggcctaccggccacagaaagtagaagagagttgaatggtggtggaatcaatgcagtaggcagcagctagctaagaaaggattttctccgagaagggctccaggtcccggcccaggccctggccctgcatgaaggttggggtgggcctcttcctccccgagtccagggccagggctccactcggggagggagctggcagccacctgggggctcctcgggcttgcatctatttgcagcctggactgcttgctttatttatttgtgcttttggctcccatgtgccacagaccccgtgtgctttgttctgccactacacggccacatggccttggacagtgctgcaaccttgcaaccccccaacctcctccgcatcgacaacagaaagccaccacacatgtgcacatacacacacacacacacaccagtgcatgcacatatgcacaccaatgtgcacatgcacctgcagacatgaacacacacacgtgcctgcaagcacacacacacacacacacaaacacaaagaggcgcccactctctagtca

SEQ ID NO: 88227 - DNA, 1816 bp, Homo sapiens
ttcgcgggccctttgttcggccgagccgagccggggcgggcgctggcccctagcgacccgcgtgcggcgccaggccccgggccggccgggtttgaggggagcggcgggaagcggccggggccggggcgcgtgtgtgctagtgtgagacggggctgtgcagacgcccggtgtgcatcacaatcaaacgggagtggaatggagggctgaagatggatgtgccccctcccttttaaaactcatgcagcggtgaaattcggtcctttccgggcagccccccgcagattttgcactggtgatggcaggcgcgaacccgccgtgttttggtgcaggagcccggtgccgttgtttgggggaagagaaaaacccggggcgtgctgcgggtgggcggagaaggacccctgggcgctctgcggctctgaaatcaggtggattttctaacggtgctgcggactgcggagtaatgcgtatgaggaaaacgagccgtacaacatctgtcctgttatcagataacgtaacccgagcgcctggttgccgcctctgctttaagcggtgcctcctttgcacctttaccttgaggacgagatttaattaattgattcgtagctatgaaaatgtgcagatgtggatgtgggggttccctgcctgttaacctggggaagaaataactggcaagcatgttacacggagctttggggatcttagcaaaaatgaaggcttgctgcttggatgttgtgccgggaggtaggggaggaggagccgctagatcgtggctgcacctattgcattcgaaggcatttgacggtattggtgattctgcacgtaattagtggagttgtctcaaacctttgcctccgccaaatgaaacctccatttgagtggtccgctcggttatttctaggcgtgaactgcggattctaaactcaaaatggtgctctgtagatgtccaacttcagcgtctttaaggagttgcaagttggagccttctgactgggttaatccattgtgtagccgaggttcggtttttctcgagtgtctggtgttcacgttgacgtacttcggccagtacaaggtagccaatttatggtgatcgctgtgagagcctcgtacgtccctgaatgtaatttgagcctgcataaggcctactttatgcaagtgatttcctgcagttggaattgaataactatgcgaatgagttgagaccctggaaacctggcttgagtgatttcagaggacagtggtagctggtttgaaatgtgtagggggtgttggcaatgatattcatagattccggatttccttcagtactgtatgaaagaataaatgataaaacttagccccaggccagatgaacttggttagtagagggcaccttgaagaaatttacattgttccagaacagcagaggtggcaatggtctttgagcatgtttcactgtagcacccctaggatgctttgttgggggaaataatgcaaaacagggtttttaaaatgactagttcagttgtcggaattaattttgtgtgtattaatagaacaaagtaatgatgtgaacagttgtaactttacctatactgaaagttttttttctacagaaagtttttaatatttattttcataagaatagacattcttggaagctgtttttcatacagatttctcatgacctgaccataggcatagtcaggccgtgagaaattgatagctcagaaaacggtaatagtaaacacacacacacactcgtttttattataaggatctgattttaaaagcttgtttgtaactcttctgtgcttcttgtccaaaacaaagaccttgc

SEQ ID NO: 88228 - DNA, 1053 bp, Homo sapiens
ggagtaaatagttgcctttagaatgctgattgtgaaggtagagtggaatgaactgtttcgtttgacattcggtgattaaaaaataactaagtcatacagaggatatatgaaactaaatacagtatttttcatcaccgctaccgccacctttttgttaaacagctggctttcctgagatacatttgtgcttttccaaatgctgtcatctggcttacttccaaaaccaagccagaggagggtcagggctggagtaggacaacctttctccttaatgaagggagtttccagtttggaaagaaatggaagacacagttcctgcagtgctggctgggaatgaggtatttacattacctctccaaccccaattgaaggggatgaggtcttgattgtaacttagtcttgcttggcccaggaaagtgatgctaacttgacattttttaaaaaagactactgatgaaagttaattgtttgatttgagtatatagaatatctttggcatcgtagaagttcaccaacaaccttttaagattgaaaaaccatttaaaagactatttgggggtctttttggccttccccaataggaattggagcattcgattgcatgcttatgctttggatgactgtttatctttcagtcagggtttattgtgcaaaggtgatacttaagattttataagaaagaaaatcgtttggctgtgaactctaggctgtcccgtataccaaagtaaaacacatgggacaattaagatttggggatagagcaagcaaagattaccaagagcaactgaagctggtggagaaggcacaagaaatggagaggaggagacaggaacagatttatagacgtccttggagctggcagaaggataggttgagggagcaggaggcggagtcctgaacagactgagcgtgaaagggtctatataagctgggaagaaccaggtaactttatgtttgttttgtttttgttatcttccgttgaacttgttttggcttctttctcataattttaagacatgggtttttaccttttctccagctctatctcagagg

SEQ ID NO: 88229 - DNA, 1048 bp, Homo sapiens
tgtacagatcgtgcatttgaaatgttaatttatttaatgaaaagtaaattatgtaattttaaaaaatctccacctgggatatatataacaaggttttacatgtttaaaacatgctgaaaatccatatcgtttgttccatttttggagttttactaaaaatgaattcttttcttagctttagatgttttcagagaatgaagaagctattgcaggaatggagagctgtttgttaagaatgcattcctcctctgtagccttcaaaagactatagagctgtgtgcagagctagacaatctgggcatccagccataaaacatcactgctgtagcacagatagttgttcgcactctcctgagccctctgtggctgcaaaccacaacagaagtaatggtcttgggaaaggaacactcaatgttattttgaactcttaatattctctgtgtctctctgagttccagctatgcattggaactttggttttctaaaatatagtagtgattaaggatgagcaataatatagcttcttaagtatattcctcttgtaagccagtggatttaaatgtttgctctaggaaataaggggtgtctaggaaataagagttgtctgtcccaccatcttcctctttatttgcctctttgttgcaatacttcttttctgttggagaaccactgccctaagacccatatgatcactgggccacacacagtgcacatggcccaaagagtcatctggaatcttccagatattttgtgggatggattggtctaatttggcccagtttccactttctcatgaacctttttggcataacaaatttttaatttttttgcacaaaaatgaagaagagtgtgactggcatctatttgtataaatccaaatggtttactctgaagaccctctctgtttttcttcttcagaccattttagaaattaatactctattgtatctttataacttccttctctgaaggattgaactacaaacctatagtatcacagtgtcaagttgaattattctcagcagttggataactcttgtctgtggtt

SEQ ID NO: 88230 - DNA, 2556 bp, Homo sapiens
ttactaatgtgcagactgtcttttgacgtggctaataccagatgcaagttggtgcccaggtggttattgggaatatgtgctttgtttgattcattttatgtgtgccttctagcttattaagaataagatctctcacagctaaaatcaagtgcttggtttgagcctggcaaagatattgtttacttttttattcccaaagatcatttctttttaattactcttttaggaagcagggaaaatctcagtgaaaatagcaactgggaattaaactaagatctgaaactgggaaatggcaacgcgggcacaggtgtcacctttccaactgttgttgagatgatgtggacaacggttattcagaaattacagtggggaggagggagatgcacaagtattttttctcatactccatatgaaatatgaagtgcagagtgaggggcccagagtgtagggagggaatttaataggctttgttcttcagggggctatggctgatgtcttaaacaaggtcttttttggtagggaggcacagtaagggaagaaggtgatggatttgtgggaacaagtacatttgagtcactgaggacaattgggaattgtgaagtgggagtggacgaggttagaaagcatccttaggtaaccagatctccatttaaaactaatctgagcatttacaatgtgattatgtgccaaggacatgagtttatcttatttaatcctcacaacactcctgtgaagtggttgcttttaacattcccattttacagatgagcaaagggagtaatttccacaagatcctatagcttataggagatgaagccagaatttaaactcaatacacttcaaagccctcacatatggaaaaagcttggattattttaatagctgcttaatgagtctcttcctctgttctgtgtcctgctatccagctgccaatattaactgactgccttctgagcactttgtgtgtatgatctcattcatttctcctcagcagcttataagttaggagctgtgattatattcactttatacatggaagctgaaactgatggaagttgaataatttgccccaaatcagagccttaataaatgtgtctaggtccttggaagccagagcttgagctctttatcattccgctgtgctgccttctgaagcctgagcctgattacatcattccttccacaaaacctttatgtcttccctgtgcagcggccacaggggaaggacatcaacttcttcctgccctcctggagctgtcttactagtatagtgagagaaatgggcaccaaacaagttgttaaaaaaagagagaaagcaatacatgtgaagaacgccacatacacatattaaaaagttgacaaaaacctaaggtaatagatcattatatagctgtatactggatctcctctcttaaggacgcatgtcaaaattttggatgctctgagaactccagcagtgaaagaaatatgtttacctttattggcccagtatttcccaaacttatgtggccattgaacattgttttcccttcataccactttttagttcagtgggactgactttaacaaattcagaaaggaagagtgcctggtcatccccagagagggcctgtgggctgcagtggttaggcaagacttcacttgaaatgagttctgaaaggctggcaaagcttggttggatgaaagggatattctacaaggagacgaatgggcaagccatgtttggaaatattttgtaaagcgcgtaacataatggctgagacatagtagggacgggatatagttattgactggatgagtgcagaggcctagctgtaaatggaggttctgtgttggcaataaggtttagaaggggctctatcaggtggaacctctagttgttggctccttaggaaccgttggtggctgttggtgggcatgacatgaatcaggtgttggattagaatcttccttgagcagaggtatggtgttaaaactggctgttgtagctgtctgtgcaaggtgatgcctacatactggtagggtcaaactgaaaagctgttacaaagaatcagcaggataaaataatacaaaatgattgacgtgggttgttggaaagaatgagttctaagaggcatagggtacttactgctcttcctagaatctgccacagaggctttaaattaatgaagctaatattaagatatttggttaaatacacatagtacattctttttagatgctgatggggaaagatgacacacaagatagtagttttaggcgagtttattgtatgaggttgtgttctgcagtagagatttgactcacagcataaatccaagtatgtgatgagccatgtaataatagacgtctgctgttaattatggtggatactctcaatgaaatcagattttcttagggccatacccataaaaaaattcttgacctagatcttatataacagtcccaggtatatagtaaattttatgcatatggaatgttgacaggaaagaagagaaaacaaaaatctttaatgtttcaaggaagcataagatcaaatcattacataaatagaat

SEQ ID NO: 88231 - DNA, 1024 bp, Homo sapiens
tctattgcactacctcattcagactgactgaggtagtataatttccattatctttaataaattttttttttttgaggcagagtctcgctgtcaccaggctggagtgcagtggcgcaatctcggctcactgcaacctctgcaacctgggttcaagcgagtctcctgcctcagcctcccaagtatctgggattacaggtgcccgccaccatgcccagctaatttttgtatttttagtagagacggggtttcaccatgttggccagggtggtctcgaattcctgatctcaggtgatccacctgcctcagcctcccaaggtgctgggattacaggcgtgagtcaccacgcccggcaatttccattatctttaaaaatctgagagatctttgggacctcaaatttgatctgtggcatctgacctattaagagaaaactaacgtttatgtgtttataagaatcgttatttatacttgaaaagcctgatgttcttttctctctgatttctaactctggcatctagaatgcagtgtaggcagcagtgtgcctgggagacaagcagagatctcacggattcctttatttttcctgccatagcagcaaattttccttggagcactatttgaaaattaacattactgaaaaaattaagcccacttaaagggactctagtttttatctaaattataaaaggtgagaagacagttctgaaaaaaatgtatcaccttgaaactagaatgctttagttaatggggtaagctagaagtaagctgcctttgataactcatgtaagagcagcatatgaatggatgataactgtctttcttccatttaattcagctacttcctattcaatctcaaatctcagttggaaagcaatttccctcacttgacccatttttcttctgcattatatctttcttctggttcttcaacacaaaaagtttgaaaagacttgtaagcagattcagacacctggtttgggctaagcgtatttcattatttggctttccagttggaaggataaca

SEQ ID NO: 88232 - DNA, 1199 bp, Homo sapiens
tttcgttttgggtttatattaccattgttattcaatgttatgtgtagtcagggtgataatagattagcaacaacagtgctattaacaggtattatgtcttgtttctctgctatgtttccaagaacaaatcttaactcattgagtctgttcaaaattcacagttctgtagagttcaccgaggagaaaacagagacctaaagaggcagtgtgacttgcccaagatcaggtagtcctgggttcaaacccaggttttgcagaaaactaattccatgccttttgccataggtaaatgagcaagggaaaaaacaatttgcaaaacaaatttgtaaacaaacatctttaaaatgtatctttctagtaatcaaagaaagaaataagccagattaaaaaagaaacattcagttgagaaaacttaaatatgatactgaggaggatgagaaaagaaatttctttaagtctcatgtatggggggaaaaaaattcttccatgcatcttttgctggtggccatgaaaacaggtgtaaataccttcaggtggtgaaaataataatgtacatcaaaagaatcaaatacgttattaccttaggaggtttttttttagcatctgtattaaggtttttttctgatatacattaaactgcacatatttaaagtataacattcaataaatgttgatatacatatatatctgtgaaactacagccacagtcaagataatgagcatatccactgaggttgagtgttgaaatgtgctggtgggagggcagatgcagtgtgctggagggagaaagaagccaaattgttaaaactgggcaactggtggaaagatggtggtggagggaatggggagacctcccttataattttgcctataaaggcagctacacatagcagttttaaaaatatttgtcattcatgtaggaaggtaatcatttcttaaatatttaatcaaacatttttcttttttgggtaaaatctggtcttttgaaaatatgaaatagcattgtgattatgaggctttgggacatcatgtaagagtaaaggttcaacaacagaagtggaaactaatttacagttgccatcttttactcttgccacataagacttgaataaaaagtaccatgatatacttttatcattactttataaagtaaaggactttctcatgcaaagaagtggaaaggataccatcttatagga

SEQ ID NO: 88233 - DNA, 1594 bp, Homo sapiens
gtcagaggcgggggtcacaaaaacgggagttcagggatgacagaccctggtaaacatcccaggcttttggttggaaccacccttcttaccccctaaaaaccccaactttttaccctaggtgtatggtgaacctaaaaattttcctgaaatccagccctcacaaaacacaaaaacttagttttgaattggctgaaatagattaaagtgattcacccttgctcttaaatgcttgtcagaagcaaaactaaatcctctctagaggaaggtaacattcacagcctcagcctatctccacagttttgtgcatgcaagattaacattcagtcaaaaactaagcatataaaaagaggcaggcgataaggttacccacaggagatctagatattagggttatcagacatggaccttaaggtaatgttgataaatatgtttagtaaattaagtgacaaatggaggatttcagaaagaactggacactattaaaaaagttaaatggaaattctggaattgaaaagtgcaatatagggtgacaatagtttacaataatcttttgtatattttaaaatagctagaagagaagaatttgaattttttaacataaagacatttaaggtgatggatatcccaattacactgatttgatccttacaaatcatatgaatgtactaaattatcacatgaatcctgaaagtatgtgtatctgttatgcatcaattaaaaattaaaaagaacttttaaaagtgcagcaactcaaattaggaattaaacaggagggtttaatagtattcttagctgaagaaaaaattagtaaactagaagatagatcagaagacaatatccataccaaagcacagagagacaaaaggatggaaaatgaaaagaaaaagaaaaatatgtaagagacaaatgggacactgttaaaagtctaaaatacttataattggaatctcggagaggagaaagaataggtcagaagcaatagtaaaagacataataacttgagaatcttccaaaactaatacagacttgcatatttgagaatcactgtagctctaagcagaatcaataccaaaaaacaaaaataaagggaaaagagaggaaaaattgccaaaacaaagaaaatcttaaaatcagccaaaggaggaaaaagatacattaccttcaaaggagcggcagtaaagacggacagtctactttgcaaagaaatggaaatcaaaatacagtggaacgatatcttcaaagtgttgtaagaaaataactgccaacctagaaatctgtatgaagcaaaaatatctttcaaaaatgaagtgagaatatagacatcttcagacagacaaaaattagaattcatcaccagcagatctacactagaggtactataaagaaagttcttcaggtaaaaggaaaattatcccagctggaagcatggagatgcaggaaggagtaaagagcactggaaaggatagatagacgaatacatctaaaataatgtgaactgtgtaaaacagtaaaaatattgataggtgcagcaaaccaccatggcacacgtttacctgtgtaacctgcacatcctgcgcatgtacctggaacttaa

SEQ ID NO: 88234 - DNA, 1540 bp, Homo sapiens
aagacaaaagccaacagaaccaaaaggacaaaaagatagattcagtgtccctatttcttctattatacacaaattagggagagcaggatatttgttgaatatggcgtaaattcacagaccaactttcatattatacttaatggtaaaaccctgaaagcagtctcttactgttataccttataacccacccctagaatttctgcttcccattctagcaactgagttctgctgggatttggagttcttattttccaatagggaatgttactaccagaggacacagaaaggttccattgaattgaaagatgaggctataacccatttgggactgttgatgccactgaaccaacaggtaggaaaagaggtcactctcctgactagagtgcttaattctgattaccaaggcaaaatggggtaatgctatacaatgggggcagggaggaggatgtttgtaactcaggattctctagagtgtctcttagtacttctttgcaccatattagagacaaaatgaaaaactgcagtactcaagaaaaggcaggtctgttgaggagtcacatgtttcaggaatgaaggtttaggtcaccctgtcatgttgagaaccctgactggctgaggttctaattgaggtcacaagacatgttggatgcatagtgagagaagaaagttagggacaccatccatgcgttcataaccaggtgcagaagcaaggattgtagtaacttagcatattttttcttgtgtctgtatgtttatatgtattaactttgctttttccccccttattttatatataattactggaagttaattaatttgatctttagagaacagaatatttagtgggactgttaactgaattttaaggagtaattaatatagccagtgattaatacaatgtctgttcggactgcagctcctcattttggggagaaggtgagaacatgttcatttataggaaggtagctgcatgttaccttcatgtggaatcagagttgttttgatacttcaaatatagagggtgtgtatggaagccaagtagccaaaggggtggactgtgccaattatttattgttgctcagttcccagtttatgtaaatccacatccatttatgccctgcttttgatacaggagatgggcactgtagacatttccctttggtgagctggcttcactttaggctttgccaatggaagcactggagacacaatgtaaggaggaatagaggagaaaagggtcttcccagccaggcacggtggctcacgcctgtaatcccagcattttgggaaaccgaggcaggattgcttgagcccaggagtttgaggccagactgggcaacatagcaagacctcatcaatacttaaaaaaaaaaaacaaaaaaaaaaacagccacgtgtggtggcgcatgcattagtgtcagctgctccagaggctaaggtgggaggatcgcttgattgaggctgcagtgagctgtggttgcaccactgcaccccagcctaaatgtcagagctagattctatctcaaaaaaaagaagtagg

SEQ ID NO: 88235 - DNA, 1842 bp, Homo sapiens
aatggcatgaaccctggaggcagaggttgcagtgagccgagatcgcgccactgcactccagcctgggcaacagagcgagactccgtctcaaaaaaaaaaaaaaaccagcaactgtgttgaatctgtctcatactttgaacttctgacgtcctctgtctctgacctctaaacccaaatttaaagggttaatcgggcctacttggatggatagtctctctgtcttaaggtcaactgatttgggatttgaattaacgtctgcacagtccctgcaaatagtacctacattcgtgtttgattaactaggggaaggtatgtgtatcccaggggccaggaatcttaggaggaatcttagaattctgactaccaaaacaggaaatagaaattaagccatgaaaaatggttgttatttacagcttgtatacccagaaaacccaagatgataagctaaaaaattatttgatgcagtatagataagtcagtaactggactagatacttaccatcagtaaccattcaggcaatccacaggatatttgatctaatacataaaaatcaattttaaaaaaattataaaatacctagacatgagcttaacatgtacaggaaataaatatgaagaaatgggctgggcacagtggctcacacctgtaatcccagcacttggaaggccgaggtgggcggatcacccgaggtcgggagtttgagaccatcctgaccaacatggagaaacctcgtctctattaaaaatacaaaattagccaggcatggtggcacatgcctgtaatcccagccatttgggaggctgaggcaggagaatcgtttgaacgcgggagacaggttgtggtgagccgagatcgcgccattgcactccagcctggacaacaagagtgaaactccatctcaaaaaaaaaaaaaaagaagaagaagaaatgacaatttcactgaaagagggaaaaaatggagagatgttctcaaataggaaaattaattcttacagagctttcagttaatttgtatgtttaaagcaattctaatttttaaaaaatgtatttttcttttggagcatgacaatatggttgtaaattttatctggaaggataaaagaataaatactttaaaaaaataatgaaaggaacctagtggtagcagataaccaaaattttatgaaactggaataatttaaatagtgtcattgtggcagaagcgtgcagttattaatggagcagaatggtcttcaggcccatctgttatacatgaatttgatgtatgaagagccattgtcacaaatgagcagagacaggaaggatcatttagtcctcgtgcactaaatgactcccaggcactgttagttacagaaaagaaggtagatcctagtgtctaccacataccaaaataaactttaaatgaagtatcatctgtataatagaaaaaattttaagaaatctagagaataaaaagagctaatttgaatagttcctacaaatacaagtaaaatctcatgaaaatttttggtagaatttgattagcgtttaaaacttggtgaatgccaaaaacaaaaggcagacaaaaactgggggaagtgtttacagcaacatgattaaaggttaatgtatttaacatgtataaacttaataagttcattatgaagaagcccactaagaactgaagagacgggccaggatatatagacaggcaatgtacagaaaatgaaattcatgtgggataacaaatatggggaaatatgttcattaatagtcaaagaattgtaaattaaggccactgaaatactttatcagattagcaaggattaaaaattataatactcagtgcttatgagattgtt

SEQ ID NO: 88236 - DNA, 1228 bp, Homo sapiens
acaacatacacctttgccatatttcaatggctagaagcaagtcgctggtctctctcatactccacaggaagggattatacaaaagtgtggaaatcagaagaccatagagtctgtcaagcacaggtcttcttcacaacttctggtcctgttggtcagagccatttggcaatgagtcgccttttccaccccaagtccaggtgtcatgctgagtgacttaagcattcttagaggcagtccatccaatatgctggcttacaggctttggaccttctctataccaatgactttatttcactttagaacccagtccttgtgactctaaatctcaagcatactctctattctgtttctttccatagtctatatagagtattaaatataattaaagttttaccttgtctttccttttagattttatgctcaaggctgagactattttgtcttatccttctcatactgcccacaaaagtctagcaaatacttcctgcacatagcagatagtcaaatacatgttgaataaattaagaccataactatttctatgacaactgcatagcctaccagttccgtccccttctctttttaattttgtctgataacattttaccagcccttcctaacataaacactgaaaggaaattctaattgaattagtcagtttcaaaatagtggcatgtaacacacacactctctgtctctctttctccctccgcccccccccccccacacacacacaaattagtgaatattttgatgacatggcattggagtccaaccagtataacttcagagtatggtctctggtgttctttgtaggtgaaactaaggacgagaaacatttacaatttctgataactaaacctcaaagacaaaaacaggcccctgccctcttttattgaattttcttcttttacaaatataggaagtagtcaactaacaaaaagactggtaatttgtaacatttttcatccagaattgttttgcatgaagtggctggattctcagtctacctacataatttcaccttttgaatcattatttctctttctccatcagaacctctgaaacaaaaataaattattgtttctctgggaaaatctacagtttaactaggaacaccgaaatgatacccacagaggcccatttgtgggaaatcttttcaccctttcctcctcctagctgcctccaaaatatgagtgttgctcctttttctacccagagcctccta

SEQ ID NO: 88237 - DNA, 1023 bp, Homo sapiens
tttgttttactgatttttgtaaatatctttgaaagtatatgtattcttatcttgcttcctgctataatcccagagcacttataaagctattgttcaggctgggtgtggtggcccacacctgtaatcccagcactttgggaggctgaggtgggaggatcacttgaggccaggagttcgagactagcctggacaacatagcacgccatctctgtttacaaaaataaacaaagcttttcttcagaaaatacttattaaatgaatcagtccccacctccctccatccttgtttttgtccctggtgcttactacaataaatagcacatgttagttgtatagttcttcagtgattgaattagtgaacatatgagatggacttgaggtgtagactctctaggaaaagaagtgattaaaatagcttagaagaaaaaggaagagtcaggaaatgggaagattcagtgaggatcaagaacaggtgccatgtaaatagtgataagaataggaagttatggtcagaatgcgggatagtggcatctaaaatttcagcagtggtgcaattctgggtggttagggtctagtagctaatactatagataaagcaccctggtgatcaggtgggggaaactacatgttttggcatttgaggttggactggtaaaacagccagttccctacctaatatccctaaagcaaaacccactgcgaaggaaatccatcccatacatacaaagcccctaattggtatttcagtgcctgaacagacaaccaagggttactacagagttgaggaaaggctttcagatcagagagtatctaagggaagaggcatccagagaaggaaaaaagatatgcagaaaacttagaagattttcagagaaaagaatagagatgattttgcatacctaaaacaagaacagggtgttgtggaaaaggagcattcaagagcacaagaaggttaacaattttaaacatcacaataaaaaactcagtagaaggattagaagatcaagttgaatcaagcaccct

SEQ ID NO: 88238 - DNA, 1042 bp, Homo sapiens
aatagaagcaccaataaaagagtagaaaacataagagaaacaacaagttacaggtgatcaatccaagagattcaatatgttgttatttagaaacagaaggaaggtgttttcaagaaaatagagaactgaaaggtatgagctgaaagcatcagccaaatgccaagcacaaataatgggggagaaaagatacatcaccctgaaatttcagaaccctagagatcaagtggaaaaaataaagcatggccaggcttggtgcgtcacactggtaatcccagcactttgggaggccagggcaggagatcgcttgagcccaggtattcgagaccagactaggggctggactgtaggagctgtatcttactccatatcatacccttatccccagcaatgcctgatgatgggttggtgttcaacaatgtggactgaatgaatgagacagccggctactgaagaagtcagggcaacctgcagtgctgttagggaagtgtccctttctagcaccttctcagagggtcctcctgtataccatatgcgaaattctgacttaagatttggagcagctagtgctttttcattgtttgacttaacatgatcatcaaacttatactagttttctttgtatttaatagggagaaagagcaagaaacacaagaagaggaacgtttgatggaagaaaagaaaaagaaaaagcaggaagaaaagaaaaagaaggaaggtgctcagaaaaaggtttggctgaagttcctgcttcattgtctttgtatcattgtgtgtctcatttgcatcatcatagccattatatgacaaggtttcattctgttactttttaaatcaatatgccaagtctataattagcgaataatagatatcctactggtgaaataaatacaggtgacagccgtaaatgtctaacttggaactggaagtgttagagctgtgttttaaggaagctgtgttttagttgctggtggtgaagtgtgtccatgttgttctacttaaaatgaactgtcctgaacaaccatgtctaataaatgaagaaggg

SEQ ID NO: 88239 - DNA, 2271 bp, Homo sapiens
tctctttttatcctccaagtccagaatttgctggttatcataaaaggtgttggtggaaacacacgcatttctcactgttactcaggaactcctatgatgtgctggagattcagaatgaacaaactgaaagccatactccaagcctcttccttttatacctgtatgtttagttatttcccagtggttaagagcacccactcaggagtcacataaactagctctgtttaatttgggacaagttacttcacttctttaggcttcagtatctcatatttaaaatgagaaaggtagtgaatggttcctacctcataaagctgttacaaagacttaatacgattatttgtcaattcaaaataaaatgtaaaaaaaaaagactaattgagatcatgcaggaaaatgactcagtatctagcatataattggtgctcagtaaaggtttactataactgttattctgaagtttttttccactggaccatcacatgtacacaactgtacatgtagacacatgcactctcacagctaatactatgcttttgtgagacattttataattttcaaagttaaggttatgtgtattatctcatttgaacttcatagctgaacaggaaaggaattcgtttacagataatctcctagtgtgaattaagaggctggttcttggttaagaaccagttaatggtaaaggcaagacttgagggagtccaggtctctgaacctctagactagagtcacatgaagagagggagttaatgctcaatgaatattaaaaagcagcatagcaaaaaggacatttttctctgttatactctcagaagcactgtgaatttacataacacttttccagaagggtccaaaaggtttatggtacatagttgtgtatgaatttatgatcttgaatgaaaaacaatggtttcttactattgtcatttcaaaatacagagttaactgttctggatcatccatttcttcttcttcttcttctttcttcttcttcttcttcttcttcttcttcttcttcttcttcttcttcttcttcttcttcttcttcttccttcttccttcttccttcttcttccttcttccttcttcctccttcttccttcttcttctttcttcttcttccttcttcttgaatttttctgtctggtttagtaccagctatattcttcatcattgtcactgttttctactcaagtagtaacaaattgcttattactgaacagtgattgtgaattacattgtcccaccactttacgcagagctatcattttctattactgttctgatgagaattttcttttatttatttatttatttattttttttttttttgagatggagtcttgctctatcgcccaggctgggtggagtacagtggcatgatctcggctcactgcaacctccacccctcaggttcaagtggttctcctgcctcagcatcaccccacccccaccccataagctggggttacaggcacgcatggccacacccagctaattttttgtatttttagtagagacagggtttcaccatgttggccaggttggtctcgaactcctgacctcaaatgattcccccccacctcggcctgccaaagtgctgggattacaggcgtgagccaccgcacctggcctctgttgagaattttcattgctaactccaaactctactggatttttctcttctccttctatatcctctaaaatactgttcctttgggtacagtttatcagtaactactaactagccttagaatgggttgtagtaataattaatgtctttccaaacaaaaaatgctttttgaattataaataatctaacagtactgctaggtaattcattgatgaatattagcagcatcaaggtttacgtttttctcagactcttcattattactggttcaaaccaaaattcattgcctgagaaatattggttccaactttctgactggacacttttgtcgggtgacacaggttggcctgactgtacctatgatacatgttatagtactagtattagtgttcacacataaaattgatgctttcctaacattctagcattttgacttccctcccctgctccagattgtgtgtctatgagggcaggggccacatttgccacaaggcagcacccagaagtctcaaggccctgagttgtttgaatataggaaagtgtttagcaatttgagagagtccgagagttggatactcttaagagagaagctgcagttataaattagattgcataatatactgaatcaatcaaca

SEQ ID NO: 88240 - DNA, 1044 bp, Homo sapiens
ctctaaaggatgctgacagtctgctgtctaaaaaataatttgtttacccagaccagtttcttttctgtgtttttttaaaaacaactttattgagttattgtggacattatatttaaagagaagaaatagataagtgttggcatatattcacctgttaaaccatcaccatgatcaagatgacacccatcatccctgaaggtgtccttgtgaccttttctgatccatctcctctgtccccaccctacccccatctgtctctaggcaaacactgatctgctttctgccactataaaagagtttttatttctagaacattgtattgagggactcctacactgtgcactttggctcctttcactcagtgtattgcttttgaaattcatccatgctgtagtgtgtatcagtagttcattcctttttattgctgagcagtgttccattgtgtaggtgtatcacagctatttatcctcttcattctcctgttcatggacatctgcgtttttccagttttgagctattgagtaaagcttcttttaacatttatgtacaagtcttatatggctatatactttcatttatcttgagtaaatgtataatagtaaaatggctatggcatatgataggtgtatgtttcatttttcaagaaattgcacacagctctttcccaacgtgtttatactgtttcacagttctgcatcttcaccaatgtgtggtatggtcatcttcataattttagccattctaataggtatgtagtggtatctcattacacttttaattggcattaacctaatgactaatgtggcactttattttaatgtgcttatttgtcatcttggtgaagcgtcttttaaagtcttttgcccatttttcattgttatttattttctttttccagattggtttctgatactaaattggcctctagagttgggcagaaagactcatcgctacaggttgtctacatgcctcagtcattgcccttctatgtgtgtagttacttgtaaatagtaatatcagaaaatatgcactttcaaatagaat

SEQ ID NO: 88241 - DNA, 1031 bp, Homo sapiens
tctggggaactgggagtcttactgctcaggaccacgtggaccttgcagagagtttggattttattctgagagcgttacaagacctcagagttttaaaccagggaggagatctgcatttcagaaggatcacactggctgcagtatagatgatggattagagagagtctcttacagtactccagctaagagatgagggtgcccaggttccaatggtgaccgttggaatgaaaatagatgggtgaaattgagggatatttgagggtggagggcatgtaggagctattaatagaaatgacaaggtttggtgattgattagatgtaggagagattgaaatactcagaagggcgaggcgagaaagctgatgagtatatgggacatgttgattttgaagtgtatcaagtataaaagagtggacaacaaagccataaaagaacaggaaacctgccaagggggatgggaaatagtggcatagagaagaaggcaggagtggccgtcgctgataaagacaacctgaggggtcttttggtccaaagactgaggggtcaaaagataacagggccttggattttagcagcaagaaagaaattatggccttggctagtcagtttccatgaaggtttggcaggaggagaggagagagtgggaggagctggaggagaatgtggagtccaggagaggtgattgttgccatttgtgaagagattaaatatttgaacatgttcaagtgatgatgagaaggagctaattacagtagccagacagtccctgggcccgttagaggttggaaatgcaatgtctttcactctgcacacaaacaccgcaaccctcttcttttttatattcagttccatcatatggaaactctggctagaaaaaaaacagagaaatacttgtaaagcaaggaattgatccaagacccaatcttatgttttgggccttcatatctactttggagagagttgtgagttgaagacccaggacacgcaaagtccctaagataggatccagaggtttggagggtgcccccttg

SEQ ID NO: 88242 - DNA, 1018 bp, Homo sapiens
atcaccttgattttacagatgaggaatccaaggcccaggaatagctggctcagactctcaagattagtttgtgtgtagcaaaactaggtctcaaacttggaactctagactttagtccagttctgtttccaaagcactacattgtcattttttctcagtttttggttatggtttccttggtttgggttgggttttaaaggggtctagctaaagttttgggttcttttgcctttcattcattttagtgccagaacctactaagacctgttcaagccagccccaacctgccggtaccagtaccagtacttccaccagcactatctcaagcagcaacaatggcaaacgtgcatctgccagtggccagcagccagctgcatcccgttacctgcctcgtgaggtgcctccacgcttccgccagcaagaacagaagcagctattaaagagaggccagccattgcctacggggactctaaccagtgtgagcccaacccagggtgctgggcctgcaggggtaagcccacctcccctacctggagccggaacacagcatcatcccagtaagctccaaccaggtaaaaaccacataggatgagacattgttttgatctgaaaactttgctattttcaactttgctgctgagcaatagaaatagacatattttggtccatactcacaacatacacagagacagacaaattcatttcattttaagtgggttttaaaatttaattgtgttttccctctatttatttacattattggtcatgagtttgcagatggcatgagctacttcagctgagcttatttttcatcagaaactaaaggtctgtacattggtccatacgaacccatcaaggcagttactttagaacccagaagtgaaaacttttcagtaaaacccttttctctcaatttcctagtctgtcttatgagtgcacacaagcattttttgcagggaggtacagatccttccactaggcgtttctaactgtaacttagtcatacacattgagccaa

SEQ ID NO: 88243 - DNA, 2875 bp, Homo sapiens
gatgctttcagagatgctgatgtgctaacgtgcattgtgagtattctccagggggaataatagtacagtgtagtggtaagaattgatataattttaaaaacattaacgctctttaaaatgggatctattaagaagacaaatagcttttttctttaagtcatttttttagtgtttgtcattcagatttgaagacttgaaataaagagcttccccaaagactagttaacagttgattcattgacaaatgagtagaaaatctaattttgaattttgtttcatctttttcagatctcagtcatagtggattggcagatcattatgaaaattcccactggggacagcagcctacttacagaagcgaagccaactgcagctgggataaagtgataatagataggactgacaaggaggcgtggccttccatcacaggaacagagactgaatctgcctcagaatgtactacagacactgactctgcctccaactgtggctcagagaacagtagcatggctacagggagtgcccagggcaacttcactggacataccaagaagacaaatggcaataatggcaccaatggcgcactcgtccaaagcccttctaatcagagtgcccttggagcagggggagcgaacagtaatggaagtgcggccagagtgtggggtgtagccacaggctccagctctggcctggctcactgctctgtcagtggtggggatggaaaaatggacactatgattggagatgggagaagtcagaattgctggggtgcttccaactccaatgctggcattaatcttaaccttaatcctaatgccaacccagctgcctggcctgtacttggacatgaaggaaccgtggcgacaggcaacccttccagtatttgcagtccagtcagtgccataggtcaaaatatgggcaaccagaacgggaacccaacaggcactttaggtgcttggggaaacttgctgccacaagagagcacagaaccacaaacgtccacttctcagaatgtgtctttcagcgcacaacctcagaaccttaacactgatggaccaaataacactaaccccatgaactcttcacccaaccctatcaatgcaatgcagacaaatggactgccaaactggggcatggctgttggtatgggggccatcatcccgccccacctgcaaggccttcctggtgctaatggatcatcagtttctcaagtcagtgggggcagtgctgaaggaataagcaattctgtgtggggactgtccccaggtaaccctgccacaggaaatagcaattctgggttcagtcaggggaatggagacactgtgaactcagcattaagtgctaaacaaaatggatccagcagtgctgtgcaaaaggaaggaagtggaggaaatgcttgggattcaggacctcctgctggtcctggaatactcgcctggggaaggggcagtggcaacaatggcgttggtaatatccattcaggagcttggggccaccccagccgaagcacctctaacggtgtgaatggggaatggggaaagcccccaaaccagcattccaacagtgacatcaatgggaaaggatcaacagggtgggagagtcctagtgtcaccagccagaaccctaccgtacagcctggtggtgaacacatgaactcctgggccaaagcggcatcttctggaactacagcaagtgaaggaagtagtgatggttctggcaaccacaatgaaggaagcactgggagggaaggaacgggagaaggccgaaggcgagataaagggattatagaccaagggcacatccagttgccaaggaatgatcttgacccaagagttctgtctaatactggttggggacagactcctgtaaagcaaaacactgcctgggaatttgaagaatcccctaggtctgaaaggaaaaatgacaatgggacagaggcctggggttgtgcagctactcaggcttcaaactcaggggggaagaacgatgggtccatcatgaacagtacaaatacctcttcagtatctgggtgggtcaacgcgccacctgccgctgtgccagcaaacacaggttggggagacagcaacaacaaagcgccaagtggcccgggggtttggggggactcgataagctctactgctgttagtactgctgctgctgccaagagtggccatgcttggagtggggccgcaaatcaggaggacaagtcacccacctggggtgagcctccaaagcccaaatcccaacactggggagatggacaaagatcaaatccagcctggagtgcaggagggggagattgggcagattcatcgtctgtccttggacacttgggggatgggaaaaaaaatggatctggatgggatgctgacagtaataggtcagggtctggttggaatgacaccacgagatctgggaacagtggctggggcaacagcacaaatacaaaggccaatccaggtacaaactggggggagactttaaaacctggcccccaacagaactgggctagcaaaccccaagacaacaatgtgagtaactggggaggagctgcttctgtgaaacagacaggaacagggtggatcggggggccggtaccggtcaaacagaaggacagcagtgaagcaactggctgggaagaaccctctccaccgtccattcgccgcaaaatggaaattgatgatggtacctcagcttggggggacccaagcaactataacaataaaactgtaaacatgtgggatagaaacaacccggtcatccagagcagtaccacgaccaataccaccaccaccaccaccactaccacgagcaacaccacacacagggtcgagacgccgcccccgcaccaggccggtactcagctgaatcgatc

SEQ ID NO: 88244 - DNA, 1039 bp, Homo sapiens
atttcatctctgaactcagatttcactgaaatgtagataattttagagtcaaatatgaaggccattatacagttgatccaagctaaaccagcagcagtggggtagtgacatcttactgtgtcttccaacaatggctagaagtaaaatatcattacatatgccaatcagaaaactggcaggcagtatactgctaatactgatcttagtctagaatttgttgtgtgttcattttgctgcctatttgcagctcttcagagatgtatctcagccatagcagggattccagctgtgctggtggtgaccactgtgggctcctacaagtcggcaaaggctctagccagaggcacactttactttgcatgtgggtacttaatctggtgatatttgctttaaaacttagttttctgaaacaattatcatcttataaaatataaaaccagaggttgtgtgcattaatcatggaagaggcatatctccaattcactaaactaaaacttggaaaaaattagatttaggaagcttctacctaaaaagatgagacgtgtattgtttctataagtctcattagcagcagaagccagagagcagtggccttccttccagactcctgtcctaggaagtttatcattctttagtataaaaactacaccaaaagacagtcacctgcagatggagtgaatcagcaagatcctgttacagctcagctgttttcacataacttcggaaatagatcccattgacctctgcagccagaagtaattctattttaagcactatgcagtagttactaaaagagaaattatctgagtgatctgtgctttttgtggatgtgggatttttcttgggtttggatttggctgggttgtttttgctttcctgtgtttgaggggtttggtaagtggggctggacttcagcaaggactggggagttgggagcctgctacggaagtaggaagagatgcttctcagtgcaagtccgtggcgtgagacgtgtgaaccccacatgcaaaggccttagctttaggtaccttcaattcaa

SEQ ID NO: 88245 - DNA, 1036 bp, Homo sapiens
atttgtaatacctattgccttctcaaagagatggaggtctagagatgataaacaaattctaggtgagttcattatttaattacctacagtaaattagtatttttatagctaattggtctttagcaacacatgagttattttagcttactaaaaccttgataatttttattagctatgttaacgtctctgatttaattttgtcctttcaatttgtaaaactacttctcccaatatatattattgtcttttgtgtaattaaaggtaatattatagttagcaattgctggcgataactggttaggactaactcccctgttattggtaactatttgcataatatattcctcagcatagagcttgtaatttaaaatgatttttaggttgcgtgtccttttgttattaatcattcttactgcattttcttagaataagagtatcaagggaactgattccatgctatttttagtcagaaaattaatacattttgtaattgatattgtaatatccatgttgaggccaaacaatgtaaaattgatggttaactatttgcattttatactgtaagtttttctcttgcacacagtcacatgcttgctacagttatgacttaaaatatttatatttctgtctgagcaaaatgtatctatatgaaaattacaactgatacaagctgtcaacatatcaacagtgtcaggtgagcttatggcagaagcaaaagattagaatttgagtttatttggaaaaataaaattgacctatgcaatataaaatgttttttgtactgaagtgtgaagggcgtggggaaatccttcttattgcctggtttcataacctcttctgtgcctgtagataatgcagttggcccttgaacagtttgggattagggttaccaaaagtataacttaggacttcccaaaaacttaactacttgaccagaagccttattgatagcagtcagttaacacatactttttatgccttcagagttttatacaataagataagctagagaacagaagacattattaagaaaatt

SEQ ID NO: 88246 - DNA, 1031 bp, Homo sapiens
agctgtgattgcactactataatccgggcaacagagcaagaccctgtttcaaaaaaaagaaaaaaacctacaaattttaaaaaccacacaggacaatgaaatgttttaggaatctacatttctgtagccttttcataccatgtagagattgccaccttccctggtggccccaggatttgttcttagcatgtttatgtttcagaatgatgtgtagttggttaaggaagtttagaacagcacagagtacaaatagctgatgtttgaaggaaaaattatatacatatacatgtttatttacatatgtagcaagagaaattcaattctgagatctgggagaaatgaaggcataaaaaggtagattacaatgcatcatttgtcccacgacccctaaattatatgttacagtggaagcattgtctgcgttagggacatgaatttgataagttcatgtttgctctgtttctagcttcaaaatctatgcaagaaggctggggcagtggtggggatgaaatgaacctcagtaccagccagtgggaggatgaagaaggggacgtgtggaataatgctgcttcccaagaaagcacctcctcctgcagctcctgggggaacgcccccaaaaaaggacttcaaaaggtaagtacaacactcttaacgacggtacaccctgaaaaccaaaggtacttcagacacattcagtatccagttaatcagacaaaaagatagacctgaggttctcaaagtagtcttaggacccttggaggtcccagagaccctttcaggggagtaagcaaggtcacaactattatcatgccagtactaagactgtctttttcatttgaagtctctctccggtatagggtagaggtgtccagagaactttattgtagcagagaatgtgcagaaacaggcatgaaaatccagccatttctcttaagccagacatagagatttgccaaaaggcaaaacagtgccacccttctcatgaaaaattaattactttttattttaaaatgttaggttaatgtgtagtg

SEQ ID NO: 88247 - DNA, 1624 bp, Homo sapiens
caccttaggggctggagtacaaccttgaactcctgggctcgaattgtcctcctgcctcagcctcctgagtagctgggtctacaggtgcatgccactctgcccaactaattttattttttattttttctgtagagacagagtctcactttgtggcatttatacagttttgtattgcagcatttttgtagtaaaaagataacaataatttatgtgtacattgatggagtaacaagttaattatgtcacttctacattatacagaactaaaaggaaattctatctatgtattgatatgaaaagatcactaaagtacattgttaaattaaaagcaaggtgcagaaaaacatgtacagcacacaccctattttgtggggtaggaggaagaaaacgtgtgtgtgtgtatgtgagtgtgtgtatgcatgcatgcacacgtagtgtatcagcttctacagaatgttctaaattctctggaagggcaaataagaaactgctatgagtagtgcctcttcgagagaacaggaactaagcaaatggggtggcatgagatgaaaactttctttataccttgtttatacttttgaatcgtgtgaatgtattcatgttcaaaaaaatatagtttataaaagcattcagttaataatcagcagaaaccagaaactaaaatcagagctctccgctcatgaggagtagaagtgattacagacatcaaaaagaatcctttttacagttgggctggcaaataatccagttaatgatgggaccaaaaatagcaaattggtaaattaaaatcttgactaatctggctctggcagcatagtaatgattgaaatagccccaaaataagctagttccttgaggaaagaaagcctgtttatagagctccatatgctccatgatatagctgtggcaggctcaattgtgaaaaacactatgaagaatatttttggaagggaatttttttcatattgtaataatgcatcattagaacctttgcatttataggctcagagggaagttattgagaagcctcctggctcttctgtggtgccgagccctcccccacccccactgctctttctgtagctgacctttttcctcatcctctccttcactgacattttcctccttattccttttctctaccctatgagctataagtaacaaatagttaataaaattaacaggttgtttcatcctttcttcttgctgcctctttactcattggaataaaccccctcattttatcatttttcagaataaagcttagaaaaggcaaaaagtgtaatttttagtaaacttcacatagggctgtgttcaagggagcgcttaggattattggatagtaaaagtagtctatatttgtgataaactaaattaattatctgggaaagagaaataattatcttgctttaagttcataaattgcacatatataccaacctgcaaatgtaccttgatgctttccgtagcagtagccacgaaatactgttagggagtttctggaatacagcattattcaatgttaatacaaaaagatcctgtgacttttaaatgaccctgaatttaggctgtctcccatttctggtagaaatgcattaaaatgtagctcatggacttccccctt

SEQ ID NO: 88248 - DNA, 1087 bp, Homo sapiens
agactgcaggagccacggaagggtgcctggggccaacccccatccccttgccgtgaatccttggcagccccttgttgggctcagccctagcaaagcaagggctctctctgcccctggcttccctgtgtttgaaggggtggagggtctccatccctccttgaggccttagctggtgcctatcttgtgctcagcactcacttgttttgtttacaacattgcttctgtttgttgtgctccaggcgctctgctggaaaagaaggtggacgtggacaagcgtgggctgggagtgaccgaccataatggaatggccgccaagcccctcggctgccgcccgccaatctccaaagagtcttccgtggaccgccccacctttcttgacaaggtatgaatataggtggtttgttgtttttgcttttttaacaagaggagtttttcatttcaactgtgtccttaatacaagccagattaaaaacttgctggactataatacttaagtgacttttatccatttttttctaacattatgaacatttaactcaaagaagggaatgtcgtatttcataagatgttactgagaatgaaaaagactgggattgaaaactgattttcatatttattgtgtgaacttggctggttatctgcttcaatttgtccaatgggcaagggtcatcaaatttccattttactatctcattttaaaaacacagatcttccctttggaaattacgtgttagatgtttatcctcaggaaaagggattggaagtggtggggcttgggcacccatctctggctggcccttgtcagttggccacatgagtgaccacagctggcatctgtggaaaacgccctgaatgtttagccagtccggtcacagctcagcccccagtgttgtcatgtaatgatgtccccatgccagactggtgtgactgcaaagcggagaaaagcattgcactaaattcaatgcaaatgtcgagccttgaaaataaaattgaagtaaggaaggacacattaaaaaaaaaagatcaacaatggaaggaggctgggtgcggtggctcactcctgtaatcccagcactttgggaggctg

SEQ ID NO: 88249 - DNA, 1471 bp, Homo sapiens
gcctggacgagagagcgatactctgtctcaaaaaaaaaaagaaaaagaaaaaaaaaaaaggaaaggctcacaagcaaagaatatcagagatgggacttgatcttattttgagagtcctccagcacgtgatctgcctcagctgcagctgtggggtagcccagggtgaggctcacgtcttcatcctgcccctcgccagtggggactgagttcaaactcaggatgcccagtgaaattggaattacagataaataatttttgaaatcatactgtttaaactgataaaattactgttatctgaaattccaatgtgaaatcatactgtttaaactgataaaattactgttatctgaaattccaatgtaactcagcatcgcatatgtttatttgctaatctggcaaccctaaattgggaccctgacatttaaaatatggaataatgcacaggctggttgtgatgttagatgacataaatttgcaaaagacctggcacacagcatgacctcagtagatgttaaaaaaaaattaataaggttctgtcttttattagttctataactcaccctcttcttagattacaccctatgaaactgctgtgtttgtaggtcaaaaacaaatgtcatggaattcaacctaatgtacacctagagctttggtaataacttctcaaaaagaatctgtttatttgaaaatggttgtaaagtgcttgttgccatccttcctccgtgctcctacctgaggcagggccaatagttaggagaatagtagcagctaatatatgtgtttgtaaaatacttttaaactgaaaacagcatcttaatcctatttctttttctttttcccctcttccttttgcacatgttctccattcccttatccacacttttttgatctgttaattatttatccatccacgcctcctctgtttccttgggaaactgtttggtgctttgtctgctgatggacactgcacacagctcaccctttctttctccaatcaggatggcggcctcgtggaagagcccacgccttcaccgttcttgccttccccaagcctgaagctccccctttcacacagtgcactccccagtcaggccctgggtgggattgcctccgggctgggcatgcaaaacttgaattcttctagacaggtaaggctgtttggagagagcaaaacatggcctttgttttacctgccttctaaaaaatgtgtttgagacataaacttacttatttatagttaatacctctatttttaaatgtgactgaaaaagtagttgaaatactaccaggatttcccttcaggtgacttactggagtcaagagttgaagtaggaaatgctttagttatatttattcttacacttaactaaaacgtgtttgagctctcagcacccttggtgctaacttgggactggctaaagtgatgatgtgttgcacagtggtcttcggctgccggatgcatccagaggtc

SEQ ID NO: 88250 - DNA, 1202 bp, Homo sapiens
tttttttttaattttcaatcagtcttactgattttactataattgccatgtcattgtatacctagatgcttactgaaattatatacactaaaagacccagttaattatttcattctttaatgtgggtatctgatttatttagcaatcttagccagcaacttcatcacctagaaaatgaccaggaatcggccgggcacggtggctcatgcctataatcccagcattttgggaggcccaggcgggtggatcacctgaggtcaggagttcgagattagtctggccaacatggtgaaaccccgtctctactaaaaatacaaaaattagccgggcatgatggcgcatgtctgtaatcccagctattcgggaggctgaggcaggagaatcgcttgaacctggaaggcggaggttgcagtgagcctcgcacctttgcactccagcctgggcgacagagcaagactccgtctcaagaaaaaaaaaaaagaaaatcatgaccaggaatcatgaaggagaaaaaaaaaaaaaaaagaatgggaactccaaaagacagaaccattggcataaaacctttgctaatgagagagtacctcagccctcagtctttcccctttgctgttttttagacacatgtccaacaagtttgaggtctgcttttctgtaagcagcaggggaggatagaaggaaggagggaaggacgtgtcccagagacacatgctatgtgtcctcgctttaatggaaagcacagagctctagacatgaggtcaggaccaaggcttggccctcagagactgttttttctttttctttttcttttttttttttttttgagacggcgtcttgctagtcttgctctgttgcccaggctggagtgcagtggcacgatcatggctcactgcagcctctgccttgtgggttcaagcaattctcctgtctcagcctcccgagtagctgggattacaggcgcccgccaccacgcccagctaatttttgtatttttagtagagacagggtttcaccatgttggtcaggctgctggtctccaactccttacctcaggtgatcctcccgcctcagactcccaaagtgctgggattacaggcgtgagccactgcgcctggccagagactgtttttccatctgtcagaagggaggtggtgctgtagtgaggaatcgctgtggggaggcagtgcacatgtgcagtccta

SEQ ID NO: 88251 - DNA, 1006 bp, Homo sapiens
gagatcacgccattacactccagcctggatgacagagcgagactccatctaaaaaaaaaaaaaaaaaaaaaaaaaaaaaaaacagtatgtgtcagccacagtatgggccaagaagagtggctaggttctctttttttattttttaactaatgtcagaaagttgaaccattagttcaacttacacttaattatcatactattttaactcttcgttctgtcaacaggcataccaacgtttacaaatccagcagcagatgttacaggcccagcgtaatgtgtccggatccatgagacaacaggagcagcaagtaggtgctacccagattgatttttgtcatgagctataattttccctgatagaagagacgctaattgatgaactattagatgatcattgatttttctctagccaagccttcctttgaaaattcctgggttcagctaggtttgggaggaggttggcctagccagtagtggcctcagcataaagacaatgaagaatgcatttggtccctagacaagccatgagtgtcccttcccacctagttaacgcacctatgtctctgcctgccaggttgcgcgcacaatcactaatctgcagcagcagatccagcagcaccagcgccagctggcccaggccctgctcgtgaagcagccaccaccgccaccgcccccgccgcacctgtctctgcacccctctgcaggcaaatcggccatggacagcttcccctcgcacccacagactcccggcctacctgacctgcagaccaaagagcagcagtcttcacccaacacctttgctccttaccctctcggtgagtgtcccatggtcttcaacagccacatcaggtagagagggtacctggagtccgtatgtggtagccagggcagcatttcagtggttaggaggactggccagcgctgaaaccatagcctgttggaaatgcagccccagacaaaatcggagagcaggtatctcaaggctttttaattttaaaaaaatttt

SEQ ID NO: 88252 - DNA, 1061 bp, Homo sapiens
caggagttttgccgctgccaataatactctcagtataaaacctttaaaggtagtaccagtcagagcccccaaaatctcatttccattgtcaaatctccaaagtttgttctgttcctagtctactctgaactgtactttaccagccactgtcctccagcctaaaccacagagaagactttataatggtttggtcagtaaaagtattcagatttacattaaaagcacttcttaaaaagcagtggttgttgatacaactcattttgtatgaaatgtgatttgtataatcgaccaaatcaacatatatatgttgaaatctaacttgtagaagcacactcagcacttgaaacccgcaggtcagtagaagacatggtgccaggcctcgaggtcaggccagtcaggagagacacagctcacatacctgaagacaccagagggtataaattagtaaattgattctgcatggactaatttgccgtaagaattcagaagttagtgaaagcactttaggcttgtctgttgattgctattagagtctgtagatacaggacaaagggttatcggtaacttggaaaatacatctgtaaaggggcaaaggccagttgagtggtagtgaatttgctgccagcagataatattcatttatctaattctattcaatgtctctgaaaagagcggtatattgtaatcatatgaatcctttttacttgacatattataaatgtggtatatctttaatatgagattgataaatactagactagatgatctcgttccttaattattgtctcatccattagagccctttgtgtcgaagtaggtaagacctgacttaggaattagactccctaggtttgagtcccaactcaccaccaagaggctcactactaacttgggcaacttgcctagctgctgtttgcttcaatttctttatttttctttcttttttttttggtagagacagggtctttctatgttgcccaggcaagtctcaaaactcctggcctcaagtgatcctccctaagtgttaggattacaggcctgagacaccatactgagccatg

SEQ ID NO: 88253 - DNA, 1075 bp, Homo sapiens
gcttctttgtttcctattgtccccataggtgctatccctggaggtctaagcattgggcctccaggtaagtcctccattgatgactcctatggccggtacgatttaatccagaacagtgagtcaccagccagtcctcccgtagctgttccccatagctggtcacgtgccaaatctgacagtgataaaatctcaaatggctctagcatcaactggcccccaggtaagaccatgcaacacttctgtgcaacagcagcaggtcagaatgtgctccaagcctgcagagagtgattaggctgagaggacccagaatctgagctaaggatctggaagcgttaagcccagagctttggcattttccttggaaatccatttgtcagatcaattttgggtatggttagcatcaggcatttttctgtaaacccttagttcagcatgaggagtggaaggggtggcagggaggaagcacactgcacactatccggtaaaactattccaaccctgtgtgaaaactagcttaatatgatagctgtgatacctggttctagtttgttccaaaggattgattgctttaatgaaagagagtataaggtgtacctctaatttaattagcagattataaaaatttctacaaacaggacaaaacatcttttaaaatttcgtgaatcaatgtgccggtgttctgatctgtggcttctcattttggtttcttaaacagaattccatccgggagttccatggaaaggactgcagaatattgaccctgagaatgaccctgacgtcactcctggcagtgtccccactgggcctaccatcaacaccaccatccaggatgtcaaccgctacctcctcaagagtggaggtgagggtgctgctcttcctgcctctgcatggacggtctctctagacccatttggagatgtcaggggtgacaggttgggctgtgaggcagggatgatacaaggcacagttggcgggcaccttttctagtcacctgaagcagcatgaaaagacagcaggtagtgcttatggagaaatggaaatcaatttgagtttctgctggattttttattattat

SEQ ID NO: 88254 - DNA, 2153 bp, Homo sapiens
cttccgccctgggtgggcctggtgttccttgccctcattccggtacacccacaaccttccagcatgggcgtcatggccatcatgaacatgtcacagtgctgcagagagttttttttatggccagttttggggccagtttaatggccagattttggggtgggggtgggaatcacgggagttacaattcaagatgagatttggatggggacacagccaaaccgtatcagatagttggaaagtaatggtttctgccttttagcggcagccttcagggatttgctctgttgtattaaccagaagaacctgggagcactgattccacaccgggtctggggacaggcagaggtggagagcagagcttccctggagattctcgggcctcatcacccccgtctctcctggcacagatgggaaaacacaggcctcccgggctggtgggaagatccaaaaagtcagagtcaccacggggaagtgggaagggggtctgcagggactgtgaggttttggtttaccaaagatagcatgggcctcccaggctgagaaaggctttcctaaagcacgcagtgacggcctgtgctgtcccacacttcagcacaataagaagtggggagggccgcactatccactggcacggggccttgtcaaccaggttctcccctcttgttgcaggttctgcctggagcaccgacacctcaggaagaaccagcagctggctcgttcttcgaaacctcactccccaggtgcaatatggtgcccctgcatcactgagcatgatccagggagggttcccgcttggcccccaatgcagatgaggctgtctggtggggcaggatagttgggggttcttggtcagggtccataagtgacgctgcatgggaggagatgagcaagtgccaggattggctccagcagcggcagcagatggggcccaggggcctcttttaaccatgttcctggtgaattgtttgtttccccaccagaggctggaaaagtgtgctctgtaaatagaattgtttattttacaactagccattcaagagtggttgggcctggctgggcgcagtagctcatgcctgtaatcccagcactttgggaggccgaggccagggatcacctgagcccaagagttggagaccagcctgggcaacatagcaagaccccatgtgtgtatttttataacattttttaaaagagtcgtttggccacatcagactgtggggctagccagtcccttcccgggacccaggccacacccacctgcacgtctcccaagtctgttgtcagcagctggacccaggtgccttttgcaaaccagaggctctgtgcgacgtgctctggtgaaaggagagcagaattcaaaatggggtttttctccttcctctgattagcctaacttataaaatgtaactgaagcatccaagtttttagttacacgtttggccacagagatataaaacgttaatgttgtaaaaccacatattattaggccttttaaagaaaaacattcctagtgtttagtgtatccaatttcatacgttttttctttggaaggctgtagtgaaagaaatcagaagaaagctcattcatgtccctgtgcttcctctatcagattgatggttctacactgcggacattgtgtttgcaacatgggcctcttatcacattccacctgaatctgactcaaggcaatgctgtggtccggtacagctccaaggaggaggctgccaaggcccagaagtctctgcacatgtatgttttctcacagccacctcagcgctccaagtagctccccatcccccagagcattaggttaggggtgttgcaggggtgtcctgagccaccatagcagaatcccacaggctggccaccctcccacttctggaggctggaagtctgatacccaagatgaaggtgtgggcagggctggtttctcctgaggcctctctccttggctgtagacagctgccttctccctctgttcttatatggtcgtctctttgtgcatgtctgtgccgtaatctctccttataaggacaccagtcctgttggactagggcctacccatgtgacctcatctaactaacttaattcccgccttaaagaccccatctccaaacgtagtcacatggggaggtactgggtgttaggacttc

SEQ ID NO: 88255 - DNA, 3207 bp, Homo sapiens
gttcacgcacttgaagatgtactctgtgtaccagtacgatgttgccactagaagtctgaactgagcaaaacattcacagtctgggtttggaaatagcagtggcaaaacagaagccacaggatggcttccatgtggggccgttcccaatacagagaaagccagtgccacgaactcagcaggacttggggtggccctgttcacgtgccccatcttgctgttgcaggtgcgtcctgggaaacactaccatcctggccgagttcgctggtgaagaagaagtgaatcgcttcttagcccaaggccaggcgctgccacccacttccagctggcagtccagcagcgcgtccagccagccgcggctcagcgcagcgggcagctcccatggcctggtacgcagcgacgctggccactggaacgccccgtgcctgggtggcaaggggagcagtgagctgctgtggggcggggtgccccagtactccagcagcctgtggggcccgcccagcgccgacgacagcagggtgataggcagccccacgccgctaaccaccctgctgcctggggacctgctcagcggggagtccctgtaggctctgccatcatcagcaccaggagagccgacccctcccgggacccctcccggctgggcggccccacagacccgctggaacccagcagcggccgcccttttgagtacctctgtccaggactgaagacgaaccttggccgcagtccttgcgaactgttcgcaaaacagtgcgggctgcggtgggtcagcgtcacatgctaatgacaggatgttcctcgtagctttttattttgtgcgtcttatgtttgtatagtgtgttgtcattttgattttttttttttttttaagtataaaagctgcttagaatagttctatcatgaagggcacttttcagattgtgggctggaaagggttattttatctgtgggggagggagggagacgtgaagcctatttaaaatgagcctgtgacgattatgcacatgaccagaggcggccggtaatcagggcagagtctggtgtggaccgccgggcgcagagcggctccgcggcgggagctgagcggaaggcgcgggctgcgatctgctctctgttcccctggatccgcctatgcacattacccttgtttcattactttttcatgtcatttttttatcccaaaaaatattttttaaaagttaaaaaaagacatatcaaacatgcaaatacttgaatccagcaggccaatagtgaaatgtgaacactttctaattctacacttccaggttgacatcagtacacagaaacaggctctaggaaaaatttctaagttcatagcctacgtgtgtgtatgtgtgcgtgttgaaacagaagtgtgtgtgtgtgtgcatgtgtggcgcgtgctcctgcacggcgtgcagttttctgtgtttgtgtgtttgaaagcgtgtgaggatttaactgtgggttttcccttgtattcagtatacgctttttttttggcgcattggtcaaacggttgttattattagcttctaactttgcactgagtgtcctcgcccttcctttagctaatcctatacattacagagaattcctaggacagggctggcgacaattcatgtgtaaatgtttactcaaggactctgtgactgcgtttaaaaagtacagtgtatatctctggagaaataacatgtatacctacctttagcagctttttattgtggactaatgcaagaaaattattaccagagtattgcaccatttttccatttggaatataaagttaaagagaaaaaaaaaaaaaactgttgttgaactgtggccatagatacttgtaaagaatggatggttccgtggaaggaacagaaacaagcacttgggcgtgggttgtgactgcttttgggggagcctggggtttgggctcccacctgtttacagacctttttttctccttcagactttaaaattttaaaaatttaaaaaggaattaaaaaaaaaaaaagacttccgtcgtaaagaaacctattttcagaatgcagatgcgttccttcagagctctgggacgggacagtgttgttccctcggccatcgtcgtggactctgtcgattgctttcgccccttcgtcaaggtgacaggcgttgtggccactgtcttgcacatgccggacgcgctctcaggaaagccagggctcccgagggcagctccacaccatttcatgtatttttaaacccaactcctagcactgaagatgttatttaaaaaaaaaaaaaacaaaacaaaacaaaaaaatgaaaaaaaagaaaaagaggaaaaaaaaacacaaagaagaaaaatacctaatctctaatgtgtagcagttacatatttaccaaataatggactcaaaagaaatagatgtttgaagagtgctttatatattaaaaattgctttatgttttaaaaatgatcaatgttttgattgttttgcaaggaagaaagacaatggaataacataccttcaagtatgttttaaaaaatatatatatgaacattgtgctccctgcctgcttgatcaggaaacttgtgcattacatttttttaattagctttttaatggttttatcaaaacaaaaaaaatacaaaaaaaaaaaaaaaagtcctgcaagactgcagatccacaaaagctggttttatagaggatcatgaactatgcacaaactgggttcaagactttttttctcaagtttagtaggatatttagaaaaaccaaccttcctcagagtgactgcatctcattgccattacatgcgttctatatattcgatggacatacacctgcgtatgtatatccaatatgtgtgcgtgtgagcatgcgtgtgcgtatgtgcgtccgacataccacttcccgtgctgccggcgagcattgagttgtagaaaaactgttgttttaaaattggggatggaagtcaagaatatgtttgtttgtttttgggttttgttgggtttgaggggttttttgtttgtttgttttttgttttttttaccttttattttgaacttaatatgtctgtaactctgagattaaacaacaagttcgtggctcttaatgttttcctcatagaatgtgactgttgaagaacatgcatcgaaagttgctttcgaaagtacaacgctttattgaatcttaataaattgcaatttttttcttggctgttcaaagtaat

SEQ ID NO: 88256 - DNA, 1045 bp, Homo sapiens
ctcctgagatgtattttaggtccctgtcaaaatggccaggctccggaggccagagaaggctctagagagagtgaaggtgggcgccgggggggagatttttgtaggtcaaaagcggtcaagtgtcagcaatgtcgtggtgtagccccagtggcagccctactgtccagccctggcccctctcccctccaggctcagagtgtccccaatccctccacggaccctcacctgctcctctcctccctctccttcctctcgtagatggagtgaagcttgttgattaagaagattttgtcctcaccctcctagaaaggccagaacacaaaggggaggagaaatcatccatcagcccatccagagccatcctgttccaaactgcatttgagggaaaactcacgaggtgtattcaacatcgcaagcagcaaaaacataaaagaaaaggtgaaagggccaccaaacaaggacaaggaaaaaccaagagccaggaagtgggcgtatgtgtggatctaagcttcctagtggccaaagtgaaaagggaaatgtaatcagcagcccagagccagcctgactcaatttaaaaccagccctgccacgtactggctctgccttgggttactaactctgtgacctcagtggcagcatctgtaaagggggataataacacaaggcacagggtttacattagtttcctgctgctgtcgtaacgaactgtcatcaacttcgtggcttaaaacaccaccggtttctcaactttcagttctggaagtgagaagtccaaaatgagtctcactgggctccagtcaagcatgatcagggctacattcctcccggaggcttcgggggagaatcctcttcctcgccttttccaacttctagaggcccctggctctcagccctttcctccacttcaaagccagcagtggctgctcaagtcctgctcacgtggcaccactctgaccctgacactccggcctctgtttttcacctctaaggaccctgagatcacgctgggccaccacgataatctagggccatctcctatccaaag

SEQ ID NO: 88257 - DNA, 1045 bp, Homo sapiens
ccgctgtcttcctctgctacgccgtctggcagtgagtggggcgggtggagggagacccttctgtgtcatctgggggttgggtggtggtgcctggggggcccaaggcttaggggtgcagaggacgggctgggagggagccgggtgaactgttgctcggggtgagggttcctggtcggcatcttccccagggtgaagccctcgagcacctgcggccccttccggaccctggacaccatgtacgaggccggcagggtgtgggtgcgccacctggaggcggcaggccccagggtctcctggctgccctgggtgcaccggtacctgatggaaaacaccttctttgtcttcctggtgtcagccctgctgctgtgagtcccgcaggtgggggcggccctggggagatggccctcgctgggcctgcaccgtgtggggactggccgctcccgggctgtggccctgggccctgcccgacagcccctctcccgcagggccgtgatctacctcaacatccaggtggtgcggggccagcgcaaggtcatctgcctgctcaaggagcagatcagcaatgtgagtgcccctcctgggctgctctcagcccccaccctctcaggtcacctgagggtgacgctcccctccactcccctgtacatctcctgtgggccttggctggtgaaagggtttgtttgccaaacaagtgaccctgatcaatacgtgcacttcagatcaagtgacgaagtagccgtgagacagagccaggctcctgatccccaaggacccgcagggccccactgggaccagggctctggggggtggggtgtgatttcagcccccgggtgtggccccgctgagggtttagacagtctctgtgaggatttttgggtccctatggactcttcactcattttacaaacaggtggattaaggttgagagttaggacttaaaacttttttttttggagacggagtctcgctctgtcacccaggctggagtgcagtggcacagtctcagctgactgcaacctctgcctcctgggttcaagcaactgtc

SEQ ID NO: 88258 - DNA, 1044 bp, Homo sapiens
ctcctggtgaaggagctccagagcctggcagtggcacagcgggaccacatgcttcgcgggatgcccttaagcctggctgagaaacgcagcctgcggtgagcagccccgaccctgaccatgccgccgctgctgcgcccccagacccacttcctcagctgggctaggtggtgggggagaaggggctgagcccgtgggtggccggtctccaggaaggagagagtcaggcccctcattggtccaggcacctatggctgcctctgtccccagagagaagagcaggaccccgagggggaagtggaggggccagccgggcagcggcggggtctgctcctgctgtggccggctcagatatgcctgcgtgctggtatgggcccctggtctgccctggggctggggcggctgggcagggctggggtggcctcagtgcctcctccggcctcaccctcagggcctctctgcctgtgcccgcaggccttgcacagcctgggcctggcgctgctctccgccctgcaggccctgatgccgtggcgctacgccctgaagcgcatcgggggccagttcggctccagcgtgctctcctacttcctctttctcaagaccctgctggctttcaatgccctcctgctgctgctgctggtggccttcatcatgggccctcaggtcgccttcccacccgccctgccgggccctgcccccgtctgcacaggcctggagctcctcacaggcgcggtgaggaagccctaggactgggggacggggggtgcctgtcttctgctaccctggtaccgtgttcccttcttgtcccagctcccctggggcccccaacccttgccccgctgtgactccaggtggccacagccagctccccgcctccccctcaatgaccctggatgctcatcgtgctggggttcccatggggctggaggcccaagattgctgtggccaaggcccctccctgtttccctcactgcccctgcctggcctcctcctgctctgcccctgtggctgtcaggcctgagggtcgggtggggcgtggggaaagtc

SEQ ID NO: 88259 - DNA, 1053 bp, Homo sapiens
ctcttgctagataaacaatgaaccccgcccaggtgtcaggagtgggagataaccaggctccccccgccggggtcggggagagtcagcaggaggcttgcgggggcggcgggggggggggcgctgcccaatctggagtgagatactctgtgtccctggggctttcggcggcatcttacttggacgatccctaaccatgggaagcagatgagtctggaaatattgcccctttttggaacttggggaaactgagcgtcagaaaaattggggacttcaaccaggggctggaatgaatccagcccagctcagacctcaggaggaggggtcggaagttggcaggggaggaaggcatagtcgccgcggggcgcccggaggagggcgggggcgccgcgggccgggccgggtcacgtgatagccgaggcccgccccccccccccccgcccacgtgggccgggaggtgcggctactcccccggccccggcagacctgcgactggcccagtcgcccctggggccctttgccactcccttggcaaggagagccgagacctcagttcccggcggctcttgcggggcacaggtgagccctggctgcgcgcgcggcccctcctccccggcgcctcccaggtgagcggccgcgatcccggtcccgggtcccgccagccccagctgcttctcctatgcggggacagcggcaatcccccctgaattcctttcggcctctggggccatttggcagccgagttccctccccgggtgctcctggagctcccagggcttgaccctccggctcggacagagctgggagcggcaggggcggggaggacagtgcggggagcaaaatccgcagcccccacccaggtcccccagccgagcgccagggcacggggaggggaggggagggggtgtggccgggatgggaaggggcgggggacagggaggccggctggacgggttcggtggccccagagttgcagccgctctgggctctggggccaggttgcggttctccctgggtagcggctgctcccgggaagctcgctgccggctggggtgg

SEQ ID NO: 88260 - DNA, 1083 bp, Homo sapiens
gcaacaagagcaaaactccgtctcaaaaaaggaaaaaaggataacatggctgagtgcagtggctcacgccgaggcgtgaagagtgcttgagttcaggagtttgagaccaggctgagcaacatagcaagacctcgtctctactaaaaatcaaataaatgagctgggcgtggtggcgcgtgcctgtggtcacagctattccggaggctgaggtgggaagatcgcttgagcctgagaggtccaggctgcagtgggctgtggtcttgctactgcaatcctgcctgggcaacagggagacacccagtttccacaaaaaaaaaaaaaaattacgactttaggcttggggccaggggcttaatggagctgagggaggaacagtgacctggctaaggcgtggcctcagggtggggcctctaccgggggcgtggccttgggctgcttggggacggactcttagcgggcgtggtctagatctgcatggggtgggaccctagtggggcgtggtctcagggtgcgttgggggcggggcccttggaggtcgtggtctcgggcggggacgtggaaggagtggcatctggctgcgttgtggacgggactcctgagggcgtggtctagggctgcatcggggcgggaccctggtggggcgtggccctgggagggtgtggcctcgagcggggcgtggcctcgggcggggcgtggcctctggctactttgggtgcgggctggcccatgggccgcagagttgctgccgctgctgtcctcacacccgctcgtgggaagcagcgcctgtcgcaactcgccacttgttctcctcacagcaggttcaggagaagtggcacctggtggaggacctgtcgcgactgctgccggagccaggcccgagcgactctccgggccccaagtaccctgcctcccaagcttcgcgcccgcagtccttctgccccggatgcccatgccctggctccccgggccaccaggccccgcggccgggcccctccgtcgtggatgccgcgggactgcgttccccttgccctggacagcacggtgccccggcctccgcccgcagattccgcttccccagcggcg

SEQ ID NO: 88261 - DNA, 1036 bp, Homo sapiens
taatagcggctcccacggcctgacccgggccggggggaagctgaggcacttgtcagtagcacatgggcacctgctggcttctagccactgcaggcggggctgaggtcattaaaagcgaggaaaaacactagctaaaaaccctttcctaaaagtgccctggaggagtgagcggctgactgaagccctctgggcacaggcacttggggtgtggctctgccagcccccgccaggctatgaggctccttagctgtgtgtcagctgcacaggatggaacaggtgaaagagaggggctggcagttccaggaggctcatgggaaagtccagggcagaggggagggccctctctgtcccccttcccacgctaaccgccgctcagtacacagggggcggctggtagccctcggtggtctccgcgttctgggtgaagggtggctgttggtagttgtccacagatgcacctgggtaggaggcgtaggcagtgttggggtccggagtggggtcaacgtaattctggatgaagtcgtccacgccagccttgtagcgctggtaggccagggaggccagcacaccctgcagggggagcacagcagggtacaggtgggtgggggaccccaccctccaccacccttgacccaagaaccggcccctggccatcctacccaggagaagatggaaaagaagctgaaggtgatggctgccctcacagagtcggcccccaccagcacgtccttcgggttggtgactgcccactggttggtgaggaagcagaaaccaacaaaccacaggaaggtccagagagctgggggaggacgggtgaagcgtcagttccatggaaagggaggggctttccaggactctgggaggggacgcgggcaggtagggcagggacctcccgggggagcctccacactatggaggggaggacttggaagccgggccgggagccacctccaaagtcccccacactcgggccttggcagggtgggccacagcagacagcctaggggacaaaaggggcagaggcaaagcccatctg

SEQ ID NO: 88262 - DNA, 1777 bp, Homo sapiens
gtgtggaggctcccccgggaggtccctgccctacctgcccgcgtcccctcccagagtcctggaaagcccctccctttccatggaactgacgcttcacccgtcctcccccagctctctggaccttcctgtggtttgttggtttctgcttcctcaccaaccagtgggcagtcaccaacccgaaggacgtgctggtgggggccgactctgtgagggcagccatcaccttcagcttcttttccatcttctcctgggtaggatggccaggggccggttcttgggtcaagggtggtggagggtggggtcccccacccacctgtaccctgctgtgctccccctgcagggtgtgctggcctccctggcctaccagcgctacaaggctggcgtggacgacttcatccagaattacgttgaccccactccggaccccaacactgcctacgcctcctacccaggtgcatctgtggacaactaccaacagccacccttcacccagaacgcggagaccaccgagggctaccagccgccccctgtgtactgagcggcggttagcgtgggaagggggacagagagggccctcccctctgccctggactttcccatgagcctcctggaactgccagcccctctctttcacctgttccatcctgtgcagctgacacacagctaaggagcctcatagcctggcgggggctggcagagccacaccccaagtgcctgtgcccagagggcttcagtcagccgctcactcctccagggcacttttaggaaagggtttttagctagtgtttttcctcgcttttaatgacctcagccccgcctgcagtggctagaagccagcaggtgcccatgtgctactgacaagtgcctcagcttccccccggcccgggtcaggccgtgggagccgctattatctgcgttctctgccaaagactcgtgggggccatcacacctgccctgtgcagcggagccggaccaggctcttgtgtcctcactcaggtttgcttcccctgtgcccactgctgtatgatctgggggccaccaccctgtgccggtggcctctgggctgcctcccgtggtgtgagggcggggctggtgctcatggcacttcctccttgctcccacccctggcagcagggaagggctttgcctgacaacacccagctttatgtaaatattctgcagttgttacttaggaagcctggggagggcaggggtgccccatggctcccagactctgtctgtgccgagtgtattataaaatcgtgggggagatgcccggcctgggatgctgtttggagacggaataaatgttttctcattcagtctccagtcattggttgagccacagcctaggggttggaggaagactccactctgggtacacccttaggggctggctttatggaacttgtagtttgaacaaggcagtggcaatccgccccctccagcctgcctggctggcccccttccctctgtctggggtcgcattccgcacaagcctttcatcaacatcttaaaatagtaactgtgctcagcttgtaaacaagatgatttttctggcctgcagtgccagggtcctgctgctcccttcctagagtgggggtgggggtacctgggagttgtcggtgaatgcccctttcttgcactgaataggggtaccataggtaagaccaggtttctaccttcctccagggtcagcacctctggagccttcctgggacacggccttggccgtccagcccacccctcggagataaggcccatctctggaagaggt

SEQ ID NO: 88263 - DNA, 1027 bp, Homo sapiens
ctctgcttccccagttgaagtgattctcccccgtcagcctcccaagtagccgatattacaggcgtgtaccaccacacctggctaatttttgtatttttagtagagacgagttttcaccatgttggccaggctggtctcgaactcctggcctcaagtgatccacctgcctcggcctcccaaagtgctgggattacaggcgtgaggcactgcacctggcccccagatctttctgtagtaatactgatctcttaaccacaacccttgaactgagaaatgatcatggggtgtgtcctaagcagaacatcatctgccttcctgtctgggccagtgtcaggacaaaaatgggtgtacagaggagcccggggcccagttggaaggaagaggcactgtcctgcccgctgggcctgtgaggtcaggttttgtttgtgaaacaaactcttggtaattcaggagtcaagacatctctcagctgtgcctcagagatgggctgttggcagctcacttgggggcaagcatcgctggggtaaggtgtgtcctgtgcaggcagggtcaccactcccagggcctccccagcctccctctccccttcgctagtgatgtgtcccaagccaaagccatcgggtgaggctgggagcagtgccctgttagttcgtactggggatttttaaacaatcgggacttgccgatgacagctccctctgtcattgctcaaaagaagaagccagaagttgctttagggccttgacctcttccagagatgggccttatctccgaggggtgggctggacggccaaggccgtgtcccaggaaggctccagaggtgctgaccctggaggaaggtagaaacctggtcttacctatggtacccctattcagtgcaagaaaggggcattcaccgacaactcccaggtacccccacccccactctaggaagggagcagcaggaccctggcactgcaggccagaaaaatcatcttgtttacaagctgagcacagttactattttaagatgttgatgaaaggcttg

SEQ ID NO: 88264 - DNA, 1440 bp, Homo sapiens
gcgcccggccgctgacctggcgggagatttggccgcagcccgccccctcgtgggaggaatccgggacgtgcgcccagggactgggagggcctggaaatcagggcgatggacgtggctgatcggggtggggcctggtctgagccccgcctcggtccgcccaccaagtttaaaggggcggagcgaggcggggctctggccatataaacagagggacgcacgcccatgcggctgtagacgccatgatggatgtgtctggtgtgggtttcccaagcaaggttccttggaagaagatgtctgcagaggtaggtggattgcagggagggactaaggggctggggcggagttagctcatttattagattggaattccaagaaggaagcttagaagccgtctagagcactcctgtgggcatgcagagcgcctagtgcgtgccaggtccccagtgcttgagcaccatggtgtattttaccttctcctaaggatttttgttaacctggttttcaggataaagaaaattgaagtcctgactatgctaataatatccgtagaccctgccaggcgtggcggctcacacctgtaatcctagcacttttggcggatcacgaggtcaggagttcgagaccagcctggccaacatggtgaaaccccgtttctactaaaaatacaaaaattagccgggcgtggtgatgtacctctgtaatcccagctactggggaggctgagacaggagaatcgcttgaacccaggaggtggaggttgcagtgagccgagatcatgccatttgtactccagcctggaaggctgggcgatagaccaagacttagtctcaaaaaaaaaaaaaaaaaaaaaaaaaaaaatccatagacccgcaggaggttaggggacaaagttctggaccttgatctgaggttacacaatgtttttgggtctgtgcttatgtggcacaggctgaaggattcagaacagctggtatttacattggggttgtgaaggttagaaacatacaggccgggtgcggtggctcaaaaaaaaaaagaaagaaagaaaagaaacccattgtataatcatgatcataaataatagcaacaaagatggtggtagtgatcacagagtgtgccaggtgtggctgtaaggatcctacaggtaataacctttccaggtacagattggacagatccaaggacctctgacaaagagctccttcactgggaggaagaagcaacccacactgactggcttgctttattttactcgcatgctttatctcttttaaccttgtgatttggatacatgccttctttttttgagacacagtctcgctcagtcacccaggctggagtgcagtggcatgatctcggctcactgcaacctctacctcccgggttcaagtgattctcctgcctcagcctcccgagtggctgggattacaggcacactgt

SEQ ID NO: 88265 - DNA, 1027 bp, Homo sapiens
ggtcgtaactgctgtgggagtggtgcccatgatggcattaactgaattcgtttgggggacctcatctccccttaaggctgccagctggctaaaggcacagcggtcgctggtatacctctagaccatggatctgagggcatcttggagaccctgggatactggggcgagggcttctaaggcagagaggagcagccgggcatgggcgagggggaggggcacactctgttgagaaggaaagtcttacggagcctcatgtttgtgccctgcaggagctggagaatcagtactgtcccagccgatgggttgtccgactgggagcagaggaagccttgaggacctactcacagataggaattgaaggtactagtgtgacctctccgtggccgcattgggtgtccttaagcatgtggcagtgattcagaatgctgggggttgggggggctgtgctgcaccacctgggcctcgaggggcatttcccaaacaccaggcactttataaacctccctgctcaggggcaggtgcccaggaccccttgctgcagggactactggaggcaggagaggtccgggggaggtccacggctcagtcgaccatgcctggcctttcttgctcagccatccatacccaggcccgtaaggctgcgggctgtggttggcatagggaggtgaagtgaacagaggaacgttccccatccgctgctgaatgtggaatgcggtcactattcctaaaaagcaatactttgggaggccgaggcaggtatatcacttgaggccaggagttcaagaccagcctggccaacatggcaaaaccctatctctacaaaaaaatacaaaaattagctggacacctgtaattccagctactcgggaacctgaggcatgagaattgcttcaacctgggaggcagaggttgcagtgagctgagattacatcattgcatgccagcctgggtaacagtgagaccctgtctcaaaaaaaaaaaaaagcaatgaagcctcttttttttttgagactgagtcttgctctgt

SEQ ID NO: 88266 - DNA, 1042 bp, Homo sapiens
ccctctgcctcccgggttcaagcgattctcctgcctcagcctcccgagtagttgggattacaggcatgcaccaccacgcccagctaatttttgtatttttagtagagacaaggtttcaccgtgatggccaggctggtcttgaactccaggactcaagtgatgctcctgcctaggcctctcaaagtgttgggattacaggcgtgagccactgcacccggcctgcacgcgttctttgaaagcagtcgagggggcgctaggtgtgggcagggacgagctggcgcggcgtcgctgggtgcaccgcgaccacgggcagagccacgcggcgggaggactacaactcccggcacaccccgcgccgccccgcctctactcccagaaggccgcggggggtggaccgcctaagagggcgtgcgctcccgacatgccccgcggcgcgccattaaccgccagatttgaatcgcgggacccgttggcagaggtggcggcggcggcatgggtgccccgacgttgccccctgcctggcagccctttctcaaggaccaccgcatctctacattcaagaactggcccttcttggagggctgcgcctgcaccccggagcgggtgagactgcccggcctcctggggtcccccacgcccgccttgccctgtccctagcgaggccactgtgactgggcctcgggggtacaagccgccctcccctccccgtcctgtccccagcgaggccactgtggctgggccccttgggtccaggccggcctcccctccctgctttgtccccatcgaggcctttgtggctgggcctcggggttccgggctgccacgtccactcacgagctgtgctgtcccttgcagatggccgaggctggcttcatccactgccccactgagaacgagccagacttggcccagtgtttcttctgcttcaaggagctggaaggctgggagccagatgacgaccccatgtaagtcttctctggccagcctcgatgggctttgttttgaactgagttgtcaaaagatttgagttgcaaagacactt

SEQ ID NO: 88267 - DNA, 1005 bp, Homo sapiens
ggggccagcccgtggggacgctgggattggagcccaagccccaggttcgccgcgcggctctcgacttcctctcctttcccccaggggcgagctcagcgaccgcagagaggtggggtcgatctccctgcgaccccagggggcccgcgaggccagtgcgcgggcaggagcggggacgtgctcagaagagccgggcgccgccgcgcccgcccgccccccgtcccccggctcccggctccgcgcgccccccgccgcccccggggccctgctacccccgacccgtcccctcccgccggccgcccccatggcccggctgggcgcgctgctcctggccgccgccctgggtgcactgctcagcttcgcgctcctggccgccgcggtcgccagcgactactggtacatcctggaggtggcggacgccggcaatggcagcgcctggcccgggcgcgcagagctgctctcctcgcactcggggctctggcgcatctgcgaaggtaaccggccaccgcgccggccctcctccctccgcgacctcgtccctccgacacccccttaaccccgccctgctcgtgttgccccgccagacccccttccaggacccctctcttgcatcccgctctgccccagggtgtctctccgctccctccccatcaccctccgtcttcccccaaaactgacagcccaagggctacaggagggagggagcccagttcggggcccctcacagccggaggagggggctgtggggcgacagtgggggagggaagcctagaggtgtgtagttggggggcctcatccaagtcaccaggggttgtttcttgatcacgctccccggggtttgggcctggcagccccttgtccccgtccctgtcaggcactgtcagagctgttcaccccacacctcctgatgccgcgggggcaggggttccaaatgtgtacagaggcttcagagtccggggagagagaaggggatcccagcaggctggagggtccacagggccccctccg

SEQ ID NO: 88268 - DNA, 1003 bp, Homo sapiens
aggagtttggggccactccttgcctgcctcaaagggggcctggctgagggtgcttcttgaccacaggggccagggctgcctagggtggcgcagggctgggcctggagtttgggatgcaggcttgttaaacacagggcagaaccccaggttgggaggggctcagtttgcaggcccaggcccgcaggcccactgctggtcccagggtgagacaggtgagaagagggatggccagcacacacttgagtccccttgggccacaaaggctggggcacgcccaccgttatgcagatggacagttgaggtggctgcaggagaagggttcccagggcctgtacaacacgtggaagcactaaacggccccgtttggggtttgggggcccttcccgagtcttgagaggtcttgagaggtgtgctggggaaggtggcagcctcttgtagcttgatcttcctccaccctgccccacccctaggtctctttattgattcaaaggttaaggaagctcctgggggcttgagggggtggcacagttttggtggggcccagtgaggacaaatctggggggtgagcagggcctcctcttcctcctggtgtttgaacgtttaccattccatgtgggaccattgtgccaatttgtccttaagtaaatcacttgtgctgtgtgcagtataagccttttatttttcttagaacttttcaaaataggtaacacatgcctgtctgtcataaacagtacaaacgtgagcaaacactgtcaccagctgtgcgcgtgtctgtctgtccatccagaggtgttctgagagcgtgtgtgcacgtgtgtgtgtgtccactgtgaagtcatctgtagacatacaagcctacttcttattcccagatcagcacagggagtggggaggggggcctgggtctccgttttggaaacgggggctggcttcgtgggcatgtcctctcagcttgggaggaaaggtgtggcggactcttcctctcctcctcctggcccccaac

SEQ ID NO: 88269 - DNA, 1031 bp, Homo sapiens
ttcacattctcacacacacatgcacactcacatgcacacacgcacacgcactcttgaaccacctgaacagttttacaccccatgcttcttcctctcaggcttgcgaagtgctacttcctatatcttaaatcccctccagggacctgcaattatgacttggggtcaccattagctcacccaaggctccttccagagcagaacccccaccccacccttcagatcagttatacttccctgctcccaagaactgacatatactttagaatatatatagctgagcttaaaaaaaaaaaagaaaaaagaaaaaaccctattactgtcggatattggttaatgattggtgagggagttggagggggagaaatccccgcccacaaggctcagtttcactgggaaagggactttccttagaaggaaccaagacgtcttgtatcatcagctcttaacgatttgggaagggaagctaaatagctctttcctgtaattcgaacaactaaattattcatcgagagctgcagacagagattggacagtgacccgagaggcaggagaccccagcccagccccatgacccaggcacagggccacctccccggctcctgaggggccagtgcccgaattagaggggtctggaaagtgagcggccccaggggtcccagagggtggtgggagagcctggattctagctgggagatgggggaggagggagacaggagagagtcaaagggccctggcactcagggacttgtccagatgggaaggggcctgagtggcttccccttgctgtaccccctgcggcctggagcccctcccctgaccttgggctgttggggtgaagcaggcacgcccagaatcctccctcaagatatggcctggcctccttctgccacaggaggcttggaatggggaggcagggaacaagggacaaccaagcttgtccctcaaattcaaaacagcccgcagttcactccccttgatgcccggttctgggcaggggagacatggctgggtgagaaacaccgccccgaagc

SEQ ID NO: 88270 - DNA, 1120 bp, Homo sapiens
cgtctttagcagagcataaagtggcatttcacttgtccctctacccaacagcaaggaagtggacctctcttaggcttttcttggaagacgaaaggaaagaaagaacgttctcaatgtgagatcctacaggaccactgtactgggtcgaatggcgtccccccccaccaaattcatgtctgcatggaacctacaaatgtgactttgtttggaaagagggtctttgcagatgtaattaagatgtactccacaggcctggggagatcaaggctaacagcatgttgtatgaggatggccccagtccaatgactgatgcccttatatgagggaaatctggacacagacacacagagaaggccacgcggtggtggaggcagagatgggagagatgtgtctacaagccaaggagcgagcaggaccgccggccaccaccaggagctggcaggggcaaggaagtcattcttccctgggggcttcagagggagcacggtcccagtacaccttgagtgttggccttctggcctccagagctgtgagagaatccattttggttgtttgaagctgctgagtttgtggcgttttgttacggctgtcccaggaaaggaatacaatcaccaaatgtcaaacacagggcagctgggaaaaacaagagggaaatgcatgaggcacgtaaagaaaagacttggaagagaccaaggagggacaggaaggaatgcttcctcaacttcctcctcgcacccggacaggaagccggagacctagtggctgagccttggaagaagcggctacctattcccccccacaagagcgggtgagcttggatgtcggatgaatgagaagggtctgaatcttgctgggtcccagggagaccctgttaataataacaaactcaagatatggtctcgtctcatcctcaccacagtgcctaaagcaggttttattgaaatccccgtgtatagattaggaacaaggcagggcggttgggtgcctgcccagggtcataggcagcagcagtgatctggaactggagcccagctttcccacaccctgcccttaccacttgtcctctcctgatccagggctccagtgcccatgtccagtgccttggtggggctgggccaag

SEQ ID NO: 88271 - DNA, 1077 bp, Homo sapiens
gcaagtttcccgccgccgggatgagccgccccctggacaccagcctgcgcctcaagaccttcagctccaagagcgagtaccagctggtggtgaacgcagtgcgcaagctgcaggagagcggcttctactggagcgcagtgaccggcggcgaggcgaacctgctgctcagtgccgagcccgccggcacctttctgatccgcgacagctcggaccagcgccacttcttcacgctcagcgtcaagacccagtctgggaccaagaacctgcgcatccagtgtgaggggggcagcttctctctgcagagcgatccccggagcacgcagcccgtgccccgcttcgactgcgtgctcaagctggtgcaccactacatgccgccccctggagccccctccttcccctcgccacctactgaaccctcctccgaggtgcccgagcagccgtctgcccagccactccctgggagtccccccagaagagcctattacatctactccgggggcgagaagatccccctggtgttgagccggcccctctcctccaacgtggccactcttcagcatctctgtcggaagaccgtcaacggccacctggactcctatgagaaagtcacccagctgccggggcccattcgggagttcctggaccagtacgatgccccgctttaaggggtaaagggcgcaaagggcatgggtcgggagaggggacgcaggcccctctcctccgtggcacatggcacaagcacaagaagccaaccaggagagagtcctgtagctctggggggaaagagggcggacaggcccctccctctgccctctccctgcagaatgtggcaggcggacctggaatgtgttggagggaagggggagtaccacctgagtctccagcttctccggaggagccagctgtcctggtgggacgatagcaaccacaagtggattctccttcaattcctcagcttcccctctgcctccaaacaggggacacttcgggaatgctgaactaatgagaactgccagggaatcttcaaactttccaacggaacttgtttgctctttgatttggtttaaacctgagctg

SEQ ID NO: 88272 - DNA, 1743 bp, Homo sapiens
agagagatgattgtttctctgggacaacagttcaaccagcaactcagtttcttgggcattaagacagaagtttttgctttgtaatcctcggaaataatgcctatggtaggactgaggataaatgctttgaccggtattgagtggtagtgtaggtttctgagcctttctttgccttattcggtttgcagttcttttctgattcgttgtggccttggtgttcgagttattcatgtttgttgtggctgcttaccctttattagctgctgactttgctttcttctccattattcagttgcacctcccaatttctcattccccgaatgatgtggtttcttgtaactcgctgatcattgattcattgataatagttctgtgcagtcatgagcttgaattattttaggttttagcttgtcgatctgagtcagctgttggagggccagtgaaccctcgtgaggggacgttccttttactgccgcggtttcctttcaggcatagagacagccagagagacagagaactctacttaaaattacttctgttaatgatttagaagcactgtcatttcctcttaagctagcatctgactcattatcattaggaactgctggatccgttaatttattcatcatgtgtgtattgagcactgctgtgctgtgctaggtactcaggaagcaaagataaagacacagccccacctccaagacgctcagacccataaacaattacaagaagtaggtagaaggtcatggcagtaccttggagaggtcatggaaggcttcctggtgcagtggctcatagctgttttgaaggaggggtcggagtagttaggctcggtgaagaagagggggagtggatgttcaagaagtgatagtgacatggactgcagcgaaaggcaattctgaggtcccaccaatactgaaaccatttccaggagctgactaggggtaccgagtaggggatggagggagggaagaagaggagctaggagcaagccagtctgggccagagacccaggaagacaagttctgagattccatgtatgatttcttttgattctggttcagcctgagatggtgggggcttttatatgaagtcggggcagtgggagcagaaaagagggctgagtgagaatcagtcttgatggggcacatggatgttggtacatttcacgaaaacggagtaaagaagaggctcaggttttggggatgatggtaaagtgcatttgggttatgttaatcagtatccaggttcctctaggtgatgtgttcagtgtccagttgactgtggcagaactggagctcaggagagggagacagatgcttcagatagggtttttttgagtcatccggctacacagaatggttttttttttttttttttttttttgagatggagtcccactctgtcgcccaggctggagtgcaatggcacgatctcggctcactgcaagctccgcctcccgggttcaagcgattctcctgcctcagcctccggagtagctgggaatacaggtgcccgccaccacccccggctaatttttttttgtaattttagtagagacggggtttcaccatgttagctaggatggtctcgatctcctgacctcgtgatccccccgcctcggcctcccaaagtgctgggattataggcgtgagccaccgtgcccggcccacagaatggccttgttacttggagtagatgagaccaagtgggaaatgtatcatgaaggcattagttcctaat

SEQ ID NO: 88273 - DNA, 1213 bp, Homo sapiens
gcaggaagtacggtaccttcttgtagtttctggagcctttctcaggaagtgttatgactgttgctttttctcatcagttcacttttttacatttaaatatctgtgactgagagggtagggtgagttgttctcaaaaagtagtttctgaaaatattgcaatccagagagctcagtttcttttaaaaacttcttttttcatggttttgtacagatttggatgggctccaggccacagagtctgtaccgtgaatgtaccttacggttaaagaagggcccctggaccttcagaccacgcctctgagggacactgaattaccgacctgtgtttggtatggagagcgcaacttctgccctgttcagtgaggacagccctccagctttaccgtactctttcatcaaagtcctacataccctgttttgaaaaaaccccaagaagttggcctgttacatgtgtcccattggtagtgggtgacagtcagtactgcagctctagggggaaacacgtgttctctgacaccgggagaagatgtggaagggacgtctaaaggtgcagtgtagaccgcggtgtaattccctggtgtttgcttgtcttcagtggcatcccttctctgagaagcgggcgcccggtagggcctccaggcgctgttgacacgcgctgaggagaaaggcgaggggtgccagtgttttccatgaagcagagcacgcgcagctgcagaacggtgaagtggaaaaccgtctcctccaaaagggagaaatgccttctgttttccccaggtttctttctttctttctttttctgagatggagtcttgctctgtcgcccaggctggagtgcagtggcgcaatctcggctcactgcaacctctgcctcctgggttcaagccattttcgtgcctcaacctcccaagtagctgggattgcaggtgcctgctaccatgcccggctaatttttgtatttttttttttttgagatggagtctcgtactttcgcccaggtcagagtgcagtggcatgatcttgcctcactacaagctctgcctgccgagttcatgccattctcctgcctcagcctcccgagtagctgggactgcaggtgcctgccaccaggcccggctaattttttgtaatttttagtagagatggggtttcaccatgttagccaggatggtctcgatctcctgacgtcgtgatccgcctgcttcggcctcccaaa

SEQ ID NO: 88274 - DNA, 1041 bp, Homo sapiens
gtgctcggcccctttttttttgagacgaagtctcactctgtcactcaggctggcatgcagtggtgcaatcttggctcactgcaacctccgcctcctgggttcaagcgattctcctgcttcagccttccaagtagctgggattacaggcatgtaccaccacacccaactaatttttttgtgtttttagtagagacggggtttcaccatattggccaggctggttttgaactcctgacctcaagttttcttcccgccttggcctcccaaagtgctaagattataggcatgagccactgtgctgggctgcggctctcagcttctttgaaggccgcgtgtggactgaccacatgacctggagcagtacagcggcacctgatttttggatggtctgagagatggcagaaatgctgtgaggcaggggagacattgattttatgctgctgttgcctgttcccccgcccccgaccatgtttcattagtgaatatgagactctaggccccttggggcctcgggttgatgggttgctgtgcacctttcccattgtccggtggtttctgctgcactgaagggtccttcgctctcctctcttgagctttgcaggagggtggcccaggatttgggaaacccaggcagcgagccctgcgttacacatctaggcccttcatctgcaagctgatgcctgtgagtgtcatcaccccctctagagacgggggtgggggaggaacagctgtttcccacctctgcactgggtggccacggccagtcgcagacttccaggatccacagaggcagcaccttctgctgttgactaaggttttcttggcagtgaatcggcagtgacagaccggtgggctttctgggaagtgcagctgtgggccatctgttgtctgtgcagggacatttacgaagcctgggaagattgagggctttatcatgaagcaagtgagtgaaatcatcttcctggaatttgtggccattcaggccttgggatgtttgagcatcctctcccccacgtccctcttgaggtcacacactgaaga

SEQ ID NO: 88275 - DNA, 1044 bp, Homo sapiens
tgttaggactgatttggggtatcatcttggggcactgatgtgttctgctcatgtgtctatatacctgtccatctatgtttcaagagtgattcgtgcccagtatggacattggaaactgcagatgggtagaaggtaaagagggcaggtttgagacagaatcttgctctgttgcccaggctggagtgcagtggtgtgatcacagctcattgcaacctctgcctcctgggttcaagtgactcttctgcctcagcctcccaggtagctgggattacaggcacgcgccaccatggcgtggctaatctttatgtttttagtagagacagggtttcgccatgttggccaggctggtctcaaactcctggcttcaagtgatctgcctgcctcggcctccgaaagtgctgggattataggcgtgagccactacacccagcctgccttcattcttcttaatggccgtgttgcattttatagttggcctagactgagctttacttttcaggctgagtattttcatttaggattgtgggaccttatttgggaggttaccatacacgtttcgagcttgctttaaatattaattggtgaagacataggatagttcagcttggagtgggatttgcctcccaggtcaaagggttctgttttcttagtgaaccatgaaaatgatgaatttgaattttgaatttttctcctctctcaggggcagataagagtagccaagaggcgggtcgtgatggcatccctctacctggggacaggtcctttggaacaggagctggtaaggtttatggggagatggttgtggcagcaatagtgaatgggccccaacatgccacagctttttgtgccatgcagttggtgtggagctgcctttccttggcctccatgtcagagccagctcttgtttttgttgccccagatatgggcatgtcaggagggcctggtgaggagagcatgggggagggcctggtgaggagagcttgaagaggtctggtctgggccttctaggcctcactggcagtgtcctcctacccacacagggcc

SEQ ID NO: 88276 - DNA, 1045 bp, Homo sapiens
agctttgccttttggcccagaaagcctaaaatatttaccatctgacccttaaagaaaatgtgtgtggatccctggtctaatgtaacgggccaggcatggatatgagagaaaacaggccatgcttaggccaggatgagagccagcacgctccgagcaggagcggggagactcgagcccagctgtgcttgggagaatgagtccacagagaggctcagggtgtgcgcagggccccccggtgctcctccctccggcagccctgtccagcatgtggcagtgtgactcctttctcccctggagggtgttggcatcaacaggctagactcctgcatgggatggtccttctctttgttctgtagcccagccctgaaaggcactgagtgtctgttcctgcccccagctcagaccatgcaagccagcaaggatgacctgggacagccctccttccctgtttcacttccctgatcagccttgccaaagccttgttgttttatcaatcgtttatcagacaatcaactttggacagttgatattctccatttttgtatcattttcattctagtaatttctattcatatatatatatatatatatatatatatatacacacacacacacacatatgtatgtatatatttttgagatggagtttttgctctcgtcacccaggctggagtgtggtggcacgatctcagctcactgcaacctctgcctccgaggttcaagtgattctccagcctcagctgcccgagtagctggggttacaggcacacaacaccacacctggctaatgtttgtactcttggtagagacagggtttcaccatgttggtcaggctggtctcaaactcctggcctcaggtgatctgcccgctcctgcctccgtaagtgctgtgctgggattataggcgtgagccactgtgcccggcctgttcttatttttattttttgcttccctatactgtattcttggttttattctgttgtttctttcccctgtcttcctgagttggatgcttaactcattaattttcagctttgtcttgtct

SEQ ID NO: 88277 - DNA, 1400 bp, Homo sapiens
atcatgaggtcaggagatccagaccattctggctaacacggtgaaaccctgtttctactaaaaaaatacaaaaaattagcggggcgtggtggcgggcgcctgtagtcccagccacttgggaggctgaggcaggagaatggcgtgaacccgggaggtggagcttgcagtgagctgagatcgtgccactgcattccagcctgggcaacagagcgagactctgtctcaaaaaaagaaaaaaaaaactgaagcccaggttcccctagactttcatccacctctgtggggattgaacccaccatggtgtttaaaaaacgcccctaggagattctgatgcctagcctagccttaagaaccactgtcccagcttggaatgggaagcttctggcatgtccagggcatcccacgtgctgctttgaggcccacaggcctgtctaggcaggtggcattgtttggtgtgggaagtgactgccacactgtcctgcaggacccatcctggcatgtgttgtggctgaaccaggctggtggtcagtgtctcagggcaggtggccccagcccgtggcgggtgtggaaagtatttttggattggcgttacttctgggaataacagcagtacccagggatggggtattgaaagagttggccagtggggcagctttgacctttggggaggcctcagacccacactgtcgtgtgctggagaggtgcagaggagtggctaggcgtcgctctcctcaactgcactgtgctggaacgatgaggaggccccttaactcagcctggagggtgggaggctcctggcctgtggcttctgactctgccacgggttatttccctgaagtggctttgataaacgtgagctgactccccagttaccgctgaaacagaaacacccaacctgcttttctggggcgtcttgccttttcccggactgatgtgcttctgccactccctctctcctgccctggtgtgggtggtgttgggtcggggcggggggtgccctgcaacccaggagtgctggatgagtgggaaattggggatgatcttacagctggatcccagggcacgtgcccatgtgggggatgggattgggggagagttggcagaggtgggtgagggatggatggtgtgtggagggggctgctgctgagcagaggggcttcaccctaaagccaggaaccagaggtcagaggtcacttgatgctgaagtgagaggcgagggtccttccctgctcagtggttgtgtccccagtgggatcttaagtcagcacctcttcaggcccatcttttgatggtcacttcctccagggcagcgtgtgtcaggtgagagatgagtgggcagccgcagggtgcttgtggatttcgatggctggcccagtggaccattcatttcctgactgtct

SEQ ID NO: 88278 - DNA, 2625 bp, Homo sapiens
attcctgccggtggctatgcactgatacctccactcccttactcaggtcctgtaggacaggcctgggctgatctcagctcctcctgctcccagaagcccttgggcagagacaggtagccaggactctgtggattctagatccttgcccctcagacagcactctgctgtcagcacagcactctctgggagccaggcaacaagaggcttcacggagtgactgtgttgaacttgctggtggccccatgagtgtggtgatgcaaggaagagcagcgtggggggaagaggcaccttctcatgtaaaatgaccccgtggctcagcagctgccagtggatttcagtgcagtctggtgacagaaaattcagagggctggcctttattcttaagggttttctgtgttgtcaagtattgccaggactgtctggcagttgcttagatgccttgttggaaagattcttgtgtgataaccatttgccgatcgttcaacagcctgatacacctcttttgcatactatgctgatttcttaacatattttatctatcaatcagtcaatcagtctatcatgtatctctatcacatttcaataaattgagctgtttcaaagaaccagaggaacactcaactatttaaaggcatgcactagagacttcttttgcaatatggtttatctatttcattcttatttggatttttgtaaagggtgcctattcagaatactcaggagaagccatgcaagtgtgatttggcatagggattactagacttgaagtctagaagcctggttctgagtccacatttacctgtggccacagctgaggggcctggcttaacctctttcctgtgcagtcggggggatggctctagattgtcaggaggacacggggaacagggctgatatttgactttctataaaataaccgtatggttcctaggccaggtgaggcaccttggtggggcgcgtggaggttgaaatcacactgggggccgagggctgctgcgcgtccctgagcgaatagattggcagaagggagtggggtgggggccttggatcccttggtgccgtgtctctggccttgctccctgtagttctgttgcgctgattcggtcgtgaaggaaggtgctgccaggccgcttcacctgcatcgccttggctttgggaggtggggctgagtgggcatctgggttggatctcaggcaggtggcagttcctctgattcatggttgtcagtttcctgttgcctggccctcgctcctcgcccagtaggtgtggtgggacaaggttctgggagctggggtagaatttggactcttaacgggaagtgcctcgtgctgccgcagacacatctggatgggtgctgagctttccttcccaagcctggtcctgatcgggggtggggtacaggcaggagcagcccggccttgtcagccgttgaaagtgtggtatctgctgggttgccagtaagctcgcttcgaggtcttgagaggcagtgcaggggaggctgagtatgaaccgtgtcaagccagttcttatgtctctcttcatctttctgctccatggaggtgagggacagagtgagtggtgcccatcccattatcacattcaggcaggaaccatgctgtgctgagccaggctgtgtccatctgctgggacatgggctctgccctccggcgtgcatttcatgaggaagatcagaaagtgagttttagcatgttgacttccatttcttctggacgcagtattctagcactaacaacacaatgtgggtggctagggcggagcaggtgttggattaagagatttctggctcatgctgacagggaaatctgttaatggttgtgagaatgtcactatttttattgccttcctgataggccaattggcgttctgcccaaaggtgaactgatggtgagaggcgggcagccccaccctgtttgcctaggccacacgtgaggcggctctcccctgggcacccagtgggtgtggtaggggtgctgtgcccgtgcaaattgcttgcttcaggctgagcacacacaccagcctgtgggcccttacagtttctcagagctgtactaatgtcagagcaggtgagtgcttatcctgtaaggataagcctgtgatgtcttctgtcccctccgtgtttttactggagtctgagaaccctgtaagatttattgcagaatactgtgggagtgcttgagggaggagtatgtgttcatgcatgtactcttaaaatgttcatacacttctgccttagaactgcaaaggcctggcgtggtggctcacacctataatcccagcactttgggaggccaaggtaggcggatcacctgaggccagaagtttgagaccaatctggccaacatagtgaaactgtgtctctactaaaaatacaaaaattagccgggtgtggtggtgcatgtctgtaatcccggctactcgggaggttgaggcatgagaatcacttgaacctgggagacggaggttgcagtgagctgagctcgtgccactgtaccccagtgtgggtgagactccgtctcaaaaacaaaacaaaacaaaacaaaacagaaaaacaaaataggccaggtgcagttgtgacttacgcctgtaatcccagcactttgggag

SEQ ID NO: 88279 - DNA, 1814 bp, Homo sapiens
tccagcctgggtgacaagacgaaactctgtctcaaaataaaataaaacaaaaccaaaacttcagagctttttttttttttttttttttttttttttgggacggagtcttgctctgtcacccaggctggaatgcagtggcgtggtcttggctcactgcaacctccgcctcctgggtttaagccattcttctgcttcagcctccccagtagctgggattacaggcacgcaccagaatgcccagctagtttttgtatttttagtagagatggggtttcaccatgatggccaggctggttttgaactcctgaccttgtgatctgcccgccttggccccccaaagtcctgggattacggggttgagccactgcgcctggccgtcagagctttttttacacttaatttgaccttttttgggagagacattattactctcagtttgtttatttcattcaaacagatatctaacaaataccagctgtgtcccaggcatcattcgggacattgggaatgggtcactgggtaccagacagactaactccctgccctcctaaggcttatactttgatggaaagcagataataagcagatgcgtctctacaaatatcggaacgagctacgaagagcagagcaagagaaggctccaggctgctgcaggatctgttacaagggggctcagggagggcctcgctgaggagtagacactcgggcagttggcctgagtgaagagggagcatccatgccaccgtctggggccggagtttcctggcagaggggagagaaatgaggagcctcctcgaccacatggggcttgcagaacagcaggggcactgggagtggtgggcactgagattggagggtgggcagggcctattggaaagggcccagaagccatggcacgctgccatggaggccaggagtgccgaggcctggatcagccttccgcagggcagtatgactgtgcagaagagcaggggcaggcgtcctttctgaagaggaggcccagagctgggaggcagcagcagtcccaactccaggtcctcctctggtgtccccgcgacacttgatttatagtgagtgagtgtggagtagcagccgcctctgcttcccctgcaccctgccctctctggcacccagggctgcagtatttatctctgccccatgaactgccagcagtcagtcccttcccaaaagcacttggtccgcagagggctgcttcctccctccccaggctatcgttcctgctgcacgtctccctcatctgatggttcctggaatagtaaagatgtcaggcccaaaggtcaggccctgggatgaagagtcgggcgtgataaccagtttacagccttggactgggaaacagatttcccgacagcgagtcccaggcctgatagtcttagccctgtgtatacacagcctgacatcctgactggtggtgcgggtctgaccggagctccagaccgctcaggcctagagcgagggagatgaaacagaactaaagggctcctgcttttttttttttttttttttttttttttgagatagggtttctctctgttgcccaggctggagtgcagtgggggtaatcttagctcactgcaggcttgacctctgtaagggcttttagattccccttctcccgttggaaacttcccagttgtcctcagggcacagaccaatggctaaaactgacttgtgagctgaaatcttgaaaaaccattgttcccagctgccctggcctgtggggcatgctggggtgtgggcatctcacagcagcaccccgtggcatctctggacctggcaggtgcttgactcat

SEQ ID NO: 88280 - DNA, 1008 bp, Homo sapiens
atgccgaacctttaacagttgaccctttgtcttaaaaggaaaaggtcccagggagaaaatggtggtctcccctagtgcagagaaagaaaaagtccccaggacgtggggtgcaacgcgtctgggaagtcacaggcatgatcttccaaggctcagccacccatcactgcactcttggagacccagagtctttcttgctctgctctgagtctcactcgttgcctcaggaaacagctctcagggcagccccacagcacgggtgagcctgggcccccagccacaccctcagcgccctgggaaatcccacttgctgcgaccaacctggtgaagctgctgctgcagggcctggttctccgtcacgatcgcaatctgggcctccaggtcccggtgaactgacctgtacccaaaattaggagagccaatcagcgtgagacagggcaggctgctccctgccaggtacagccagaggcctgcggggaaaaggaaacgtgcagacaggaaatgagcacagcatctaccaaagtcctctccacacgctgctgcaatctaagagaaaggcggcctgccctgggtgcctggacacgaggggctgctgcagagcggcggacaggccacaccaggactcactcttccacccccaccccggcgcggcaggaagcagggacccaggatcagggcgcagcctcagctcaactgctggtctttgctttcaccattcacactgtggccttgtgtcccaagcaggacgagaagcaggctttcccagagggaacatggtgacgccacctgccgacctgctctcatacacccctgcccagctgcccactgagcctctccccagagagctcagggcctcgaaccccactctgaactgcctctgcacatccagacctgctgaccctgcctgctaagctcagagcctgcactggccatcccttcctgtgagcactgagaatcagctcacgcgtgcttctcagaagcagccacctcagcgcgcaacacggcagatgg

SEQ ID NO: 88281 - DNA, 1093 bp, Homo sapiens
ggcaggggtgtatgagagcaggtcggcaggtggcgtcaccatgttccctctgggaaagcctgcttctcgtcctgcttgggacacaaggccacagtgtgaatggtgaaagcaaagaccagcagttgagctgaggctgcgccctgatcctgggtccctgcttcctgccgcgccggggtgggggtggaagagtgagtcctggtgtggcctgtccgccgctctgcagcagcccctcgtgtccaggcacccagggcaggccgcctttctcttagattgcagcagcgtgtggagaggactttggtagatgctgtgctcatttcctgtctgcacgtttccttttccccgcaggcctctggctgtacctggcagggagcagcctgccctgtctcacgctgattggctctcctaattttgggtacaggtcagttcaccgggacctggaggcccagattgcgatcgtgacggagaaccaggccctgcagcagcagcttcaccaggttggtcgcagcaagtgggatttcccagggcgctgagggtgtggctgggggcccaggctcacccgtgctgtggggctgccctgagagctgtttcctgaggcaacgagtgagactcagagcagagcaagaaagactctgggtctccaagagtgcagtgatgggtggctgagccttggaagatcatgcctgtgacttcccagacgcgttgcaccccacgtcctggggactttttctttctctgcactaggggagaccaccattttctccctgggaccttttccttttaagacaaagggtcaactgttaaaggttcggcattggggctgggtgtggtggctcatgcctgtaatcccagcactttgggaggtcgaggcaggtgggtcgcctgaggtcaggagttcaagaccagcctggccaacatggtgaaaccccacctttactaaaaatgcaagaaagtagccgggcatggtggcgggtgcctgtaatcccagctactcgggaggctgaggcaggagaatcgcttgaacctaggaagcagaggttgcagtgagccaagatcgtgccattgcactccagcctgggcaacaagagcgaaactc

SEQ ID NO: 88282 - DNA, 1034 bp, Homo sapiens
gcgaaaccccatctctaaaaatacaaaaataagctgggcatggtggcctgcacctgtaatcccagctactctggaagctgaggcaggagaattgcttgaacccgggaggcggaggttgcgttgagccaagattgcaccactgcactccagcctgggtgacagagcgatacttcatctcaaaaaaaaaaaaaaaaaaaaaaaaaaagcagacaccaaagttgcgtcatggtaggtggctgggctccatggcccctactctgtccagcacttctagctcgctgagtggcccgtggaaggttctggcgtgacccctgctcagaacggccaaggcccggtcgttcccatgtcattctatgtcctctcctcctagcggctcgtgtgtccttgcaggaactcgaggcctggacgacagactttgccctgcccaccaccgtgtggctggccggcttcttcaacccccagtcgttcctcacggccatcatgcagtccatggccaggaagaacgagtggcccctggacaagatgtgtctgtctgtcgaggtgaccaagaaaaaccgagaggacatgaccgctcctccgcgagagggctcctacgtgtacggactcttcatggaaggtaaggagggctcttgtctgtctgcagaagcttccagagccagtgctacttgccaagacaagataaaactagctcttggcaaagacaggctgttcaagagctgtggggacaggcaggagagaggtgctctcagggggcatcagcctgcaggtcagagccacgctgaccctagagagggttgagaggattcagggaatgtgcagggtctggaggagaccaaaaacaccccagtcacctggcctctgctttaatgaaaacagcagagcttgtgagagagcagctccgacgtgatgaaaagcgctgaaaagcccaggctttccctgccacggagcagtcagcccagggcagaagtgcgttttgtggctgcactgagactccaggtcatgctggctggcccagtctcacccactccccagct

SEQ ID NO: 88283 - DNA, 1049 bp, Homo sapiens
gaagtatcgctctgtcacccaggctggagtgcagtggtgcaatcttggctcaacgcaacctccgcctcccgggttcaagcaattctcctgcctcagcttccagagtagctgggattacaggtgcaggccaccatgcccagcttatttttgtatttttagagatggggtttcgccatgttggccaggctggtctcgaactcctggcttcaagtgatctgcctgccttggtctcccaaagtgctgggattacaggtgtgaaccaccgtgtccagctgctgtttgctccattttaaacaagggaacaggtagagaagggtcaggaagaaaatggcttcctgtttgtggataatttaggagcccaaagaggctcttgccttcattgcctcgctccttatagaggacggcttaccctttgagggtcgcttgaggaggagctgatggaagctgctctgcggcctggcttgttttcctcctttgggaggaaatggctgcactgtcagggtgtgggaggggcatgggctaggcccttctggccctgatctgacagaggacaggcccccaggagcctcctggccatgctcctgcaggctctagggtgtggggtgtgccgagctctgggcactcggtccccgagtcttaggaagcctctcagagaaaacggcacttaccctgatgcggagcagcaggtctgcgtaccaggccgccaggcccatcatggaggggtaggcccgggccacccacgtatcaggcacggtgtcatagaagagagccgtggacagatcttccacgtcggtcgtgatggtcagttctccctaggagacacacagatgggtgtggggagccctgagctggggcctgggagagcaccagccccagtgcgtgtcatgagttgtcaacacagtgtggctttgtgctgcgcctctggagacgccctgcatcagggccacgcaagcgcttcctgctaaggaacggtctagatgagctcccggggcttgttctggaactgccagagctctggagagggagcagtaccatgctgatccggggcc

SEQ ID NO: 88284 - DNA, 1074 bp, Homo sapiens
gatctcagccatgttgaaagtctccggaatcttctccaggatgtcgtccagcacggccttcacctggaagccagtccccggacagcccctgtcactgcaaagagcccaccccacccactgcagggtcagggagcctgcccaaaatgttcccagccccaagtcctggagaggagggaagaggcaagtagagttgccagaaatgcagggtcatgggtgcagccacacatttgatgaggagagggagccttggccagcggctccgagcattctgatctcactacaagtccctgcagccgcggccatgagcgcatcaggccacctggctcggtgcctcatttgttcattcccacgcaccagcctctggtcaaatgtagccagcggttgagggattgcgactttgtcctttacgtgggctttctgtagggaccatgctggtcacaccctgttaaggagtggcccacacagtgcagtggtcacctgcaccaccgtctgtcagccaattcctgatttcagtcattagactaagagaaagtcctggacctaataggaataagggtctcacatcaagaattcagtctttaccgggaagtcctgtacttagctagtacgtaatagagcctttccacattctattaagaagtacaggccaggtacagtggctcacgcctgtaaccccagcactttaggaggccgaggcgggatggtcacctgagatcaggagttcaaaaccagcctggccaacatggtgaaactgtctctaccacaaatacaaaattagccaggtgtggtggcaggcgcctgtaatcccagcctgggaggctgagccaggagaatcgcttgaacctgggaggcggaggttgcagtgagccgagatcgtgccattgcactccagcctgggcaacgagagcaaaactccgtctcaaaaaaaaaaaaaaaaaaaaaagtggaggtacccaggaggcagcacagagccacccagacaagcgagaatttgttcagaacactggcatcccctgaactcttctaatcctttgagcagtaacaggacctgccattgtggccactgagcggctc

SEQ ID NO: 88285 - DNA, 1049 bp, Homo sapiens
aggaggctcatgtggggagtcttttcttcctatcatgtatcgcagggcacccctcctcagtcaggttagcgggggacaaggggttcccctaatgatactctgagacattaaggattaacaagaactcaggactggagtccgcagcctggggtggaatcctgcctctgtcctcgaagaactttgtgtgaaatgatttacccctctaagccctgtttcgtttctgtgtaaaatggggagaagaaaaaagttcaggggatcaactcaagtccacagagagtctagcacagccgctcggtcaagcttccatcaggcctgggcctcgggggcggggcccccggcgcggcgggacactcacttgatagcgtaggtcatgcgatctggccgcaggcagcgcaccatgcacagcttctgcagggccgtcttgttcttccactccttggggaagatctccttctcgggggcttccgactccaccagctttttccagcgcttggcagatccttcgatgtcactgtccagatttttgaactcatccatctccgagagggcctaggggcagaggcagcgggccctgtgactcttcccacttacccgggtcccgagagccttcctgtacagttcattcaaggaggagaggccattaccctccgaggaaaccggggctctgggataaggaagcccgagaggctggccaccaaagcaggagctgtccatgcccagctcaggcatcccaggacagcgccgggagcctcctcggcagggtctaacctgcggacatgaggcctgggatgggctaggggctgcttctctaggggtctctgcaaatggggccattctagctcaggggacgaccttcttcaggtctttttgaacagaccttgagactcgagggtccctgactgtgtccaggaatctgaagaacaaacttttcacttgccacttcccttacgctgggaggaggggaggctggggggaggaggggaggctggggggaggaggagaggttgagggagggatggtaagaggccctgaggcctcttctggccccc

SEQ ID NO: 88286 - DNA, 1026 bp, Homo sapiens
tgaccgaagctgcttttctcctttctcatggtagggaggcgccgatcgcccgtggcccagcctcccaagccctggctgccagggcacgtcaccgaggcagctctgaccttctcctcgatctcgctggctgtgtgcttggtggtctccagattctccaccaaggccgtgtctcccagaaagttccccgacgcagccgacagacgggccaggagcgaatcttccagctctttcagaacaatcttaaattcgttttgagacttggtgaggtttgcctgcaaggggaggtgcaggagtcactgcattgcctggctctgtccaccgggcacccgggcctccctcaggtggccatgtagctgagccaaggcccaggctttgagcgggaggaacgagctcaggtcctggaaggggctgcagaagcagagcccctggaacctcagagaggccctggccctgctcccagccttgaggcttcctgtcacggagactgtagggggcagaacggggacaggcgggcctgggcctcctgagcccatgcaagtggctataacagccagaaatgtggcaggtgcaagggctggcagccaggccattcttgcagggcagcgctttggagcttagagcccccgaggaccgctgtgactcatgttctttaagcaaagaggtcatgtgacttagaattaaatttgggagcaggaagaggggacagctggggaaggaaatgagccatcctgtcgtatgagaagctgtgatgccgtgggacacactgaggcaccttcagagagaagcaacgacacacactggactggcagccctggtcggggaccctcacagtgacctggccccctctgtgtgggacggcacctcctcccgtgtgaccaaacttcaggccattaccttcagctgttccagatctgggcgctctttggccaccacagcggccaagagttggtcctcgagtccatccctggtgaccaggaagttgatgagggtgcactgagcctgcatctctggcttgtagtgtgggtt

SEQ ID NO: 88287 - DNA, 1050 bp, Homo sapiens
aagccccggctacgaggcccagccccgactcacttgaaggccttcaggcaggcctcagggatgtgctccttgtcgaacttcttcagggagtctaggaaggtgtccaccttgcccatcatgatcttggccgccttccagctcttgtccttggggatcttgcccccaggtgcggtcagaatcatgacggcggcggtgacgttgaccacagcatccggcggggacccaaaggacttcagctctgtcaggttgttctgcaaatgacagacgggatgggtccgatgggagtttggaccgggtcctcggtgatgccccgaagaagccgccatgagtgtgtcaccacccacgccaacagcgaaggcagcttcctctccaaccaggccaggggtcccctttctttccctccccctttaccttattcagagtgtccagagcctcctgggctgccagcagggccggttctgctttggccaggtctgtttcacaggccttttgcttctcagtgacgttctggaaggaagatggacaggagaggttactgcaggcctgtccatgtgcctgtgggggcgtgtacgtgcatgtgtgtgcatgtgtgtgcatgtgtgtgcatgtatgcacgtgcatgagtgtatgtgtgcatatatgtgcatgagtgtatgtgtgtgcatgtatgtgtatgtgcatccatgtgcatatgtgcatgtgtaggcagcagtggtgaggggcggcccaggccccagcaggtctgagctccataagagaggctgcccctccggccaccactcatttgctgtatttgctgaatgtgctcctttgccgacatccctgtgtgtgtgcttggcccctgtctggagcccaccttcctccctgacgcctctactctgccccacaacgctcaggtcagaatgagcaatgcctcgacagttgggtgggattctggaatgggaactgttccttctatcggcttgagcttccaagactggaggggaaatccgggggccactgagaccgccttgactttgcagtcttattgtttctggggctgtttcataa

SEQ ID NO: 88288 - DNA, 1032 bp, Homo sapiens
cccctcccccggggcgaggggacctgttcagctgttggcacagcattcacttggggccagggaagccactcatcacggaggtcccaaaaatcccggatgccagtgtgtgtgtgtgtcctgagagatgtggagttttcctcataggacagggttggggcctcatcctccagaagagtgaatggtggaggagggacaagggaggctaattgcaaaggaaagcaggtgaccgatgccatagggcaggtcacaagcttgggtaccacagcaagcctatctggtccagtcctggcttggccatttactaagcaagtgactctaggcaagctcgacaagagcttattgagggcctggaatttcccaggcacagcgatgatgcaacagaacctgacgctgtggagttgacatgctagcgggggaggtggccaggtacacaaagaaataaggtaattgcacactatggtgtatgctctgaatgacaaacccagggcagtaagacagagtgtgagggctgaggagtggcctctgtgagagcatggcatttgggctgatactttatttttttttttattgatactttttgatatgtagtctcactctgttgcccaggctggagtgcagtggcacgatctcagcttactgcaacctctgcctcctgggttcaagtgattctcacatcagcctcccgagtagctgggactacagaggcacactccaccatgcccagctaatttttgtatttttagtagacacagggtttcaccatgttggccaggctggtctcgaactcctgacctcgtgatctgcccgccttggcctcccaaagtgctgggattacaggcatgaaccactgcacccggctgggctgatactttacgtgggaggaggtgggcataacttagcctccctcagccacaaactcctgctcagtaaaatggggatataagcaccaaacttatgtgttgttggagaaggagaaaatgggaatgtaaggggccaaacccaatctctgactcagagtaagcagtcagtaaa

SEQ ID NO: 88289 - DNA, 1025 bp, Homo sapiens
tggtgatgtgggtgatgtgatggtgataatggtggtggtggtgatgtgattgtggtgatggtggtggagatgataatggtgatggtggtggagatgataatggtgatggtggtgatgatggtggtgatggtgatgtggtgatgatggtggtggtggtgatatgatggtgataatggtgatgatggtgatgttatggtggtaatggtgatgatggtgatgtgatgatgccacgtggtggtgatggtggagatgatgatgatggtggtggtgatggtgatgatggtggtggtgatggtggagatgataatggtaatgatggtggtgtgatggtggtggtgatggtgatgatggtgatgatggtggtggtgatggtggtgatgatgatggtggtggtgatggtggagatgataatggtgatggtggtgatgatggtggtgatggtgatgtggtaatgatgatggtggtgatgatagcgatggtggtggtgatggtaataatatttcctctcatttactgactgcttactctgagtcagagattgggtttggccccttacattcccattttctccttctccaacaacacataagtttggtgcttatatccccattttactgagcaggagtttgtggctgagggaggctaagttatgcccacctcctcccacgtaaagtatcagcccagccgggtgcagtggttcatgcctgtaatcccagcactttgggaggccaaggcgggcagatcacgaggtcaggagttcgagaccagcctggccaacatggtgaaaccctgtgtctactaaaaatacaaaaattagctgggcatggtggagtgtgcctctgtagtcccagctactcgggaggctgatgtgagaatcacttgaacccaggaggcagaggttgcagtaagctgagatcgtgccactgcactccagcctgggcaacagagtgagactacatatcaaaaagtatcaataaaaaaaaaaataaagtatcagcccaaatgccatgctctcacagaggcca

SEQ ID NO: 88290 - DNA, 1065 bp, Homo sapiens
tttaagagacaactatggctgggcacggtggctcacacctctaatcccagcactttgtgaggccaaggcgggcggatcacctgaggtcaggagttcgagaacagcctggccaacatggcgaaaccccttctctactaaaagtacaaaaattagccggcgtggtggtgggcacctgtattaccagctactcaggaggctgaggaaggagaattccttgaacccaggaggcggaggttgcagtaagccaagatcgagccattgcactccagcctgagagacagagcgagatttctcctcaaaaaaaaaaaaaaaaaaaaaaaaaaaaaagacaactgaactgaatgttctcatctttccaaactgcaaacctaaacgtgccacctttggtttctcggtgccgttaggagaaaatctgcactctgtcccgaggccctgggattctggctgcagctgccctgggcaccctctgcctctggctctcacatccttgccacaccggccttcctgggcttcttcacgtgtggcagggcatttacacgtggcaatctctccacccagaatgctctccctctaaggtcccacagccagcaggacactgctgccagcttccagctgtgcaccatctccccaggggcatctctctgctggggctcccagctgggaggctcctctgtgactgcactgggggttttcctcagggctcttcctttaccgggtaatgtgcttcttcctctcccggcgggacagacacctcggtggaaggggggaaggaggatccccccctccgcgggggctctaggccactgctgcatgtttgtgaaatgggtgatggacgaaactgatagaacctctcccctaccctggccctacctcaatgccttgtggccccacaaacttgggggcccagctacgacccgtgtctccctacccacgttgcagcaccccccccaccgccccacaccagtcctgccctactgccctggggctccgcctcttcctgcgccccgccctggccccgccctcaccgccccggggccacgccttcccctccggccccgccccgtc

SEQ ID NO: 88291 - DNA, 1008 bp, Homo sapiens
caggggagggaaggggagggagctgtgattctcagacacttctgcctctcgtgggtgtgcaggccatgttctaccgaacaggtcctaatgttgaaaatcggttgtgtttggacattccgtgcaggcgtgtggagggtactgcaccgattcctgcctctaaatcaccagtcggtggccctgctttggggacagttacctgcagtgggacatcgggatccagctcaaaggagggcactttatctgtccagggcaggaacttttttgtgtcaggatcaatgtagtagtcaaaaatcgttccctgcgaggggaacttgatagtcttgaattcgttgatccaccatttactgaactccactcgataatccacaagctgttgagacacagaagtaaaaatcagggcccagctaagcaggatgctgagagaccctgtgtgggtggccgggccccccaggtgcatcacctggtcctggaacatggcgccaccgaaggcccagaagcaggtgaacacgaagtacagctcgtacagctccctgggggagtcggggggcacggtcttctccgtgagcaggcactccagcaggtacagaatcgtttggatcaccgtgatctccggcactggcgtgatcttcttgaacccaaagcgcaacttgtccaggcacgtgggcaggtacttgtcaaagaggatcatcaggttggccttctccgactgcaccttgcgcctctcgatccagctgctcaccaccctgggggtgacaggaggcgccgatgacacagccgctgctctgggtctgccagtgtccctgccttggtaaacgcccctccctacctccacccaattctgctggggctgccctcagggtcaccatgcctgcatggcaatgggtccaaacgagggtgccagaggggccagttgcaggccctgaaagggtcggaggaggatgccagggtcgtgggggctgtgccctctctggggttgctagctatgggggtgctgtaggtctagaacag

SEQ ID NO: 88292 - DNA, 1865 bp, Homo sapiens
ggctgtatttgccagctgtttctgttataagctccaggtgagaagcccagaacggaaaaggctcctgaggccacctctcagtacgagttgattcttccttgatagaggaattctgctttgattctcacccaggacccgggagattttgttttcaggacactagcacataaggttaagagccagtgtagaagctcactgtaatcatgaaggtgaagaagagagtagaaccatggggatttacttcgtgttccagggaaagtgtggatttgaaggctcccagcatctcccctcctgcttcctccttccttcacttccagtgaaacactccttatgtgccgggctgcttgtcagtagcagagtagcctgcactaggtgctgacccttccctctttttctgttctttggcaatttctaccacataggctttttgctgactctggcaaatttgcattgtatgtcattattgccccgggttttctcgccacaaacccatgctcatcctgccgtcccgattccatctccgggtgtcacctagatgcgcttgctctgcttgtacccacaggctttcactttgtgaaagacgcttctgtttcagctctgtgtcttgttactgatgtcaatgttgtgggctccacgttctcctgatgcctctcccccaaccctctctgagaagagagggtgtcgtgtgtgtcgtggagcctgcacttgtctggttgtctcttgtcgaacgtgcatctctttttgctctgcaggtggcagggtaaagacttggaagagacgctggttcattctgactgacaactgcctttactactttgagtataccacggtgagcacctgctagtcggcctccagactagggatgggcaaggcctccggttccaagtgtctctaatcagacatggttgaggagaccgttggatttgcccttcagtatctgtgggggatgggggagagtttaagcaaagtgcaagaactgaagtaaatctcagaatggggaacccctgagaagaggtgcgtgccttaaagggcacgggctcagagcaggcacccggttctggtgggacaggagatacctggcctggaggagggggagcactagaaatgggttttggaactgggctagaaagaatgaatttgcattggttgccgagaaagagtatgtggccctaattgaaagggagatgaaaagaaaaaggaaataatcgtgatttagaaaattcacctattctgggttagcagaaatgtgatttcagaagaaacagcccaaggggtaaaatatatagtgggggaaaaggaagtgaagtgaaatgggaaaagtcaatttgagattatctggagttttaagaagttttgttggtttttattcagtgggagagacttatagctgcaaatttgtgttttatatacgtatatctcttttgtaataatagccaaagaaagtaaaaatcataaattagctcttttcagagctccctctaagcaaggtacccagaaccctggcaagttagcacttggtgtggagaccgtggctcaccggactggtgatggggtgctttttcatttctgccacctttcttggtcattgtaagggcaaagcgggcatactcccatggcatcgaacttttgtcttaaagtaaatcaaggccgttgagttgagaatgctttgcttttgttctccaagtgtatcttcatggagcaaaagtcattgatcccactgagaaaattaagactcagaagtatcttttaaaatcagtttagagcaaaatggggcttaagtaaaacattgaaatcctgaccatattcaccagtcacttatttaggaccaagaaacaggtacacgccttggcattttctgctgtgag

SEQ ID NO: 88293 - DNA, 1142 bp, Homo sapiens
cctagagcccttggctgcagctcaatccacagcactcttactcattcttgggcagtggttttttttttttcttttttttttcccctccttttcaatctgaatcagccacattaattattttgttcatttagaaaagctgaaaatgcatttctcttccctttgccagaagtgatgagcttgtattgctgagatttgtggtcatgccttgccgtgaaggtgacagggtaatcaataggaaagactttagtagggttttcatacacattcatgtccacatgtgtttactttattaatggtttcagaacatagagctctagactctctggacataatgatgtcctttttttttttttttttttggacactagcagggtactttcctctgttgccttctgctttagcctttgatgagttgggttctcacattagcaggggctgttccgtcctataccagcccaactgcttgccccagtgattagaagtcagtactctcttggtcattactgacacatctgggaaggctaaaatggaatcctttatttctgactaggtcagatagcagtagactttatatttccttttaaagtcatatcccaagtccttgtgcttatacataatgacttaattcataaattccccttacagcaccacttcaccgatcagttttaaatatctcttgaattggccatcattttatatatctttaagcccccagaatctttgaagttaaggctctaaaattactaaccccataggcagccttcccttccacattcctattgccaagtggatggagttgaaaggaaacctactggaaacgtttaaagtgtgttcaagtttggatttacttccccctacagcgagatttgtttaaatgctaatactaagtgttagctttgacagcccagatactaaaattagaacagtacaaagattatcttggttcttagaccaggatgacatgcaaattcatgaggcatctcgtattttaaaaaagagaaaatttaaccaagtgtgggactcagttttagctcattgcattactttttctaaacctccatcaaatccttctagactctgaatattgtgttttcattgtagcacacttagtatcactctttgtgtttatgtgctgcagaagg

SEQ ID NO: 88294 - DNA, 1093 bp, Homo sapiens
ctgccctttcttcttaatgaaggtgaatagaaacaagggcttggattctgcccctctgaagaaagctgacccttatccattatctgagtctttgtgtagcctcccaagttttctcttcattatggaatatgaaagcacaggactggctgtgggggatcaagacccaaagtctgattagacaggagggatgtggaaggcaacaggtggaattttctaagatgtcagtatcggtggagagaaaaggcaggtatcttaggtcttggtaggcacaggtctgggcattaagagcctttatcagcctgcagcgtggtcagccgaagggaggacaaagtcagggactgtagatgcagataggaggtagagttggagcaggagtggccctaggaaacagcagagattcccgttttcatccacccctccctgtgcttcaggagggttcgcaggaacctgtgtgtggctgcaggctgacagaacctgcatgcagtttactgctggttaaatcagagatgctgggctagacctcctggaaatttttagtagtatccatctctcatttttcccttggattttgataatcctgcaaaggcaactttactggatttatagtgttcttgtctctgcctttctttctgttttcagcctagctgagatttcctttttatttgtttttttttgttttttttttttttttgagacggagtctcgctgtcgcccaggctggagtgcagtggcactatctcagctcactgcaagcttcgcctcccgggttcacgccattctcctgcctcagcctcccaagtagctgggactacaggcgcccgccaccactcccggctattttttgtatttttagtagagacggggtttcaccgtgttagctaggatggtctcgatctcctgacctcgtgatctgcccacctcggcctcccaaagtgctgggattacaggcgtgaaccaccgcgcccgacgagatttcctttttagaaaaggactcttaaaactgccaccatcttctcctgtttaccttcagaagaactttaacttgtggggaattcatatgggttttgtgttacggctggagccattaagtaat

SEQ ID NO: 88295 - DNA, 1677 bp, Homo sapiens
tggctaatttttatatttttagtggagacggggtttcgccatgttgaccaggctggtcttgaactcctgaccacaggtgatctgcctgccttcgcctcccaaagtgctggctggtctcagacttttgggctcaagtgatcctcccaccttggcctcccaaagtgctgggattacaggtctgagccactatgcctggcctagtttgtttttaaatcaataacaggtatcaagaagtttggactggctgaccttggtggtcttactgctgccacctttgctctgcctcacacagtatgtgggtgtgttgggcccttctcgcaagctcctctgtcatgtgatggttccgtcttcagggctgtggcaggaccgcgctggttcagtttgctctgtgtcagctgagtaaaggatgggtggagtacaccaattttgtaacttgtaacatttggtcttgtggttttgcaaggaaggggtgatatataattagtaaggcaggagagcaaaggaaacaggaaggggatctgcagtgctcctgtatcaaagtagatctccaaagcaacaagggacaaaagcaagcacactcctcccgcccacccgtttttacttactcttatttgatcagagaactttgctttcataaacatccttgaattaaggctggaattttttggtaaaaattcctaactgaatttggtttagaagtatacagaaaacccaatgaattaattgaataatctcccttacccccttcttcagacaattctcctgtattctctcaagtaataaaagtactagaaagatcaattgtatttatcattaaatggctggtgcttataatttattccttgaatccagttaaacagtgagctttcctgataacctaggcattgttgtcccctacagtaacctgggcctgttggatgtgtaaacattttcctttgacccaggactgtgttgaaactatttgttaatcacacagcaggatgatcaatacttacaccagctgacgggacacctggcatgactactcagtgatccagtaaaaccacgccaagctggttccatagagttttcatttttgatgataggactcgtagctctcagaatcagagaatgtttagaggtgaaacttaccacaaatgtgggtcagcatctttagtttgtttccggtgtgtggggtgcagtggcggacagtgagagagccatgtgatgggaggaggctgcagagctggactttgaataatgggtagggttcagaaaagtagaaaatattgtgaaatttattttattttgtttttttgaatgaagcaacaaaaacagagatttattgaaaatgaaagtacactccacagtgtgagagtggacccgagcataggggctcaagggccaaaaatactgtgaaatttattttaatcaaagtggaacatagatatagttttaaagatcctatacaacacaaaattttacgtgcttatagcagcagttttcataagaaccccaaagtggaaacaaccagatgccatcagctcatgagtgggtaaagaagatgaagtctgtccctacaagggaagattctttagtcataaaaaggaatgaagttctgacacatgctgcaacatggctgaacatagaaaacattgtgccaggtgaaagaaaccagtcacacaaggccatgtatta

SEQ ID NO: 88296 - DNA, 1001 bp, Homo sapiens
ataagaaaagagagtagtttcttctgtgttttcatggaaaggagttttctcacaggcataatcttgagtgtctactcaagatttgggaacatttcacatgtatgtattacggtttgtgaccaaagactctggataaaaggaggatttatatcagaattataggaagagctgtcatgctgtaccatggagacctgtgtgtgggtggtgagaagattcaacaagaaaaataaggtctgggcactggcatgtctgggtgctgctgcgggctggggagaggagcctgttgcatttaagaaagatttgccttttcatcaccatgtctccagaataggcatggtgcctggggccctacagaggcagctcagcaactgtggagggaataatggattgaaccaagttccatcttgtaaaaagttaatatgtggtgagtttgagtttttttcctcaactctccatttcaaacagaaaccagaacacttctgtgcatgtttgaccccatgcagaacccgttttctttgtttttctatgatatggatgacttccattattctcaaacttagttactaacttactgatttgcctttattgaaaagaacacaattatttacagtgaacaccttcttagaaaatctggaacataaggttgccataattatacacactttgtggtctttaagatatattctcagggtgacatgaacatgtcagagtataaacatttttagaattcttgatgtctggtgccaactttttccaaaagggctgcaccaatttactcttttcttagcaatgtatcagtacacgtacctgtaatagtgcaaatgtgccctcagtgaggatcaacattttaaaagtttttttttaaaacaaacaagcaaacaaactgaatttggtggttacaaaatggtgacttattaaatctactgatcactagctggattgaaaaaaatttttattttgcatatttgtgtattatgaactggctacatcataagaaatga

SEQ ID NO: 88297 - DNA, 1025 bp, Homo sapiens
tgtgaactgttccctctgccatgtttaccgtgtgatgttctgtagttgaaaatgttagttgtctgctggcacagaatttatctcgttcctttctctcccttctctcctccaaatcagtctcttcccttctccactagataactgtaaaaccttttcctggggtacatacattcgttaactcttgggcagtggtgagcacgagatgactttctgcagcgtttatcactgttgggtggagtcacgtcccttccctccaccgaagtcatcaaccagatagggaagggaaagatgaggcccagaaaacgagttcaaactctaggtcttgtacacgtatgtaagtaaatgtcaataacccaagcctttgtcatagcagtcacttggttgacttaggatctgggtctgttgaattttgtgcttgggaatggagctggagggagtggggcctgtgtacagcagctacctctcccaggtcctctcacttgcctgccccgcgtcctggttgcatggccgcacctgtgtgtgtgcagaggtctgtgtcccatcctctgcacctcctttccgggggcctggggagccccacgtgttgccaagatcttggtgcaataaaatactccggttttgtgagttctgtgtctttgttggtttcatttgattttttttttttaaagtacatcccaaccacagtctcgctgattccacctgtcctggaagttgaggctgggctaggaggggcaggtaggtccctgcagggagctcagtgaccaggaggttatgagagcagccctagtgaataggtgaccaagaggctgaatgaaccccggggcgcaggcgggttgccgtgcagcggctcctgttgagaatgctgctctgcagctgttacctgatgtgtgtggctccccgcatctccctttagcaacttggaagtaagctttctccaccccacggtatccaccaaacacagggcatcatgtcttcgcttctctttaggggtttggctggacaccccaaaatgaggacagccaagt

SEQ ID NO: 88298 - DNA, 2474 bp, Homo sapiens
ctcggctttgagaatgggaagaggaatctcaacactggctggagtcctctttaaaccctcagccgtggcacgaaggtggcttctgtccgtggcaggatccagaacagctgcttctgagggttggggcagggtgaggagccccacacatgctgtgtcttgggtagggaaggggcagagtgacgaagctcttccaacctgggtaatgtcacttcttgctcagagcatgtttttattcagacttcgagaccaaacatgacatctttgttcctcagacgagggcatgggtttagaaagaactgaactctttggctgtggtttagggtttagctaagagggcatcgctgggggttccatgctgaccgaccacacatgggcgtcgagccgtcctcctcttgtccttctcttcaccacaaggtggcactcaaaattgttgactaattatgagtagactagttggtaaatgacactcttgaagtgaagccacaggggacctgggaacctgcactcgtgctgacccccgtgtctgcctggtagttctgacctgggatggcaagatgtcggcggtcagtcaggatgctattgaagacagcagacaggcccggactgagaccgtggttgatgactgggacgaagagtttgaccgagggaaggtatgatgtgtgatgctgaccacaggcttgagggagcagggcggcgtggctcagctcagagccggggcagttggaggtggcggcagtggcatgaagcggccgagcatgagaagagccaggctgcccaggcctgtccgggcgtgtggccatggacagggcatgcatcctcgcagcttccgcccctttgtcaatagggggactgcaggtcgccgtgcacaggggtcattgtgaagagtgggtctccagagagctcatgagagcccggcctgtgtgcaggacctgcatgcagcatggagccccgtgggccaggaaagagccgtttttgggaactgtgatgcctgtgattcttggtctaggaaaagaaaattaaaaaatttaagagagagaagaggagaaacttcaacgccttccagaaacttcagactcgacggaacttctggtctgtgactcacccagcaaaggctgccagcctcagctatcgccgctgactgtgcccctgtggaaggaggtcggttccgagggggtgggtgtaagggtgaggtgggggtgtgtgtgccgtgtatgtgtgtaggggtgtggtggggtgtggcgtgtgtgtatgatgtatgtgggctgtgtatctggcacatgtgtgttgggtggtgtgtgtggtgtgggcgcgtctgtggtgtgtgtcctagtcacttggagaagggtgtgtgtgggatgcgtgtgtataagggggtgtgtgtgggatgcgtgtgtataagggggtgtgtgtagtgtgtgttgggtgtggggtgtgtacacctggcatctgtggcatgtgttctggtcacttggagaagggcatgtgtggggtgtgtgtgggatgtgggttgtgtgtatatctggcatgtgtcccagtcacttgcagaagggtgacttcttgccagccgcatcgagatgccatgcattgggttcctaggttggactcatacccgagggtggcagtgggaagattcgggtctcgtttctctctgtcaggactaccgtggtttgttctgcagcctcctggagacaaggcgtcccttcccgggagctgtcggtctggatctgagggagctctctgtgtgggctctgctgcgctgggagcctgtcacggtaggagctctcccggtaccagtgtccacagaccgcccaacacagaggctttgaggcttctctagatcggaacctctttggtgacattcccgaccagccctgcaagagaaacgacagtgtgtgtgtgagcagaggtggccgcacacctgctggacatctttgccaggctgtgccttctcatgtttcatagacagtggtctgtgctggcagaggctgctgcccctggttggggctatcaggagagtgggggatggtggccacatgtcccccaggtggtctcccggtgcatagctggtggctctgggcaagccatcccttgcttctcggggctgacgccaccgttgtgtccgagcccgccctcccctgcttcctcagcgggaccccttcatctgttggccttacctgtcctcagaaaggaagaggtgaccccacccagccacctctcccttttatggaactcgagagggtggccctactgtgcaccccttccttgtgagtagctctcaactgtcctggagagcagaggctatttggggtcggaggagccctcgatacctgcgaatacatctgctttccaggctgctgtttattctgagacgactgtgctgtagcttcccttgcagctgcaataacccgcaggtcttcactgaggtggaggctttggggtagaattctccatttattttactacttaatacaaaa

SEQ ID NO: 88299 - DNA, 1568 bp, Homo sapiens
acccaccacctaggtaactttgtttttttttttttgtttttgtttttgtttttttggttttttttttttttgagacggagtcttgctttgtcgcccaggctggagtgcagtggcgcgattcggctcactgcaacctccacctcccaggttcaagcgattctcctgcctcagtctcctgactagctgagattacaggcgtgtgccaccacgcccggctaattttgtatttttagtagagatggggtttcaccatgttggctaggctggtctcaaacttctgacctcaggtgatccagccaccttggcttcccaaagtgctggaattataggcatgagccactgtacctggccaactttgcatttaaatagatgttgaattaattgttagctttctttcaaacatacatgtaacttaatgtgtatctgaaaactacagggtaaaagccttttcagatttttaggtgaaagggaggggagtgagggtagacagaaggaacagctctgctgggtctttcagaacatcctctccctgtttcctggctgtccccacagggctgtgtcacctgctccccaatcatccagccgcctgcaaccccccttcagcccccaccccacattgctgtccagtacccccaagcccccagggacgtcagaaccacggagctgctcctccatctcgacggcgctgcctcaggtcaacgaggaccttgtgtctcttccacaccagttgccagaggccagtgagcccccccagagcccctctgagaagaggaaaaagacctttgtgggagagccgcagaggctgggctcagagacgcgcctcccacagcacatcagggaggccactgcggctccccacgggaagaggaagaggaagaagaagaagcgcccggaggacacagctgccagcgccctgcaggaggggcagacacagagacagcctgggagccccatgtacaggagggagggccaggcacagctgcccgctgtcagacggcaggaagatggcacacagccacaggtgaatggccagcaggtgggatgtgttacggacggccaccacgcgagcagcaggaagcggaggaggaaaggagcagaaggtcttggtgaagaaggcggcctgcaccaggacccacttcggcacaggtaagggcaggagcaaagtggcatctgtctacctctgacgagaaacaaagcaaaaccacagaatctacccccaagtaggtatggtctggaaacgtagtctgcttgcgtggttttctaaaatgtggatttgtgatcagatgtctcctctggctgggtgtggtggctcacacctgtaatcctagcactttgggaggctgaggcgggtggatcacttcaacccaggagtttgagaccagcctaggcaatatggaaaagccctttctctaccaaaaacaaaaattggttgggcatggtggcatgcacctatagtcccagctactcaggaggctgaggtgggaggatggtttgagcccaggaggtggaggttgcagtgagctgagatcgcgtcactgcactacagcctgggtgacagctaaaccctg

SEQ ID NO: 88300 - DNA, 1050 bp, Homo sapiens
ctcctgcacagcgttgctgcacacccattcgccccaaattgtctttttcttgtttgtggcggggcagttttgagacagtctcgctctgtcgcccaggctgagtgcagtggctcgatctcggctcactgcaacctctgcctcgcgggttcaagtgattcttgttcctcagcctcctgagtagctgggattacaggcagtgcaccaccatgcccagctaattttttgtatttttattagaagtggggtttcgctatattggtcaggctgatctcgaactcctcgaggtgatccccctgcctcagcctcccaaagtgctgggattacaggcgtgagccactgtgcccggcccccaaattgttaaagaccagacaagctgggcattttgtgtggttgtggatggaaagggcaaattgatctttactctcaaagtgaattttatttgtcttttccttgatttttcaaacaggatgtaggctatccggaattcctcaacatacgtccgtatatgtcccagaataatggtgatcctgtcatgtatggactctatgctgtcctggtgcactcgggctacagctgccatgccgggcactattactgctacgtgaaggtgagaggcttgtgtcagtgcagctgcctcctgggacaggtttcagcacccatgcacatccagatgcggcctctgtagagcacttactttgtgaaaagtgtgatgttttgtggttgtattcaagtcctcgttgttgcctctctgcgtggagtgaaaagatgccctttacagaagtgttgcaccagaatctagtgttctcagacttgcagggagacacggaagaggcagccgcttctggtgccatccttagaaccctggcaaaatcggccatggtgatgacactgcctgaatgtcctttagaagggacagttcctatctgttggggcactaggaaggaactgggacgcagagcacactttggggtcacattccgagttatgaaaatattacacgttttaatagaagttgttacctgttgattattaatagtgtttggaaatgta

SEQ ID NO: 88301 - DNA, 1304 bp, Homo sapiens
ccgccgtcccccgggctccgggccggtgatgggggtcgccggggcccgctgtctgtgcaggattcaggtcaacttcggagaggttgaagtcggaatcagggcgagggcgtcgcgtgcggccgcagagctcagcggggcgggtgcggccccggggcgggcaccttcctcgtggttgcggaggaggccatggagcccggggcggggtgcggttccgatgctgctgcttctggcgggtggcgtgggggtcctgggcctggggctggagtggcggccgccaaacccagacacacgagaggggagactccgcgcgcccccgtttacgtaacgctcgccacggagccatgctcggggagaggtgctcgggtcgctgtgtccgcggccgggctcggggcaggcgctgcggagtcgcccgggaggcccctggagcgcggcgctgggccccgggaggccgctgcttccgtgggctcctctccccagcacgtggttgaccctgcgagcgtccgttgcagttcatcctggaaaagtgactttagaaggaggagggagcgggaatgagcctaaatggtgctggctggggttcgcgcaggtggaaatgtggatgaggcctgtgctgtccttggacaagagagagcatccttcctgagttgggtagagtgtggatggtgtgtgcgtcggagggattgctagtgattacaggaacacttgtctcgggctcctacacgtcagagagcgagcgagcgttgtttaggttattgcttaatgttttaggtggaattggtgaagtagagattgacctgtcccacttgaaaaattgtgttcaaaatctctgcatctacattaaggagtgggttaagttcaaagttacttatctcgagtgaaactgggttacatctcccaaggttcgtttatcccctccctaagtggttctcaagcgttggttgtgcatgacagagttctcaccttccagggtagatgtgagtcctaaccgaaagcagtgatattgtggggagtttttaatacgactggatgtcttcactttgtagatggcttttattctgagatcatttccttacacatttttcgggagttggtatgcttttatttatggatgaagtcataggtctgagatttgctgtagaattacctggggatgggaagtgactcaggatgggtcagatgtagttactgaggctgaataaggggggctcatgtgctccctgtgcggttctccatctgtgtgtttgaatgttttcactgtaaactgtttttacgaaccttaattttatgtaatcatagtgatcgta

SEQ ID NO: 88302 - DNA, 1293 bp, Homo sapiens
tgttaagactcctgacccccaagtggcatgcagcccccatgcccaccgggacctggtcagcacagatcttgatgacttccctttctagggcagactgggagggtatccaggaatcggcccctgccccacgggcgttttcatgctgtacagtgacctaaagttggtaagatgtcataatggaccagtccatgtgatttcagtatatacaactccaccagacccctccaacccatataacaccccacccctgttcgcttcctgtatggtgatatcatatgtaacatttactcctgtttctgctgattgtttttttaatgttttggtttgtttttgacatcagctgtaatcattcctgtgctgtgttttttattacccttggtaggtattagacttgcacttttttaaaaaaaggtttctgcatcgtggaagcatttgacccagagtggaacgcgtggcctatgcaggtggattccttcaggtctttcctttggttctttgagcatctttgctttcattcgtctcccgtctttggttctccagttcaaattattgcaaagtaaaggatctttgagtaggttcggtctgaaaggtgtggcctttatatttgatccacacacgttggtcttttaaccgtgctgagcagaaaacaaaacaggttaagaagagccgggtggcagctgacagaggaagccgctcaaataccttcacaataaatagtggcaatatatatatagtttaagaaggctctccatttggcatcgtttaatttatatgttatgttctaagcacagctctcttctcctattttcatcctgcaagcaactcaaaatatttaaaataaagtttacattgtagttattttcaaatctttgcttgataagtattaagaaatattggacttgctgccgtaatttaaagctctgttgattttgtttccgtttggatttttgggggaggggagcactgtgtttatgctggaatatgaagtctgagaccttccggtgctgggaacacacaagagttgttgaaagttgacaagcagactgcgcatgtctctgatgctttgtatcattcttgagcaatcgctcggtccgtggacaataaacagtattatcaaagagaacgtgggctctctccgtgtggctgtatccgatgttcagaacggccacttcctagctcaagaatgggaatcagcctctgcaaggagcctctcctgtccggcgggagggggcgccctgtgtcctccagagaaacaaggccagtgagctctgagtcaaatatgggatgcagacc

SEQ ID NO: 88303 - DNA, 1087 bp, Homo sapiens
atctcctccccggacgagtgcctctggatggactgggtcacagagaagaacatcaacgggcaccaggccaagttcttcgcctgcatcaagagaagtgacggctcctgtgcgtggtaccgcggcgcggcgccccccaagcaggagtttctcgacatcgaggacccataagcaggcctccaacgcccctgtggccaactgcaaaaaaagcctccaagggtttcgactggtccagctctgacatcccttcctggaaacagcatgaataaaacactcatcccatgggtccaaattaatatgattctgctccccccttctccttttagacatggttgtgggtctggagggagacgtgggtccaaggtcctcatcccatcctccctctgccaggcactatgtgtctggggcttcgatccttgggtgcaggcagggctgggacacgcggcttccctcccagtccctgccttggcaccgtcacagatgccaagcaggcagcacttagggatctcccagctgggttagggcagggcctggaaatgtgcattttgcagaaacttttgagggtcgttgcaagactgtgtagcaggcctaccaggtccctttcatcttgagagggacatggcccttgttttctgcagcttccacgcctctgcactccctgcccctggcaagtgctcccatcgccccggtgcccaccatgagctcccagcacctgactccccccacatccaagggcagcctggaaccagtggctagttcttgaaggagccccatcaatcctattaatcctcagaattccagtgggagcctccctctgagccttgtagaaatgggagcgagaaaccccagctgagctgcgttccagcctcagctgagtctttttggtctgcacccacccccccacccccccccccccgcccacatgctccccagcttgcaggaggaatcggtgaggtcctgtcctgaggctgctgtccggggccggtggctgccctcaaggtcccttccctagctgctgcggttgccattgcttcttgcctgttctggcatcaggcacctggattgagttgcacagctttgctttatccgg

SEQ ID NO: 88304 - DNA, 1019 bp, Homo sapiens
tttctgcacttcctccaaggcctggccctccacctcctgcccctcacacccctcacacccctcacacccagcttccagcatctctcttcccaccacctctcttccggacacaagtgcacagggcctgccccctgccttgcgagcctaaatcctccccgaagtgccaggcacctcatagggctatgttggcgggctcaggggtgccccctggactcacaccccagcccttgcccagccttcatttgactgtaaaacaagggatggagccacccggaagggtgtggggctcctgaggtttccagagagcactgccatgccagcagcggtgaggatcccagatgtggtggccgtgttcaccttcatcctaaggcacttccaggtaccccgcacggttctcctgctccgaacactttgcaccttctagagctctgctctggtttggtgcttctgcccccacccttgggggacagattccgtgttcgcgcctcactctgcatttgctggaaccttcgtcctccggccccatctttgctccctgccttgtgggtccttctccccaaaccacagggacccaggaaggcctccgtggctgagcagtggtgcgtgggtcgccctgttggtccgtgaggcttggacggggagcagcagcgttgcttgtgctttctgccgaggtcagctgtccatgggctgaggggggccagcagggtctggcaggtgctacctgttcacctcctggcctgctcccccccaacctgctggccagttgggctttggatgtgaccccaccctgagagctgccctggggcgtccatcttctctccgcacaaatctcccttccccttcaagccctgtgtgaccaggatctccgacacataagacaaaaggaaatagggtttttagagtggacgggtgggtagagcaccctccctgacctgtggtcattcttccagttcgtgcaaatggcaagggggttatatcgagatctccaagaagacacggggcggagggctggggtgcag

SEQ ID NO: 88305 - DNA, 1412 bp, Homo sapiens
gggccccagacgctgtctcctcttccttgcagcctcaaggcagcctccccgccgatgcctccccacatccaatgggggtttgttccctttccttgggttcctctggatcagccccgaggaggctccgatgagcccaaatccctgatgcagctcacaggcagctctcggtggaacgggaggaggcttcaagggagcgggtgctgcaggttccctgcatgggataaccgagaacacagaaccttccagaatcctggagagcagggaggggcgggttgctgtgagctggtgggccctggtggtcgcagccccttgcctgctactgcgcacggcctgatggtgtggggctgggcacaccaggccgcatgcgtgtctgacccgcggtcacccggttcccaggctacctcatccatgagtctgcctgctggagtgacacgctgcagcgctggttcttcctgccgcgccgcgccagccaggagcgctacagcgagaaggacgacgagcgcaagggcgccaacctgctgctgagcgcctcccctgacttcggcgacatcgctgtgagccacgtcggggcggtggtccccactcacggcttctcgtccttcaagttcatccccaacaccgacgaccagatcattgtggccctcaaatccgaggaggacagcggcagagtcgcctcctacatcatggccttcacgctggacgggcgcttcctgttgccggagaccaagatcggaagcgtgaaatacgaaggcatcgagttcatttaactcaaaacggaaacactgagcaaggccatcaggactcagcttttataaaaacaagaggagtgcacttttgttttgttttgttctttttggaactgtgcctgggttggaggtctggacagggagcccagtcccgggccccatagtggtgcgggcactggacccccgggccccacggaggccgcggtctgaactgctttccatgctgccatctggtggtgatttcggtcacttcaggcattgactcaaggcctgcctaactggctgggtcgtttcttccatccgacctcgtttcttttctttcctatgttcttttgttcagtgaatatccctagagctcctaccatatgtcaggccctatgcctcaccctgagaacgcagtgagcatgaggtggacctgtttgctgggaaccccaggtcacccccttttcttcctactctgtgcctggagcatcatgtccacccctgcagatccttggaaaagaaaatgtttatgttgcagggtattgcatggtcacgagtgagggcaggcccctggggacacatctgcccacagctgcacaggccagggcgcaggcacatctgttggttctcaggcctcagataaaaccatctccgcatcatatggccagtgaccgctttctccct

SEQ ID NO: 88306 - DNA, 1015 bp, Homo sapiens
agttcatggccggccaggccctccccacacccggtgataaaatcttcagtgtttgcccagggctgggcaggggacggacctcacctgaggtatcaactgaggcgttggtcgcctacttcctgcctcgcacttgtcagggttttaggcaaccctagtgtagttctgtccttcccttggatagggaggaaagcggggtacagggagctctggggttgggctgtactcaggtcatccgggagggatggaagaccctggcatggagaatgtctcatcgcacaagcagaccaggagaccgcaggtccctccagggccctgcagagaagctactacagtctcgggcagttcagagggcacagctccagctctcaggggcaagaagctggcaaaatttggggaaagcaaacagaagttagaacaccagggtgtagggatgataagaatacacggtagaacacaggctcccacacagcctgaactgtggcagccttcaaagttaggcttattttaaataaatcagtttaaaaaaagcaaaaacagcttctgaacaaatccattgaaaggaagactgggagccccagcaccaagcccctctccggccactggagttagagtgatgctcggtgagacctcaggtgtggccgagggcagcacccgcactcccctgggacacacgtgccccttcagagtgctgtcacttttcagcttttctagcctttaaggataatcctaaggttggggttacagcttgaggagcggggagttggggatcagaggagacttgagagtggtcactgaaccttcaggagctgaggggagggcagccggccggccctgggcgggagccaggtgcgggccggaggggaggcaggtgtggagccgggcgggagtcaggtgcggggtctaaggacaggtgcggggccgggtgggagccaggtgcaggggtgcggcgggagctgggtgcggggcctaaggacactctgcttggccaggcttcaaggccgaatggctggcagtg

SEQ ID NO: 88307 - DNA, 1067 bp, Homo sapiens
aaggcgttgaagtctggcttaagacttaagacagtgcgtgatgccaccatgtgggagtggggcagaggtgagactgggaccccccagaatggctctgagggtgttgccgggttgagtgaaagtcctggcgattcggcctttgtgtcccgggagccgagcctggaggaaagcgtgaggagagaaggtggcagtaagcaggtgggctcgtgcaggtgccaccgcggtgtggaaggcagccctgatccaggtccatggggcgatgatcccatcccgttattttcacacactctggaaaaggacaccttcccagatgtgtggtgccatttggaatgtgcctttcaactgagaaggtcgccttttggctaaaattcctccaggtgtaacatcgatgatacaaattaagcagacacagcctctttacaaggcagtaactgcaaaccgtagagggttctgaagctgtgcgcccacaccatagacagtgactggtcctggcccttggaaaaacctggaggctctttcccctcttcctcctgtgattggtggaggaacagctccccgagatgtccacgtcctaccttctgagcctgtgaatatgttacattacatggcaaaggggaattaaggttgctgatcagccggccttaaagtagtgagatgatcctggattttcccagggagcccagtgtaatcacagggtccttaagaacagaagagggaagcagaagagccggagggagatgatggccaagagccttggggaagtgcagtgggcgggctttggagggggaggaggggccaccaggcagggaatgtgggtgcctccagaagctggaagaggcatgagaatggagccatggcccgtgtgaggcttctgtcccacaggacggtgcctgctgcctgccgtgtgctggatactaggggcggggacaggtgcagaagtcagtcagatcctgagcttgacctttaaggagcgtgctgtctgtggaggcaggatggcctaaccagactccctgtgaccttcttcctttctggtttccttgtactgcccacccccgaggagatttgcc

SEQ ID NO: 88308 - DNA, 1951 bp, Homo sapiens
ctccttggactgataagggaattttctccctctgactggcacttggtcaaacctgtaacaggccaaccttccccaccccatcccagtccttgctctccctgccctcatccaatttggagccttcctccaggcacacagctcactctcatcttcctgcatgcaaatgattcgccctccccaccatacctgtctcacacccctactgccatccggtctggattctctcatccttggagactggtacctccttgccagtccatgttgcctggtgcctttgcttctccctccgaatggtctttcccttgccctctgtgtaccctaggcttggcacagagcacctgtgaccactcttccatcagcagacacatctctctcccaaacacctttcccccttagtgacccctggaaaagccgtctcttagtgtcccagctccatttcttattttattcttgaggttgtatgccctatggcctttcctaccacattttcaacaaagcagaggtttggaaatgtgaggctcttggtgtcaagtgaatccggctagctctccagtgtaagggcccaaacttgaaacaagtgtcaggtcgtagaaggctcctaaaaggaagcgggtgccgcagcccttcaggatccgctatctcccagctcttcctccctctccctctgaggagctttgctgagaaaggtccctccaggcctggaccacagaccctccctgcagccccaccgcaggcctctcagcaggacagtctggctggagcctgtggaacggcagtggggctcctcccaggtgctcctccctgctggcctcaatgagccctctatcctagcacacgcccctgctgaaaggcacactgaaggagccaaccctctcccctctggacgtggcaagggtttcctgtcggggcagccccaggcatcttcacggccaggactcaggtgaagcatggatttgtccaggcactgtcatgaggccaccgcagcagtgtggggaccaacttctagtgtcactttttcatgtccaaattaacgtgatcacaaaagagaatgacatgtcacaaggtggtagagggaaccctccactcgcagcgggataggacccctggaccctgggacacctcgctggaggggcacatctgaggcttgacgcttctgattgccagaggtctcctttcttccccttaggctataaccatattttcctagcccatggcagcttagtaaatgtgttggtgtaaaagctcttggtactccagaacgttttcactcacccgtcactgtgcacctggtctgcaggacccccctgagctgcagagtacgtgaggagacccagggtgtggtagcagcagttctcctggccctgtgggtgtttttaccctgccacctggatgtggctttcgaggtgtgtgtgcctgtgcaggctcccccaagtacatatggcccgtcctcggagtctcggtactttctggcaaccgtataggtagataggtagatgtataaatgctgtagtgttttctctttcaaaaacagaagatctgagacttggaactattgtccaggtcctgaaatgggtcagtactatcacaaggaggtcatttttctattgtttgttgaatggtaccagggatgccaaggacacacagcattcattcttttcactcagtgcactctgaactatcgagatttcctggaaagctcttatgaaatgccaatatcaagggaattagaaacttttatattaattcttaagaatgttcatgttgattttccttttactttaatcaagatggttaattaggaaaaaatcatcctggcagtagagaagtctgtttggggagacgttctgttttttgttttggaccctgctcgtctttgtcatgcgtgcagtggtcatgtggagcgcctggttcccaggcaggacgctgctccccgcgttcctctgggatggtt

SEQ ID NO: 88309 - DNA, 1061 bp, Homo sapiens
ggtggaatgtcatcttttgtggttcttcagttgcttcaggccatctggatgtatatgtgcaggtcacaggggatatgatggcttagcttgggctcagaggcctgacaataatgagtattatgtgagacatggttgggactcagtttagcatgacaagaaacattaatgaattcaagaaaggtttgtctcctctccaaaatcaaaaaccaaaagtgcataacagtgtttagcacatttctatttagttaaaggtaatttaagatacgtgtttatgacttgtttggataccatataacatctagtgatcgcctctgggcagggaatacagaacggcaatgggaggcttatttttcattgcgtaccatttatataatttgaattcctcctcttgtgtatcttttactgaacggaaggttttgagagagctgggggaagtagctggtatcaagcaggaaagctgaaggtgcagatgggcagggggctggtgcacccttctgccaagctctcctgccagaggctccacggccaccaggcctttctcagaactttgggatggaggagggcggggccggggaagccttttaacagagtgccctaaaatatctcgggggctagggctacggaggggaaaggagaaatcagagacccttgtttggcaggtttgtcaactgcagattttttgcagggaaacaccccaccgtccccaccccaggacactacagccttagacctccctgatcctggctttggcaactggtcagcagcactctggaggcggctgttttgaagggccaaggagaggggctgcctgagaatgaggatggcagaaaggggcccacggttttccgcctcccaagactacgagggtcgggaggcccatgtaagggggccctcgctcggagaatgagaacttccctccctagtagccttcacccccctcaatgcctcccaccccaaaagatctgctgggcccacgttccagcgcaacgcggtggaagacggccctcatgtgccagtgcggaccctcgcgcccctccagcctgcagccagccggccgctcc

SEQ ID NO: 88310 - DNA, 1097 bp, Homo sapiens
aggcagtgggcattgtgcttgcaccctcttcttcctctcctttttgattcttttcatctgtccagttgttggtgcggcggatgggaggacactccaggcagggaaaggtgaggcctcttagttttgctctgaatgtcccaaccagcatccccattttcgcatctcctgtttgtccagagacagaccctcacaggagggataacaaaacaaaaaaatccagctgcaacatcgaggtgaggggcagctcggagagaacagggcagaggggggaaaaaagaagcaaaaaaagggggaatgctgttatcatcagagctggcttctgcttctctggccaaatccttcccctgctagtgatatggtaagtttccagagcaagctgggctgacgcagagtctagggatggagactgggtcccaaccagggccggctctggagcagcctggatcagggatcaggatgggagggcagcctacgggccttgttcagaaaaaatatttgtgtatgactgagaaaatgtcaggttttcatatcaaggaatgagaggcctgatagagactgaggagtgcttccagccatcctgggctcaccactgtactcgtgctgttctctagaaaatggaaatcttcccggcaggggctccttcctaacctttagatcacagagctctcaagactctgaacaaaacagtggaccatcaccttccaaaggtgatgcgcgcgcgcgcacacacacacacacacacacacacacacacacagtttggcattttgttatagggggttcacagattcccccaaacctgtctgagtccccgataatgcacagggcgtctcaggtctgccactgtttggagacctgacccctcagggttggccacagcggatcccggaggccttggggctcatccctctgctaccaagtgactaggagcgctcagccttgctgggcacccccatcctgcggggggcattctcgtccggggctcgcagcccctccgcctctggacggacctccagactcacggaatctgccccacccccactctcagcctggcgggctccccagggggccgggaggaggcggccgctggatttccc

SEQ ID NO: 88311 - DNA, 1115 bp, Homo sapiens
ctgccctcatccaggcctctgaccagtagcctgagaggggctttttctaggcttcagagcaggggagagctggaaggggctagaaagctcccgcttgtctgtttctcaggctcctgtgagcctcagtcctgagaccagagtcaagaggaagtacacgtcccaatcacccgtgtcaggattcactctcaggagctgggtggcaggagaggcaatagcccctgtggcaattgcaggaccagctggagcagggttgcggtgtctccacggtgctctcgccctgcccatggccaccccagactctgatctccaggaaccccatagcccctctccacctcaccccatgttgatgcccagggtcactcttgctacccgctgggcccccaaacccccgctgcctctcttccttccccccatcccccacctggttttgactaatcctgcttccctctctgggcctggctgccgggatctggggtccctaagtccctctctttaaagaacttctgcgggtcagactctgaagccgagttgctgtgggcgtgcccggaagcagagcgccacactcgctgcttaagctcccccagctctttccagaaaacattaaactcagaattgtgttttcagcatcctgcctcgtcagtttgctcattaaactgaatccttttcgtcttctcctctccacccaaggcccactcctgcctgggaggccctcagcttcatacctggggacattggtacccagcaggtgcatgctggaccctgagttgcctcgctcctccagggggtgcagcctcccatgggtggggcagcgacagcgtgtctcagctgcagctgaacgtgtgcctgagtcgggcgcctggggcctgggtgggtctggggacttgtgagaggtgggtgggaggcaggggcttgatctcctgagcaggaccgcactgtcccccgggagggagagaaactgtggaggtagcagcttggccatggctctgcagcctggacactattcctttcctagggctgccgtggaaactggggttggggcgtgggtggcataagcctctagcggagggtccttcctgccccttccagctattggtagccccaggcactccttggct

SEQ ID NO: 88312 - DNA, 1100 bp, Homo sapiens
aggaggtggggctgcggggcccgcgtgaaccccgatccgcggggctgagagtccgtggccccggggcccgaggtttcccggcacgggcgcgccgaggggcggggggccggcgcctgtgtccgctccgtgcacagtaagggacagagggtggcagcgcccctccgccccggtccgccccgccgtcctcgcgccactgccgggcagcggcctccggcccccgtgcgtgacccctgcctatctcagaaatacgggtgcaaacccgagtggccgcggggcccagcgggaatcccgacgccccggccagacccctgcttcccacgtcgctggtctatgcggaagatcccggcggcggtgctcatgcctggctcagtggatgccggctggtggaaggggtggccttctgtaggggtgacactagaactgagtctttggggaggaggaagccttcagtaggtggagaatagggagtagggtatccaactggcggggaacagaaagggccaaagcacagagacagaaagggacgaacatgcccctctgggctgggcttccttcctttggggggcacttgcccacccggtaaactccccctcagtaggttgcagggggagaagttaggagcacagacatggcttccggaaacagcagccgtagctttgtttctaaacccaaagcagtgagactgctgagcatttcagacctcatgaagatgggatgaaggctggctgctgggaaagatatttttggacaggaggaatgtggagatggctctttccctcctagtggaggaatgacaggtgacaaaggtgacctggtgtgggattgttctgagaaggtctgggagggggtggctgaagtataataaggacatcaacgaggaagggggctttggaaaaggaaggtggagaggaacaactgcggcatctctgcttgaatccgtccccgacccctgcagttctcagggtctcccaatgtcattctggaggccctgggtcagtgtttggtgatggcagatgctacagaggactctttgcaacaggcctctgaatggcagtggagtgatggcagatgacaactcagtgaacaaagaagtggccttg

SEQ ID NO: 88313 - DNA, 1117 bp, Homo sapiens
ttctttccccaggttcattcagggctcggtggtgcagactccctatgctttctaccactggcagtgcatcgacgtctttgtgtacttcagccaccacaccgtcaccattcccccagtgggctggaccaacactgcccacaggcatggggtctgcgtgctgggtaagagccaaggactcacctctgtgtcagccagactcctcagctcaccagccaggggaccccgtgattaggaggcacgggctttgcctgcttctcagtgcccagagcccctcgctgggggccgccttggtcggctaggacaggcagctgcaggctttttctggaaaggaccagatagtattttcatgatttcagaccactgggtcactgtggtgattattggagtgatggcaggtacacaaataggcagggccgtgttccagtaaaattgcattttacaaacacaggtagtagtgggcatcggcccaagggccacggtttgccgattcctgggtcagaacaatgcttctcagctttagcctcaatcccgatcgttgatgggcttccgtcaccaggactgctggtctgcactggcagagtgtctgattcacgggatatatggggatttgaatgtctaccaagtggtcaggtgatactgaagctgctggttcgagaacctcgctttgaaaactgtgggtggagggaaagtgattcccgtggctgaccttgtttctctcctatcctcacagggactttcatcacggagtggaatgaagggggaaggctctgtgaagccttcctggccggggatgagcgctcgtaccaggcagtggctgaccggctggtccagatcactcagttttttcgttttgatggctggctgatcaacatcgagaactcgctgagtgtgagtgcccagccctcacccacctccccgccccttgctgtgttgccgcccacctccacctctttcctgccttggcctcacctcgccccacgcctgggctgcaggttgcagcagtaagagccacttctcgcctcccaggcagtgccaactctgaaatcttagttacacgcagtgagacagaatctcctccgactgtttccagcaagcgtgcttggccggctcccacgtt

SEQ ID NO: 88314 - DNA, 1037 bp, Homo sapiens
cctgagcgacagagcgagactctgtctcaaaaaggcagagttctcttaacatcctgagcctcagcagacaccatggatgctgggcgagggtttcaggtcaccatctgggctgctcgctgcccctggggaacaggccatatcctaggtcctggaggcagctcccagcctgtgagttgcaggtgcctctgagatctaggaggggaaaggctgagattgtgcaggtggagggggtggccctgtccctctgggctctaggaggggaaaggctgaggctgtgtggggtggggtggggtggggtggggtggggtggggtgggcccatccctctgagtactaggaggggaaaggctgagactgcagggttggtgggggtggccccatccttctgggcctgggcctcacagcaggtccttgttgcttctcagggtcttctttgattcctgcgacggcttcttcactaactataactggcgggaggagcacttggagcggatgctggggcaggctggggagcgccgggctgatgtgtacgtgggcgtggatgtgtttgctcgagggaacgtggtcggaggccgattcgacacagacaaggtgggtggtggctttcgtccaagggccagcggcccagtgcctcccctgggacctcatttcctcatggaccttccattcccgtctgcacctcaaaggaatgacagcagctgttcttcccagagtggggatcccgtggcactgagaaacaggtgtcctgccccggccaagctatgtccccactgaaacccctttcccggctatttctacaatcagataatgtatttttgtgtgggtgttaccagacagaggcgcgtcgttcccccgctgtccggtcctcggcgggcctgggcctcctgtcccagctgcgttccttgatcttccccgtgagggaagcctgcggggacgcacaggggcctgcagcgcctctcactgcggctcaggggcgaggacgggggaggtgcccagggtttggggatcggtaggtgtcatgacgagggagcattttct

SEQ ID NO: 88315 - DNA, 1079 bp, Homo sapiens
ggggtgatgcccagcagcctccaggtgcatctaggagggaggggttggacagcttccccctcccgtttctgagctgccctgagagccccaacccacgtcactggcgtccaggagcctgtctggactctggtcctgatgtgcccagcgtctccctctgtctcttcagtcgttggagctgatccgaaagcatggcttctccgtggctttgtttgcccccggctgggtgtatgagtgtctggagaagaaggatttcttccagaaccaggacaagtgagtcctgctgtcctgggtgcttagtgcaggctgatgggagggaggggtttctggtgtctctgataggacacgtttgtgctctttagtgacccttcctatgggggggtggttaagggaggatgacaggggaggaagccagcaccctggctgcttccgggcagggaccaaacccagcggccgcttcctgcagactcgtgtttgcagcgtatctgtagacggggaggctgcagtcctcctggaagtcctgtcttggagggtgcaggagagcctcgagtttccaccagcaagtttgagggacactgagaggctccctcccttcctccggaccgagctgttgcccccatgtctctggcaggttctggggccgactggagcgttatctgcccacacatagcatctgctccttgcctttcgtcacgtccttctgcctgggcatgggtgcacggagggtctgctatggccaggtgggtgggtgtcttccctccgtgtctgtcctctggcctcagctgggacaggtgggaggagcctgggacttgccagcaggcacggtggtggtcttacccttccctgccgctccgggcacccctgctctgttggcctctgctgagtgcccctgttctgcccttttcttcaggaagaggcggtagggccctggtaccacctgagcgcccaggagatccagcccttgtttggagaacacaggctgggaggggatggccggggctgggtgaggacgcactgctgcctggaggatgcctggcacggaggcagctccctgctcgtccggggtgtgatcccaccggagg

SEQ ID NO: 88316 - DNA, 1050 bp, Homo sapiens
gggtctcaaagcagacctttaccctttagtgtgaattaggggtggggcagtcatgccttgggtaccctatccccactgtaaccctttccaagtggccatgtcctagcagggtgaggaggggacactggtgatgtgcctacccccatgcccagctggcagctggagttagtgtcctggcagtaaaagctccccaaggcagaagggagacacgggcctccaggagaggctgggagagctgtccctgtccccacaccacaccaaggaccctcttggtgatgccttgggcaccctatccccaccatcgccttctccaagtggccaagtcccagctgctccatggccaggggtgggagggggtccccggtctcctttcccaagctgggggccgagggcagagcacaggcatgagcgtctcaggagtggagcgggcagctgggccagcagtcttaacccgcactttcctgtctgccccactccctctttgtctctgtctctgcagcaattcggaaaaattttagacgtggagatcatttttaacgagcggggctccaaggtgggtgccgcacggagctgccgccttacagcgccggctgtaggtcccgccaggctaacgtgtgaaatgtgcgtttccttcctggagagcttcgcgcccgaggacccctgagcgacacgggtgcttgtattccccgctcttccgcccccacccgccccgcccccaccccagctgtctgtgttgttgctgccgctgccgctttttctttctgagccaccaggacctcttgcctgcaccccagagccctgggccccaggtccgggccccacccccactgaacacttaccccaggggaccactggccttgaagcttgagggaggggctacagagagggcaggctggggagggtgtccggcggagacaagccctactccccttccaggaaggcacgaccctctaccctgggctccgagggtggagatgggtgggctgcccctgcaggtcctgaagcccagcctgggccccctaccccaaggtggggttcagggggcaggcc

SEQ ID NO: 88317 - DNA, 1017 bp, Homo sapiens
tagttccatccatgttgttgaaaatgacaggccctcattttttttttatggctcaatagtactccattgtgtatctgtaccacattttctttacccattcatctgttgatggacacttaggttgcttccaaatcttagctattgtaaacagtgctgcaataaacagcaatgcagatatctcctccatatactgatttcctttcttttgggaacatactcagaggtgggattgctggatcctacggcagctgttttcagttttttgagaaacctccaaactgttctccgtagtggttgttctaatttatattcccgccagcagtgtatgagggttcccttttctccacatcctcgccagtatttgttattgcctgtctttcggatttaagccattttaactggggtgagatgatatctcagtgtagttttgatttgcatttctctgatgatcaatgatggtgagcacctttttatacacctgtgtgccaaattccttaggtggcagctagacgttcaaggaacagcggagacatttgtggctggagtagacaagcaagaggagagaagcaggagcaggggtcgtgcaggaccctggtgggggaggggccgtctcaggactttgggttctactgtgcagaggacagagtgtaggagccagggaggaagtaggaggaccagacaggagatgatggcggcccgaccaaggtgggagcagtgggcggttcagggcggctggaggcggagccagtggggtttgctactggactgtttgtggggtttgctactggactgtttgtggtgtgtgggccaaaagagccaagtcaagggtgacccccagattaggactatgtgctggactggggggcaggtgtttcctgagatggggaagacctcagagatgggtttgatgggggcaatgcggaggaggtcagaggtccctttgggggcacgtcaaacccccaaagtgtatcagatgtccaagtggagactgcaaggggcagctgggattctggggag

SEQ ID NO: 88318 - DNA, 1022 bp, Homo sapiens
agtgccatcctttccccccaatcattcccagggagtgagggcgcaggaccgctgcgtgggttcattcagaataaacatcacccgacctcaactacttgtctggttaaattctccagtgaacaggacaatttttcggatgtggctgcagccagcagaccagacctgggcagcaatggatgctgccgcgggtgcacgagctgctgttcagtgccctcctccctccgctggccagtggtgggatactctctagccacccatgctgacccgcgagccagcgtgtctcagacggggttcctggaatcccaccaagtcaacaggggaagcatcaacagcccagggaacagagactaaacgcaaggtgcaaggggtggtgctacgtctgccacagtaattaatcctgattaaaaatgcctgtgattagcagcctcgctaccttagagggaagagagaatgattattaataagaacagtgcctcctaatgaatctcagaacagaccctagaatccccctgcccctcggcggagcctttgggttccacaaccagagggaacgtgctctgccatcaacaactccaagaagcaattgctgggcaccgtgaagccgctcggaaacgccgcatcctccacggaagcttccggtgcctggtgatgtttacctcagcaagggagactatctgtgatttcaccttgattgagcacacacggagagcaaaagcaacggaattcacgacgcgtcccccaggaagaccctgggtcctctcagggccagtccctctcccccggccagccccctcccctccccttacaatacttgaaggcactcacagccctctcccccggagccatttactggcttgcaataggatggaataagattctcttttataggagactgcagtttaataataaagtaattaccgtgacaaaatcccatttttcgagcttggggttttttcctcctatcctctcaaacttggtccactggatcccaggccagggcctcccagagagtcctgctgatg

SEQ ID NO: 88319 - DNA, 1051 bp, Homo sapiens
tggagaaaccctgtctctactaaaaatgcaaaattagccaggcgtggtggtgcatgcctgtaatcccagctactcaggaggctgaggcaggagaattacttgaaccccggaggcggaggttgcagtgagccgagattgcacccttgcactccagcctgggcaacaagagtgaaactccatctcaaaaaaaaaaaaaaaaaaaaaaaagtcatttctctttatggttcacaagtctgtgtcgttgggagttggctgaccctggctggtctcccttatgggtctgtgggttgattcagttgccctgctcctggcttggtctagctggggcagctgtgctctatggatctttcatccccgtcctgggaccagggagccaaccatggcaatgacagaacaagtggaaacatacaaggcttcttctcgcctaggcttggaaatggctcaccatctcttccacctcattctgaacaagtcccacggcaggcccagattcatagagggtagggaaggaggctccacctcttttgcaggaaaaactgcaaaatcgcatggcaaagggcatgaagtaggaaagaatagagagccccattaatgcatactcttttgttggtgtggagggtggccaattctgatgatgatgcggataatggccaccactgtatatcaaatgctaactatgtacctgccaccagagcaagcattctggatacacggtctcatctgtttcttatggtaacccaatgagaaagttattattgccccattttataggtgattaaactgaagttgagaaaggttaagtaacttgcccgaagatagtgacaagggagccaggattttgatccaggattatctgatacccaagcccagacttgtaggtacctcacatttcaggctttgtagtactgacctccaaaccctgcccctgttgtgggccttctcaccccctctcattggggtttctttgtggatgaatgaatggatggtggatgggtgagtgggtagatggatggatggatgaatatatagatggatggaaggttggatgcat

SEQ ID NO: 88320 - DNA, 1146 bp, Homo sapiens
cacccatggtgccagcagggtgcctgctgggtgcccaggcccccagccagcacccacccaggagctgagcctccaggtcttggacttgcagagtgtcaagaatggcatgcccggggtgggtctccttgcccgccacgccaccgccaccaagggtgtcccggccaccaacccagcccctgggaagggcactgggagtggcctcattggggccagcggggccaccatgcccaccgacacaagcaaaagtgagaagctggcttccagagcagtggcgccacccacccctgccagcaagagggactgtgtcaagggcagtgctacccccagtgggcaggagagccgcacagcccccggagaagcccgcaaggcggccacactgccagagatgagcgcaggtgaggagagtagcagctcggactccgaccccgactccgcctcgccgcccagcactggacagaacccgtcagtgtccgttcagaccagccaggactggaagcccacccgcagcctcatcgagcacgtatttgtcaccgacgtcactgccaacctcatcaccgtcacagtgaaggagtctcccaccagcgtgggcttcttcaacctgaggcattactgaagccccggcgccaccagctgcgcggtcttactccccttccctgcctatggtgtcgcttggctaagtgactcccagcccaagccccctcaagagtctgggtcgggggaggaggagtgggtggcctccttgatgggcaggcttggaagggacttctcccgcaccccactctgtcccaggacatagggcagggggcctcactgccttgttggtctccaccttgttcctacctctgcaggcctctttgctctcccctcttgcctcaggaaacccggtggcacctgtggctccaggtgactgtcttgaacagagcgggcttcttcatggctgcgttgttgctgagtttgaactgctcctccctggcctgcgtgactgaatcacagctttggtccctgtcttgcaggggctgaggtgtcaggaggggacttctggcccaccttgccttcagccctggagtgggcagagagtattgtggggaggcatggccagtgggactagtgttccctccatctggccacagcttttgggagatgggg

SEQ ID NO: 88321 - DNA, 1037 bp, Homo sapiens
gcgcagaggcccctcgggaccgggaccgagaccgggatagggaccgggagcgggatcgagaaagggagagggagcgagagagggagcgggaacgtgagagggaacgagagcggggtaccagcagagtggatgacaagcccagctcaccgggggacagctcgaagaagcgaggccccaagccccggaaggagctcccggacccctcacagaggcccttaggcgaacccagcgccggcctcggagagtacctcaagggcaggaagctggacgacaccccttccggggcaggaaagtttccagccggccacagtgtgatccagctggcccgaagacaggactcggacctggtgcagtgtggtgtgaccagccctagctcagctgaggccacgggcaaactggctgtggacaccttcccggccagggtgataaagcacagggctgccttcctggaggccaaaggccagggtgccctagatcccaatggcacccgggtccgacatggctcaggcccccccagctctggggggggcctgtaccgggacatgggggcccaggggggaaggccctccctcatcgccaggatccctgtggccagaatcctgggggacccggaggaagagtcctggagcccctccctgactaacctggagaaggtggtggtcacggacgtgacctcaaactttttgaccgtcaccattaaggaaagtaacacggaccaaggcttttttaaagagaaaagatgaatgctgggtgggtgtgtccaggaggagagcaggggagagagtgagcgtgagcttggcatagtgatttttatttctgggtgggatgtggccttttggctggtcccgtccctgatgtcacccccaccccaccagcccctttcatccctccttcctccccctcagtttttgttggaaagattatctctagagttatattttctattagatgtaaatatgttatttaagaaaaatatctaaatatatatatttcaactcgaagttgttttatttaaaggagagagactctcattgtgc

SEQ ID NO: 88322 - DNA, 1049 bp, Homo sapiens
cccacacctttggggccggctgggcaaaccttgaacccccaatttctgcgtggcctttggctgccctccttctccaaggcgtgactcttactccagagactcaggcgagcacgtgtcccttaccttattttctctcaatcaaactgaaacccattgtgatcccccatagtccagtgcggtctctgttattattacgggtgtctcccttcctccccgtgcccaggacaggccatgagccagagatacaaggggccccaggcaagatgcagggctctctgctcctggctctttatcgtcgtcgggacaccctttgtccaaactcaaggaatcccgggaggtctggctttgccgctttggctgggactcaggtacctgggcatacctgcatctgtgccccctcttcgtcccagtgagacggaccctcagtatcccccccaacatagaacaggaaggtctcaagccagccccctcctccagttcaatcaccctccctcacatccacccagagaagtccagacctgtggccacttccatgccctctccagaccaggagacacctgctgctgacctcgtggaaaacttagattttgacattctgatgcttcggaagtggtggctcctcctccttcacccctccgccacctgtgggcctcctctctgcatctcaagagaacaaccagatctttgggctcctggggtgtgtgccatgcaatttagacgaagtgctttgaaaatatgccattcagtctctgactaggaaaataagtctgacctgataggtccgatgtcatcagctcttcaacatgagacaaaagaggggattttatgttttgagtcattagaatgatataataattttctgaattgacatctggatgttgaaattaggatggtgcaaaaggggtccagggcctcaggctgggcgcagcagccagctcccaatgacgcagaagctgcttcaaaaccccctcaacaaagaggggcacatgcaagtcaccaaagtgggaagccttcaccaaggccacacccaaagtctactgattgtctgt

SEQ ID NO: 88323 - DNA, 1070 bp, Homo sapiens
ggggttggtcgggagaagggtgagaggcagtgctgtggaaggggcctggcccctgctgcctgcgattctccccgggtatgtggccttctgcctccttcagcctcagtttcctcacctgtaacatgagaataatgatgcctgcctgcccaggccacctcctgggagtgcattggggactctaagtgtaaaactgtcatgaggatggtttatgaagtcccagggaccacacctgccactcagggaagagaccgctgacctcagccatcagccgtgtgcatcgtgaggggcagcgagctcaggacggagagctctcccttggttcggagtcagcacacctgcactcccacacgcccacccagctgtgtgtcctccgccgagggcgagcctctctgtgactcttctgtaaaatgcaccccattctgcccactcctgccacgagacccatcctctgcgatcccgccaggcatgtgtgtgtgaatgcatgtgcaaagctctccatcagaagggtggtgtgggccctgcaggtcctacccctcggccttgaagctccctcgggctgcggactctgcctcctgggtctgagcattagaaccaggagaggggtgtccctgggcagagccaggggtgcaaacagcctgcagccatctggccttttaagtatagtgtgtcgcatttccgggtaggaaggtagcatttcaagttcaaagagaggtcaagtcatgcaaccatctttcctccagcacttttggggtaaggaggacagtttttgttatggtttaggggaaattttcatgaaatttccaccattaccaatagattactgatgtccatggcaagtgatctgttcttggtattttgttttgttttgttttggtttttaaatgtaatcacccattggtcaggcccaggactggtcaccatgagctctgctagccacggccccaacgatgcttccggctctcatggattccacagcaaataaaactgtactgacaacagatgcacgctgtacagtgcctctggaaggtgcggtgggacttgctgggtcaaagcacggcaggctctgtgct

SEQ ID NO: 88324 - DNA, 1118 bp, Homo sapiens
acccagggccccgtggtgccggtgatggtgggagatgcaggcagagccctcagtccaggactcggtgagcccccgaggtgcaggccgttgttgctgctgttgctgtctttggccactcccatggggaccctaggctgccaggctgtcccccggcccctcctcaccccccgtcctctgtctgcaggcgaggagtttgctgtaccagttccgcctcctgccccggatcccctgcagcctgcacgatctgtgtaagctgtgcgggtcaggcatgtgggacagcggctccatgcccgcggtggagtgcaccggccaccatcccggctcggagagctgtccctacgggggcacggtggagatgccttcccccaagtccctgagggaaggcaagaagggcccaaagacgccgcaggacggcttcggcttccgcagataggtcgggcccccgacaccggacaggggttgaggggacctcctcagaggccctgggcacgggagggggtggggctgggcgtgaaggggacaggggacggtagaaacctaaggaaaatgcttttgggcaacatgagaggaaccttttcatattaatgacaaaattagagtctggaagtgacagaagtcagatctacagccacccagaggaaagtcagctcctgaaacgctgcagtggaacgcgcagccaccgcacctgagacgcaggctggctgggctctcctgctggctgccctggaggatttcaacatgtcccaggatttgctccaccctcgagggcagccagacagcgtcgccaggcaatgaggaaagcagagacaggagaggaaggcctcactcacccactgcgtcgagggctgcagaacacagcggggtcctgtccaggcccagggacatctttgcaagccagacacacttcctcttgagacctcgttctctcggagtgagccaaacacacttcccaaaacgtccccagccacagctgggatgccgatggaaaggcatctgccataaaagaaaagcaaaagataaaaagcccaaccgatgtggggatagagaggcggaagagcagtcaggcttgaggagctggcgcttgtaatgtttatccgtttaaacatttcgtcctcctg

SEQ ID NO: 88325 - DNA, 1047 bp, Homo sapiens
gacagggtttcaccatgttggccaggctagtgtcgaactcctgacctcaggtgatctgcccacctcagcctcccaaagtgctgggattgtaggcgtgggccaccgcgcccggccaggccattaccttttgcaaagcaagggtctgtgtgtctggaagctaagcttgggctctgagatggtggcacagctgccttccactgaggtgaaggcaagcgagggaaggcagggtccacggcccagggttctgcaggctgggcagtgtgccgcggtgagggtcatccccacccactgctgtctccaccgcctcccaggaggatcctgctgaactacgccgtgtacaaccctgccgtcggctattcccaagggatgtcggacctggtggcgcccatcttggccgaggtcctggatgagtcagacaccttctggtgctttgtgggtttgatgcagaacacgatcttcgtcagctcaccccgggacgaggacatggagaaacaactggtgaggctcagggggatgggtgcgtccaagggcatgtgagggcccgtgttgcctctcccgttgtagccggggttgccgtggtgatgcgtggcttggctgctgtaggtcagtgggcagtgggaacgccaggataggacttgcccgtgggatatgggcggcttagcctatctcggcctccggggatggccctctgactccctgcaggtccagaggccgcgttgtgtgggccgctctggtggccttccacccctgcacgtgacaacctggcccaagctccctggctggcaaggaagacgtggcaccatcacacccagccccctctgagccttagaaaatgggtcctcaggtgtgtctaagctgctccctgcaggagtcaacacagccagggcttctgagtgcagacaggaagaggaggggctcctgaaaccccctgaggtctctggggcagtcctcacaccccacccctcccctggggtgccctgctgacacctctcccgtcaaggcctcctcaaaaggaccagccctatgtagaccaggaagcactgaatg

SEQ ID NO: 88326 - DNA, 1058 bp, Homo sapiens
gctggggctgggagcagggcctggaggggtgaaggcatccggagactgtgtcccacttgggatctgctaacccgggactgggctcagctctctctccaggaggctgggactgggtgaagcccctgggctgtgctcagctcccctccagaacgctgggccagggccaaggcctcattacccactgggctgcaacttgctctccttcctgggacgctggagactgtgaggctgagttaatatcaaggagagccttggatacacgccacccatccgccgcatccggggagggtctgcagccggcagcagccgcccagctcccgtccagggaacgggggttgggaggaagggtggcttcctgcagtgtgtgcgccacacgatgcctctgggtgccacccgctgaccccggctgggtgctcggctccacacaggctctccatgactcccgaggagcacagagcgttctggcgtaatgtgcagttcactgtggacaaagacgtggtccggacagatcggaacaaccagttcttccggggggaagacaatcccaatgtggagagcatgaggtactccctccccagccagctcctttcccatctgcaagtctgcaagcctcacctgaccgctctgggaagtggatgagcccccagcgagtttctgcaggggctctcttccaggttcatacatcaaagccccagaagtgaaggatacgctactcatgagctacgtcagttggcatctcagagccatggcatcccagggaagccacccaggtccctgcccacagagcccctctatcccctgggcaccaccaagcctgtccttgcttggctcacactaaccatggaccagcttccccatgcaccccctccatctccccgtgggtggtcccgtagtcatacagccacacagagccagaggctggcatctgtgacattctgctacagcctagcaaataattgcacaaaattagcagcccacagaaatgtccctgccagcccaccccttgtcacaggcagtccacccttcagaaaatcagagccatgttcccccttaacccc

SEQ ID NO: 88327 - DNA, 1055 bp, Homo sapiens
cagtggaaatactgcaccgagatgcagctcaaagaccaggtagcccagcagacggccccagaatgcccagcggttgacactccccaccccccacgggccccatctccctcctgggtcctgtgtctggggtccccgggccccgggggcttacggggtgtgacccacggtagtttttggccgtcagagcagcaactttgggtttgaaacctttgcccagggctttcggtaaagtcagtgccctgcacttgaaaaatcatgttttgacaagacttcctgccatattttgctcaatctacgtacaaatgtaataagagctctttaattatctgtttaaggtactgtatgtgcttattagaaatggggccgattttaaaattcccttccttcccgcagagcctcctgctggcttcccttattacagtagcatggctttttttccccctacattgaacaacctttgatttttgaattaaatgtcagctgcagttttgccctggattcgtgactgctcgcggaggcaatctgacaggctggctccctgctcgcagaacagcgatccctttgtatgtggccaatcacatgtaattcattgcaggccctcccggcagagggaagttaggccgaacgaggcattcattccgtttttgcggctggggttggagagagtggggggcggcggcacagtgggccggggaggagagagccgcagagggaaaccgattttaagatgaaggtattttcattttaattgcgcctaattacactcgccatttaggggtttgtatgcaggggacggcccttgccctcctttcagaagagagagaggcttttattcctgggaaaagcactgctggcctctgaagccgcgcggctgagatcctgacctttgcccagttttcctcccgtccagcaggtcgcccccgataagacatgcatgcagttctccatccgccgccccaagctgccgtcctccgagacgcaccccgaggagagcatgtacaagaggctcggcgtctccgcctggctcaaccacctgaatgagctgggccaggtgg

SEQ ID NO: 88328 - DNA, 1034 bp, Homo sapiens
ggtgcctcacacctgtaatgccagcactttgggaggccgaagtgggtggatcacctgaggccaggagtttgagaccagcctggccaacatggtgaaaccccatctctactaaaaatacacaaattagccgggcttggtggtgcacgcctgtaatcccagctactcaggaggctgaggcaggagaatgccttgaacccgagaggtggaggttgcagtgagccgagatagcgccactgcactccagcctgggcaatggagacagactccatctcaaaaaaaaataaaaaataaaaatacagggagtgtatattaatgtaaaattatttacaatatgagatcacttccattcccacactgggaggaacgtaaaactcaacaatgcaagagcaaactgcatctctgtttccagagggtggcgctgtttttgcaccgggctgactctccgtttccagggtggcgctgtttttgcactgggactcgtacaaggactggtgctttctctgatgtgcttagcttatttcaggcatgcatttcccctgggctctctgctagctcttcacctttctgcaggcttcactgaggacccccaggtccacctctctagagtggccgtgcccagcccctccacctcccaccctgtgctcattcccttagagcaccccatgacccgtttaccgtttgctgcctgacttcccaccacaatgaagctctacacaggtggcaaccttgtctcgttgtctgcaggttgagagggtgggggacacccagaactttttattgcagaacaaatattttctgaggccatgctttgtacaagaccctttggtgggagatgtacaagataaatcagacgggagagagcgggtgcatagtgaccttttattcacatagcataaaagtcacccttttaaagtgtacaatgcagtggcagttagtacattcatgaagctgtgtaatcacaacctgattccagaacattttcatccccccaaaaagaaacctcatactctagcagtcacagcccagcccttcct

SEQ ID NO: 88329 - DNA, 1045 bp, Homo sapiens
gacaccagccgttctgaagagcggagggccgcgccccttatgccgcctggcagaagagtttcgttgggaaaaatggtttttcataacctttctgctttcttatttaaattaagctttgccgggagagtttggtagtagcagagggcccctgatttggtcccctttgacctccacagccttgattggcagtttgttgtgggcattgaagttgtggctgcgaggtgggagccagcagaacaaatactctaggacagctgggcatccccgaggacccagccgaggggggagtgtgcgcaattagagaggtcttcacacagaaagttaattagctactaaatggcatttagcacagtttatgagaattgcatgtttgaaaagcaaatggagatcaatgcggaatggctgccaccggatggggacccttggacccagcaccagtctcagggcctgggatgccccccaccccgagcgtgagtgccaggccagtgcccgctgagactggactgggagatgctcctcgaggacctgcctggccttggggggcagtcctgcttcgcacccacagccgagcttccctgtccaaaaaaagtgagtaaacacgtcttcagtttcggggaactgtgtctgccgtggcctggatagtgactcccttccccgcaaattcatggccactcagaacctcagaatgtgactttatttggaaatagggtctttgctgatgggatcaagggaaggatccagttgaggtcttcctggattagggtggccctaaatccaacggatgtctttaaaagacacggacggacacacagacacaggaggggcagggagatggaggcagagatgggagtgatgctgctgcaggcttgggggcttccaggatccaggacgagcacctccagctggaagaggcaggaaagactcttgcctggagccttcagagggggcgcggcccgactagcaccttgactttgacctccagaactgccagacaatacatttctgttgttttcaagcttctggtctgtggtccttcattacagca

SEQ ID NO: 88330 - DNA, 1055 bp, Homo sapiens
ttttgctctgtgactttggagagtgcatcaaaggctcggcggacgcccacttgccgaggagccacggccctggctggtggccaggcaagcacctcccaggtaggcgtcaggggaagcatccaaactagtaaataaaacggcttctggcaggacgtgctatcatccccctctcccttctaaacacacacacgctttcacagagaagaacttagaagtatttcgtttgaatcagaaggaaatattgaatatcgtctcattctcccccacctaattttttttttaaaccacattcagaattgctgggcaacctcatttccccacatttaggattcttccctcgaaatctcatgcaggcgtaaaatccgagagcctcggagggtttttctgagcctctgcatctcccagcaccccgcccccacccagcactcatgtgtttgtctgctttaaaagcttcaggatgggaaattcctcaccagcccgtaagccgctgtttgtaggagcccctaaactctgtggaacccaaatctcccagtactgacttaattcccttttccctgagaaccagctccctgcagcacccagggttctgcccgcagagggaggctgtggctgggagtggaaaatgcccagccaggggctaccttcatggggacattccctacccccatccccaccttcattcggaaagagtcatgactcctggtcaccaggcaaacttctgtacctgcttattctggtttaaaaataggtcaggcatgatgactcatgcctgtaatcctagcactttgggaggccgaggcaggaggagcgcttgagcccaggagttcaagatcagcctggacaacatagcgagaccccatctctataaaaaataaaaaatttagctgggcgtgatggcgtgcacctgtggtcccagctactcgggaggctgaagtgggaggatcgcttgagcccaagaggtggaagcggaggttgcagtgagctgtgatgtcaccacagcactccagcctgggtgacagagcaagacccagtctgaaaaaaaagtaaaaaaaaaa

SEQ ID NO: 88331 - DNA, 1011 bp, Homo sapiens
ttacattttgttcactggttcccaaaatgaggtgcaggctctgcagagaaagcaggctttccccgaggggctctggagcagaaagagctgtctcaaggtaggtgctggggctggggtgatgtgagagcagagttggaagtgggaatgttctggaaggagggagagggctagtggcagatatgtggtcaccggaggaggagccctgcgatatatatcaggcagggacagggagaggagaggcgacctgggaccccgaaaaccgggtgggtggtcgctgtggcctctcctgggagcctcggactggcggttagggcagactccagtagattgtaaaggcatcaggatctgtcttgcttctgtaaatatttaaacactgggaggattatttttggtagctacggtctctctccgagcctggcgggctgccgggacgggtgtcaagtgacatcgggtgcaaggataccccaccccctggccccaccggccccaggctccgtgtgttcacctttccaacggccacagtttgatgtgggtcacggtttccccttctaggagacgcagagagatggtctcgggcgcgaccagcagggattcctcgtccacacagtttcctgacagcggttgaaagggacgggtctacgcaggccaagaacagcagcggagtgtggggtcaggggcccagcggggggcaccccggggaggggccgcctccgccagacccaccccgggtgaaaggacgcattgtgtgcccgcagcatgaggggagcctgcagagaggcgtctttgtagggtccacgagggggaaagcgcttcccggcaggcggagcacacaagccagccggtggccacggccgggacaggcttgtacgcaggacattgaggtccggcgaggatgggggggccaccaggcccccggccctttgcagagtgttgctcgttttctcccaccccagaattgggcttggccaacacggcccccccaaccatccccccacccccgccagctgcccg

SEQ ID NO: 88332 - DNA, 1084 bp, Homo sapiens
gacaggttgctggggccccggcaaagacactatagaaatgggcttccaaagagacaaaagagattgtgttcattttagaaattcgagggtggccaggcctggtggctcaggtctgtaatcccagcactttgagagcccaaggcgggcggatcacctgaggtcaggagttcgagaccagcctggccaacatagtgaaaccccgtctctactaaaaagtactaaaattagccaggcgtggtggtggatgcctgtaattccagctactcgggaggctgaggcaggagaatcacttgaacccaggaagcggaggttgcagtgagccgagatcacgccactgcactccagcctgggcaacagagtgagactccatctcaaaaaaaaaaaaaaaaaaaaaaaaaaagaaatttgggggaaaggcagaagggaaatatttgtgatctttgatccctctggtgttgccgttatcattttggttggttttcttcctggactttcaaagttgggaattgtaattgtctattccaggggttggcaggtgggccagacagcaagtattttctgctttgggggccagatggttttggctgcagcttttcaattctgcccttgtagcatggaagccaccacacaatgtatgttaattggcatggctgtgttccattaattttttttttttttgagacagtgtctcactctctcgcccaggctggagtgcagtggtgtgatcttggctcactgcaacctccacctcctgagttaaagcaattctcctgcctcagcctcccgagtagctgggactacaggtgcccaccaccacacacggctaatttttgtatttttactagagatggggtttcgccgtgttggccgggctggtctcaaattcctgacctcaggtaatccccccgcctcggcctcccagagtgctggggttacaggcgtgagccaccgcgcccagccccattcacgttttattaaggatactgaaagtggaatttcatataattttcatgtgttgtgaaatattctcctctggatttttttcaacatttaaaaatgttcaaaaccatccttcacatgaaac

SEQ ID NO: 88333 - DNA, 1045 bp, Homo sapiens
ggaacccccgcccacccctccgggcccagcgcagcctggcagccgggaagccagcagctcctgaaggtctgttgtttgggtttgtttgtgcttctgtaaccgggagctgagatttatttctttaaaacatcccattgcccgacaccctgcaatctgttctgtgtgtcgttcagactaatctcgtcttgtttctgtagcacttggcaggctctgtgtggcgttcctccctcccccagactcccccctgcccaagccaaggtggccaccaccagctgctccgcctgcacccagagagtggccgatgccaggggtctgagggaagctgttacgggaagggcagctggctggtcagagccccatgaactggcatgtggccatagtcagtctagaaatggccacaggacatagcctcgccccagcagtctcactgtcaggcggagaagccaagcaggcgcccagccgagcactggtcccctccctggctgcccctcagctctgggagcttggaggggctgccaaagaattcgactgggatgccaccgtgcccagccctctggtgtgcaactgtggcatggctgtttggctcacacatgatgtctaggcagagaaggggctggcgggcttggttgggtgaggcctgtaagtgagctttggtcagagacccagctgtgaatccaagctccactcaagacccgcagggggtggccttggacggtgttgaaccactctgtacctcagtttactcctctgtgaagtgggggcattgtgggggttcaggaaggccgtgcgtgtaaagctctgcacagagggctcagtacagggcagatagacagtcatcatcactgtgtacctgactgagttgccagccccgttggacgtgctcgtatcagtgtcctggggctgctgtgacaaaggaccacaaaccgggtgcttgaaacaagagaaatgtattctctcacagtcctggagccagaggtccaaaatcaaggtgtctgcagagccacgctccctctggaaggtctaggggagggtccttcctggtctc

SEQ ID NO: 88334 - DNA, 1833 bp, Homo sapiens
gcatagctggaattcatttcaagctccacagtttccctctagtgtttttgctcagggccaggctgtatctgaggccggactggcactttactaaagggcagtggcctctccgagcagctcgccaaaggtaccacaagggcctcatccacagcctcctggcctctaacgtgccatccccctggctcctcacaggttacctgtgcttgtacatggagaaggatgagatgctgggagccaccctcatcctggcatgggtccccaactctcgcatccagaggcaggacgaggaggccctgcgctacatcacacccgagagctcccccgttcgcaaggcaccccgccctcggggccggcgcacccggagctcaggagcctcccaccagccctccccgacggagctgcggcctaccctgacccccaaagatgaggacatcctggtggtggcccagagtgttccagaccgcatgctcgccagccctgcgccagaggatgaggagaagctggcgcagggcttgggggtggatggtgcccagccagcctcgcagcctgcttgcagcccctccgggatcttgtcgacggtcagtccgcaggatgtcaccgaggaggggcgggagccgcggcccgaggccggggaggaggatggctctttggaactgtcagccgagggcgtgagcagagacagctcctttgactcagactcagacaccttctcctcgcccttctgcctctcgcccatcagcgcggcgctggccgagagccgcggctccgtgtttctggaaagtgacagcaggtgagttcctggttctgggcgtgggctctcgggaggcccccaaggcctgacctgggcaggaagcactcacctgcgtcacctgtgatgccaggtgagcgctggaggcatctgcccgacctgcccgcggctgtggccgtggctgtggcaggagcccctccctgaggcaagggcttcagcagggagtccccactttacaccccactgagaggactgtgaagggtgcgtcggggtgtccacattcttctctctccttgagactcactaggactaaacaggccctaccaggtctgatgggcccatgaccaaggctaagcccccgggagtcctggtcccttctgttcccatcaccggaggggcaggagattttcagtccccaagcgagtgcccaagaggcccgggtggcatcattaggctcacgcacagggctggcccaagcccagatgtgctggtctccagctccccgctctgccctgcagcccactgggcacgtgacctggccccctgtggtccccggaggcttcagcctccctctttctcatagctgtggaggatggatgtagtcccggggcagtgttgaccatattcacccgacttggcagccgctatgcaccctggggagtccagccagagtatctggactccttgctggccacacttgcaggagctagagttgggcccgtgccctgcggtgggttccctgggccttggaacccaaagagaccttcctgagtggggagggttgcatggtgccacgagggccctcatggccttggggtgagtgcccgtgtggtcgcataagcccggagccccagagccagcacagggggcctgcatccgacttccacagccccttcctatgccccggctgtggtccttacgctcattagatttctgggcaaataatggtggtgaccacagacaacagtaagagccgacatcagtcagcgagcaggtcattaactgttgagctcgtggtgtgagccgggcgcatgctggacgtgggtggtctgggtctcgcctgggcgctggacaccgtgggctat

SEQ ID NO: 88335 - DNA, 1055 bp, Homo sapiens
tggtgaccagaggttgggaactaggttggatttcgatgaaatagcctcttgcgaaacagcaaatgcactttacaaataaggagaattgtttttagagagcaaacagtcctgtctaatgtttaatagacatgctccatttctccaaaaagagcccagtctctccagaacaatctgggaggggcgggggggggttgtcctggtgtcccaggtggcgggtgatggaggagccggagttctgcacgtgggggacgaaggtctcacgctgcagggtttcccgctcacgaaatgaccctgagtggtcagaacctgtcttctcctccgtaaagctgcactgttgggacgcacctcgcagagccacagtgaggttctgcctgtcatggtatgggagaaaatgctgtattttgaacacttgtatttcggaatctcctttaaagcttccagcacattcttttgattatcctcagtgctggcaaaacattttcacttaaagagggttttgatttggggaagcagctgagagctgtgtgcagccagctctggcaactggagcgatcacactgagtagagccatttgaaacacagaaggaggtgggctccagccccgctgcggccttgtccagtgtggacaccgcgcaggctacagagcacccaaaacgtggctgagcagaactttgacgtgcttaagtgcaaaatgcacagcagactttggagactttaaggacataaaataggccaggtgcggtggctcccgcctgtaatcctaacactttggaaggctgaggcaggaggatcacttgaggccagaagttcaagaccagcctgggcaaaaaagtgaaacctcatctctacaaaaaataaaaaaattagcgggacctggtggcatgtgcctttagtccaggctatttgggagactgggcaggaggattccttgagcccaggagtttcagaatacagtgagctgtgatcacaccactgcactctagcctgggtgacaacctgtctctaaaaaaaaaaaaagaatgtaaaagatttcattaataattttttcaggctgg

SEQ ID NO: 88336 - DNA, 1093 bp, Homo sapiens
tatcctcctgatgagactgaaggagctaccttccccaagcctgctgcccggggactgggtcctgatcctggctgcctacaagattccatatcgccctttgacccgcaaagccaggggttcccaggaagatgggtagggcccctgcctggctctgggcaggtggaggaagctggggcctcatccaaggcatgccagcagcagacgttctgcagcgggggcaacgcgatccttgtttgcgtgtgtctggctcgtgtttaataaggtgtcgctgtttccctgttctttgttgcttgggctttgagggcaaagcagatgaaccagtttctgccggccatgtgccaggtgaccgggctcagtgcgtgttgctcctgagcagtctggcagtgacatggccatgggaataatcggtggtgggctgcgtcccgtggcccccacaccctgcctgcctctgcctctgcccctgcctgtcactagtgggcatgggctgcgtccctctggtgagtgggaactgccagctccatgggtttccaggaccaggtctgtcctgctgactgctgcatcctggcccctaacccaaggtggccctgaggccggtgcacggcacagagtgagcaagagaagaggctggggtgatacctctctcctagtggctccaggctacctccaggagggttctggaagagacttttgcacctctgttctttttgttttcctgtttgggaactgatgaagccctttaggccaggacaggaaactaagaccttaggtggaggcagcctccacgggcaggtcctggtcatgaacctgtagcccacctgtgtccattctcgctgccctcacagggacgtcggggcccaggcgtgctcctctcctgggttctaggcctcggtcctcatcctactgctaaaagagtagtcactctgcgtggggggttcaccgtcagtgggtgagcaggtcagaggccgccctgcgagttggaaatcagctccttacagtgtcctcggtttggtgtggttggcagaagaatggcccccaaagatgcccatgtcctaatccagggaatttgtaaatatggtatgttacgtggccacgg

SEQ ID NO: 88337 - DNA, 1025 bp, Homo sapiens
ttcagcatttgctgctttgtcctgacaggtgccatttaacatatttataaccgggtgcagtgtctcatgcctgtaatcccagcattttgggaggccgaggcaggcgaatcacctgaggtcaggagttcgagaccagcctggccaacatggtgaaaccccgtctctactaaaaatacaaaaaatagccaggcatggtggcaggtgcctgtaataccagctacttgggaggctcagccaggagactggcttgatcccggaagggggaggttgcagtgagccaagatcgcgccattgcactccagcctgggtgacagagtgagactccatctcaaaaaaacaacaacaaaaagacatttgatttatgtgccttcccctcctaaaaagggtgggaacccctccaggatgcacacacatcttacttttctagatgcctggccatggtacatggagacacccctgggaaaccctccaggaccggatggcgtgtggggctgccgggttgccttacactttttgcgctcctcgttggcggctgcgcaggtcttggtgtagagagcgcgggcggcctgcagctcctcctccttctgcctgcgctcgctcgaggccattgcgtggcggtcgtgactcttctccagcagcttctgcaggtgtaccaggtgctgctgcacctcatagagattcacccccagctcctgccgctgggctcggctctgcttggtagccacaacctggaccaaagagagaaacagggtcaccaggacgcaggcatccgaccagggtgggagactggacggatacacaccagctcttggaggtccagcttcaacttttcgatctgtcggttcaggtagttcttcagggcagcctggaatcttaccatcaggggctagaacaatggaaaaccacaggtggttacctttctggttaccctcctgcccgacccagggctcagcccaggtggccacaggtctccctccggtgggccagagacgacttccgtgtggagtgctccctgcttctgcttg

SEQ ID NO: 88338 - DNA, 1008 bp, Homo sapiens
catctttatgaaaaggtgggtcaggtagagtagggctgccagaggttgcgaatgaaaacaggatgcccagtaaacccgaattgcagataccccaggcatgactttgtttttttgtgtaaggatgcaaaatttgggatgtatttatactagaaaagctgcttgttgtttatctgaaattcagagttatcaggtgttctgtattttacctccatcctgggggaggcgtcctcctcctggctctgcagatgagggagccgaggctcagagaggctgaatgtgctgcccatggtcccacatccatgtgtggctgcaccaggacctgacctgtccttggcgtgcgggttgttctctggagagtaaggtggctgtggggaacatcaataaacccccatctcttctagatcaaagatccagctaacaggcgctacgaggtgcccttggagaccccgcatgtccacagccgggcaccgtccccactctacagcgtggagttctccgaggagcccttcggggtgatcgtgcgccggcagctggacggccgcgtgctgtgagttctgggctctgtgccagcatgatggggagggcgacgcgcatttctcacacggcagggagggccacacgcgtttgtttctcacacgatgggcagggcgacacatgtttgtttctcacacggcggggagggcgacgggcatttctcacagggcgctccctgggtcttttactcacataggtctaaatcccatgtaaacacgtgttcaggactcaccaagcccctgcttgtcatttaactcaggaaaactctcaggaacgacagcacttggatttgccttaatcttaagagaagttgccttcggaaatgcgtttttctttttttgctcattcatttactcagtgtccacgcactgaccctccgtgccgggtggtttggatcctgctcccggggacagacacacagtgaggggaagccataagcaagtccatgcagacacagcgtcagggagtggtcat

SEQ ID NO: 88339 - DNA, 1016 bp, Homo sapiens
gggaggactttggccacaagctcctaggcctggaaaggttctgttcagcccctgcccagccttgcttggggtcatgggacaggcatgtgtgccagttccggtaccagccagttcctggaggtcagccccttgggggcccctcaggggtggtgtgggcccagccaggcggtgcgcctcttctgatatgccctgagagttgatcacgctggtgccagggtgccaagggctgcagggctcggcacggccgcctgtcccagggtcagtgtgctgcagggctggccaggccactccgccctcccagggcaccagggcccgggggtgctctctgggtgctctcaggctcgtgtggccccttgggtgtgagcaagcctggctggcctctgtcccgcaggctgaacacgacggtggcgcccctgttctttgcggaccagttccttcagctgtccacctcgctgccctcgcagtatatcacaggcctcgccgagcacctcagtcccctgatgctcagcaccagctggaccaggatcaccctgtggaaccgggaccttgcgcccacggtacagcggcgggcggcgggcgggggcactgagctggggagcgcaggtgctgaagcgccgtctcctgcatgtcccagcccggtgcgaacctctacgggtctcaccctttctacctggcgctggaggacggcgggtcggcacacggggtgttcctgctaaacagcaatgccatgggtaagctgcccgccgcccagcgcccgggccggggtctcctccgtgctgcctgccctggagactggaggtccgcatgaggggccctgggcacggtgctgggccttgtgttttctgggaaatgagtcctatgggctgatgcctctcccaactctggccttctgtgctcctaaggagggttctggggccctgcctggaggtgggctggcaccacatatctttccgtcccatgccaggttcctcctgagtcaggcttagcacggcttccccaggccactctgagctcct

SEQ ID NO: 88340 - DNA, 1340 bp, Homo sapiens
ggctccgtgtgccttctggccgtgcctctccttctggccggctctgaatccctggaaaggacggcgtgagtgagggcagcttccagccctcatgctggcaccacagagcggagacttcttcccatcagctcccatagaaaagtcccaaagcaggactcttgagtcacccagcacaaagaggcccttccctgagccagtcccacagccagaaggatgcagtttgggggctggtccagcccgagtctggtgtccggcacgatggccagaggaggaggtgggaggcagggcgagctgaaaagatccaacagttcctgcccggaagatccacttcagcagaggaagcacagatgagatgtggggctgtgctgatgctgcctgtttccatccctgccttctgcaggcagcaaacagtagtagcccttaagagcaggagtggaaacacagacttttttctttctcacatttttttaattataaaagaaaagtgattactgtagaacacttgggaaactctagaggtttaaagaaaaggtaaaggtaaagcttccattccggcgcgcccctcatcagccagctggtcctgactcgcccggccctggctcctctccaggcaggcgtgtgcaggcatgtgcaggtacacaggcaggcatgctgtacacacgcatgatgtcatccccagcctcatcctctcactgtctcagttttccccgtggctggcgccagggctctgggccaccctcaccttgacaggtttccctcttcccaggatcctgccatcagcagctcgggccctgccgggagctacaggccctacgacgagggtctgcggaggggggttttcatcaccaacgagaccggccagccgctgattgggaaggtagggcgagggtccaggggacgggggttagaaagcagaggcctccagccagggggagccggcagctgctcaggaagacggtgggatttgaggagccatcacgcccagtgggacagctgagaggaatgggccacagtggcccgtgacgatggtggctcctacaaggaatggccccgtgagttcttccatcagcaggcctttgacttcatgggcagctgggcctggcccaggcacaagccctgcagaccctcagtgaggccttagggtcctccttgtcctcccagccccccaggggcctccaggcagggcccccgctgagggagcagctagggagggtctggtgcggatgtgaggctgcctggcagggcttgcacggggccgtctccgctgcccttctccctgacgctctctggttctgcagcccagcccctgggtggacgtgttgggggtgacccctcgtttt

SEQ ID NO: 88341 - DNA, 1075 bp, Homo sapiens
gggcctctatgggaggcttgccggggccccccacccacttagcaggtggggctctgggtcacttggcctgagctggctctgctgcagcagcctgaggaccagcctgactctgccctcccagaaatcctgcagtttaacctgctgggggtgcctctggtcggggccgacgtctgcggcttcctgggcaacacctcagaggagctgtgtgtgcgctggacccagctgggggccttctaccccttcatgcggaaccacaacagcctgctcagtctggtagggtgggggtggcggcatggcaggtgggcgatcccacccacccaagactctcccctgggaatcccacccctgctggagaagcaccccatgctgggtggctgagaagtgcagctctcccgaggcggggactccaggggaccgcggccccagcacccaagtgcttcctttgcccccgcctgccctgcagccccaggagccgtacagcttcagcgagccggcccagcaggccatgaggaaggccctcaccctgcgctacgcactcctcccccacctctacacactgttccaccaggcccacgtcgcgggggagaccgtggcccggcccctcttcctggagtgagtgacctaggcaggggcggtggcccatgtgtgccctgggggaggggcacgtaactcccaggcagccctgtcctgctgtgggctgtgttccccaggacccagcaggttgccgctgagtgagacaacatttgggcctggcttaagggggaagggcagcaagaaaacccagtaatatcccccagacaggccgtagtacacacgaggagttcctaacaacagccctgcacatcagtgtgttgagggaggattcccagagagtgaggtgattagttaactatttgcagaagtcaatttatttttcttgcataccatagaaacataagttccagataaattaaatagttaatgtcaaaaatcaagctgtggaggccaggcacggtggctaacgcctgtaatcccagaactttgggaggctgaggcgagtggatcacctgaggtcaagagttcgaggccagcctgg

SEQ ID NO: 88342 - DNA, 1048 bp, Homo sapiens
gtcagctggtgttagccgggcggagtgtgttagtctctccagagggaggctggttccccagggaagcagagcctgtgtgcgggcagcagctgtgtgcgggcctgggggttgcatgtgtcacctggagctgggcactaaccattccaagccgccgcatcgcttgtttccacctcctgggccggggctctggcccccaacgtgtctaggagagctttctccctagatcgcactgtgggccggggccctggagggctgctctgtgttaataagattgtaaggtttgccctcctcacctgttgccggcatgcgggtagtattagccacccccctccatctgttcccagcaccggagaagggggtgctcaggtggaggtgtggggtatgcacctgagctcctgcttcgcgcctgctgctctgccccaacgcgaccgctgcccggctgcccagagggctggatgcctgccggtccccgagcaagcctgggaactcaggaaaattcacaggacttgggagattctaaatcttaagtgcaattatttttaataaaaggggcatttggaatcagcttctgcgggtctctctgggattcagggcagggaggatgtatccaggggccctggaacagaggcagctcctttgtcctcagcaggcccccagacattcccacagtgggtgtgcgccgtcctctgtctcaagccggcatccatcacgtcatgttcccatgtcacgaggcctgacatcacctcatgtcctgtccccatctcacctcacatcccgtcacctcatgtccccgcatcacctaaagccccatgtcacctttgtgtcccatacccccatctcacatgcctacctcatgtccccatgtcaccttcacgtcccatctcacctcacctcccctccccaccccacctcacctcccctcccctcctcccctcccctcctcacctgacctcccctccccacgtcacctcccttcccctccccacctcacctcccctccccacctcccctcccctcccctccccaccccacctcacctcccctcccc

SEQ ID NO: 88343 - DNA, 1018 bp, Homo sapiens
acgaggtcaggagataacgactctctgaatacacatatagggtgcacacagcacggtgtgctaacacggtgaaaccccatctctactaaaaatacaaaaacaaaattagcctggtgtggtggcgggcgcctgtagtcccagctactcaggaagctgaggcgggagaatggcgtgaaccctggaggcggagcttgcagtgagctaagattgcgctgctgccccccagcatgggccacagagtgagactccgtctcaaaaaaaaaaaaaaaaaagcaaaattaacttgtttttgtcagagaaaagagcaggagaattttgtggtttcgagataataatggcataaataataatcggtgatcatctcggaggagaaacagtctttctttttggaaaacgtggatgtttctctctcccaccctggacgtgaacctgtgctttgtttcaggggctgcttgctctcggtgactacatgaatgtccagtgccatgcctgcattggaggcaccaatgttggcgaggacatcaggaagctggattacggacagcatgttgtcgcgggcactccagggcgtgtttttggtaagcacttttgtcgctaaaaatggtgctgccggtagtatttgtaagaagtgcttaaatggtacaggacagctttcgatttggtaggccgcacggtagacttttgcacctgggtcacttgcaggaggtagagggaaggtctctggaaccctgagaccagtggaatgatgagctctttcttgggagcctcaggtgtgattatttcaaaatctcatagatgtgatttgtcgtaagtatttcaaaatctcatgttatagatatgattcgtcgcagaagcctaaggacacgtgctatcaaaatgttggttttggatgaagctgatgaaatgttgaataaaggtatgagcaacaaaagaattactcttctactgacataattcttagttcttaaattttcacagtgtaaaattgaaacagccagtgactgttctgaatgtgaat

SEQ ID NO: 88344 - DNA, 1033 bp, Homo sapiens
taggtctcagtccggcacaggaaaaacagccaccttcagtatctcagtcctccagtgtttggatattcaggtaatttgccattcttaaaacaaactgttatgtaattctaggaaatacttgctttttcttctgtaactacagtgttcaaaaagtacaatttaaaattttctagtatgtattgactcagcaaatttttacacagagtcttagttgtacactaatatatgcactaatattctgtcatgattttctatttaactagaggaagctcttgtctgcagacgaggatgctgacacattaagttattgttggatttgcaatttaaatgacaatatttgctaacctgtaagagatgagaagtatgattaatatgagatagtatttctcatatagatctgagtgtgaattactacaatccactttgataatactgcggattctctattttctgataaattatttcaccaggttcgtgaaactcaagctttgatcttggctcccacaagagagttggctgtgcagatccagaaggtgagatggctaaagatagcggtgtccgattaacaagtactgcttttgtgatttagttgtgaaacaccgacttatttatttaatccaatcctgttttctgatacctcaaaattttcttcctgattaacattttgccattaatcattatataaattgctggtttgtattaagtcatttttggtgtggcttgtgtgctctcggtagttttttacagccttagaaatgtagattttttgcgaaaaatcaattttaataaaaataaattaggtcgaggtgggtggatcacctgaggtcaggagtttgagaccagcctggtcaacatagtgaaaccctgtctctactaaaaatacaaaaaattagctgggcgtggtggcaggcgcctgtaatcccagctacttgggtggctgagcaggagaatcacttgaacccgggaggcagaggttgcagtgagctgagattgtgccgttgtactctagtctgggcaagaagagtgaaactct

SEQ ID NO: 88345 - DNA, 1090 bp, Homo sapiens
ccccagcctgtttccagggaattcaggtccacacgccgctcaaagaacctcagcgccccagtccgcgaaatcccgcggccggtacgaaacaccgccaactttagaagtaccaccccctccatccctttcgtaaggaactgggtgccccgccctcaacgagatcccgcgggaactgcatatggcgcgagagcagaaacaccttacttttccctgcggcaaacgcccagttccctttcacgtgacgaagagtgccccgtcccccagaggcgtggccgcgtcgcgcgtacgcacgtacgcacgtacgcacgcacgtctctcgctttcgcatacttaaggcgtctgttctcggcagcggcacagcgaggtcggcagcggcacagcgaggtcggcagcggcacagcgaggtcggcagcggcacagcgaggtcggcagcggcagcgaggtcggcagcggcacagcgaggtcggcagcggcagcgaggtcggcagcggcgcgcgctgtgctcttccgcggactctgaatcatggcgaccacggccacgatggcgacctcgggctcggcgcgaaagcggctgctcaaagaggaagacatgactaaagtggaattcgagaccagcgaggaggtggatgtgacccccacgttcgacaccatgggcctgcgggaggacctgctgcggggcatctacgcttacggtgagcgggcgcgggccgcgggggccagccgggggcgagtcgggggcgagccgggggctgagggccagactggtgactcccgggccggccctgcgctccggaggtcgtggtcagggtcgaggctcgggggccagtgacgtccgacccccacccccacccccgtcctcgccctcacgcctggctgtgtcggcgctttcggtgtgtgtcccccgtgcagagctcggcgctgggtctgtcgggggctgcagccgcttcgaggcacctcagcgtccttcattcagcagataactgatttctacctattagcttttctaggtactggggttttggcggtaaaccggaagggtttgcgcctttacgggttttgaatttcgtttggggggaaagcatactgtcag

SEQ ID NO: 88346 - DNA, 1020 bp, Homo sapiens
actttgtgaggggctcggggtgaccccttcggcacagggcagaggctcgtgtgtcctgcccactgcctggcagagcctccaggtggggtgggcccgggacagcaggaaactcaggttccctttccctccgagctcgcggcccacatctctcttggggcccacatctctctctggccccaaatgatgagccaggagcactgtggccacacccaccacaggggctggagtacacgagctaccaaaaaggagacttcttttccagtccatgggattttagaaggatcctaaatgtcaccgaatcagggcctcttgttataccattcaaggcactgaggcccagagagatgacgtggcggtgagaggtgtcggctcgacaaggcacctcccgctgctgattggattggagaagggagccgcccagagtggcgtaggttcggcccttccgagggcagctcctgtgtgctgagggctctgctgctctgagatgccgcgtcccttccagacctcacgcccaccatcttggattggttctcgatcccgtaccccagctacgccatctttggctcgaagaccatccacctcactggccggtccctcctgccggcgctggaggccgagcccctctgggccaccgtctttggcagccagagccaccacgaggtcaccatgtcctaccccatgcgctccgtgcagcaccggcacttccgcctcgtgcacaacctcaacttcaagatgccctttcccatcgaccaggacttctacgtctcacccaccttccaggacctcctgaaccgcaccacagctggtcagcccacgggctggtacaaggacctccgtcattactactaccgggcgcgctgggagctctacgaccggagccgggacccccacgagacccagaacctggccaccgacccgcgctttgctcagcttctggagatgcttcgggaccagctggccaagtggcagtgggagacccacgacccctgggtgtgcgcccccgacggcgtcctggaggag

SEQ ID NO: 88347 - DNA, 1080 bp, Homo sapiens
cacagcaggtgctcaataagtggtagaacagacaacagatgtcagctccttgttcttaggggttaaactgagcagtgtggaggtctgggaatgagtccttgttaatattctggaagagccaggcgcagtagctcatgcctgtaacctcagcactttgggaggccgaggcaggcagatcacctgaggtcgggagttcgagaccagcctggccaacatggtgaaaccctgtctctactaaaaacacaaaaattagccatgcatggtggcatatgcctttaatcccagctacttgggaggctgaggcaggagaatcacttgaacccaggaggcagaggttgtagtgagccaagatcgtgccactgcactcctgcctgggcaacagagtgagactccatctcaaaaacccaaaacaaaactaaatattccagaagatcccatctggggccacctttgccctcccagttcatcaccaccatcatggtcttcctacaatgcaggagacacagaggggcaggcctgggaccctggaggcccacagctggtgtcttccttcccgcggctggggtcttaccgatggccagcagctcctggttggcatcgatgcggtaattattctgagatgctaaagggaaccaacggtaaagacctggtcagtaatattcaacatcgctcaaaaagtattcacaaaatgtaacacagattatgaatttctacacacggcaataagttttgtaaatctaagaatacacatctaaaatattcacatatatgtgcgtgtaaacatgtgcttgaatgtatcacagagtggaaagaggtacagtaccatgtaatcaggccaggtatggtggctcacagctataatcgcagcacttttagaggccaaggcaggaggatcgcttgagcccaggagttcgagaccagcctgggcaacatggcaaaatctcatctctacaaaaaatacaaaaattagccaagcatggtggtgtgtgcctatagtcccagatattcaggacgctgaggcgggaggatggtttgagcctaggaggttgaggctgcagtgagatgagatcgtgccaccgc

SEQ ID NO: 88348 - DNA, 1090 bp, Homo sapiens
atctgggactataggcacacaccaccatgcttggctaatttttgtattttttgtagagatgagattttgccatgttgcccaggctggtctcgaactcctgggctcaagcgatcctcctgccttggcctctaaaagtgctgcgattatagctgtgagccaccatacctggcctgattacatggtactgtacctctttccactctgtgatacattcaagcacatgtttacacgcacatatatgtgaatattttagatgtgtattcttagatttacaaaacttattgccgtgtgtagaaattcataatctgtgttacattttgtgaatactttttgagcgatgttgaatattactgaccaggtctttaccgttggttccctttagcatctcagaataattaccgcatcgatgccaaccaggagctgctggccatcggtaagaccccagccgcgggaaggaagacaccagctgtgggcctccagggtcccaggcctgcccctctgtgtctcctgcattgtaggaagaccatgatggtggtgatgaactgggagggcaaaggtggccccagatgggatcttctggaatatttagttttgttttgggtttttgagatggagtctcactctgttgcccaggcaggagtgcagtggcacgatcttggctcactacaacctctgcctcctgggttcaagtgattctcctgcctcagcctcccaagtagctgggattaaaggcatatgccaccatgcatggctaatttttgtgtttttagtagagacagggtttcaccatgttggccaggctggtctcgaactcccgacctcaggtgatctgcctgcctcggcctcccaaagtgctgaggttacaggcatgagctactgcgcctggctcttccagaatattaacaaggactcattcccagacctccacactgctcagtttaacccctaagaacaaggagctgacatctgttgtctgttctaccacttattgagcacctgctgtgtacctgaccctgaggtctgtggccttggtctagatccaggaacacctggaatgtcccacctcggggagggagcacctagtgccggg

SEQ ID NO: 88349 - DNA, 1088 bp, Homo sapiens
ggtaacaagagtgaaactccatctcaaaaacaaacaaacaaacaaaaagtcctctgggccaggcgctgtggctcacacctgtaatcccagcactttgggaggccgaggtaggaggatcatttgaggccaggagtttgagaccagcctgggcaacatgacgaaaccccatcaaaaaaataggaaaaaatagctggacgtggtggcgtgcacctgtagctactcaggaggctgaggtgggaggatcacttgagtctgggaggttgaggctgcagtgagccatgatcgtgccactgcactccagcctgagcaatgagcaagaccctgtctcaaaaaacaaaaaattaaaaaaaaaaaaatcttcctctgacagcattcccctggggctgcgtttcttctcaccattcactggtatggaggtgaagccatacctctccgggagactctgagatggcaggtctaccaggctgccgacccgtgtgctacagaggaacatccctgccctggctaaagtctgtctgtctctcaggtccccgttctccgtgtcctgctgtccgctgacctgaaggggttccagtacttctctaccctggaagaagcaggtgggcacagtcagacatcctgtggctttggtgattttgtaaaaatcataaatgcttattgtaaaaaatatgggaaaccagctgggcacagtggctcatgcctgtaatcccagcactttgggaggccgaggcaggtggatcacctgaggtcaggagttcgagaccagcctggccaacatggtaaaacctcatcagtactaaaaatacaaaaattagctgggtgtggtggcatgcacctctagtcccagctattcgggaggctgaagcaggagaatcgcttgaacccaggaggcagaggttgtactgagccgagattgtgccactgcactccagcctgggtgagagagcgagactctgtctcaaaaaaaaaaaaaacaaaaaaaacaggaaaccacctccaccccagtccactttggtgatcactccatacccctcccctaaacacgcatatgtacctgcctgtcaggatgtggatatatgtttgcggtt

SEQ ID NO: 88350 - DNA, 1686 bp, Homo sapiens
gatggcggcttgagggcagtggtcttccaggaactggatcacggtccctccaagggtctctcctgcagttgcgtctgcgcttactgcagtctttccacagccccgtgttgtgggcagagggagtgaggccaggcctggctcctgcctccagcctccccgggctctgcccaacctccgtgtgctgctgctgctgtttcttcctggctggccactcccctcctgcaaggcaggccctggggaggggtgctggcagctgttcctaaggtctgagccctttgctacatcaaggaaagaagcggtagggggcctgcatcttccatgctggtgggaggtggggggtggtcaggggcctgcctcagtgggctcctcctgttccgggctgtgactcggcggtccagagcctcaggattctccgtctatttctgccagagcctgattatgtcatcgaagctgctagagcatccatgaccttggcttattttcaactttcataattagggaaaaacttaatttgaggtttgattattttaaccattagaaatctttgggtaatggccaggcacagtggctcacacctgtaatcacagcactttgggaggccgaggtgggtggatcacctgaggtcaggagttcaagactagctggccaacatggtgaaaccccatctgtactaaaaatatgaaaattacggccgggcacagtagctcacgcctggaatcccagcactttgggaggccgaggcgggtggatcacctgaggtcagttcaagaccagcctggccaacatggtgaaaccccatctgtacaaaaatacaaaaaaaaaaaaattagccgggcatgatggcaggtgcctgtaatcccagctacttgggaggctgaggcaggataatcacctgagctggggaggcggaggttgcaatgggctcagatcatgccattgcactccagcctgggcaacaagagtgaaacttcgtctcaaaaaaaacaaaaacaaaaacaaaacaaaaatagctgggcgtggtggcatgtgcctgtaatcccagctactcaggaggctgaggcaggagaatggcatgaacccgggaaacagaggttgcagtgagctgagattgtgccactgcactccagcctgggtgacagagtgagactccatctcaaaaaaagaaaaaaaaaaaagcctttgaattgcaaataatggaaagcccagctccacctttctaatcccattgaggaagtttattatggacacacctgatgagccccgagcctgtaggtgaggcttggtgcaggcgtctccggccctgtctactctgccttccggacggctcccccactgagcctctcatcagctgtttcccgttactccctcgtgccacacagtggcttcccctgtgatccacctgctactctgtccttcaggggacaagacagcgcctcctctggtgattgattcctctggagagaggaagcgcttcctcaaatctcattggctctgattggctcacaggccaatcccccagtgggtccctatggccaggatgatagacatcagtggttgacaccagcccacgcacaagagctgcccttggggctagagtaaggctgatgttactcaaaccatgcagccgataacagggagagccaagggaccattccccaggatgggccatccagcgctgtcaccagg

SEQ ID NO: 88351 - DNA, 1052 bp, Homo sapiens
ttgtgcagagtccgaagagggagcacagaggagagaggaagagtgaaagcagctgtgtgaagcgtgaatcgcacaggactggagttgaatgaatgtgggtggtggtgtgctattcttgcgacctttttgaaagttcaaaaattttcaaagtataacatgagagataagtcctttcagaataaaaagccggttgtgcagtaggaggaccagtagtggcccctggttgggtctctgattctagaaagccaacctgggctgctgtgaccggccactagcatggctgactgttgatgaaggttggggagagccctggtgttcgcggagtcccgcgctctctgtattgccgtaatgctctgtctttctcctttcatgggagtgtgccgtggcatttagtcgtgagagtgggtgtgacctgtgtgcgggttttgcaggtctggaggcggctggtggaaatccaattccccgcggagcatggctggaaggagtcgttgctgggagacatggaatggaggctcacaaaggtaccaaaagtttgggggcagtcttttcagggcgtgaaggcaagctggagaaccccagaccattagcgacagccaagagatctcagcagtgcctctctgtgggcagggatggggtgaatcacagctccgtgtttctgtttctgatccagcccttatagtctgtccctagaagagcgcttcggagtcttactgagaggacagagaagaacaagggcccaggatctcaccatcatgggggtgcgggatttttcctgaccccttcgttggacttgcgacagggatgctgtgtttacttggcccgccgtgctcaaccccttgtgggagggagcacgtgagtgagtgtggcatctggccagctgctttgggagctggcaggagcaagctccgtgcaggccctgcagcagtgcccagattgaggtgcctgcaacccccgaagctccagagggcatgttacagtgctctcttagctccgccgtctatggacagtagtgtgttatcagctcagtgggtcccttgccttgttgcctaggg

SEQ ID NO: 88352 - DNA, 1050 bp, Homo sapiens
gtagctgggactacaggcgcccgccaccgcgcccagctatatttttgtattttttgtagagacggggtttcaccgtgttagccaggatggtctcgatctcctgacctcgtgatccacccgcctcagcctcccaaagtgctgggatgacaggcgtgagccaccgcgcccggcctatatgtaactgttaaatggatctttaaagggaaaagtcagaaacaaggaaaaatgacctatgtctcataacttacctgtttttgcaagccaggtgctttttctgcagagtgggaaaagagactcttttaaattttagcctttggtctactggtggggggcagggaggacatgctttgcgtgggccaggagaagcttaaaattgggggaaacagtaaaacagcaggaaagtaaaaatgatgaaagaattttcatcccatagagcactggagcgctgcatccgaaagctctgaaaccacccccctttgatttttgcaggaggaacccctctcccagatcactgcctactgcaatagttgctgggacaccaaaggcttagaggacagtgtggccaagaccttcgagaaatgcatcattgaagccgtgagctcagcctgccaggtgaacaatctctcctcctgggaaacggattcgggctcacagctgtgttctgccatgacccagctaagggctatgaagcacccgctgggtctcagctcctccgctaactcagagattgggaagtgggcaccctcctccctcgccaagggcaatggcgctgaaatctagttctctccggattcctcagtgtgctgcacagtccctgctgctcgcaccatcctgcatgtgttccatatggaatcacggccgtgcgcgtgtggcacaagtcacacgggcttgcaggccgttcctcagatggccctgtcatcactgtggctgctggtttgattgattgttaacacttgctcagtaggtgtgcgggaagagactccaaaggttgacagaacatttatggaagcaaaatatgtgaaatggaaaattgtatcaatttatttagct

SEQ ID NO: 88353 - DNA, 1008 bp, Homo sapiens
cataaaatatatgctatattaagggtttattcatttttggtatttttcatgatatgaaagtccaaaaaaaaatgtagaaactggcagccagaaggaaggagggtgactggttatgttggtgtgtgtttgtgtgtgtgtcttcacatctctggtgctggacacttaaggaggcagtatacaaggaaatgaaaattttcgaagaaatgtaaagtgttttactattttgctctttttgtggccttataaaacaagttacagtagatttcagaaatgctatcgagtaggtaatttgcttttgttatttcaaaacaaactaatgaaaaacttctaaatgtccctcttttattaattttcttgtagtctcagaccagtatccttcaggggttctcttactctgatttgcggaaatttggcatcgtcttgtctgctgtgatcactaagtcctggcctaggaccgcggacaacttcaatgacattttaaagcatctgctcacgttggcagatgtcaagcacgtcttcagattgtgtggtatgtttgcgggagtgctgggaacatcagctcaggcaaggtggtgtcttcctgattgggaaaggtgggaggcagaagatttgacatgatgatactgaattgggatgggctgatgtttgacaaaggctgcagtttggacagagagaccctggaaggctcagagtgtcttgcgttgtaaataataactaatgctaacagccactattcattgaatgcttgctgtaccctagcgactgtgctgggtcgcaagggaagtgcccttgaaacaacccttctgaaagtcccctttaaggcccccagttttcagatcaggaaacaaatggagaaggcaatgcgacttacctaaggtctcaaagattataagtagtaaaaactaaaatccagacccaggtatgtcttatttggagatcaatatagaatgtccaagccaacattgatgacctcaacagaaagtgaagtactgtgctgtctgatttccc

SEQ ID NO: 88354 - DNA, 1039 bp, Homo sapiens
ccaggatctaaagtcaggagaggtcacccttgcagagattgatgtcatcttcaaggactttgtgaataaatacacggacctggattcagaacttaagatcatgtgcaccgtggaccaccaggaccaaagagattggatcaaggaccgagtcgaacagatcaaggaataccatcacctgcaccaggctgtccacgcagccaaggtcatcttgcaggtcaaagagagcctgggactgaacggtgacttcagtgttctcaacactttactaaattttgtaagttatttgctggggactgtgggggtttggaggggcgtcctgcctcagcctcttcaggagccatgggctttgtggctttgaaaaggggggcggatgacttagagcttccgtcaggggctcctgtgtgtgtggtacttgaggcctgaatatcccaagggctttgtttttacctttgttataaatagtaccactgctccttagccagagggagtttccttgggtctgcgtgaagatcaagaactcaggaaagggcaacaatcctcttttcataacgggcatttgtaaagggtcataggctctctctaggttacagaagccaaaaagcaaaacactttgtcggctgcccaactgcatctcccagttccacccaaaagcggtaaatcagttgtttctgttagagttaagaggtgactcttttgcttttttttttttgagatggagtctcgctctgtcgtccaggctggagtgcagtggcgcgatcttggctcactgcaagcttcgcctcccaggttcacgccattctcctgtctcagcctcccaagtagctgggaccacaggtgcccgcaaccacgcccggctaatttttttggtatttttttttttttttagcagagacagggtttcaccgtgttagccaggatggtctcgatctcctgacctcgtgatccacccaccgtggcctcccaaagtgctgggattacaggcgtgagccaccgtgcccggctgagtcttctgcttcttatgtttttaggtagaccgaga

SEQ ID NO: 88355 - DNA, 1626 bp, Homo sapiens
agacggagtttcgctcttgttgcccaggctggagtgcagtggtgcaatctcggctcactgcaacctccacctcctggattcaagcgattttcctgtctcagtctcctgagtagctgggattacaggcgcccgccaccacacccagctacttttttgtatttttagtagagatggggtttcaccgtgttggccaggctggtcttgaactcctgacctcaggtgatccacccatctcagcctcccaaagtgcaggcgtgagcaagtacaggcgtgagccaccgcgcctggccccacagagagatttttctcacttctccattgatgctgtgcgtttcttggcagcctcttcagttctgtggcttagatgtcgttggcagaggagagaggaagaggcagaggaggcaggaggggcacaggtggcagtgcaggtgtgctcgggggtctgggggccaccacctgctggatctcaggctctggctctcttgggagagccgctgctttcagtggtggactctctggtccacactgatgcacatccttcagtgagtaatttatctgaggggaatgatctgagtgtttcatagttaattgtgaacatgttatttacagctgagccttggtttctttttgtttaaatggtaatgttgtgtggattgaaggaaagagcatacacagaagtgcagtacagtgcctgggacattgaaattgctcaggaacggcaagatatcgtttagtgctattaacagacagtacaggctgggcgtggtggctcacacctgtaatctcagcactttgggaggccaagtcgtgtggatcacctgaggtcaggagttggagaccagcctgaccaacatggtgaaacctggtctctactaaaaatacaaaaaattagccaggcgtggtggtgggcgccagtaatcccagctacacgggaggctgaggcaagagaatcacttaaacctggaaggtggaggttgcagtgagccgagatcatgtcacttcactccagcttgggtgacagagtgagactctgtctcaaaaaaaaaaaaaaaaactacaaaagattaggtgttccggactcttactgaaagcagaaagtggacagaaccttaaaaattcatgaaatatccatttcagcttcagtaaggattactgcccaagaccgagtcttgtgctatcgtggaatagtcccacgctgaactcccctcttctcttccccaggcatcaatgagctgaaggtgtttgtggacctggcctccatctcagcgggggagaatgacattgatgtggaccgggtggcctgcttccatgacgctgtgcagggctacgcatccctgctatttaagctggaccccagcgtggacttcagtgcattcatgaagcatctgaaaaagctgtggaaggctctggataaggaccagtacctgcccaggaaactggtgagtcttattctgtctctaatgcagattttgttgaatagagcattgcttagcaacgttagggcagtgactgtggaaatggtggcacacctgtgtggtaggtttgtacacagccgttttcaatgatatttaaaaagcttttcttcataaatggaaattcaccatcttgttacctagaaagcaggat

SEQ ID NO: 88356 - DNA, 1035 bp, Homo sapiens
tacttggggaccacagaaggacactgaggacttgggactccacagccattgcttccagcgtcacccccagagggttctctgcattggggacctggcagaatgatggcgtctggtagagaggcaggcgggcggctgctcattcccctccactcctccacagatgtaagtcaagtgcccccatgtgccagccggggcaccaggcactggaggaaacgtggaacagcgagtacaaagcagcactgagtgacagatcatgttgtcagggtggcacctggtccagctggggcgctgggtgggcgactgcgtcctgagccctggggaagcgtggggagaaggctctgcagcgaggcagaggcgggaggccgaccacaggagggagaagggcaagatcctcgctccaaccgtggcccgtgttctctccttttgtccccatagtgtgactccgccaggaacttggaatggctgaagactgtgaatgagagtcatgggtctgtggaacgctcatccctgaccctggccacggccatcaaccaaagaggcatctatgtgatccaggcgcccaaaggtggccaaaaggtgagcggtccccagccctcggcgcagctgcggcccttctgcaggctgctgccagtccaggtcttctggccccaagaaagtgacttctaacctatgctcttcacagatttccccagacacggttctgcacttgatccttcctgagagccctggcagccacgaggagtcacgagagtactctttagaggaggtgaaggagcttttgaacaagttgatgctgatgtctggcaagaaggatcgtaacaacacggaagtggagaggttttcagaggtgagggcgcatctttgcagtggcgctaagctggtggtgtcatctcgtccgtgagggctgtgtactcccaagaaaacggaaaggatttgacttgggatttgactgataagaagggctctgctcttaggcccatggagagtagagttggcacatttgtagggtgcatggaactctagtccgcggcccca

SEQ ID NO: 88357 - DNA, 1049 bp, Homo sapiens
gcactctgctgggaatatgctgttcaggacgtggatcgccatggcctactgctcccccaagcagggtgtgtccctccaaatggactttggcttggacctggtgacggagcttaaagaaggtggagatgtcactgagctgctggcagccctctgcaggcagatggagcacttccttgacagctggaagagatttgtgacccagaagcgaatggagcacttttacctgaacttctacacggcagagcagctggtttacctgagcactgagctcaggaagcagcccccgagtgatgccgccctaacgatgctatccttcatcaaaagcaactgcaccctgagggatgtcttaagggcctctgtggggtgtgggagtgaggccgccaggtaccgcatgaggagagtcatggaagagctcccgctgatgctcttatcagagttcagcctggtggacaagctgaggatcatcatggagcagtccatgaggtgccttcctgccttcctgcccgactgcctcgacctagagacccttggccactgtctggctcacctggcagggatgggtgggtctcccgtggagcgttgtctcccgagaggtctgcaggtcggccagcccaacctcgtcgtctgtggccactccgaggtgttgccagccgccctggctgtctacatgcaaaccccaagccagcccctgcccacttacgatgaggtgctgctctgcaccccggcaaccacctttgaggaggtggcactgttgctgcgccgctgcctgaccctgggctccctggggcacaaggtctacagcctgctgttcgcagatcagctgagctacgaggtggcacgccaagcggaggagcttttccacaatctgtgcacgcagcagcaccgagaagactaccagctcgtcatggtctgtgatggggactgggagcactgctacctcccctctgccttcagccagcacaaggtcttcgtcaccccccaggcacccctcgaggccatccaagcctacctggcaggtcactaccgggtcccgaagcagaccctgtcgg

SEQ ID NO: 88358 - DNA, 1773 bp, Homo sapiens
acaaaagcatttcttagaaagtcttcttgtaaccatttcattaatgtctctcctttccagcgtacacgtgtaccccagttcagttttcttgacatcttcccaaaagtcacctgcaggcctcccaaagaggtgatagacatggagctgagtgccctgaggagtgacacagagcctgggatggatctgtgggagttctgcagcgaaactttccaaagaccttaccagtatttaagacgattcaatcaaaaccaagacctagacacgtttcagtatcaagaaggctctgtcgaaggcaccccggaggaatgcctccagcatttcctgtttcactgcggggtaataaacccatcctggtcagagcttcggaactttgctcggttcctgaattatcagctcagagattgtgaggcctctctcttctgcaatccgagttttattggcgacacactgaggggcttcaagaagttcgtggtgaccttcatgatctttatggcaagagattttgccacaccatcactccacacctctgaccaaagcccggggaagcacatggtcaccatggatggggttagggaagaagatctagcgcccttctccctccggaagaggtgggagtcggagcctcacccatacgttttcttcaatgacgaccacacaaccatgacattcatcggcttccatctgcagcccaacatcaacggcagtgtcgatgccatcagtcacttgactgggaaggtcatcaagagagacgtcatgaccagggacctgtaccagggcctgctgctccagagggtgcccttcaatgtcgactttgataaactgcccagacacaagaaacttgagaggctctgcctgaccttagggatcccccaggccaccgaccccgacaaaacgtatgagctcacaaccgacaatatgcttaaaatccttgccatcgagatgcggttccggtgtgggatcccggttatcatcatgggagaaactggctgtgggaaaaccaggcttattaaattccttagcgacctgcggcgtggtggtaccaatgctgacaccataaagctggtcaaggtgcacggaggaacaactgcagacatgatctactccagagtcagggaggctgaaaatgtggccttcgccaataaggaccaacatcagttggacaccatcttgttttttgatgaagccaacacaacggaagctataagctgtatcaaagaagtcctgtgtgatcatatggtggatggccagcctctggctgaggactctggcctgcatattatagctgcctgcaatccataccggaagcactctgaggagatgatctgccgtttggagtcagctggtttgggctacagggttagtatggaggagacggccgacaggctgggctccattcctctgaggcagctggtataccgggtccatgctctgcccccgagcctgattcctctggtgtgggactttggacaactgagtgacgttgctgaaaagctctacatccagcagattgtccagagactggttgagtccatcagcctagatgaaaacgggactcgcgtgatcacagaagtcctctgcgcctctcagggtttcatgaggaaaacagaagatgagtgcagctttgtcagcctcagggacgtggagcgctgtgtgaaagttttcaggtggttccacgagcacagcgcgatgctcttagcgcagctgaatgcctttctctccaagtccagcgtcagcaaaaatcacaccgagagagatcccgtcctctggtcgttg

SEQ ID NO: 88359 - DNA, 1112 bp, Homo sapiens
tggttctggtttccccaaggaccaagagtacacccagctctgcagaaacatcaatcgtgtgaagatctgcatggaaacaggcaagatggtgttgcttctcaacctgcagaacctctacgagagcctctacgacgcactcaaccagtactacgtccacctcggcggccagaagtacgtggacctcggtctggggacccaccgcgtcaaatgtcgggttcaccccaacttccgcctgattgtcattgaagagaaagacgtcgtgtacaaacactttcccatccccctcattaaccggctggagaagcactatctggatatcaacacggtgctggagaaatggcagaagagcatcgtggaggagctctgtgcgtgggtggagaagttcatcaatgtcaaagcacatcatttccagaagaggcacaaatacagcccctctgacgtcttcatcggctaccactcggacgcctgcgcgtctgtggtgctgcaggtcatagagaggcagggtccccgggccttgacggaggaacttcaccagaaggtgtctgaggaggccaaatcgatcctgctgaactgcgctacgcccgatgccgtggtccggctgagcgcctactcgctgggcgggttcgcagcggagtggctgtcgcaggagtactttcacagacagaggcacaactcctttgcagatttccttcaggcacacctgcacacggcagacctggagcgccacgccatcttcacagaggtgattgtctttctgcacttgtaccctatcccctgtcacccaagagtcctaaatccctcgtgtcaggattcaagattcttccccaggcagcggttagggatcctgcagggagatgctgagacgctgagctctcctccgcggtaagtgtggggagtaggtccagttaaccaggtgctgagtgcctggctctgtgcagtgcaccatgctggtaacagcaccatacacagtgttcacaccaacaaataaagtaccacgtcccaggactgggccaagggcactagggacgcacagatgaatctgtagcccttgtcctttgttagcattagggagcatggagagaccagcacatgaacagatgccatcaatatca

SEQ ID NO: 88360 - DNA, 1607 bp, Homo sapiens
acgtttcgacttgcactgtgatgggggagtgacctttgggacaggagaattgctgacatctgggggaaggggacagcaccaaccacgaactccatctgaaagcatgagtcgtactataacaggaaatggcatttgtgctgagccctaagggatcatgagaatctcaagtacggaccaagcaggcagagacacgggcctctggggaggagaggaaggcaccctcggggcagggtggggtcgtctctccaatgcctttggccctgtagggcctctcggccccagcgctgccgtgttttgggaaactcctttgggtttggattctgtgccgttgtgtggcaactgcaccgcgctgaacatcgcaggtttctaggatctgtctaaacctggcagcagacttgcaacctttccttgaagtctggcaagtaatttgcatttcttaactctgtagatcaccactttctccaggctgctaacaagtcacgactgtgaaattttagaatcagaggtcacaggcagggctccgaaacccacactcctgtggctgcagcagtttgacaccgagtactcattcctcaaagaagtccggtgaggttccctgccttccctgctgccctctccctccccagccgcagccgtgtggcttctgcgtggcgatggtacccgcgccggttaatgagcgccacagtcacgtgactgtgaaatagatccttgttaaatctctcccagcatccctctcatctccatcatcttctgcaacgcggtgtctggcctaacatcctcctccgagagcaccatcctcggacctcgttaggaggcattccttgggtttcctcccctggactatctgttcttactgaagaaaatcctacctgagtagctgtttctttgtagcctttatgtttcccatcactttggggaattttcttttccatttttttaagacagagaactcacttgaataacttcccttttctttcagaaactgtttaacgaatacagccaaatgtaaaatcctcatttttcagacagattttgaagatggaatccgtagcgcccagctcattgcctcagctaagtatgtttttagtatttttctcagaaactatgtaaaaaacccaaaacgtaggaagtcctagagaattttttccttgaagacagtatagtatcataatcagtatagaaataaaaataacaattcttcccccgcctcattcccccaagtgggattagggaaactgaagagagacaaaaagaaaaggccaataacattacaaaaatagtggaatgggcctgggcaacagagcaagacctcatttctaaaaaaataaaataattagccttccacagtgcacctctagtcccagctgctcagaaggctgaggtgggaggatcgcttgagcctgggaggtcaaggctgcagtgaactgcgatcccaccactgcagtccagcctaggggccagagcaagagcctgtcctccccacaaaaaaggtgaaatgcgagaggtgtaaataatggaacattaacaagctataaaaggatgcctttgaagcctgtgtttgtagacatgttttggtcattattaattttgaattatacaatttgaat

SEQ ID NO: 88361 - DNA, 1865 bp, Homo sapiens
gaggaaactactggagatgtggacaaatatttggttcacagggatgtccttttcagctttgcttcgaaaaataagaaatagtttaattgtccggaaatacaggatgggcaaattaaagtatggccgtatgatgggttattgagcagccattaaaaccatgtttttcaagtatactcagtcatagggaaagttcatgatgtcatgttcagtggcaaaaagcccagacgacacggtgaccttaacgtgggaggagaggcagatagaaaactggacagaagcaaacgggacagaatagcacacatggtttctaatttcctcttttatggttttccaatagttcggatttcccacggggaaaacataccatttttgtaatttaaaaatatattctaaaagcttttttgaatcccagtttctgcagatggctctgtggtcctgcactaggaaactgaaagcggcgtcagaagcgcccgaggaagaggtttccttaccgtgggtgcaccttgcctaccagcgtttcagaagccgtctgcagaacttttccagaatcctgaccatctaccctcaggttctccacagcctgatggaagcccgttggaaccatgagctggctggatgtgagatggtatggccctcctccgcctgccctgagcaagccttgtggtgcttccaactccactctgggaatggagagcttctggggctgtgttccaagtgggagatttcttcacaaggcacataccttagctgaattcagagatgttaaggacacatctcgctgacgcttctcacatcctagacaatgaaagtttaggtcgcaagcctgggacacaagtatacatgcagctaacagccggggcctctggtgggccggtgggaggggcaccgctcagccacgccctgctgtccgtctccccagaccctggacgcatttgccgcaatggcctgcacggagatgctgacaagaaacaccctgaagcccagtccccaggcgtggctacagttggtgaagaatctttccatgccgctggagctcatctgctccgatgagcacatgcaaggcagcgggagcctggcccaggctgtcatcagggaagtcaggtgagacccaggagccctcacccactgcttcatctggcgcgcgctcaccaggagcctgccaagtgccaggcatgtccatgagaagacgggcaggtgctcctgccatgggaggggctccgtcctcacccgttcactccgcatttgccgaacccttagtgagtgccaggcgtctcattagggtgctggagacacgagaggcggctgtgcattcagggagcgcactgtgtactggggccgtagaaaggcagacgggctattgtgatgccgtgtgagaaatgctgtggtagaaaggacaccccgggcgggcaggtgcacagagcaggacaggccctcagggccagagtccacttccctaaaggtgaggtgggacttgacaggcgcaggatcatgcagtgagcgggttgtggtggtaccccatgcagaggcatcacagtgggacaccgagtcccagctaagctgagcgtctgagagcgagagctgggggcgggccaggaagtatgtcacatagggcttgcttgtaatcccagccgctgggcctggaccccgggtcccgcatctcttctcccgtctccctcctcgtttcacccttgggttccttggtgggagccgagtgagtgagtgagtggcgccctcttttgacagagcccagtggagtcggattttctccaccgcactcttcgtggagcacgtgctcctaggaaccgagagccgcgtccccgagttacaggggctggtgaccgagcacgtcttcttactagacaagg

SEQ ID NO: 88362 - DNA, 1032 bp, Homo sapiens
acatggtgaaaccctgtctctactaaaaatacaaaaattagccgggcatggtggtgcatgcctgtaatcccagctacttgggaggctgaggcaggagaattgcctgaacccaggaggtgaaggttgcagtgagctgagatcgtgccactgtactccagcctgggcaacagagtgaaacactgtctcaaaaaaaaaaaaaaaaacactggcgtctacattccttgggcctctggtgaggacctttgttaagactttctggcttagttcctctgaatttgttgtctgaaatctgtatgtgtatgtcttggggagagaataatcttgagataccagatatttatgaaagtacgtaagtggcgtctcttatgatagttctctgaggtcaggttttctaccaaatgaaggttaatagagtttatatttctgaatattgtgtttgccaaaaaaggaaaatgaaaaaaaggatgctttcttgagagaaagggtgttgtacctgtgcgcttgggaaacagctggagagaattcgtctggcaaggcagttaaacagtaggggcatatcatctgctctgaggcaaaccaggccctgaggcagcgcaggcagtgcacgtggtcgcagggcagacagacggggtcctttgcatctcccaggcagatggagcacggctgaatcccaaacctagaatccaagaagggcaatcagttctgaagcagagaaactggccagaagaagtgaaaaccacgagaggttcagaattctcgccttcacagatccaaacctaaggtctcacctgctgagggtcttgctggctgtctccttgcattcacagagagtgcgcatcacggcctcaaaaggcccgtgcgtcttcacgtcagagttctctcgaagacactgaagaaaggcagggacaggagtcattagcaggggggagggctgagggcggccaggccgggcgacagagggagcaccacattcagggccaaggctgcgccgtgtgtgtggggtgtggggtgcgaggcctttgtgatcctgtg

SEQ ID NO: 88363 - DNA, 1035 bp, Homo sapiens
gagaactctgacgtgaagacgcacgggccttttgaggccgtgatgcgcactctctgtgaatgcaaggagacagccagcaagaccctcagcaggtgagaccttaggtttggatctgtgaaggcgagaattctgaacctctcgtggttttcacttcttctggccagtttctctgcttcagaactgattgcccttcttggattctaggtttgggattcagccgtgctccatctgcctgggagatgcaaaggaccccgtctgtctgccctgcgaccacgtgcactgcctgcgctgcctcagggcctggtttgcctcagagcagatgatatgcccctactgtttaactgccttgccagacgaattctctccagctgtttcccaagcgcacaggtacaacaccctttctctcaagaaagcatcctttttttcattttccttttttggcaaacacaatattcagaaatataaactctattaaccttcatttggtagaaaacctgacctcagagaactatcataagagacgccacttacgtactttcataaatatctggtatctcaagattattctctccccaagacatacacatacagatttcagacaacaaattcagaggaactaagccagaaagtcttaacaaaggtcctcaccagaggcccaaggaatgtagacgccagtgtttttttttttttttttgagacagtgtttcactctgttgcccaggctggagtacagtggcacgatctcagctcactgcaaccttcacctcctgggttcaggcaattctcctgcctcagcctcccaagtagctgggattacaggcatgcaccaccatgcccggctaatttttgtatttttagtagagacagggtttcaccatgttggccaggctggtctcgaactcctgacctcaggtgatccacccgccttggcctcccaaagtgcagggattacaggcatgagtgaccacacctggccgacgccactggttttaatgcatcagtatcattcacagtcactgacctgaggatcaaccc

SEQ ID NO: 88364 - DNA, 1579 bp, Homo sapiens
ttgttatttcacaggaagctgttctgttttcttcacagacagcttgagaagtccagcagaaggaaagcagagttccctttcttcctctaggcctcctgctgagcagcagcacccaggtgacaagctcacttatctagagctgtctctgtcttcttgtttttcagcatgcttttcttccaaccatgcctgaagacttgctggctcaagctcggaggtggaagggtctggagcgagtccactggtacagtaagtgttggggtctagatgaccccacactcctttgagcttcaaagggtgtccagatgctatgaagcattgggttcgacttggggtccacgtggtttgtgcctcagggtccaaaaccacctgcattctaccggtggcgtctgcagaagacgaatggcttgaaggagctggcactccgccggctagatgatccaaaccatttcatttctttgtcgtgtggaaaaggccctctgtgatgcacttctgttctctggaatatgccattttgggagaagggagggactgggaaccacatcagagacgcattcaaaggcccaccacaaaacaaagtttttgacacaaagctcttctgaaatatatgaaatatagaaccgggagactgactcatataacccatgacatgtaaattttgctgttgcctgagtaaatattttaaaactagtttttaaagttgttataaaatatgctcatgacaaaaaaaaaaaaatcaaggaaaatagaaaggtctagaatcctgtccaccttgcctccaaaagtacccctggtatgggcctatattctaattgctctttacttgataaaattaataaaattagactcagacatttttcactgacaacatacatttattaagcttcaggcaggtgtcatgtaacttaacaaattagcgtgggatgctctggacagtcattctcatattgtggtcagggccagagagtagagagttagctttcccttttcaatgtgggtcattgggtgaaacctcattagccaatgtgtgtcctgttctcttcacagcttgtcccaacggccatccttgctccgtgggagaggtgagtcttggtatttaagatagggtttgaggggtggcgtgcactcctgggttggaggagggggatcgtgggtcaggagagtgaggctctcggccttccaggagagcacaggctcaccgaggactgcccagggtgctctgagcagggcaatgccaatggcgctaagggtttctagcccagggcttctcagactcagcactgtggacgtggctctgcggcgtgggctgtcctgtgcactgcaggctgtctggcagtatgcctgacctcgagtccctggatgccaggagcacccactcctcccagtgtgacagctaaaaccagacattgacaaaggtcccctaggaaagaaaattgctactggttgggaactgctgctagccattctttctagccactgcagcatggggtcagtgagccttgtcttgatagaatggcaaggtgttgcctggaccacaggctgcattattagccctcagaggaggtgtggtccagatgccaaa

SEQ ID NO: 88365 - DNA, 1046 bp, Homo sapiens
gaggtcaaggctgtagtgagccgtgatggtgccactgcactccagcctggaggacagagcgaggctctgtctcataaaaattgatatatgaaaaagtccaaatgaatataaggaagtcagtttggaagctcttctagtattcttggtattagatcatgaagtgccacaggctagtgtgatagatggagggatggaaaaagtgctgaatacaagaaaggaaggttgaattttatatatttgtctataaagtgtcactctgggaataaagcttaaattgtctcacttatttaaaaaacagttccagtttgcccacgtgcaacattagtgagtacctaccctgttcccatgggttctccacccacccgaaacaagcacacactgggacaatctgagggtgctcacgtctgccggtgataaggaggtgttcatttgcatgatggcatttgtgcataaaatggtactgctccagaagtggttctagtgccctgtcttcaccctagtgtggcaggccgatggaacagagcatctgcattgactgccatgcgccgattggaggcattgaccacaaacctcgggacggctttcatctggtcaagtatgtgggtcaggattctatttcctaagtactcaaactttggggtgttgggctgtttttattccagctgataaagtgatactcaagatagtactaattactccagtacatgtgggcctgtgtcatattgaatagcaatgccaaagtcccagcagtcacacagcagggaggcatctgatctgttgttggatccctgggccctgaaatgcaaagcaggctaccctttaacagctgttaatatgaatacaggtgtcttccttttgggccttgggtgcaccttctgtagaaatatgcatgacataaacagatgatctaattcacgaggacatctatgtctgcaggaccaaaacctgggcatccgtctgtctcagcagatgccatctcacttgccagcaatcttagctttctccattttttattttttgagaaaaatgaaggagacagacatagt

SEQ ID NO: 88366 - DNA, 1050 bp, Homo sapiens
tgggctttggcagtcaggtgaggacacacagaaggcacagctaatggcatctgctggcaggttacccatggaggctgaaggaagaggggctgtgggggtggtggtgccattaactggtagaatcaagacctcaacaatcagctgggtgcagtggctcacgcctataatcccagcactttgggaggcctaggcgggtggatcccttgatcccaagagttcgagaccagccgggcaacgtggtgaagccccatctctaccaaaaaatacacaaattagctgggcatggtggtgcacacttgtgatctcagctatttgggaagctgatgtgagaggatcgcttgagcccagaggtggaggcttggcaccactgccctgcagcctcggtgacagagtgagaccctgtttcaaaaaaagacctcaacagttccttgggggactgaggtgcagatggccctgcaggagagggctcaggagagccctgcggcccggagatacaggtggcgtggtggcctcgggagctgcaggtgtgagggaggagatacagaccagactgcagggtgaggtgctgcttccctctctcgagaaacacaccaagggctgcttgttcacaacagacacaccaaatgagcagcagtggcaggagtcagccctaccttgaggctcagccggggcttgccctggaggaagcggctgacgatctgccgctgaatcttctccagatcgaactcctgcacggtctctctgccctcctccacctggtactggcagttggagagaatcagtggagtcaggtcccgctccacttcataactgatgacatgcagttcagtgacctcggcggcatccacggaatagctgaggggcagaaagacagcgctcagcgtccaggccaggcatgcgggcctagggctctatgttgcagggagcaggctcccatttctcacagttggagcagtggaaaaccctacccaagtatggggcgggtcactggtgggggcggctgaaggagtgagtgtctgttagggaaggggctgaagcttgcttgtgtct

SEQ ID NO: 88367 - DNA, 1114 bp, Homo sapiens
tgatcctgtgcacggggctttctgccttctcagtgtgtttccctccgtgttaggcctactccagccttgccccgggtgtttgctgtgagcccacagtttctgcggcctcccttacagagagcaagcaagacagcaaatcagcaagttttcttgtagagtaaaagcagattgacatcttgtgggtttgattcttaggaatgatgttgatgcatggccatgcctgctgaagcgggaagtccatggaaccgatttgttcctgctctccgcatgcgggtactgataggtagacctgtgtgtctccatggcctccaggaactgcctgcacaccgtgcgcccaagtgtcagctgttagagagttggccccccgcatgtggcttgggcagtgaaggggctcggctctcttaccaggtggtgagatgccagaaacccagcccacagacatccctctcctgcttttcatttcccaggactccctccccagctcggtcattagtgccatcagtggacagctgcagtcctacagcgatgcctgtgaagtgctgtctgtcgtagaagtcactctggggtttctgagcacagctggtggggatccaaacatgcagctgaatgtgtatactcaagacatcctgcaaatgggtgatcagacgattcacgtgttaaaggtgggtctcacaccgaaaaggaaatcagcacagcccctcaccctggtctcctgcttcccgcgagggataggagcattcagggagtgccactctaggcgctcctgaaaaggatggggagacaagaacaactgctcacccagtcagtccagcataaacaggacacaccagggacagtagagacagacacgcgctagaaatgccagcagtctagatagagcccaaatgtgactgagtacatgaggcccctgcaaacagcgtgatgtgagcgggctgtgaggtgccgcaggagggaactggtagataggacagagatggccttcacaaggagggagatcacattagtacagggcagaacgaagagaagaatgcctgtgtggagagcactcaggctccctggtgcacgacatgagtgggggtgtgagacctcagcccccactcaggaattctattcc

SEQ ID NO: 88368 - DNA, 1038 bp, Homo sapiens
ctttggatgactttggagagaagactcctctctcctcgtctgcggcgtggacttgatcatggactggtgcctttgcattcagaaggagagctgtcagcgtagcaccgaattcaagaccaaggcgtgctacctgagctgacagctttttgaaagccgagctgtttctgaaccatgtacatacatgttctgaaactttctcatcattttatgagtactgttcattgagagatgacaatgaagattagatgaaattggaaataaaccaacattgtttacattccaggagacttgtagctcagccacacacgcagtaatgacctgtgcccgttcgcctctggcactgcccacccctctttttttttttcttctaattctgtactcacaaaagagaatctcattttcttctttcttccattcccttaaattctgagtactgtacatatatttctgggttcccacgatgatgtgaaaaactaccagactgttttttgtcttctcacaaagacaagaaaaatcagggcattttgtgagtgccttaagatcaaactaacaagatctgaccctctcccctcacagtgagccactgccccacttcagagggtaagagccaaaagcctcattgtgaaaggcactggacttggaccagggacaccatcagggccttggttttctcacgcataaaatggagagtggattaatcgccaaagattcttctgatctgacattttgaaattgtgagagaaactagatgactgtaaacttggtcacaggcctggttctggcagttctttgcggacttttttctagcattatgccaaataaacatgcagtctcagtgtgctctcgcatgtatgaatatctagtcctttctgtggttctcagccaagacataaaaactaggactcagagcacatacaaaaccagttatgtttcggaaagagggaaaagagtccccgagcccggatcttgtgctgcttttctcactgacgtgttgccttttttctttacaaaatctgctttgatacttaggacctctct

SEQ ID NO: 88369 - DNA, 1056 bp, Homo sapiens
tggagacgggacaggggttactgctgatctagtcagggagaggacagaccagctgggctcagagcccccagagaagcaagtgttagcagggaagcctcggcttgcgcagagcctacagggaagcacagactggaaaccagtgaaggctgagcagctccaactgccactggtggggaggagacccaggaccccctcactcagcctgtccactcaccagctactcaggcccttcagggactgcccagctcggtttgagagctgccattgcggggctttgaccccaaagtcccaggcatgcctgtcccacactcgctgacagggccgcggctcctgagcctgaagaactggctgtgacctgtgtgtcctgagtgggcttctgtgggggatggaggcattgccagcagcagctcctggtgggaaactggtctagagaccagctcagcacccagcagcacgtctgtctcccccaggctgacatctgctcccgagagcacatccgcaagtcgctgggactccccgggccacccacaccgaggtgagcacccagggaggctggggcactaaaggggcatctcacagacacctgcatgggctgtttccggtggctcagcctctccttgttgcaatattgtggctcaggacagacagtgcagggccagggaaggcaggggacacaggagaggtcttcaaagagggaggagagtggagtggggtagactcctattctcgtgggaactctccagaaacaccactgcctccacgcaaagccctggaactacggccctgtctggtccaagccctacctcccaatagggctatccccagccttcctcagtccacttagcctgtgaggtaccaggacgtgggctctgcagaaaaggcgtggcctcggagtcagacatgatccagccctgcatagccagctgtggcgtttgcactcttcgagcctcagcttcctcatcgtcgggataggctctgtaattcttgtcccactggttcttgtaagttagagtgacagtgtgcctggcacagtcaccgctaacagtgcaaggcatt

SEQ ID NO: 88370 - DNA, 1040 bp, Homo sapiens
tctgcttttagtgatgcataatctagttcccgtgaagtggtttgtctcctgttgggcacctgggaggaagacgaagggatggagaatcggggacgtctgtccctgttgggcagctttagctggcatggagtgatgtctgggcaggggccccaggcccagctgctgtggttgtccatggctgagggaccagctgcaggaggggcagagtccaggtccccccaggagaagctccagggcagaggtggtcggtgccatcccttttcttgggctcccccagaggagggatggatgtagggctggagagtcagggacagggagacgaaacggcacctaggagtgtccgtgagagtccgtgatcgggcaggcacagaggcactcagatccccggcctagggatgggcccccagaccacctggcgacccctccactctcatcctctgtttttctctgaaggacactctgggtggtgggtttgatgccacccaggcatttgtgggtgagctggcccacttcaacatctgggaccgcaagctgacccccggggaggtgtacaacctggccacctgcagcaccaaggctctgtccggcaatgtcatcgcctgggctgaatcccacatcgagatctacggaggggccaccaagtggaccttcgaggcctgtcgccagatcaactgagcacggcaggccaggctgagcccgcccgccctcgccccctgcttgtgcggcgatgatctgttttgtgcgtctcttctctcccttttccccaggaatgaaccgaggccgtcgcccctgcacacgcacacgcacacagcctggttttgtcctcatgcacacgaagcagcccctgctcccatctgtccctgaggaagccccacttctctgtaggagcccggactctctcaggcatgccccattcacagctgaagtgggtgctgcaacgtcttgaacaaggcagaagttggtgagaggatctgtgtgtgcgtgtctacatgtgtgtgtctacgtgtgtgcgtgcgtggctgggggaggccttttctttg

SEQ ID NO: 88371 - DNA, 1027 bp, Homo sapiens
ggattgagggatgggcggatgatggatggtggatggatgggtgggtaggtggatccatggatggatgcacagagggaaaaaggcacattgtatcagactccaaagggagaattaattgcagcataaaatgggagtccaggacctctcttatttcagagttcatcgtgtagatgggaacagtgtttaacccttccctctcccactgccctctgtcagctgcttcccagttcctaaattattggctctgaaagtgggggctgggggagtggggaaaagagtggagatgctgagactttcccatgtgtccagcttccagaggcttccaggacagactgtggcaccatggttagtagccaggagcaggttagggcattatggtacctccccaaacaaagcagggtgctccagcttcaggcagtcaggaccccatctgctcagtgagtgtctggtcagcacccactcaggccaggctgtgtggcaaatacaaaagaagttaaaaaaaaataaagacattccattatttcaatagaaagaattttttaaaaatgtgtcactggaggtacacttgctttacattttttgctttggaagatgtagggaaaaaagtcatgaaatgttttcatttctctgtgattgagcagactcttaaaatattaaactattgcttaataattgattaaaactaatctctgtgggagccaaccacccatttggtaggatctctttaaacttttaggggcttttagctccccctggccgcctaacctttctcttgtctgattcattctgggctcagcagacgtttggtctcttgtggattgatgatgtcaggatgcttctgtcgggccgtgggatggctgatgaggctggattccgaacaaggaacatcctagggacacagtgtctggagaggcagtgagggaagaggaaagaaatgtctgtgaataattgtactgcagcttctaaaactcgggacgggagtcagagaaaacagccctgtggccttcagagccgcttaagttgtctg

SEQ ID NO: 88372 - DNA, 1006 bp, Homo sapiens
gacaacgtgcgatataatctttatacccacatgattagtctactttttaaaatatccaagctgggtgaagtgcagaagtctgatatactatgctaggaaatgagattactggaaaatgttcaactagtaacaaattagtgcaaagttattataaagttacactgaacttcattctagtcttctaaacaatttctcttgaagctagattttcctccttttatgtagtgtcctgttgctgtaacttggaaacaggatttctttaatcgtgagttagggtatgaggcgtcgagacttgggtgcaggttttagggtgtccgcatggtgtttggagtgtggagagtgactcacaagcagctggtaggaaagaaaacagccgaattttgttggatttgtccttcataaaacacccatctatttcctggcctcaaaagcaaaagggtagtactgcttctcctctatgcacacttataatttgtctttttgtaagttattttctccctccaggctgcttttatttgcacatttcagtggtataaaagaggaagttggtgttacaatgtttgattttctctaggcttatgtatatgtttatggaatattattgttttttagtatatgatgttgaacatatataagattacacttctgggctgggcgcggtggctcacgcctgtaatctcagcactttgggaggccaaggcaggcctcccaaaggcaggcggatcacctgaggtcaggagtttgagaccagcccggccaacatggtgaaaccctgtctgtactaaaaatacaaaaattagctgggcttggtggcaggtgcccgtaatcccagctactcgagaagctgaggctggagaatcgcttgaacctgggaggcagaggttgcagtgagccgaaatcgcaccattgcactccagcctaggggacagagtgagactgtgtctcaaaaataaataaataaataaaacttctggtaactctagtcagtcagtcagtagtaaccagt

SEQ ID NO: 88373 - DNA, 1022 bp, Homo sapiens
gtgtcattgtcagacactatttccatgcatgtgtaggaccactgacaggcatcctatgtctacatgtgtaggggatgaaacggttagatgaagaaggctattttgtaaaccattctctagactcagttgcattgctctgtagccatactttgcccaggtcatggaggaagcagagtagatctgttcaactaatacatggactgccaaaggtttatgcggtcttttcagcaagggtaatagcaatccttcataatctacactaccccctctgctttcctcaccttgcgtcctctccacattccaactgtgccctgttccactcccctgagactggtctccatatggccccagtttgttgctaaatctaaagttctcttctctgtccttctctgttcttatttcacctctcagcagcattccacaatgtggaccatggcctcttcataaagctctttcctcacttgcttctgtgtctccacgaaactcggattttcctcttaggtcactagttgttccttctcagactcctttgctacctgacacctaaatgcaggggcaccccaggaattgatcttggaccccattctctgttctgggtgtgcccctccctagcagatctcatcggggcccatgattttaaatagtgtctacatgccagtgatgcttaaacccccaatctttagttctgatctggcctgaaatttctgtctcagatgcctactgcctgctttttcttagttttctccatcaccgcttgccacaaccaccatccactcagttgttcaagctgtaagtttagagtttatccttaattctttcctctccctctctttatcgccccatccaattcattagaacccatcagcgttacttccaaagcatgtcttacattggcctgcttcattttgtctccactgatgcagccccagtccaggcagccaccgtctcttgtctggacactgcatttgtgtcctgactggtctccctatgtccattcttgccctacaaccagtttttcacat

SEQ ID NO: 88374 - DNA, 1079 bp, Homo sapiens
cattgcgatgttggcactgctttggtcctgagtttcaagggaggaaattgaaggcttgagaggtgaagtaatttgcagaaggtcccctgaactcaggcctgactgtctccaaagtggcgtgtcagctgagggaacacagggtatcttgcagtcgtgatttctgatcaacacaagctgtccagcttcccaacatggccaaacaacaggacagacgtggctgctttccgtgggctctgttgcttctgatttatgtgtgtcttttctctttgagttgaagcattagaaggtgtatccaccaagatccagtaaagaagacagaaaacacaccaggtatctcaaccaagcggatttaggtggggaactggttttacaggctttcgaggggctgaaagggccaaaaggaaaccttgactgagacggtaactacaggaggcaggtgctgctgctagggctgggggaacaaatagaagaggctggagttacttaaatctagatggctagagaagggacccagtgagctggggcttgggccactgaggtagggacacagcctggcgcttgctggcaccgctgctaagtgcacagtgcaggggcctgggagcagaaggaagcaggagggcatgggggcggccggcagctgggaagggaaccatcctccctcctcgcctgccagcctccctggagggtgctggacaggtttgaacttcatgtggtagcagtaattttaaggttttgttttgtccccttgcaactctccttacttgctttgtccccttgcaacttataactaccttacacaggtactctgcattggtactctgcacaggtactcggggttattatttacatatgggatctgagcctcctgtgctttgcccgagttagggcctcaaggactttgtggatcccttcctgatcttttatttatttatttgtttatttatttatttatttattttgagatggagtttcgctcttgttgcccaggctggagtgcaatggtgcgatctcggctcaccgcaacctccgcctcccgggttcaagcgattcttctgcctcagccccctgagtagctggga

SEQ ID NO: 88375 - DNA, 1017 bp, Homo sapiens
tcccaaagtgctgggatcataggcgtgagccaccatgcccggcccttcctgatctttatggcaagaggtttttgccacaacaacacttcacacctgactgaagcccagagaagcccacgtcacgatggctggaggcaaggaagaggatctagtcttttctctctcccagaggcgggagccttatgtccacatcactgtgagcctgctggccttgcccaaggactattcttttaaactaagagagtaaattaagatatttccgaggggtctgggatccatgtaaatgaaaaagttcaaccttttttgtaagccatgttcttaaaaatctgcatgtggggtagttaagtgtcacttactagagtcgaggatttcagcgcaggtctttttgaagttctgagatgaacttctcctcctctttatacttctcattccaaggatgctgagtgtgggattattcctgatgcagtgctgcctagggagaggagcctcagcacggcatctatcatgggctgctttgcttctgtatttagaaagagaactagaattttaaaataattgacttacaactacttagaaaagaaagggccaaatactatgtgcaatcatggcttcctcacggtcaggcatgtttcctgatctcatctcctttttcaggagactctttggaaatacatgcatatatttcattattgggaattaccaataatttaaccacttttgtgctattagacatttaggttgcttctgattttttaatattataactcatgttatgatgagacagtgtataaatctttgttcagatttctggttattttctcagtatggtttctggaagtgatagaaataactggataaataataaataacctttaggggaattggcacgttttgcaaaattgctgtttgggaagtttgtcccattttatgtgcccgctcgtggggtctgagggaggctttttcctggctcggctgccagccctgggcattgccatttgaaaatacctttgcaattaa

SEQ ID NO: 88376 - DNA, 1086 bp, Homo sapiens
tgaggatcatccactggcctcccaacccggtagtgaagggggaataacaaggacgtctctggaaagtgctgcaggttcccctgaggaaagctattgtagagtagaaacgagaatgcacccccggaatcagctctccgatgatatgcaggtgcagctgcctccagccctgccgttggtcaggaggaggcaaggggtacctaatgtgctcttatttggcccatgatgagtggagaaagagacctttgcccaggtgtccatgtcactgaggcagtggcggagggtgtcccccagctctgcagtggtcaccctctgcctcctgtcctcgggcagctgcctgtggctgcaggcggtgaaggtgctgttggttgtttgctcccagacctggctgtggggcctgctctgcagaggtcaggggcatggcgcagggggacccagcagggagctggagccaggcagtgcgggctgagccaggccgaggagacccccgcttttatcttgagtgttgtcatctgatgctgagttctttctcagcagtgaaggggaatcagtgtcctgacttgaattgcactttgatggggtttttagtttctgtgtgttggatttttactgagagctctagagaaactagtcacctgggggtttcagaggagggttgtgaagtgctgaatttttctttgagcttttaaggtcagaactcaggggagctaaaaaaaaatgaaaaaataataatttaaaccttataaggtgactcataaataactgcctttcaagatgagtggaattcttctgggaaaaagccctgtggaaattctcctgaccaccgagaacaaagaggaccactgctataaaaacctccagaatcatcatctgcggatggagggaagactctgccaggagtgcgatttttcctttatgtgttactccgtttaccatgtctcaataaaatggcagagaaagtccttttcctgtgtttcatttttcccacaacctttccccttttgacttctttggggcttccccttatctgagactggcccaccgcagaattcagcttcacgggcctgtccggatggaacgtggacgcca

SEQ ID NO: 88377 - DNA, 1039 bp, Homo sapiens
aacctcccaaagtgctgggattacaggcgtgagccaccgcggctggccggtttattattttttcctcagtgccgtggaggcgcacagggctgctgcacccgttagggtggccctgggtcctacagccccgggcacacggtgcacagcacttgcgtagggtggtcctgagtgtgcacgctgctacgtcgctcaggcttatgtgccttaagcagttgcatagtttaggcacagtgctgcttctcaaagtgaattctacttggagccacttatatatagattagattttataatgtgtaatatgaagaggagcctggaggtatacttaatttaggaattatattatttttggtttgggttttaaagtatttgaatgcctgttaaaccaattctgtagtggctagaggttcaaaatttgtagtatttatgaaaaatactcattctaagtctgcttccttttataatttaggtatatacactctctgttcagaattcctcaatacaacgcattaaatattgttccgaggtcttctgagccccgttctcagtggtggccgtgagctaacatttccacatctgtcacaatgttgtttgcagtttgtcgggaggcgctctgcagccaggcagatggaggggccgctaggcaggatgttgcgagtctgtgagggcatcaatcccccgtttctggcatagatttaattgtttggttcaactgggaagccatatattaacttctacttcaacccatcctgatctctccacagatgctagttttatacaggcctatttttctctgaaattgagcctgagagacaaaaatccacacttgggctgtcatagattttggtaaattgagtcttgtgactgattggtgcctcctgcctgccccgtgatcctgtatgtagtaaccacgtcgtgatcacaggtcatggattggggaaagttgcctccaaagatgtgggtgtctgtttttcactccactttccatttggccaaaaattcaacacttcagtttctgtttcaaaaaagtaacaaagaatta

SEQ ID NO: 88378 - DNA, 1036 bp, Homo sapiens
gaggtgcgtgccaccatgcccggctaatttttgtattttgagtagagatggggtttcaccatgttggccaggctggtcttgaattcctgacctcatgatccacccaccttggccgcccaaagtgctgggattacaggcgtgagccaccacgcccggccgtgcagttctttaaacgtaggaaatgacctttgagttttgagttcgataccagcgtttctactattaaaggtggactttctctgtcaatgttcttggaatcttatgctttccacgaagtccttgcacttgtgcagaactgtatccccttagccatgtgaactgcacggagcaacgctgttgcaggatttccttctgcctcactcagaacatatgtgctctgtgtgtgaagaagctcgtcaggctgtgagcacagcacaagaataaagcctttagaactcagcagagagaaccagccattactgaaaatggaatgttttaattaaaaatatccatcaccgggtggctcttcttttcctttatttctcaagtgtggcaaatgttaataacagtggctgcactgtggctccatggtaaattgccagttggtgagtaggatttctcccatgaagcttagagatgaacccctgcaacatctgttcttgtgacaacgaatcccttttttactttggcttatgcatatttcagaggttagagacaggaggctccttctaaaagtgttcagtaactgcctgggctgatgtgtgtgcctgagagtcagagagagagagggagaaagagaatgggggctaaggggaacaagaagggagagagagagagagagggagagagaatgggcactagggagaagagaaagagagagagagacggggaatgggtgggagcatatgaattcattggtaaccctttcactttcttttcttcctgtattaattgatgggttgaccttattaagtgggttgattttggggtttctactgcagtgtaacaatgagcatgcagatggattttctgattgtttacaaggaaatcaaccttt

SEQ ID NO: 88379 - DNA, 1294 bp, Homo sapiens
cattgtcctgtcccttcctgacaaggaaatggctggacactctcttcatgtcagcacccctaggtgctgggggctcaaagataagccaggcctggaagacccacccagagccaggggagcccacccccaatacacatactcaccaagccacatgctgcggttgggggtcccagaggtgtgctcaggccagcctgtggggacagcaaagtggcctccccgagaagggggcctgtcctcagtgtttcagaggcctcaccttgtctcatgcttgaaatatttcctgaagaatgccatttttgaaatttattttctaaagaaaaaaaatccaaatattgaaaggctctgcttgaatttttgtcaacaattactatatcaagaaaatatttctgatttaggtggctccttcagaatatctgattcctgtgttggcttctgcgttgcctttgcaggcctgtgtctgtaggtgaggttttcctgttcagatggagctctgtggtggtaaatgtggccttccttgttttatgttacgtgtttctctcaacttcatgagatcagaccagatagagaatgttaaagaaaaaatatttcgggcaattagaattgcaagaatgtcaagaagaaatatgtgtagtgaatagcaggctgtagaaaccatctcactgctcagatcttaaaatctgtagccaagagaggctttgaagcacccagggaagatgcatgtgccactctgcattttgtaaaattctgaaccatggactttattgtagtgctcgctttgccgacagctgctttagtcgtcgataatccccaaggatacttgcgtgtgctgttgccttcgtcaccaggacttggaggaaactgcagtgttgctatttgttatttcacgttgatatttccttccacctttggccttgtcctgcggtaattcctcatttaggattcctttgaatagttgggtcatggggagagttctgacgttattttactaaggtgaggtttgctaagccatcattcttacgtagatggcagaaaaagccattcggagaaaatatctgagtctgttcccgccaggttaaatagaaaggggatttgccaaggatctccagaagacccgagagccggtccctgacgttatggtaggcttcaagggggcttctgtagctgctgagcaactgagacagtggaggagtcctagaagacctgccaccgcctcctgaagagccaggtgcctctgccacacagctcacagggtgctcacctccctgtggaacgggggcctcgagtctcagggtct

SEQ ID NO: 88380 - DNA, 1037 bp, Homo sapiens
agctagtgatgccgtgtacctcatggcagggtgggggaattaactgggagcagagacctggtttggtgcagagactggtcctcacctccgccgccccaactctagtccctacttctaccccaacatcacaacacctcaaacaccccgacccctacgtcacagcgcctcaagcatcccgacccctgcaacactgtcttagtctgttgttgctgctgtaacagaatacccgagactgggtaatttacaaacaacagaaatgtatttcacgcagttctggaggctgaggagtctaagataaaggcactggcaggtctgttgtctcttgagggccctgtccatcttccaagatggggctgtaacactgtgtcctgtcacggtgaaagggacagaaaagcagaagtgtgcgtctagttccctccagcccttttatgaaacacgatcgcctcctgaaggccccatctcttcatactaccacattgggcttccgttccaacacgtacatttttggggacatattcagaacatagcactagccccagtatccccactccagatcacccacacccccgcaacacgccccagtaccgccactccagatcacccacacccctccccaacacgccccagtgctgcatggggagcaggggccaaggtgctgcatgagctgcttcctgaatccgtgcctcttccgctgctttctgtagggctgactacgaaagagggctgcagtgaacacacctcactgagccccactgccgggcatgtagccttgcaggacggccgctcactcagggttgaaggtctccagcagattctgggagtagatgcacggtgctgcttatttcgttttacaaattaaacatccaatatgcaggtagcaatgtgtgtgaatccccagtgctttatgtagaaccctgagtatggggttcatttttgggcagggtggggtggagcggaaggtggtctgtgctgatgtcagaggggtctgagaagcttgaaaaataagggtaactgtgtgtgcctgaaccatgcaggaa

SEQ ID NO: 88381 - DNA, 1288 bp, Homo sapiens
cgtgatcgcccttggcggcggctcgtgggtttacagagcacttgcacagacttcgtcattgattcttgcaaccatttgggattcatagaccagtcaagttggttaacagatattgattaggtggaaacgtatatgttaagcatagtgccatatacaaggaactgtaagctgtgctcttgctttcaaggcactgatagtacacctggggaggtaagactaggatccatgcagtagaacagagaccaatacgaggtcaagcttgaacggcctggaaggccagagaatgctgcggtagagacgtcagggcaggcagtgggaggcaagagcaaagagctgaaggaagagcatgagcccacactctgaggtccgaggggctgggttttcgcacaccagctgggctccctttgggcctggggggtcagtagcacccgttagccacggccagtcacagccgtatgctctgtgcacacagctctgtgcccacagctgaaaccttggctctttggggcttatggtttaaaatgctgttttcttttcttcctttcttttttttttttttttttgagacggagtcacataggctggagtgcagtggtgtgatcatggctcactgtagcctctacctcctggactcaagcgatcctcccacctcagcctcctgagtagctggaaccacaggcatgcaccaacacgctgattaattaaaaaaaaattattgtagagacggggtctcattttgttgcccaggtttaacatactgttttctctgccagttccattggtgtctcaaggtggtatctctgcttcccctctgaaggaatctgaaagaagggggttaactgcttggagcccacctctctcctgtatctactttccaaagtgaggacagttttttaaaacaggacatgttcatcccctcatatctgctgaaaatccgtctagctcttggtttttgtataatacagcaataggcaacacaggaacgtaattttgtagctatgtgaggagtgaggcctagtgttagaacggggccagactgtaaaagatctcgctcctgtacggctcccgtcctagtcccacagacgctgcaagggccgcgggtcccggccgaagctttcctgtcccagatgcctgcagctgtgtggctccaagctttgcgcctgagctgaggaagatcacacgcctctcactgtatacaggactaattattacaaaatagacagggatggcattatggttaggaaaatatagactcattaaaaatcatttctaatttcaaagtagcccc

SEQ ID NO: 88382 - DNA, 1058 bp, Homo sapiens
atgttttataagacacaactacagttttacatttatgatctgtccacttcaccccacatcagactgatactgttgtcaataatatctatcggggaatttaattttagtttatttaaattatacttaatcaaatgctaaatgcatcgtttcatttgacctcattctttcccgtctcttcctctgcttctcatttcagctctcccacccactgccctattcttggaagggaaccatacaattaactgaccacagggattcccagtggataggcggttatagtgccatgtagctggtcacggcctggtgagcagctgacagtggtttcacccctcctgggtgggcaggtatcctgacctgagtcagggcagggagagtggggcccctgccaggctgtctctactaacgagggccgccatgtctctgcaggatgttgtgagggatgcagggaagtggctgcctcctgccaacactggggagagggtgggatgggagaagggcctggactttccaaggggtgaaatccaaggagggggtactccttgaatgggaactccctcccttcttcctctgtccgtggttcactggagagcatgcatagtgtgagccaccgctgaccgtcgtgatgcatggacagttttctgaccatagatgacagccgcgggccgcgaccatgctggttgctgcagttaagtatgggtgactgaactcaacgccttccagccagccctgtgcgtttactttgctcctcctcatgcatgcggcaaggtcgctctttggcatctgtttgttaaagctgttttttgctttcctttgccttgtttgtgtacttcgtggcccctattttttgtttttcagatcccaatccaatcctatcttgtgggtctgatcacagcacagttgatttgggtcactatgatttttttgagaccttagaactttgttcctgagagaaatgaagaccaaacatgtaacgtctgaagtcacagattacggattataacaaatttaccacaattcttccagagaagttagatattacctggtttttaccaagcttt

SEQ ID NO: 88383 - DNA, 1074 bp, Homo sapiens
gttaggagctggagcctgtggaaaaagacaagcaggaggggcctcgctctctgtgtccttctttccccagagagagtggacaacaccagaagcagaggccacacctctttacttggggtgagctttaattcttctggtgccttaaaaataagtttctatgggaatatctatcatttactaaggaagatgaaacagcatggcggtgcctccactgaccaagtctgtccgtcgggcaggtgtgtctaggggaggaggcggaaggcgctcctcagtcatggagccacgttgttgtaggagctcattctcatcttgtccaggtctgcgagtagtgaaggcagcaagtcctgtgtggcggccgtggggcttccagggagctgagcggtcaggttgagtcagtttccatgtggtggacagttcttacttatccatgcacagccctggtttgtggattacagtgaacagattttgaatgtcagcttcccttcagttcaccgtgcttctcagatgtgtcacagttaatttgtggttaagggatgaaagttggttttgccattagataaacatgttttttatagtgcctaaccccaagcagagtatgttcaaggagagaacaaaacagctcccaagatctggtccattagcccagtagaaattgttattgcattttaatgtaaatgacagtcatcctttcgtggtattgataatagagttgtttgtgtgcttttatgagatgctttgaatgaaccgaagctgatgactatacctcctgttgggaggagggggtttggggagcaagggggttgagaaggccagtggtgggcagttttggttctacttaacaggtgtgtcttttggattttaggcacaagtgttatttgcagaactgaatgtttatgtgtaattccatgttgtttaggggtttggagtgaggataattggaatccaggcatcttctccttgtccctgaatggggctgctgcttgacctgtccacctcacagggagtgtcatgtggccatgtgtgacaaactgtgaaacccttggtattgagtgctcacactgctaggtgtggtgg

SEQ ID NO: 88384 - DNA, 1030 bp, Homo sapiens
ttggggttaactgtggtgctttgacagtttcacttaactgcttactgcccagaaagttaagaactgttcctatgatcaatgtttttacttatatttttgccttggcctcagcagtgctctcccacttcgtcttccctcctttctagtgcttctcgcctgaaagcttttccacgtgcgtgccgtgttcagtgagaactctgattcatgctcttcagccagaagccttcgtagtcagccctgcccacgcacttcctgccttgccctgtccccagaggccatggtattggaagcagcttcctggaagcaagcttagattatgcgaagcagtttattccggactctttagaccaattgcaccagagcataaaggtgttgtcacctactgctatccctccgaataccttagtgacatgacctataaattcttttaggcacaccaaagacattacagaaagaagaatgaaagaaaggcatggttctgcagcctcctggaggatggcagcctgttgtgactagactcctcagggtttcagtccattagagctggtcccagaggggacccctgctggccagccctgtgttggactcttgctctccgaggccacctaggggattcactagagagcccatttgggattgaagagcacgcgtgttgactagagtgggttgcagcatgggccgcagcctgtttaaacactgcctagggaagattggtggagtccgcctcctcccttctgcctcgtaggtccgcagagtcgtgctgggctcaccgctccttccctttctgggcgggagcgcccctctcactggtaggggagctccctgggaaatgtggtctcctttctaccagtgcactgaggggtggggtggggagagcttaactgtggaaagaatgcgaactggtttagttctggctttgccacttcttagaaatgtaactctggacaaattactatttaaacttttaaaatttgtacatgcaaatgagagttaatggacagaataaaagtatataaagcatttgcaccag

SEQ ID NO: 88385 - DNA, 1172 bp, Homo sapiens
gtgggcagtgaggcctcgtcttacgcatgtggtcagaggagataatgtggctagaagtgctttgtaagcgccaaggattgctgttatgaggaatttactagatttcaggctttcatcagatagttagcgaggaagcgcaaaagcacagcatggtctccatgtttgctgacctgcagcgaaaagtcagaaagctaattggaggccattcataggctgattctaccttacaccatcattatactttttgtctataagactggagaagatctttctgagacatatcactatcagtgttttacgcgtatgaaacatatttttctttccttctttatgttcatttttaaaatttttgatcagtgccctcaagcattctcctattcaatagaaaacatatttttctaggtatgataatctttcagatttttggtatgtgtacctttgctaaaaacacatttaatatttctacctgtctggacaccttttaaaaatgtctggctgcaccttggagaaacgcttcatgcaagcagattctaattaaagtaggaaactttactttaccattaagttatatgtaaaagcattctaggggagagtcttttaatcattgaaacattttcaaacgtgtttgctcatttgcttctttatttgtttttatggcttattcatttgtttatttttaaactttttattatgaaaaatttcaacatatacccatcatctatcttcagtcattttcagctgccagttccagtctcctttcatctgtgcccccacccagtccccccttcccactcccctggctgattaggaagcaaatcccagacttcatgtaatttcacctgtcaatatttctgaaagaaatatttactttctctaaagataagtatgcttctaaacacacacacacacatacacacacacacaatgtttgtttgaatcaggatgcaagtgagatgaatgtattgtgagttacttcatctattctgttaatccatgtaattaatccaaaagtcagtccctcaccccagcactctctgtgcacctgtctgcctgtctctttctgcagttgattggttgaagaaactggatcatgtagcctgtagaatttatcgtggtctcgatctcgtcagtggcttctccccccttgccctgggtgagccacactcacctct

SEQ ID NO: 88386 - DNA, 1069 bp, Homo sapiens
gttgactcagcccacccaagcagggagcatcttcccatttgttcacgtcttctgtgttttccaggagagctttgaaaatcttccatgtctgtgttttgcacatttcatgttaaacttattcctatgcattcagtctgctctgtggctttcgagatggggttttctttgccatgatgttcctttgtttattatttgtgtatatcaaggctattgattgttctctgtcagttttagattctgctcattcagggttaagggcccaggcaggaggcggagggaggagctttcagcagggcgattccttactcggtctcttcactcttctgccattgctgccatgtgtacattgcaggctccttcatttgagcaaattctctcttccatgctccagatgttttcagaaggaccgcgtacttctgagaaacacttggtaccccagtggcagctgcgtttgccttggtgttgccatgtgacaggcattacttgtttatctcattgttgttcctagtagttctcaatgtttgttgaatgaatatttataaccatcatgtgtggcagttcttatgtagtgttttgatttgtttttttgagaccatctcactctgtcactcaggctggagtacagtgttgtgatcatggttcactgcaacctcaacctcctgggcttaagtgatccttccacctcagctgggactacaggtgtgtgccaccacacctggctaattttttttttttttaattgtagagatggggtctcattctgctgcccaggctgatcttgagctcccgggctcaaccagttctcccaccttggcctcctaagctgctgggattttcggcatgagccagggtgcctggcattacctggttttatagatggagaaactcagagccatgtgtccaggaccacacagctattaactgcaaacccagaggaaagggtaggggatgagttccaagcattccctggagtccgtggtaaatttcttcatttcttctcctgcaacaggcccggtacaagcagagccttgacccaactgtggatgaagtcaagaagctctgcacgtcc

SEQ ID NO: 88387 - DNA, 1068 bp, Homo sapiens
gccatggtgggcaggcaaggttggagggggcctcctggagaaggcggtgcttgctcgggctgagtcttacagaagagaacaaaggcaacagttgtccctgagaggggactggaggggatgatctcagaggaagtagatgatataataaaccagcatggtattcattggaaactacaagcagttctgtgctatgggagcctggagcctgaattgggtttcaaaagaaagaaggccagaaagtgttccaggctaaggcatagagcacctcgcagactcttagggatgtgggcttagataaatccttttgatgccgtgtgaagcctggctctggggagaaaagactggctagagaaactccaggtagaaggccgtcgtatacaagaggccagtggcggcaccctgagtcaggctggtggggcgaccctcaggaccttcctaggacaggtggaggttgagttagagggagcaggtgagacctggactgtgaccaggcaccagaagcgagaagaaggagcttgtgggcatttgttctcaggttgtgagtaggccggaggtccatgagtatggggtcgtgagaagtaggggcagacatgctgcgggcggttcccaaaatacagtttctagagccgaagaaggccaagagagtgaaatctggggagcagaagaggatcctggcaggtgatggggaggagaattgggagaaaatggcatgggggaagccgggaagggtacctgtcagcccgggggaacagagatggaattgatatccattattccaaggagtctggccctttagcaagaagagcactttatattccaagtgaagcagtcctgttcaaaataagcagctccccatttctgagaagatgctgagtacatcttctgccagagaactcagaatgtgaatcagaattctcagccctattaaagtggcatcttctcagggctcgttcctgtaaagccccttaagggcacagccttcctttaaactctcagccaggaactgtggtctcatctggatttgccgccgcagctttccctggactaaagatggacttgtgccaccat

SEQ ID NO: 88388 - DNA, 1040 bp, Homo sapiens
aagaaagaacaaggctaagcagggatgtttagtttctgcaagaggtaacttatgtttgtagataggagaaagggggttgctgaagaaagtataaatcagtggagtaaaggatgagaaatgggaaggtatgagaagattaattcaggacagagatacagcatttgacttggcaagcccaagcactcttctctgagacgtgggagggaaggagaggtgaatacaaatgtggtggagctttgaagctggacatgagagctggttccccttggagcctgtctcctgttaagtgagaagccaggccatgtcctgagaggtgggggccatgagtgccaggatggaagggtcaggagagaggagacatggcaacccaccccttcctcatgtttactgcctggcatagttggcatttttctttatgttgaggaaaatgctgctatgatctgattagtaggtgctaaataccccagtttgtataaagtaggatggtatctttgcagggctaatgaaatggccaaatcaggtttgggtaaggccacctggagatccatgtccttcagctgatggcagtcttcctgtgtatcccagctatccacagagatgcttgcgagttctaccatcgcaacagcggcgaggccaggttctcccatcccaacagtggtgaggccagaaatttccaggctcatcacatctacctgctcagcctgtggtgggttggagttggggttgggacaccccacctgcccttccagagggcgactgtctgcacctgcccagtgtgccccccgttccctcctctgcagtgtcagagctgctgtgcctggatctgaggaggggccgtgggagaagaagccgcccccacgacacttgcgcttgccttttcagctggagcacggggtggcggcaccgtgtcgttctgcccacctcacccactgggatgcaaacttgctgaggccagggcttcttcctgccatgccttgccaccacgccccttgcctcccctgggacatgccgttctcttctttgtactcatctgtttggta

SEQ ID NO: 88389 - DNA, 1083 bp, Homo sapiens
tgtaaatttacaatatgttttaatactttttattgtataacatgtgagctgaaagaaattgacaggtgaatgatttgttccagggtttaaaaaataaacaattgattaaatataatgcaagaaaatggttatttggaccagaaagcctccaaataataaacattaacacaaatatgagtgacataaattttaagagatggtgatcagctttcatattcttagtggcacagtgcttgtcctgggaccaggaggtttatttattgtttacttctctctcagaggagtgctgtaggtagagtagaagacgacttcatcaaagcacagatacagtattgcacacacttcaaaccatcagagccggaaaatgacatatctgtcactcagtaatccttcttatatttttattgtgtcatatttctttgtaatttaaaaattaaggataatattcaagtctctccgctttcagtcttcttttataaataagtatattttaccaaattagtatatgccatggtttgaaaaatcaaataatacagaaggtttatgatgaataaagtagtccctggccccacgctttctctgctgagactctatgaccaaaggcacctccttcccctgtttccatttctagttcttctggagggtgtctccttccctgtagatgacatgctgagaccactgcttcttgatttgtcgtttttagattatcagtgggctttgtcttagggtacaaaccaagaacagagctgccattaagttctgtttaaagaagggagaaacgatgtggaagcctgttagcaaagaagtcaattatgtgtagattacatgctggtttaaattcctatgtgttatttgtattcagtagtgaattctaaagagaaaattctagattgaagaggctgcgtcactcacgacgccttcttgcgttccctcttattcactctattgggtttctttatactttgtaaactttgtggtttcaagtaatatccttatgcttttatttctagttttatcagtaatagctcatttcttccattttcaaggctcttagcttccttgtactttcttctgccttttttc

SEQ ID NO: 88390 - DNA, 1050 bp, Homo sapiens
aggtctgcctcacgctctgcacacccctcccctccctggcggccgccctgcacaccccttccctccccagcggccgccctgcacaccccttccctccccggcgaccctcgttgggagcgtgtgaaggatggtcctgagtgcaggctgcaggtgccaggtggtgatcggcacataacgtgacagatgggcaggtgtgtttgtcacgcacagacctgcatggtaggcacctgccccatgcccatgtgtccttgcccgctgccatctgagaggatgtaccctcatcctacaacagctggcccttggtgtgccaggtctgccaggccagagctctctaggggtccgtgttgggtaagtgcacggcaggtggccccctggccgagagcctcaggaccccgctgtctggggtttgggggctgagtgtggcacagcaccactttcatgccctctggaaggcttggcttttgcgacctggcctcctcaccagctcaatggcagtttcatggcatagcgtccctgctgcccccagacggtcagaaatccaacccgagtcatatcattatcctcgtctttgtcggcactggagacgtggggaggtttcgttcctcagaactgctgcacgatatgtcttccaaaataaatgcggtttatttcaaacagcagcactcaaaatcaaggctcctcaggaaatccagtattaaccccttccgagctttcgccgtccttgtcagatgggcaaaacacgttgtttagcatctcagcacaagactggagagaagatcgggcagtttgtgcataattatttagcagtctttaaaactaggagaggaatctgttttctaattaagctgctgtgtctggaagtaaattatagtgaaccttcctcgagcgacccccccagtttctaattatctatgctaacctagcagcctgatgaataagctgttgctgctgcagtacatatttatattctgaatcctttgagagagtggcaataagatccgtgcctggaaattaagggacatttttcagccctgaaacaaagtaatgcaa

SEQ ID NO: 88391 - DNA, 1054 bp, Homo sapiens
cggaagtactgtgccgcctttgggaataatatggtcagtacatacctactgatatgaacaatgttcacagtgcattgtttagtttaaaaaggagctgagaaatagaatcacatattatctagttcaagatcagtaagagaagtgtggacataaagaacaatgtctgagttcatatacctaaatgtcaccagtgggttagctttttaaatgcaattaaagcatgtttgttctagtattttctacattgagcatcttttatctgtgtaataaaggcataaagcgtgttttcttcacctgtctaaaagcatgaacttgtaaggaaaggagcaccagctctaggtaactgaagcagcagacagatctgaactgtggtcagaccgctccaaagctggcagctcatgcagcagcgtttcggggttgcacaccagtatggtttgcagtgataccattttcttcttgttcttccaggtgctgttaagccaagtgcaccggctgagagcattggacttgcttggaagatttttggacctgggtccctgggcagtgagcctggtgcgtgccttccgcattaacctgggggctgagggaggtgggacagagattaggctccgtgtttcagtctgtgcacgtatttcatgatccagagccacccccagccgtgagacccagggcgagtgtgtccaccgtgttggtgtcctgtcactcctgaggccctcaaggagcccactctgtacccgtgcagcctgcagtgctgcctggcgtttgggggtctggggttgtcgcccctctttatgtctgatgttagacataggagtgagtgtgttgtcggccggtcaccttttcctgagccgcccccagcgctgcggaggagcagggcgcccctgagcctgacgcagcacccacctcgtggtgctgcttcccccaggaggagtctggatcctcagcactgtctgctcaccatcatggcaggcacaattcggaaacgctcttctggttcctcattctatagcagagtagtaatggccactaaaaacaccctggcagaggcaggatc

SEQ ID NO: 88392 - DNA, 1974 bp, Homo sapiens
tcgtgttgctggtggtcctccggggctccgcccccacatgatgagtgcctcctgcagccctcagccgtccctgtgactcctggggcttgccattgtgcagatcggggtgcacatggtgtacagacgggtccacctgtgaagatcgcagagcctgctcagaggttcagaggtgcagacagaagccagccactcccccagtgttctcagcatccccctgctgccgccagccggccctcaggacacacttaagagtttgagaaggatcggagcccactcaggctgggcccagcggaagggcgagcctgggacctcccctcatttcccaagcacctttggggcacaccgtgtgtcccattgtgccagaagctctgagggattcatggggaggccttaaagaaggtgggctcgggcggaagaaaagacggaagaacaccatgtgccaccggggagaagtgtgtgccgtttacatgagacagagcagggcacagtggtgacactgatctgacacagatggtaccgcacaggacaaggagcaccaaggggggcacatgaagaaagccgtctgtccaggattctcccaggactctgatcccagagggcctcccccagcatcactccccatgccaggttacactccacttcacactaccagccagaaattaccaggcagatagaatcaggaaaatatgacccgtaatgaagaaaaggaaatcaacccattaaaacctgctcagaactgctgcaggtgttatcattagcaggccaggacattaaaaagttagaagtctactctacatattcaaaaagttaaattgagacacggagaatataaaaagaacccaacttgaatttctagagatgaaaactgcaatatgtgatgggaagaaatatacttgatgggattaacaaccagttaagcattgcaggagaaaacagtacacggttaggcacggggctcacgtctgtaatctcagcacttttggaggctgaggcagacagatcacttgagtaaccaggatttcaataccagcctgagcaacatggtgaaacctcgactccacatgaaaaaatacaaaactcagccatgcatgttggcgcgtgcctgtagtcccagccattcagaaggctgaggcgggagaatcgcttgagcccgggaggtcgaggctgcaaagagccgtgattgtgccatggcactccagcctagggaacagagtgaggccctgcctcaaagaaagaaagaaaatagcaatagaaactaacaaaaatgaagcatggtaagaaaagaaaaaaaaatttaattaaaagaatattattccattgcgggacaacggcaagtgacataacgtactatttgggggtccataaaggaggctagcagaaaaagtatttgaagaaacaatagctaacatttttttgaatttgatgacaattataaacccacagatccacaaagcttagcaaaccccaagcacaagaaaactacacgaaggcatatcgcaatcaaattacttgaaaaacagtgagaaattcaaaagtctaaaggcagccagtaaaaagccagtaaggagcaaaggtgagaatgacggcaggtttcttcttacagatttcctacagatggaaaaggtgagagtgacggcaggtttcttcttacagatttcctacagatggaaaaggtgagaatgatggcaagtttcttctcacagatttcctacagatggaaaaggtgagcgtgatggcaggtttctcacagatttcctacagatggaaaaggcagacagcggaacagcatctttaaagcagagagagagacagagaaagagaaaaaactgtcaacctagaattctatacccactgaaaatatatttccaaatggaggcaaaataaagacttttaaagacatacaaaagatgaaagcttatccccggcagatccacactacaagaaacgtgaagtcctttagccttgaggagaata

SEQ ID NO: 88393 - DNA, 1134 bp, Homo sapiens
tgtgctcatggaagcaaatgtccttttccttaggaatatttctgggcaaagcgtcatgctatctgcaactttcacacagtgcagaaaaacacaggggatcagggggcagaaagcaaacatggcagagtattttttgaaattgtccttagggtcatgtgatgggaccagagctcaagagcagcagaacttcatgatgagaaagtccaggagatgtggccacagctgtcttccgctggtcacactttgcaaggatggtggtagtggttgttttaataagttcctcaagcctgctgttagcatttgtgtatctgctaattagcaagattaaggagggggagagttaattaaggactcccgtaggcaaggttccagttaattgagggtttttcatagataaaattaatactcagtccagactgaccttctgagttatagttaataaagttgtggttatggtaccaccagggaactccaagagcgtaatgtcagtggatctggaaagatgctctgtgatggtattcatgaagtaaatccagatttggaaattcaaagaggcttcccactgggaacaggctgctgtggtccccggaaggaacccgcactatgaagaaaaggcagatgagagagtcatagaattttgtttctgcagcccccacgtctgtgctggttctcctacccgtgctcaaattctctactgttttctctgcaaagtcgtttcaccacagttcgtgtatgctggcgttgatagcctctcctcttcctgcttctccacttttccccactcccccttcctcacacacgtacacgcaaaactcaattcaaaaaatgtgcaaggttagctttctctgtcatccagcgatgactcagtctcaccaagggggcaagagagtgccatctagagcgtgtgaccctgctggtcccacagcagaaggcagtgccctggtgggggctagtctagttaggacctgagcaaacattttacttgtgtcccgaactcttgttcctatagtttctatcttaacaaattttatttttttagaacagttttagatttacagaaaactggaaaaggtagtaaatagagttctcatgtaccctacacccaattttccctgttgacatcttctattagta

SEQ ID NO: 88394 - DNA, 1033 bp, Homo sapiens
gatccgctgaggcatttcaaggaaagttacaccctttccaacgcagttttccttttagaaagatttggcctcagtagatgaatccatgtgatcaagcctagtgatcagctaggattcttgaatctcgggacccgttgccagaataacaaaatgggggcttcctgtaacctcggctctttaaagcaacacttctgataccagggttagggtttcagaaaatgcagccgccttaggagcctcattggcagctactttccactaaaacatcttccatttctctctctcaggagtttcctttaacagtgtttacactcagatttggagagtcctgctgcacctggctgctgacccctatccagaggtctcggacgtggccatgaaagtactcaacagcatcgcctacaaggtacgtgccgggcgctccccaccgcgctccagctgctggttctcggttacgagtatgcatgccaggaactccaggtgtgcccgggtccacaccacagtttagaaagtaacaaaacgagcttcagcaaatatcttaaatctggagatgtacacagtacaccccaaactgtgtctgtgcagctcccacgtgggcagagggtgctggatttactgatgcctgtcaaggcaattaggggaggactgacattatctttcaggatcctctggtgtctgggtgagctacagtgctggcccttcttccattttttttttctttctttacttaattatttataagagatggggtctccctgtgttgcccaggctggtcttgaactcctgggctcaagggatcctcctgcctcagcctcccaaagtgctgggattacaagcgtgagccactgcacctgttttttgtttttgtaagacagtctcactctgtccagactagaatgcagtgacctgatcacggctcactgtagcctccaactcctgggctcaagcaatcctcccacctcagccttggaagtagctgggactacaggtgcacaccaccacacccggctaatttttaaattttttgtagaga

SEQ ID NO: 88395 - DNA, 1039 bp, Homo sapiens
gattacaggcatgagccaccacacccagacttttcttccctttctgatagcagtaatttttgactcattcaaaacccttctagttaatggtttcttattcatggccattctagctcaagggaacttttcaaagaatcagtttttggtttcattggtttttctctgttgtttgtccattttccatttgattgattgagctttcatcaataaagcttgctttcttctgcttactttgagtttaatttgctcttctcatcctagtttcttaaggtagaagcagaggtcattgattttagtcctttctctttggggactgtaaactcttctcagtcccttttgtgagctctgggcatttggcctaccgccttcccgctgttttttctctgcctcatgggttgtcactctacccttgagcagatgaatacttagtcaaagaccccaggggcctctcctgcagaccttggaagctttcccctctccagtgctctgtcctgcaaattgtcaccacctcagcctccctggagccccagtctctgtctcctgttccctgaaagtgctgggctccccgtctctgcactgtggcctgggactgcctgaaactacctgcaagccggacacagggcagctgtttatttccgttctctcagggatcacaagcccgtgacacccagcacccagtgtccaaaaacaattgtttacggtatttgtcctggttttctagttgcttatggaagttggatgatttatgtggaattagaagtcactcattatagcacttaaaaattttttggtaactttttgataaaacttcaaaagcttacagaaatgttgcaggaagaatgcagggaaaggccacactcttgcagcctctgtggtgttctacgtcttcatctgacctcgtcacggctatggcgttgcctcgggtatcactcagtgccagggtctgcagggtcgaggagccacggcttcccatcctagtccatcgctttttccaaatgagctatcgagtctccccctctcatttgctgtggccttctgg

SEQ ID NO: 88396 - DNA, 1052 bp, Homo sapiens
tagccgttccctttgacccagtcatgaatctgctaaaatactgtcttgagaaaataatcagagatgtagatgacttccgtgttgtttctaagaacgaaaattgagattcacttaaatgtccacagagggtgaatagttaaaaagttatgaaatatttgatgagatattattggagctactgaaaagttaaacattaaaaatagtgtcctaaggaagcgctcatgacaacattccttaaaaagaaaaaatgcaaaatgcagaccaagaagccagatttacagaacaatcacagccgtgcttctcatacagacacagatgtgcatacgacggagaccagcagagcccgctcctaactagagattcgcaaatggcgccacccacgactgcactgaattgggcttcttttgtgcctcttctgcagtttctacactaagcacgaagcacctttagagtcgggggaaaagaatcaaagaaacaaaccccaggagatcattgaggctggtggattcagtcctagtcagaagcccctcaccaggcccacctgctgggctcaccgctgcttacctgcgggtggcatgagggtggcggcccctgcagacagagggaagtgccccttcccatcactaggaggcttctggttaggaaaggaaagcatacacaaatcctggaattggatgcaggaagcaggagccacccaaactctgagtgagccagagctgggaggtggctggacactgtgccaggggtgccaggccgtcctctagaactgcggcccagtctgttgaaaagtcaatggaatttagtctaatgttaacaagcttggtgtccttgatgcggtctcgtgcttaaggcagacaaggtcaggcgactaagaaacccacatggtctggtcttcgctcttgctgggatggcagtggctgtacatgttggtaatttcttggtgtgataacgagaggcttttcttgaagtccttgaaaaatgcctattctcagtcatctatcctatgatgaaagaggaatggcatagataatccaaaactcattgctcttaaa

SEQ ID NO: 88397 - DNA, 2621 bp, Homo sapiens
agcgtgggcaccctgtcggctggggtggggggcccgggcagcgtgggcaccctgtcggctggggtggggggcccaggcagggccacagcgggtcactctcgggcttccctctgcagacgggccaagctgctgctcaagaagaagcgataccaggagcagctcctggacaggacggagaaccagatcagcagcctggaggccatggtaggcggccgggtgcttcgccctggagtgcaggtgcagctggaggcagctccgcccggctgcgtggacatcagaaatttctcccgagagctgaaagctcctctcagatgcctcgggctgaagctgacctgaagaggggcgggcctggaatcccggggagtctgccaggaagctaatggtcttaagaggctggggggcaggttggctctcgcaggactgaggtggggaaggttgggccacccctgggtggtgtgggtaggtcaggggtctgcatggggactgagtgtccctggtgttagggacccgagcggcgtggttctgctctttggtaaccagagctactaacaagcaaccagcggtcccctgagtgtgtccctggcacctgctcagtcctgcgcatccccacctggcagtgggagaggacagggaggagcaggtgtcaggagtcaccctcacgcccagcagcacccgcccagcaagggtgtcatcctgaaccctgccccagggccgggaggagggcaccccggatcctcagcacctgcgtctgctctggtttccttttcaggttcagagtattgagttcacccagatcgaaatgaaagtgatggaggggctgcagtttggaaatgagtgtctgaacaagatgcaccaggtgagtctctgcagggccaggggcatggaggtgtggggagcccattgggctggagctggggatagggcggggggcttgtcccacggtgttcgtgtcagacacagggcaagaggctggcaggggagatgtgttgggtgctgccaggcaggcagggatgcagtgaccgggtgcagcacaggctgggaactgtgggaactgggtccccaggcgccgaagtgacatagaagggaagtctgagggtggggagggggctggcaaactaatcacagaaggcttcctggaggtggcgggtgtggtggctcacacctgtaatcacttttggaggccaaggcaggcagatcacctgaggtcaggagttcgagaccagcctggccaacatggtgaaaccctgtctctactaataatacaaaaatgagccaggcgtggtggcaggcacctgtaaacccagctactcaagaggctgaggcaggagaatctcttgaaccgggaggcagaggttgcagtgagatgagattgcgccactgcactccagcctggatgataagagcaaaactccgtctcaggaaaaaaaaaaaagaaggcttcctggaggaggtgaataccggcctcatctcaggccgggcatggatgtgaagcccagcgtggccataccacgttcccccaccaaccccatcacactcctgacatgggggccagtaggtggggctagttggagagccagggactcacctggcgggaggtctggctgtgctacttttccaagtgtttggtgagtactggtggtgtgtgccggtcaagcacaagtggccctttgaccttttgccactcaaaagaaatcaagtcacctgcccagaatgttctacctgttgcttgtttttactggcggctgtgagagctgactcagggtgagagggggcatcgggcgccagggcagtgcagtcgtggcctctgaaaagactcatcaaacggcccctgtggcctcaggacaggcccatgcctgggacacacatgtcctggcctcatttaaacagggacaggagctgggtgtggtggcatgcacctgtagtcccagctacttggacggatcgcttgagcccagcctgggcaacacagccagaccttgtctttaaaaataaataaaaataaacagaggggtgaggccatggccctgagagcccaggaggcctctgtcgggggtctaccattggcctcgcgacaggggtcaacacccatcaccctcgtccacaggtgatgtccattgaagaggtggagaggatcctggacgagacgcaggaggccgtggagtaccagcgggtaggtggcaccctgaccggcctgcccccaactgtgagaacccacaaggccaccctcgagggccaaactgtcccacatcctagagcggccgccttctctcaaggggacgagacccagccacaggccatctccttcctccctgaggggccacctcctcgctgctctcaccaccgcctgtccttttgcagcaaatagacgagctcctggcaggaagcttcactcaggaggatgaagacgccatcctggaggagctgagcgcaatcactcaggtaacggcccccccgggactgagcacagtcactcaggcagcgggacccccagagctcagacccccaggaggccctgcccatggtgatctcgtatgtggtgtcctttaagtaaatagtctgcggtttgtgactggttttcctacctgaggtgactctgttttcagggttgctcacccaacggt

SEQ ID NO: 88398 - DNA, 1053 bp, Homo sapiens
ggcccctcctggcactgggggccgtactcggctcaacctccctgagcaaagacgaagaaagacgaactttgcttaacgctcagtataattagtcttcatttaccgcctgaaacgttgtctttgttttcttatcactctgcttcttaaatgacttaaactgccttgaaagtgatctgaaaggtatttctggatgggagcggagggaatctgttcttcagaatctgaaattggaggacacctggaaaacaagacctcagtgtgttcccgcaggtccctgcagacaggagacagcagagctgtacctgcgggtgccgcttcgcatgccgtcagggaggacccagacgtctccatgctgctgggcgccgcgcagatggcttccctgcccggggctggctgcttctaatttcagctgctggaggctccgcgctctcactcttgctcgcgctctctctctctctcttttattccatgtttatttaaagccagattttgaaatgttgtcttcagccctaaaatctcactttatcttcttgcagcagatcctataaaaccccacttaggtgcctagagggtgggggacttcgaggacagagtttccctggcccgctgcctgacactgtctccgtaaacattccgatgactggtcagtgttttcccagtggagcagcccagtgtcacgtccacccagacggaatacagacgagccgggtggacgtcgtgagtccagatacacgagagagagcatggcctccccagtgacatgcaggaagcacgcctgccccggtgctcggagttgaacttaggcaggggagtctgaggctgccctgccgtctcctgtctggggtcgtgatgcagtggggcctgtcatgagtggtccagacgtgtacccccggaggtggaacagtgacagcctcaggtgccctggtgcctcctccttcccggctcttcctggcactctgcttccttctcctaacctgagagccacacgctatttcttcttgtccatctagaaaccaaggacatctggaaggggtcttccaccttagaccctaa

SEQ ID NO: 88399 - DNA, 1075 bp, Homo sapiens
accggctcacggaaaatgtctataaggtgagcgccccccggcgccgagctgagcccgctccgtgtgcgcctgggtcgcgcgccgcccgcgcgcccgagcccgaccagggcggccccggggccgcgcgccgggccaggaggctgggactttgggggtcttcccggcgcggccacccgggacccgggctgctggggtggtgagcccggcgccggccgctcacaggtggccacccccgcccgggcccccccatcccatgcgcgccgcggcccggtcagtccccagccccaggcccggggagcactccccgctccgacggccctgctcggcccccgcgcgctcgccttggcgtcggcgggaacggagccgcgcgccgggccccggaagccctcggaccggtcggggtcgtagcacacccgggcagggccggggcggcgggggcggcgggcccaggggttgcggcggccaggacggcatgggggctgtctgaaggccgcggtcggcgcggtggcaccgtggggctcctccaggcgcggttgcgcgagcctcgggcacttcattctcaacaggctttcccttcccacaactcctgcccggcgcccatgctggggcctaaggtgggaggtcggagcgcgggcaggctggatgggtggacggataatctatcatcttatgtaaccgcggagagagaagactaattgtgtaggaggctgacgtgcctgcctttgcttcagatgtgttaagagtggcatccacgttctcgtctgcgaaatgacaggttcacatccaagggccgcagagcaccgctggaagcctcccctgccgccccctccccagtcgtttttgtggctgggataccgacaaacaggcccttggttttctctttcttcagcatccgttctcggtccagacccccacgcctgagcccggcagctgccggggagcattttctcagaggagaaacccctgctctgggtgtccctgggtcctgggcgatctcttacagatgtgctttgtttcaaaactgtctgcaggttcagtgacaggctgggcgatgagtggagtgggtatttacccg

SEQ ID NO: 88400 - DNA, 1059 bp, Homo sapiens
cacgtcggagccactgggaaacaggattcagggtgacctgaggagtcggcttgggaaaggcacaggccctggggttgttaggtttggtttcacagagtctgtggcatacggttctggccttgttgctctgtggaagcacatgttgtcaagggagggaggtttattaaattattagtcattagctccattacgacttgtttgtgattgcagagggtggaagagaagtaccagcggaacctttttcctattttttctccttctgcgctgaaaccagaaagcaggaactttcgtggtgagagttggcagggggtgagtacatggagtggttttgctctgggggaccgaccccgtgatcgtccttaataaaactctcctaaccgggcagtaggccttcacctaggtgaagctgtaatttatctgcaggtctaagtgaaatctgctggcaggaaaactcttaggactgagtgtttggggactttgagcccctgtggacgcagaccagctggtctggagcacgtgaaacacacaggttctgcgttttgtcttccacgggtgggttaattggtgattttcccaagtgaagatgtggcggttgatgatttgatttagcacggcaggacgcggtgggccgcaggtgtctgaagggtcgatccactctggaaaggctttgccctggtgacaggcttgcgctgctgctgctgcacacaggcggggttggttttgtaggtaggtggctcctgctgccactccgggagcctgactgctgagtctttgagacctttttgtgctttgtcactggggagctcaaggtgccttggtagtgccggtactggttgggcagcttttggcaatgtcagccaggcagaaactcagcccacatggagacatagtcaggagaccgctgaggccaccggtgtgcactcctgggccggtccagccggtccaggcagtgctgagctctgtcctctcctgggacggtgctgcctctggcatcccttcccggggccgctcctgtgcctgggttggcggcttgcagagccctggcagtgcctcttggaa

SEQ ID NO: 88401 - DNA, 1086 bp, Homo sapiens
ttcttcgttggggagattggttggctcgtggtactgcccgagtggacctgaggttcaggattaaagtgaaggctggtgctgccctgggctttcaggggccaccgttagatgggagggcagtgggtgggggctgctgggagctgtgttcctgttgctgccttgtcttcgactgaagcttccaaaggtggagacctgagggccaagacctgtctgctggctacaggcaccatgggctgaactgtccaggataggtggtcttgcaggggagggctggtgtgtgacctggccattgaataggaggggcctgtcctccttccgagctccaggaggcagactggccgggaggctgaagcccggttcacccttctccccagttcacaggtctgggccctggtcaggggagcaaccccagcgtcactgcaggagtggcaggtggtgagcagagctggacatcaccacttgtctccacccagccttgcatggccctctctgccagctgccctgggctagtgttgcctgtgggtgccaccatgggtggggacactcgccaccgtctgtggaggcggggtgccactgactgctggttgaggctggctcctgtccttccttacattgagccagagtctgccctgtgttgccttcccagccaccttgtctggtgactttctttgaggccccaggatagggaagcatctttgtggctgcacagagcccgtggtcccctggaagctctgcacttgggcggccggcgccgtcagccgccccccacagcctgcgctaagatccctagtaattacaggcaggcggggatggtgctggcaccggcctccaacgcacttccacctcccccgagcgctgattcattcctggcccctggctgtgcctgtacagctgcacaatgacttgaggggcctcaacccagaggcagaaagggaggccgagaagggacccgtttggctctgtgactgcaagggcttgatctgtcctgcccacggattcctcctttgggcatggaacggcggccagcctgtgaggggcccatcggtatttgggaatgaacacatcttgtttctggattctggagca

SEQ ID NO: 88402 - DNA, 1281 bp, Homo sapiens
gtggtgaccccatgatctctaggcacagcacacgatgtccagattctccgggcccagctaagttccgtgccctgtgaatgagaccagttgttcatctcttcctggctgggtctgaatcttggccattacaatgagaatccagagtccagatgatcccacccctggagatgggggctggtcttgcacattgcagactgacgatggcttcctttttccagagccactcgtctgtgggacacttggtgacctcatctacggtagagtcttccgtagccctcacgtggctctccgaggtgtgggtttcttccccgtcgtccgcacacggggaagtggtgtggatgccgctttcagtgggttgcggtgggggccggggcctgtgttcccctcctctgggtgagcaggcacttcggccctttgatgccaccaaggcgtgggttccgttcgggcctttccgctcctgtttggttcctcatgagggtggcggggctgagtgtggagacttggagctttacttcctgctcctgcttttcttgatggcctggtgggaatgagctcggccgtccaggcagcaccgccaccttagccgcagccagccgccctggagtctcacttctgctgttgcgtttttctgctgttgcgtttttctgctgttgcgtttttctgctgttgcgtttttctgctgttgcgtttttctgctgttgcgtttttctgctgttgcgtttttctgctgttgcgtttttctgctgttgcgtttttcttttgttcgaggcagcacacccgtcccaggcacaggccttcattcctctgtggacgtggtcttgtgccgcagaacaaattgtgcgcttaattgaaaagtatataaataaaatctgataaagtgcccagttataggcccctaagtgggttctgtagaaaacggattagaaattgtaattacactgctctccggggccctgccccgccctttctgcggcctggaggtcagggcggggctccctgtcaggtggaggagtttgccaggcactccctggagtccctgaggaggaagcccaggctcttccaggagcctgctccacccctgtggctgtggaggagttcagcaggcccggagcccttcacacccacttctgattagatcagactctgcctctgagatgctgggaggcccctcaggcggcggcaataccaagtaatgcctttagcctcctttgatcagctgtgacgggcgtcctggtctgagactgtgaagcaattggaaatagttctcccactccaggctca

SEQ ID NO: 88403 - DNA, 1028 bp, Homo sapiens
gggtggtggccacatgctgctgccctcgtgacctctgagagacccctctgcccgtcatctgttgagggcccctccttgggccggtagactcttggccctgtgtttcccgctaggcgtcccccggcacagtcctgcggccctgtgtctcccgctaggtgtcccccggcacagtcctgcggccctgtgtctcccgctaggcgtcccccagcacagtcctgcagccctgtgtttccggcatccccagccttgtcgttccttgtgggggaatcccgccctgggatccgccatgtcccaggaccaagcctggccctgctgaaccaggagcgagttcctcagggacgggctgcagcagccccctccatggatatcctgagccccgatgtgagcaaggggatcccctcctaggaggctgacttagcccccagagcaggcaaggcccagaggccagactccccaccgggaacaggcagggccagcaggcccctgttcacccatagtccatgggtaggagttgggatgggatcacatgtgtcccctggaacattctggaacatttcaagagtttcgaagatgtagttccggagccaagcccaccagggaggccctggtcatgtctttctaaaataaagggttgcagggatccacgggctataccttgacacttgttccccccacccaccacactctcatgtacgtgcgcgtgcgtgcacacacacacacacgcacgtgatacagaaccagtgctccagtccccacagcctggggacagccaggagacaagtgctcttccctccctggagaggcccctcctgccggcctgggcctgctgggcactgtgggcaggtgcaggcaaggacagcagcagcacctttgacccctggaggcagcctcgctgctgaaggactcagcggtgacaggctgtgctgccacagctgccaggcagggagcgctgtggagcgcaggcctcccgcctgctagacccaggacagtggcgggcgtctgcgccctctggcgggggccaggcccca

SEQ ID NO: 88404 - DNA, 1050 bp, Homo sapiens
ggggaaacaggcggttcctgcccggttcttcctaaacgctctcgtctttttgtgtgtcttggtgactttagaaacaaacacagtggactcagtggctactggtattgtctcttcccacactgaactctggggaattgagtgcagggcacagcccggctcagcctgcccgctggtgggagcccctgggaagctgcggcgctcctttatctgatgtggtttagtaaaagcctcccacacacctccccgtggcctgggacgtggctggtagtgtttgtgtgggaagcagctcaagacgcggaccgcgtgacattaaggagagctcaagggcggaccgggccctgtgtagagacccttccgcgccggcgttcccgctccgctaaagatttcaaatccaggggattccatgctcaatggatgaatgtagacacaaaacagcaacacttgtatgaagatgtaaagtgctgaacatatttttttcctgtttcctttccttttttttaaaaaatctgaattgtgccctgtactgcagttacttgtttgaataaaagttttatttattgcacgagttgggtatggacctccttccggttcccggcgtgcgtctttgccgtgggggccccgccttgtgcccacctctgccaggtattttctcggcactcagtcgcctgctagataacctgggcttgcacacggtgctggccccagtgacagtcgctcactctgcccgggctctgcggggggccgtctgcagctgaggcaggctcctggctccctccaggcccgcaagtgaggcaggctccgcaggcgccgtccagggagagccagagccccagctgtgtgccgactccgagtgctccagggttctaggtctcctggcagctcgcccgtggtcccccctcctctgcacccccgagtcctcagaccccatgctgcctccaactgagccttgtgtttccttgcagcgccgatgtggaagtggccagattctgagccgcctgactagagttagtaagttgcctggcgttctcgtgcagtcactggcctctccag

SEQ ID NO: 88405 - DNA, 1028 bp, Homo sapiens
tcacggtgtcgcccgcgcccacgtcccgcttctccatcacgcacgtgtctgactcggacgccgagtccaagagaggtgaggcctgggcggggctgtggcagaagggcacgcgggaggcagggcacggagctccgagggtggggcccctccgtctaggtcctgggccgggccagccccggctccgctccgctccgctccttcccggccccgctccttcccggccccagacctagcctggaccccgcctggccctcgcctggccctcacctgaccctcacctgaccctcacctgaccctcacctgaccctcacctggccctcacctggcccctgcactcggctctcctctgcctgaccctaccccgcagacctgcggcaggccctctcaccggaaccttcccagccagaagtccctgcagacccaggtcccacggtgccccggccccacggtgcccaggtggagccctgctgggggcctgagccaccgctcccggccatggccctccactatccgccccaccccaggctgggctcatctctgccaggtgtccctacccctacagcctctgcccacgtgcctgacaagtgcccacctcctcggagaaggccccctgccagcttcctcttccctagctgtcctggcctgtggctgcagccctgggggaagggcctgtcagcctcacccctggtgcagggtgccccctgtgtggctgaacaagcaggcaggtcaccaggaggccactgcatgaccttggccatccccttcctgttcaggcctcagtttccttatgcgtaaaacaggactcggaggcatttgctgagagttgttggcctgagtccagtgacaggagtgggggaaatgggtccatctctcacctagacacagccagatctgctgcagggaaggggcccggcctgtatgtgggccagggatggaggccaggtgggagttgcgggggaggcagccctggtgtctcagaaccctgtgttcactttgttgtcctgcttgccaggacctgaagctggtgc

SEQ ID NO: 88406 - DNA, 1002 bp, Homo sapiens
cgggggcctgagcaggcaagagatggaggtggagggtctgctgggtgctttggcctggaacgaggcccctgccgggggcacccaggggctgcaggtgtccccatactgcgttcaggtatggactgggagtgcgtggcctcaggccaggtccattgcagattgggaaggggcccttcaggggtttgggcccagagagcactgtgcaccctgctgaccggaggcccacccggatggaatctcactacagggttgcccttgggggctgcccacagccaggtggggctgggagatgggagaagacgtcttcattcccaccctcacacgcccaccctgccccccagccgttgtcacccatggccctgatgctgcccccaccccagttcataccagcatccccaacagacacaccaggctgcgtcattcacttaatgctgcttttcttccattttccttcaaaagctgggtccaccctcacggctgccgcctcttaccggccccaacggcttctgcccaggtgcgtggtcaccccggttaccccatgggagccccttggctggccagggctagtcatggtgctacttcttctttggaattttctcctttttgatcaattcagaaaattctagagcaggagaccaatttaaagtaagtacccctgttttgtgtcccccagttcctgtaggccctttaactctcagaggaggcagagggagtgtgcctggactacacagtccagggggtcctgtccccaagtccttgagcagggaccaggcctccagcccatctggccgggggcggccccacgctggagctgtttgtcctgggcccagctgcttggtcgtcacaagttgaccccagctggggactgggggcttgcagtggcctggctctctgcagagactctcaggaattcccaccagaccctctgagagcaggtgctcattgatgatcatctctcagtggggaaactgaggcacggagcagctggggggcctgagttct

SEQ ID NO: 88407 - DNA, 2921 bp, Homo sapiens
tgctgctgctgtggcatcctgggggctcgtttctgggagtcacatctggctgcttggggttgttgtctgaactgacgctgagtgtgttgctttcagcccatcttttgcgtgggctctggaaggatcaagggtgcctggagcgcatcctctgtggtccgagaacaggcgttgcccctctcgctaggggctgctacacccctgcgccccacgaccagcccactgacactcagatgtaccgagagggacacgcacaacaggggctccccccttagcctctggggccttctgtggggggtggactctgccacggtgacagtcccacacacattctcaccacccatgcccgccgcgaggctacagtccaggctgaccgtgcccgtcacctggtttcacaccctggtgggctgggatgtcaccgagcagccaggcaggctttggcagtggatgcctctgggcccagtagcatgctcccgacgtagccctgtggggcccagggctggacagatgaaactctgggagttttcagaggcttccaggaggctgccagcttaggctctgaatgcctgggcttgggggcccaggccccgccctcagcaacacgcaagtccaactttcccatcccatctggtagcagaaggtggcctcaggttgtcatgggctgtgggtctctgagggaggggaccgtgggctgtgcatcatgacgatctctggtacgcctatgcccacactgggtcctgacaacaggacgtagcgcacccctggacaggggtctggagagggggaaggccccttgctcccctgtggctcagagcctggagccccccaggaccccctgaggctggccctggccccgcgggccggctccgggtggcaacccccaggcagcgcatgtccccccaggaggcgtggctgctgaaccgggaacaggagctgagggaagaaatccggaaaggccgggacaaggagattgagctggtcattcaccggctggaggccgacatggcgctggccaaggaggagagtgagaaggctgccgagagccggtaaggacccgccatggctgggtcaccagctggggaggcccacgagctgaggcgcaaggacccgtgtgtgactgggctggagtgaccctgccctccccccacctccagcatcaagcgcttacgggacaagtacgaggccgagctctccgagctggagcagtcggagcggaagcttcaggagcggtgctcggagctgaagggccagcttggggaggccgagggcgagaatctgcgtctgcagggccttgtgcggcagaaggagcgggcgctggaggatgcgcaggcggtgagtgggcgggtgtcaggtgggcagtgggcacccacaggcccctcctgcatgcacgcagccagtcgctggcagccggctcactgccttctgtgcccacccaggtgaacgagcagctttctagcgagcgcagcaacctggcccaggtgatccgccaggagttcgaggaccggctggcagcctctgaggaggagacgcggcaggccaaggccgagctggccacgctgcaggcccgccagcagctggagctggaggaggtgcaccggaggtgggcggcgggggctgcagggctggagacggaggcggggcaggggagcgggcaggacctctgcagctccaagccccaggaggctgtggctgaggaaggccaggagatgcagagacagggccctgtagacagaggctggtgtgggttccatgtttggggcccaggagacctagatctgttttcctccctggtgcttagtctagggtgtcggccatccctgttggggcacccgagtgggtcgggtctgggcctggcgagttctccagggagtcagctcccggggccctgggctgggtggacaggcgctgaaagagctggggcactgtaaggttcccagcgagctccctccacgggggtcctgcatccttcctgtgccatctgctgccacaggctgagaggtgggtgtgggcgaggtgtcccaccccatctgggtaccaggcctccccaggtgtggccagggtcatactccagtggcctgtgttgggtcctgactcacagcaggtgggttgcctggacagctgtctgggccagccacaggagtcgtggtcagcagggctgggaccaggctgaccaggcggctgccccgtgcaccctgtgcactgcaggccactctggggacatggggcgggggccacactgaagcctaccatgtactacccacagggtgaagacagccctcgcgaggaaggaggaggccgtgagcagcctccggacacaacatgaggtgagtccctgtggccagccctgctggacctcggggctgggagcaggcctgaccctgtgggtgtgctgcaggctgcggtgaagcgggccgaccacctggaggagctgctggagcagcacaggaggcccacgccaagtaccaagtgaccagggatgccgggaacactgtcgaagaacggaaggcagaggacagaggctggacgtgggcccagaggcccacagggacgcccacctgccccccacagaggctggtggttgagatgcccacggctaagcacctgtggctgcattttaacagtaaaggaggccgttgttttcagcgccttgagtgactgccttgtcttctctcctgggctagaggctgcccaagacccccagagcagccaggcgtgggtttggctctcttcctcccactcccctccgcagcctgagcaggctgaccaggaaatcacgaagcttggccatcagccccccagctagcagccctcaacactcagccagcagcccccagcactcagccagcagcccccctgcactcagccctcagctccccagcattcaacccaacccccaagttcctgttccctgccttgccctggac

SEQ ID NO: 88408 - DNA, 1076 bp, Homo sapiens
tccagctctgaccttggggcccagggacggtctctctcattcactcccttggcctggggtctgaggggtgactgctgctcttgcgtcctgagccctgggggctggggacgtgcccagtggtggtcaggatctgcgggccacagggggcagtggcagcccctcctgcactgtctgcgccaccaggacagcctggaagccaccctctcctatccaccctgttgcctgtcgtggctggtcctccccagatgcagcttggctggtcccccagtctctcctcgaaggtggggtcaggacgaggccctggcgcgagcttgctcaggtcacggagccaggcacctggcaccctcaggccggaggcaggggaggtggataaggccccacgaggcacctgcctcccgccctccatgcccgtggggcaatgctgaacagggtgaggccggcacacgggctgagggaaaagggggcctggacgcggctccacagccacttcccaaagtgccacgagggcctggagctcagggaattgctgcgcttggctgatgggcaagttcctcgtggccttgcctgcccccgggcggtggctttgaggggccttgactgccgagggggaggggcagggccccggagggctgctctccagctgtgagtcaggcctgtggtcggcccgtgcccctgcggtgggtgggtcctgggaccgcccgtcccggcccccgagagccagtcctgaccgtcccgcaggttccagcagcacctggagcaggagcagtgggcgctgcagcagcaacggcagcggctgtacagtgaggtggctgaggagagggagcggctgggccagcaggcagccaggtgccgcccgggggcaccacgccctctcccagggacccctcgctggctgacccctcccccccgccccctcacccgctgacctctcccatccctgactccttactcgatgacccctcacctgctgactcctccctggccgcaggcagcgggcggagctggaagagctgaggcagcagctggaggagagcagctctgcactgacccgagccctgagggctgagtttgagaag

SEQ ID NO: 88409 - DNA, 1050 bp, Homo sapiens
gtgtgagctccctgggggcctcagcctccctggctatgcttcccaccagcttgggcagtgatggtcccgagcccaggttctggagtggggcttggcactggcattttaaaatccctgcacgtgactgtggctgacagccggggttgaggactgccagtcccatggaagaatgcaggctctggggccgtcccgacaggcagcagcacccctctctggggcaaggcctctgcaggctgatggctgccctcccatgtctcaggccaccaaggtgtgtggcagggtgggcctgggcctccagcctggccccgggcgctggggagggcagcagtggctctgtctcggggcagcacacccaaccatgagtgccggccttgtgctggtggacctggaagcccggccctgactgtgcccacagggtggcaaagggacgggggtgtccttcgtgtcgtttcctcctgccctgttctgctcgtaggagattaaaaaactcaaagaattaatgagcgccaccgagaaagcccgccgggagaagtggatcagtgagaaaaccaagaagatcaaggaggtcactgtccgaggtgggccctcccctcccatgagccggccaggtgtggggtgggtgctgcggccagggcttcttttgagagagccataacttcaggcattcatgtagtccgagaccttcctgggcagaggtgaacactcatgccccaaccacccccgtcacggcctccgctgcggcttctgccgtgacccggggggcaggtgggctccacacaggagcctggcccagcccccagcatctaggcagttgcctgaaacgagggggctcagtgcctcacttcctcagggttgggctaggggagattgggagtttgtggacgactgtggcacgtgggccctgccacgggaagcagagtgagccacaggaggaggcaggggcaggcaggcggatggggcaggaggctggtgggtgttgtggtctgaaggggcctcggacccttgggtgatgtgcagggctccccgaggcctggtcctctcgctctggac

SEQ ID NO: 88410 - DNA, 1029 bp, Homo sapiens
ctcccgggttcacaccattctcctgcctcagcctcccgagtagctgggactacaggtgcccgccaccacgcctggctaattttttgtatttttagtagagacggggtttcaccgtgttagccaggatgttctcgatctcctgacctcgtgatccgcccgcctccgcctcccaaagtgctgggattacaggcgtgagccaccacccccggcctgttttaaaatattgagaccgagcagaccccatgtggtgtggttctatttacataaaacaccaagcaaaggcaagtttatcacaggaggtcgaaggctggtgtaggggtggcagagagggctcctccaggggcagtggaacattccagaactgcactgtgctgatggtcacacaactctagatttgctaaaaatcattgacttgtacactgaaaatgggtagattttatagtatggaaattgtacctcagtaaaactgttaattaaaacaacattaaaggcaaagaagatacagaactgaaaaaagccaacaacacccaaagctccaggggctgtgggcggagcctcctgtgatgatgactgttgggggctgtgcccctgccgcttgcccctggggagctggaggggctgtgggcggagcctcctgtgaccatgacagtcgtttcttgtcaggacagtcgcgggggtacctccctgcctggactttcggagcctgctcctggcggagccgtcacctaccctaccgcccagttagggctagggagaccaggcctgtagacgcggtgggtggcacgagggaagggggaccagaagcccgcaaccccttgaagccccccagttctgcccggggcagactgctcccgagctagggctcacacgttctgggttctctgttagtgcctttgctgagagaatccacacatggtcccgagagccaaggtgaagcatttttttttttgcttaatcagttttacttagtataatttgtatacaatagaaggtgcccattgtaagtgtgcagttccatgagattccacc

SEQ ID NO: 88411 - DNA, 1342 bp, Homo sapiens
ccagactgccccctccctcaagtaaggtcttctggggaggccgcggggctgcggggtccgacctcagttagggcatgtagtcagtgcacctggggtccgacctcggtcagggcacgcggtcagttcacacagggttctaccttggtcagggcatgcggtcagtgtgcatggggtccaacctcggtcagggcacgtggtcagtgcacgtaaaaccgcgtggagcagctgtgaaccgggctccccatccacgtccgccgccctcttctgttcttgggtcggcagcttcccacagagagaaaacagcccagatgtggcacagtgaggtctggggctcaccctgaggtggggcccccaggaggaagccaaggcttgtgcagagcccagaaggcgtcacagcgggggtggaccgagcggggcaaaggagcccccgagtccaccaccacatggtcttgcggggattggggatggccttggggttgctcaggggtccctcaggctctggactcctgtgacttttgggaactttctcaatggaattttttttttttttgaaatggagtttcattcttgttgcccaggctggagtgcagtggcatgatctcggcttactgcaacctctgcctcccaggttcaagcgattctcctgcctcagcctcccgtgtagctgggagtacaggtgcccgccaccatgccgagcgaatttttttgtgtttttagtagaaatggggtttcaccatgttggcaaggctggtctcgaactcgtgacctcaggtgatccgcccgctttggcctcccaaagtgctgggattacaggtgtgagccagggcacccagcctctcaatgtaactttagtgagaagtttttaaatgcaaagagctcattatcctgggtaccagtgagtgggaccttgtcagggcacaggtggtccagaggccaggatgtggcacgggagagccggcctcgcacctgccgctgtccccctctgccccggctgccagcctgccagcaccacttccaggctcagtcctgggacttccgggagtgggcacctgctgcctgtgggcagagctgttcccctgggcggtgagacgagggtgttttcttcttacctgtcagcaacatcatcaaggcagccacctgtgagggcagtgagagcagcggctttgggaagctgccgaagaatgtctccagtgccacccactcagcccggaacaatactgggggcagcacgggcttgcccaggcggaaggaggtgacggaggaggaggctgagaggtgaccgatcttggggcggtgggggggggcctgagcctagaacacagaggtgggcaggcatcagggt

SEQ ID NO: 88412 - DNA, 1058 bp, Homo sapiens
ccaggctgtgttacgccagccggaactgcgggtcatctctgatggcgagcagggtggacagcagggccaccggctggaccatggcggtcacctggagatgagaaaggcccgcgggggggaccatgtgcctgtgtcccacgagcagccgagaggcggggaggacgctgctgtccaggagcccaggcagaggccagagccagagctggggctcaaacgagctgtcccggggggccagaggccggacaatgccaagcccaaccgggacctgaaactgcaggctggctccgacctccggaggcgacggcgggaccttggccctcatgcagagggtcagctggccccgagggatggggtcatcattggccttaaccccctgcctgatgtccaggtgaacgacctccgtggcgccctggatgcccagctccgccaggctgcggggggagctctgcaggtggtccacagccggcagcttagacaggcgcctgggcctccagaggagtcctagcacctgctggccatgagggccacgccagccactgccctcctcggccagcagcaggtctgtctcagccgcatcccagccaaactctggaggtcacactcgcctctccccagggtttcatgtctgaggccctcaccaagtgtgagtgacagtataaaagattcactgtggcatcgtttccagaatgttcttgctgtcgttctgttgcagctcttagtctgaggtcctctgacctctagactctgagctcactccagcctgtgaggagaaacggcctccgctgcgagctggctggtgcactcccaggctcaggctggggagctgctgcgtctgtggtcaggcctcctgctcctgccagggagcacgcgtggtcttcgggttgagctcggccgtgcgtggaggtgcgcatggctgctcatggtcccaacacaggctactgtgagagccagcatccaaccccacgcttgcagtgactcagaatgataattattatgactgtttatcgatgcttcccacagtgtggtagaaagtcttgaataaacacttttgccttcac

SEQ ID NO: 88413 - DNA, 1763 bp, Homo sapiens
agggatggagatgatggtgatgatagcggtgatggtggtggtggtggtggaggtgacggtgatgacggtgatgatggaggtgatggtaatggaggggactgtgggagagtgggtcggtgggctcgtgccgccatctggtggtaatgactgagtattacatggagtctagttctccctgcccccagttaggtgtaaatcgcattttgacatatttttgttgtgaatacacatgaaaaatgacagttttctgtgctacttagctgctaatgatcgaacaggaaaaagaaactgctttgactctgccatttggctggaaaatatggtaacagtccagggagagctgccccgctcctggagctgcttggcagtgcagttccctaactgtgccctgctcccagcccaggatccggttgtggccgtggctgaggatggccgggagaagccgaagctgccgaaggagagagaggagctggagcaggcccagatcaaggggcccgtggatgtgcctggacgggaagatggcaaggaggcaccggaggaggcacagctcgatcgccctgggcaaggtgctgggcactggctgggggtgcggatggggaagggcggccccgggtcctcctttgcaggctggacaccctgcggggtggctctcagggctgtgtgtatctttttcccttcagcccagcctaagttctggtcctttttgttttctctgtctttcaattcagatgaatgtcctgcccctcccagagcaacttgtttgcagctgcccctgttgaactttagcatcagctgtgcttggccaggcagcagggaggccggcaggggaggtggtatctgttggcctgtgtcacactgttgggagccagaacccagggaagaacccagttctaattccctgggaagggaaggaggggcctcagcctgaccccatctgtcccccgtgcccttgcagggattgctgtgcctgtgggcgaggcccaccgccacgagcctcctgttcctcacgacaaggtggtggtagatgaaggccaagaccgagaggtgccagaagagaacaaacctccatccagacacgcgggcggaaaggctccaggggtccagggccagatggcgccgcctctgcccgactcagaaagagagaaacaagagccggagcagggagaggttgggaagaggcctggacaggcccaggccttggaggaggcgggtgatcttcctgaagatccccagaaagttccagaagcagatggtcagccagctgtccagcctgcaaaggaggacctggggccaggagacaggggcctgcatcctcggccccaggcagtgctgtctgagcagcagaacggcctggcggtgggtggaggggaaaaggccaaggggggaccgccgccaggcaacgccgccggggacacagggcagcccgcagaggacagcgaccacggtgggtgtcagcctgggctcgtgtcggaagacactcccctcttgggctggggaggctgggcaggggcagcagaatcgatggttcctccctcagtccccagtctctctccctgcaccagattagcatgcaaatggagcgggccccggcagctggtggggacaggaagaggctggtggctgacagctactgtaatatctgtcacacagttgtttgccagaccactaaatgtcaggtgccgcgctgtgctcgtgtgtctgggcgcacacggggggcggcgcggggggcgcctgacaggtaacacgttgttaagtgcccgtct

SEQ ID NO: 88414 - DNA, 1001 bp, Homo sapiens
gctgccctgagacccaaatcgaggcgcgtggtgcagagcagccagagcccccacctccagctgtgctttttatggctgaagtgcagagcgtggacttgtgcactttctacatgtgtggagtgaaagtgagtgttttctcccctgcccctggtgcttctctctgcatttgagtcagcgacgccttgtgtgtctggaggccctgatcacttctccgggggagggtgctacgatccgggcagtgcgcggcccctggtcaggcccctggattttccaagctcaggtgagacgtctggagtgggcttgcattcctcctgctggccggttctgcggctgtattgatctgataactgccgaaatgaaagtcacggggtgctctgaaaccaggtgtctggcacgctggtccgttgaatgaccgcgtcctcaaaggaagttcttaggctgtgcaggaagctgtgctggaagtacagggctggaggctgggctggggctccgtgggcttcccccgccactgaggctgggcagccgctgtgctccccacaggccccccaagttcccggccatcccgtctgtgcagaactccacttacgcccttattcgggattccgagggaactactgaccgttcccttgtctatgtcacacgtcccgtggttggattcccacactccagtggcaggacaagcacgggggagcctggcacccaccctgtcctcggggactgcggcgtccactccgtggtgtctgtggcccagtccccggcagagttctcacagctgccttggggacttcagtgaatgctgtgctgcttccacatgcccagtgcccgctgctgctgctgggtccgtgttcccgccctggctctggcacagaagtgaaaggtgctcacacacactcctggcacgtggcagccacagactgggatttggtcactgcatgcgctgccccctcatggatgaggcatggacccaaggcgctatcacaagtgcccatgcggcctcctcg

SEQ ID NO: 88415 - DNA, 1329 bp, Homo sapiens
cctgtgttttctttcactttcttcaaggcggtttgggatttggctccgctggccgctgtgctggtccatttactggctgctggctttctgcatcccgccctcccccggcccacctagcttcctttgtgcccttgagcccctgccctgggacagccatggccatggccacctggacaccctaggagcacccccctggactcccactccagagtcctcgttcagccccatggcagagcagctctcacctgtgctctggcgtgtgcctggcccaactcccttctccccggctgcacacagatgctccatggccccagcctctcccttgtcgtctcgcccacccctttccagaggcccaggtccctgtgcaggtccctcggatgcgtctgctgcctgtgcagggctgtcatgtccttgcctggctggtggcttgggtccctcccacccctagcagcaccacactcctggcaccaggctgtgggaccgaagccagttttctcatcacacaagtgagaggctgcagtggggaatcgcgccccaggccgcctccttgtctgtgccgactctgatcatgcctgtgcggaggcgccgagatggaggcgccgagatgggccggccgcccaggccagggtgtgtttgtttaactttccctcctcttgacagcgattctctgagcagcctcctccggctgcttgccctgtaaactggctgctttgactctcagcacccgctccctggcgtggagcagcagcctgtcgttctgtagccttggggaatgttcgcatggtgcacgctctggggggtgtcctgagtgggggctgctgcaacgctcctgtcctcagcaacaccaagtcctggcctcagcgctgggacttccagtgtgcagagaatgttgcatgaaggaaggtcagagactctcactgggctgcagagaggtcctagaagtggagccgctggggagggcgtgcctctctcaggtccgctgtgaaatggcctgtttctatacagccaggtgctgcccacctacgacagcctggatgagccgtcagtgaaaaccatgagctccatatttgcttcctcccttaatgtggtcaccaccttctacgtcatggtaagagccttgccacgccctctccgcccctgtgtcatgccagcatgatgtgccgtggtgccccgtgggactgccacaggcatggccctggccctgtgtgctgctgggtttttctctctgttcccatcccagtgtctggaggctgcgcggggacctggggcagctccatcagcttccatcattccaggaccagccctgtgagcctgggtccaccctgggcc

SEQ ID NO: 88416 - DNA, 1750 bp, Homo sapiens
ggggctgggatgtgggtgggaagagctgcactctcctgccactccttcctagcggcgcgtgggccgggatgctgagtcccgcctgcgtcctgacctgccccgtgctctctcccctctccctctgcagatcgtgctctcctctctcaagcacggcctcttcagtgggcagtggctgcggcgggtcagctacgtccgctgggagggcgtcttccgctgcatccccatcttcggcatgtccttcgcctgccagtcgtaagtgtcctgctgtggtctgtggtggagttctgtgacggggagggcgagctgctgggagacgggaccctctctttctcgtttactgtgatcgctctttgctggctgctaaagagtgatgtcttgttcagtgatgacctttcccgccccaggttgagggagatagttatattttaatcgggaggtaaatcggcttcattcctgggacatgtttgggactagctggtgagagtccctggtttgccagatccccacaagcagagcattggctgtgggggatgcagcagcaacccagccatctgactgcacagagtcgagcgcttcgccagaatttagctgttctgagaatatttaaaaggaaatggcacaaacattgacttcagacggctgctggatgcatttggaggcctgcatgtgcgcgcgagcctgctttctctctggcacgcagggctctgtaaatgtggatcgggctcttccataattccagcagcattaccttctccaccaaaatgacaagagcgagtgattcgtgcccggttggaacatggtaaccggctgaaaagagaggcgtaaatccggcgcagacgggaaaagaccatcggcatgcggggggctggcagagcggcccctgtagcgttagtgggcatgcattgagccaatcgtaaactaatgtgacagatgaaatttgttcataccgctgtgtttacacccacatgcgagatccaaatcgtcatttcccacttagcgtctctcttggcagctccatctccaccagaacgcgccccagtcttgctgtttaatatcccattatgatcggtgacagaagccgcattcttccgccacgtacctagttaccagttgccctttgtgtctgcgtgtttgcatatttagaaataaatctgcagctggggctttttggtggtggccacgtagcagccggtgcacctcgttcgggtctggttccggagtcaggtgctgggttgaagcgctggagcgtgcggctcaacaagtgcagctttccttctgtcccgccctgaggatgtgcaggcccacggattcacctgacattctccccagcagggacatccctccttgtgctggccgctgcgctgacctccccacccctgtgccggccgccgtgctgacctccccacctctgaacccaggaatgttttctgagagcagagacatctcttccctcccacagcgtcactgcaccagagtgcctgtccctgttgggtggcgggccgcgccccctgcctgtgtgattggcctggatgccagctggggccaggtctcccttgtgccttcactatctggccgtttttggtaaatgcatacctggttatgcagaatggttgtcctaggcccagagaagcagccgggcagcactgagcccaggaggccctggaggtcagggtctatctggagaccagggtccccatcctcacagtagggcagaggggcacacacccaagagctgcatgtggatggctcc

SEQ ID NO: 88417 - DNA, 1047 bp, Homo sapiens
ttggccaggcacagtggctcacgcctgtaatcccagcactttgggaggctgaggcaggcggatcacagaggtcaggagatcgagaccatcctggctaacacggtgcaaccccgtctctactaaaaatacaaacaattagccgggcgtggctactcggctactcccagctactcgggaggctgaggcaggagaatggcgtgaacctgggaggcggagcttgcagtgagccgagatctcaccattgcactccagcctgggcgacagagtgagactctgtttcaaaaaaaaaaaaaagaaaaaagaaatcacatctgtcattcagcccagccttggggtagtccctggcggcagcccaggtgtgtgccagcttgccctgatggcatttcccgtaccccccgtccctgtgcagcatgatcgggctgatgctgggcacctgcatcgccttctacgtcgtgatcggcgacttggggtccaacttctttgcccggctgttcgggtttcaggtaaggatgtgttcagggttctgggttgttcagatgctgacggctgctctgaggccctctgtgggatcctcccgaggaccgagacctgggtgctggtcgggagaagcttctgtcgagcctgctgtcattctaggggcttggtggagtgcgggggctttgctgggtcacgtctgtgagaggtacacgcgaggaagcaagccaggcagagtctgacaccatgtagatgaggggcgggtgggggagcctcagacccgggcacagtgcagagcaagtctctgccagcccgggctgcccattggagggcagaggcggccaggccctcaggcatccccggcctccatggtcacccagagcttctgggggctgtggactcagcacttcttgcagggaccttggggtagcctcctccgtgcttgccccccaccacagagaggcccacctgacgggcccacacacctttccctcgctgccggggagcagagcccctcactgggcagggcaggcatcacggcacgttagggtgctaacagcgtagaaaggcttt

SEQ ID NO: 88418 - DNA, 1041 bp, Homo sapiens
atttagtgctttggaaaagaaaggctgactgaaacgttaccaagtaggtagaaaaatgaaaacaacatgtatattttgaaacaaagtggcaccagtagtttaattttagattagcttagcaaacactgtgtttttcatattcattatctttggaataaaaatatccaaaaaattttttcagcctgggcaacatagtaagaccccgtctctacaaaaaaaattaaaagttagctgggcatggtggtgcatacctgtagtctcagctgctcgggaggctgaggcagaaggatcacttgagcccaggagtttgagattacagtgagctatgattgcaccactgcactccagcctgggcaacacaacagtaccccatctctaaaaaaaaaacaacttttttttgatcaaggaattttcaaaccctcccgtgcagccctccaggctgttgtgtctgagttgtttgcctgatatggttggtgagcctgtcaggggaagacagggctacatgcctccagagccccccgggcagcatctggtctgggcgtggagaatcccagctttctgccagccacctctgggtgtttctggactgactccatgtcccagtgtccactgtgacttgcctggcagcagaactgcattctggcatgtggagcagtagctggtccttctcctgcaagtcaaagactgttatctttgttttttcaagacggagtctcgctctgtcacccaggctggagtgcagtggtgcagtctcggctcactgcaacctctgcctccagggttcgagtgattctcctgcctcagcctcccaagtagctgggattacaggcatgtgccaccacgccggctaatttatttatttatttatttatttatttgtatttagtagagacagggtttccccatgttggtcaggctggtctcgaactcctgatctcaggtgatccacccacctcggcctcccaaagtgctaggattacaggcgtgagccaccgtgcctggccccaaatgctgtcatctttgatgcctgtcggtgaagtg

SEQ ID NO: 88419 - DNA, 1026 bp, Homo sapiens
gcttccaaagccggccgcagcccggcgacccccgaggcctctcgccccgggcccctagacctctcactatgaccgcggccgccgcctccaactgggggctgatcacgaacatcgtgaacagcatcgtaggggtcagtgtcctcaccatgcccttctgcttcaaacaggtgagtccggtgggcccggagatcaccgccctcgcctcccccgcagagggggcgtctggctgggtcgtcctggttaaagttcccgccggggcagggcttcgctgggcgggtgcaggcggccgcgggcggggcgaccctctgggtcccggcgcagttcccgtagagaatccgtggatgagaagcgcacggcgttggccctggcagcccttgtcagcccgggccggaaagttccccacactcaaaaactcgataccgaagcaaagtgtaacaaagcaaaatgatcctccagaatcggaagggaacggtgggactccgtatttttacattttatcgtgtttttaaaaactctgacccaactgcacctgtcttcagaagcacacaactcaccactcccaggcttcgacactagatagggaccttggttgcaaggtgattaaaaacatccaccaggttatacacctaagatctgcgtttcacaaaaaccgcacatttggcagggggtggtggctcacacctgtaatcccagcactttgggaggccgaggcgagtggatcacctgaggtcaggagttcgagaactgcctgaccaacatgctgaaaccccatctctactgaaaatacaaaaattagccgggggtggtggcacatgcctgtaatcccagatacttgggaggctgagacaggagaatagcttgaacctgggaggcgaaggtttcaatgagccgaaggttgcagtgagccgagatcacgccattgcactccagcctgggcgacagagggagactccgtctcaaaaacaaaaacaaaaaactgcacatttgatctaatgtgtgcagacgttaccacagttggaaaaaatc

SEQ ID NO: 88420 - DNA, 1026 bp, Homo sapiens
acaagcaggatcctttcccacttctgaaagtcttcaaacccagtcaccccaaatgcaaacatcgtgtgaaaccccattaatcaggtaagaaagtagggagagctctgactcagctgcctctaattttgggaggagaaagagaaagtgagtttctctttcatcaagtaccccaaaataacagcgctccttcccttcagcccgctccaaccgcagccttgcctttgttgaaagacccctgtccttcctaggaaggggggcggggaggacaggctcacattccgaagagttctgtccccaaaactgttcgaagattcttttgtttgacgtgcacatgggggaggggaaggagcccgctcaggccacccggcctcctcggaccccgctcaggccacccggcctcctcggaccccgctcaggccacccggcctcctcggaccccgcccaggccacccggcctcctcggaccccgcagaatacccccaaagcccatgggcgtctcctaaccgtgtaagtccggggctccgggggctaggaggggctgctccaagacaagggaagctgcccgccagattggggccaatatcgggctttcccaacccaagcttcctccgaaaacaaccccctcaaaactgagcatccctactagaaaaaatccgcattttccaggaggacggggtgggagagcttcggggaacaaagcccggtcctcccagctctgaggccgaggcagggcgcacctcctcctgggcgaattcaatcggagctgcagaagagacaagcatttccaaactggcacccgctccgagcccaaggtgagggtggagaagggtccctggtggaagctgcaggaacactttgggccggggtctaccccgcgttcggcggctccccgaatcccgcagaaagacacgtttgcagcgaaaggctcttacacaccagccgggattttattcgttccctaccgagagtgcgctctgggagcgcgggaaacaaggaaaacgcacgtacctggcggcgctccgaggg

SEQ ID NO: 88421 - DNA, 1189 bp, Homo sapiens
aaggtccccggctccagcccaagcagggagccaggttgggggtgtgggaaggcagaagtcccagggatcctgggggaggctcaggttgtacctgaaggccacagtctcctcgacagacctcggacgaggttgtaagtgttttaaagaaactagagcagcagagaagagagactcagaagcccgtggcacggctttctcggcgtcccctccagcgagggggtctccattgctgcagttgccggttttgtccaaccaggtcaggaggctgcccggccccctccccactctcaaagttgcttgttaaacacagagtcgtaatttgtggctaaatataactagtgtgttctcacggaaagtataattcagggtgctcattgtatgaggttatcaacaagacccatctgggttaaattaaagtgattttcataaagggcagaagcgcccctttgcctggtttcccctgcctttttattagtgacagtgttattgttgcaattattagaggggatcaaggaaggtgggagttgccagggacccccaggctgaggagggagcctcccagcccccctccactcaccattgtcctgctgcccctccagccccctggtcactgtcacctctgcggctggagggctggagaaaggcccaggagcccagggaacctccaccatgccaggctgccttccctaaaggccggctccttccccccaggcagccagtctgggggtggacctggaggggcagggttctctgggaatctctgggccaagggatgcgctttggggatctgctggaataaagagtaatcggttttccttacaggaggttgacccgaaacagccctccgtcttcctgcccatgaggatgaggacaggaagccagacccgggagagaaagcccagatcagacagatgggggttgggagggcctagtggctgaaactgccctgcttggggacaatgctcaggcaggaccaatccaaacgagggcactgcttatgtggtccttccggagcatcctccaaggcagagcctggcttcgggccctccctgcaaggacacctgcctccactccctgccagaccaggcctggctgcagaggcggaggggcggcagggctgcctgtctccactgtttggcggtgtttacacgtgtcgctgtcagggtgtctggacagtgggggtcggggg

SEQ ID NO: 88422 - DNA, 1056 bp, Homo sapiens
tcaaatcccccaagtgctggtcccttcgtgtccccgaaagaggctgctcgcgtgggcaaaggccccgaggcgtcgagtgcgccttccagggcagtgcggaagctccctgccctcctccttcctccccacttctgcctcctcctcccccagtgttcacttgaagcaaattctagtgggctttttttttttcaatactgtttcaaaacagttgttacagcaaataactgcagacgggtctgctggacgcggtggagaggggctggcagctgcccagcacaggcgcctggccgctgggcagctcccgcaataccaaaataagctcccgagttcccctggaagacttgggccgccgggagctcaggctggcgatctgctcagaggaaacctccctactttccttttttactcttcctgctgtccagagctaacaaatgtttttaatttcagaggaacatggtgtggggatctgcagacttgccttccactggggagagggccagcgaggggacagagggggaggaaaggagaggggataatagacccgaggtcagtgttgatgctggagggcccaggtctctgaagttcctgcagctttgcaggtgagcgggctgcaagtgaggctaggcctgtggacacccagtggggcctggaacagtgccaggagtggccttgaaccccaccttgatccctctccagcaggatctggagtcacttccatgggcctggcatacaccactccagatttgccctctggcctggggagcagataaccccccgccccacataaccagctgcgctcctacacctagcaggccggctcacatcaccctttaacgcacactatattcacacacacacttgtgcacagtcttgaatgtgtgcccacacatctgcctgcacacactcatgtgcccacatgtgaatcacttggaagtgtacacaaaaccaaacccacagcacagatgggcagacaggtgagcctcgtgcagcatgtgacactcccacatgcacaagacatgtgtgcagaggcatatcacacacgcagaagcactcccg

SEQ ID NO: 88423 - DNA, 1924 bp, Homo sapiens
ttagagtggtgtgtgcgccgggcgagcgttaatagggactgctggtgtaagacgagcaaatcctgtttctatataaagccttaaagtgtcagggcgagaatgggtttgcagggatgcatttgccttaacgagtgcctctggtatcccgctaaagccggacaaagcgtggccagagtgcggcccagcctctcagcctgcggcccggggaggagggcagcgcgggcgcgggctgggggtggcgcggggcggcgctcaggatttcggtgcaggcgagagtgcggcggatttgctccaagaggagagcgaggcggatttgctccaagaggagagcgtggggcgccgtgctgggcctcgcagggacggatcctctcgggcggtcccctctgactccctgcccgagaggatcagtccttggcagagcgggcccaggcctccagggcagccctcttcccggtggctttgatatgagtgtcgagggaggtcagggtaggggcagctaccacgcctgaagccctagaggtcaccaggcggcgcgggtagattcgggggaagcgcgcagggctgcgctagggacccgccgggtcaccctggtacatgggtggcttttgtttacagtttgttctaaacatcagaaatgtttgtcgcttttaaaaacaaaattggcagtaacagttattattggtagcttgatgaactgtgaatactaataaaattatatctgctttaatgggattacaattagtgtgtggattaaaacggatggcagagacggggctagaaaggaaaacgtcggaaaaagggagggcactcaaagaaaaacgtacattttctagaaaaaaacaaacttgaaattgcttaattgctaacgggcttccagcatttgcagcgccaggagattggaatgggggagccgcccagtggaggggtctccccagcacttcccgggttggcccacacccgcttccctccctgcctgggcctttggcgaggctgcccttttctctctgttgcccttccttctttttctccctttcttttttctcctctagatttgtaactggaaagagaaggagaaaaagcacttgcctgagcgatgggtgatttaaaaatatctcttctgctgtccctgtggttatcaagcttgtcttcctgcccctgcatgggagctgctgcccacccggctcaggtgcacggggcgctgaggctggggccgccctggcagaagggacagctcgccagcctccccaccagcccctcttctggctgaaggctggtggcccccactgggggtagggggattgtgtgcaccccacctccactgtaccgtgccctccagcctggcaagtaacagcacgacagagacaggggcccctgacactgaggcttgcatgttggtgcacaggcaggctggggctgtcccctccgggaggcaaggccaaattccccatcaggtcaggtcagcactctccctgaccccatgccccagctcacatcctggccaggtccaggccagctgcattctcccccttctgcccttacttccaggtctaggcagcacccgggtaggtgggcgcctggtcgggtggcctagccctttgtcttgctcattctaagtttggccacgtggttcttggcgtgtaggccccggagggctgtgagaaacggctctgggctctggcctggcctgtgtcctccctgcttcttcttgatcccaggtcctcccagcctccccaagcgcagggtgctctagagggcgctggaggcccctcggggctgcctctttcagggtctgaagggtcatgtgtccccgtccctggaggccccatttcctcccccctgcggaccgaagagaacgcttgtgctcggagatgttcaacccatttgtgatgggcaacttggtcatgcagacatccagctagaagca

SEQ ID NO: 88424 - DNA, 1095 bp, Homo sapiens
cggcttcctccccgcgctttcccggaatgaggaatgtggggcagggccagcaggggggctgctcctccttcctgcctcccctcccgtcctgcacagctcccttgggagcctggctcgtgggaagtgtgcttgggaccgcccatcactccgttcccagccactcctggtgtcccccgcctgggcgggccctgtggggagcggggaaggtgtggagcggaagccagtgccgagggaagaggggagcctgagtgggtgtgggtcgggggtgggagctgacgcaggcggcgggtgcagccgccagactcggagccggggaggcccatgccagcagcccggcagctgggcttccggaagcagcgggagccgggagcctgggaagggcctcgctgcttctctggagctgccgccatctcaacgaggcgtttttttttttttttttttttacaacccatttcacagtttccagaaaaggaggatgctgtctcggcggctcacttaactcaaaacaaatgctcgctctgccggctccgcgcccgcctctcccggctcccgggccctgccgtcctcttgttccgtctgccttcagtctggtgccacagggcggagcagggtcagcctggcaggagagtggggtggggcacagtgggcacctggccatccgattgcccaggcccagcctctgctgtgtgggtcctcgggaccctggatgggggctgctggcacggctgctggaccgacccttacagagggagtggctctccggggagtcctgggctccagggccccagcatgctctgtacccctcaggctgcccagcatgtgttgcccttcttagccatccatggcaaggagcctggaagacaggttggcaggaggcaggctagttcccatcggctgtcctggccacttagggccacctctgctgtaagcccatgtggccagctctcacctactgtgtgccggcctccccacacagcacccctgggccggggccaggctcactgggcaccgagactccagcccagctgttgtgcagctgttccccagtcttcccgctgctgggccaccctgggacagcaggtccaggcacagcct

SEQ ID NO: 88425 - DNA, 1048 bp, Homo sapiens
acagccagccgctcggccctcacgttcaggcagctgctaaggcaggccggccggcactggcaccacctgcactgcacggagggctggggctggggctgggcgggtctgagtctcagagctctgccagtggcctggggtcttgctggggaaccagaagccacactccttgtggctggtgtccctggtgtccagcagacatgctctctgcagcccctgggctgggttctggtgcctgcaggcctcccaggccatgctcagccctgtcctgacctgccagctgtgcttcatcccttgggtgggggcaagtgtgccccacacagccagagctgtcccaaggcccagggccagccgcgtgggtggctgggtgtggctggctttcctgtgctgggcaggggcaggccgctcagaaatgtggctgccttgagggacagacagaccccttagccaagagaggggcctgtctggcatgactcggagtcaccgcctggggttttggggctggggcctgtgcaaggaactctttgcccccgtcccttccccaccctgtgcagatctcagagccggaagaggcctggccatggtgggaactcggcgtcggatggacacacctgtgacctccagccagggtcgggggaggctggccacaccccagcagcactggcccctggcctgggctgtccactgggccctggggcctgccttggggaggccaagtccgggcctggttctcctttggccagggccttggcgcagagtctgtccaccgtgccccctcctcccacaaaacctccccagagtcccttttgttgcccagcctgggagcttccgcgatcctgagtgctgctaggagggaacagaggccccctcgtccgtcctcccctctccccagcccatcagcaattcaatttgtgccgcaccggagggatggcattagtggagtcagagttaatatgatgtattgatgggttgatttccccccggcggctgcgtgctgggctctgcgggacatcgctcctgggctgcctgccggcttcttgcctccctgggg

SEQ ID NO: 88426 - DNA, 1092 bp, Homo sapiens
gggctgcacgaggcccagcccccagcccccagccccccagccccgtgtcctggtggacagaggggctgctcaccccattggcagcaggcatccctgaagaagggatgcagactttgtctttgctgagaagtcagagccggtggggccttggggaagaggaagctcaggcccagcagagccgagtcctggtgccagcgagtcccctcagggtaccggagagggcctggctggaggtgggatgggtgtgggtccttatctccaagttgggtttcctctggtagggcgacatctcatttgcattttaaaaagttctccttggggtgacaccaggaggctggagcaggaagccatcggttagttaccaggttccagtgagaagcgatacaggtgtggggccccacaggggccggcatcggtgatatctaggagggagattgggggcagggagggatagaggggtctaggtggcccccggtttctggcctgggctatgggagggtgcacctggggagcagcagttggacggtggggtgagttctgcttcagtgcagaggggctggggcgtctccccaaggggatccgagaggtgtctggacacacggggtggggtcagtggggaggggtggactgggaggttgtcccgactgtggagagggacgcccaggctgtgggggatgagaagggaggtggggacagatggtttccgcacagctcctgggagcccgggagcccaggagccctggcgtttagggctggagctcagggtgggggcagaggagaggcccagaaaggcccccacagggcctgggaggcggactagacaccctgaagggaacagagggaggggaccccagtgagcctgtgctcatgagtggccatgatgaccccaactctgagtgtgagctgtggggtagggacccgaggccagtctgcccaccctctcttggctgcccctcagccccttctccccacctcatactcactccaggacctctgtgtggcctgcacttcctcgcctgcaggagcccgagatttgctaaggctcaggagggccttggccttgcccttgtcagccagctgcaggggagcagg

SEQ ID NO: 88427 - DNA, 1029 bp, Homo sapiens
gccgcccagttccaggtaccgcccctagccacgctcacctgggccgggcacttctccccaaccctgcctggccggacctggctccaggagacccctgcatgcctggcctctggcaggatgaacccaagcagggggcccactggggtcaggggatcctgagcctgaccgagcttgcccccatccctgacagcggaagcccgaagaccagcacctggatctggaggagcccgcccaggagaaggccccaaagtccacccacaagccagttgccttaacccccacggccccgggcgccccctcacccgctgcaggccccaccaagctgccaccttgctgccatccgcccgacccaaagccccccgccagctcccccaccccaccacctcggcccagcgccccgtgcactttaaatgtctgccctgccagcagccccgggcctggctcccgggtgcgcagcgccgaggaaaagaatggggagggtcagcagtccacggccgacatcatcacatccgaaccaggtgagagtagccgcctggcccggcccactgtgctccgctccaagccctcccacccctgcccggcagggctgcgctgaatccgggctgcctgcagggaggcgccacacctgcccagacccagggcagcatggctgttcccttcctctctcttccctcttcccagtcctcccaatgaccttgggagaagcacacagtgccccagccgcccccttcctggccgtgggctgacgaaggcgggaggaagacggggtcccgctggctgtcgtaggggccctccagcaatgaaggcggggcctgctggtggtggtactggcaccctgggggcactgggcatgggacttgaccaggctgccattcagggtctcagcaaagctgggagagggaggggcagcgaggcggggtgcctgggtgggggggtctcgggcctggcctcggcccctgccacccgcccatccactccccaccagcctatttgattctctctgagtgggactgagaggtcacactggaa

SEQ ID NO: 88428 - DNA, 1048 bp, Homo sapiens
gcctggccagctcctacgcgcccttcgtcggggggaccgggccgggcctccccaggggagcccacaagctgctgcgggctaagaaggccgagagggtggaggccgagaagggtgggcggcggcgggcgggcggtgagttcctggtcaagctggaccacgagggtgtgacctcccccaagaacaagacctgcaaggcgttgctcatgggggacaaggacttcagccccaagctcgggcggcccctgcccagccccagctatgtgcacccggcccttgtgggcaaggacaagaaggggcgggcacccatccccccgctgcccatggggctggcgctgcgcaagtacgcgggccaggcagagttcccgctgccctacgacagcgactgccacagctccttctcggacgaggacgaggacgggccggggctggcggccggcgtgccctcccgcttcctcgcccgcctgtccgtgtcctcttcctcctctggctcgtccacctcctcctcctcaggctccgtgtccacctccagcctctgctcctccgacaacgaggactcgtcctacagctcagacgacgaggacccggctctgctgctgcagacctgcctcacccaccccgtgcccaccctcctggcccagcccgaggccctgcgctccaagggcagcggccctcacgcgcatgcccagcgctgcttcctgtccagggccacggtggctggcaccggtgcgggctcaggccccagcagcagcagcaaatccaagctcaagcgcaaagaggccctgagcttctccaaagccaaagagctctcccggaggcagcggccgccctccgtggaaaaccggccaaagatctcagccttcctgcccgcccggcagctctggaagtggtcggggaatcccacacaggtaggtccagcgggaggcgggaggagctcctggttcccaaggaaaccggggcgggctcatgcgcccctgctgcccttccctctcctttttcatcttcctacttgatttcaagttaaaaaatgtggaaaactcaagggaagaac

SEQ ID NO: 88429 - DNA, 2041 bp, Homo sapiens
gcctcgtcgcgccttccccgggaacaaaaggcggggtgggccgggtcaggcggacggggctgggggggcgccgggggtccagggcggggcccggccgcagtgcagacttccgagccgtggacgttacgtaaaaggcccggccttcggttccaggcggttgcgatcttggaggccacggccgctggggttggggcagggccgaggcttccccgcgggagggcattaggtggctgtggggaggggaccgtgttacagacgcgcccgcctgagtccatccttttccgggcaggtcgcaatggaagaagagatcgccgcgctggtcattgacaatggctccggcatgtgcaaagctggttttgctggggacgacgctccccgagccgtgtttccttccatcgtcgggcgccccagacaccaggtgagtggatggcgccgcggggctcctgggttctgcgttgcggggtgggttcggtgtcgccggcgaggctgacgggtcgtcccctgcagggcgtcatggtgggcatgggccagaaggactcctacgtgggcgacgaggcccagagcaagcgtggcatcctgaccctgaagtaccccattgagcatggcatcgtcaccaactgggacgacatggagaagatctggcaccacaccttctacaacgagctgcgcgtggccccggaggagcacccagtgctgctgaccgaggcccccctgaaccccaaggccaacagagagaagatgactcaggtgaggctcggccgacgcccgtgctcctcccgtcctttccccagtcattttctgcccggcttgatttctgacatttaagtgtttctttcgctgttccaggctctgttcctctcccggcatttcctccctgaagcctccaggtttctcatttggtttctgcctgcgttcttttcttttctccacacatcacactggcatgcagcatgttgtggcgtgtgagcatggggtggccgtgggtctctgtccctgactaagccgccccttgtcccttctcagattatgtttgagaccttcaacaccccggccatgtacgtggccatccaggccgtgctgtccctctacgcctctgggcgcaccactggcattgtcatggactctggagacggggtcacccacacggtgcccatctacgagggctacgccctcccccacgccatcctgcgtctggacctggctggccgggacctgaccgactacctcatgaagatcctcactgagcgaggctacagcttcaccaccacggccgagcgggaaatcgtgcgcgacatcaaggagaagctgtgctacgtcgccctggacttcgagcaggagatggccaccgccgcatcctcctcttctctggagaagagctacgagctgcccgatggccaggtcatcaccattggcaatgagcggttccggtgtccggaggcgctgttccagccttccttcctgggtaggtgttgtgagctaaaggtttctactcttacatcctcggtgacacagcatcactaagggagggctctgtcccctaggtatggaatcttgcggcatccacgagaccaccttcaactccatcatgaagtgtgacgtggacatccgcaaagacctgtacgccaacacggtgctgtcgggcggcaccaccatgtacccgggcattgccgacaggatgcagaaggagatcaccgccctggcgcccagcaccatgaagatcaaggtgagtcgaggggttggtggccctctgcctggctcgggagagctgactggggggcgctctgtgagctgaagccgtgcctggctgtctttgcagatcatcgcacccccagagcgcaagtactcggtgtggatcggtggctccatcctggcctcactgtccaccttccagcagatgtggattagcaagcaggagtacgacgagtcgggcccctccatcgtccaccgcaaatgcttctaaacggactcagcagatgcgtagcatttgctgcatgggttaattgagaatagaaatttgcccctggcaaatgcacacacctca

SEQ ID NO: 88430 - DNA, 1095 bp, Homo sapiens
tcccaccaccgcagcagcccctgaggccaggaggcagtgcagggcattctggacccggagggccagagaaacaggatttctggggtttggacttggggtgagtttgtaactgttgctgccacaccaccaggagcaccggctgcccctctgggtggcactaccaggtgccccacggtacccttgtcacactgttcacacctgcccggctgcccactctgggaccccgaggtaggagggtgctccctgagaccaaagcacaaaacagcatgcagggagctcctgcaagtgcccgtggtctcgtgccacaccaaggaagggccagcgggtggcctgtggccggaatgctcaacaactaggtgcctccagccggggcagtacccagcactgtgcactattttcagggccactcagggtggcgctgtggcccgggggggggccctgagccccagcccccagcctcctccctcagcctgggctacggcccacctcctggtgctggtgttttcatctggggagggtgctcgcgccgctcccgctgcaggcactgtccgcgatgagtgcgggtaggagccgtgaggtgcttctctgctgtgacaaacgaccctgtctgtccgtgaaccttcaggcctcggctgttttctctcaccccttcccaccctctctcactgggctccttccagagccctggcgctgcttgggagccctcaccaccggggtggcctctgaggaagacgcgtccctgtgacccagttacccctgaggagggctctgctgcaagggggtgtctgggaggcctggggcccctgcctggctctcccctgcgttcctctctgtggagtgggaggggcctgtggggtgctcctagtcagggtttgtctccctcagtggttgccacatctaagggagcacggccgccctgatgacactccaaacccggcctcttcagcgggtggagacagtccaaacccagcattttcagtgggtggtgacactccaaacccagccttttcaatggggccatggccccgtgcttgctgggagagctggggccaagcgagccacccaccgaggcaggcctgcaccccttaacggtcc

SEQ ID NO: 88431 - DNA, 2083 bp, Homo sapiens
ctgcagccatgtgggcctgtcagcactgcacgttcatgaaccagccaggcacaggccactgcgagatgtgcagcctccccaggacctagggcgcctgccctctgctggctaggaccgggcccagcccagcccttcctgaagccagaagcgttgctgagtgtgttccctgtaactgccccatagtgggcagccctggaggaacaaggggctggctgtcctgggctccctgacccactgaagcttctcagcacgttcctccctggagagcgggcgccacggctggtattctgcaggctgaatgcagtctccagactggaaacgcagagcggctcctcacgcctaatcctgttgacaagtcccccgccgtgttggaaagacctctcgcctctacgtggcacctggaattggggcgcacagggaggggccgatgctgccaccacccagccttctctttattttcagtgctttttgtttggcctccctgcccccatgtttttctggctgggagctcttggttacccccttgtctgactgcttggtggcaggcaccctgcctgtgagggccactttcctcttctagtagctgttgtctggtggggacgcagtggccctggacacggctcccctctgcaggtctgcaggtcggtttgctgcctgccctcctcctctcacccgatgtccaggtgggattttaaagtctgcattggttataataacagttatcagtaattcctgcccagaagacttttatttatttttttttaagataaaaactgcacaaaaggggagtgagagagactagtttccacatccttccctcctttagtgaagcccccgaggttgtgtccagggtgatgagtgtggacgggggcaccagtcagttctcccttgaagtaaacctcagtgcctgagacttttctaccaagccacacagctgcagcaactgcagatactgcgggctgagcaggagcagtggtggcgcctgccctgaggctgccctgcgatggcctgggtgggagagctgggtcaccggtgccgatgctctggccctccccaatacgctgcttcgtcccactgcaccgcctggctgagggcgttaggggctgtgcctcttgtgagggccatttgggacctccctggggcactgcacaattgatagtgtaccaatagagggagactgggcgatctggaacagcacgtggtggggtcctgcttgtgtgctctgcgttcctctgtggcgtggccaggccggggcatggctcttacccggggagtggtgggcatctcgatgcttctttgccttaatgatggccacatctgggctgctctgcacccacgggagaggctggcccagctgcagactgcttagggacttctgtgtccatcctggggggtaagcccacgtgacccacattcttggcactatgaacagagaacatttgcctgttggcttctgaagtggtcagggccatggctgacacctccaggtccgcctggcatgggacaccaagtggaaggcccaagcagctcatctgctcttgggaccaggggccagttgggttgggtctggtcacggcagagctattgtggagggtcaggaagggtggagaggagctgggttgaagcggactgctgcggatgcaactcccagcttgcccaccgcgggctgtctgctctccctcctagcagctgtcacactgaagttttgtcctctgctgtctcctctggtcctgagatgagctgtgagcctaggtggccaaggcttcctgcattgcttccctgtgagtccaaggccttcccccaccactgggcagaggctggacagcacggacttctagagagagccgcgttgccagttcctctcccactcgctcgtccttatccaccacgctattatagtttccgttgtcctccaccagcatttcccttactctgaagttccggcattcacatcattcatgttttcttttgtcttttagctaaaggaaaagcattggcgatttgtctgattctggttttgagttactctttgttcagtaatgcactttattttattgtccaaagagagtcagagctaagcata

SEQ ID NO: 88432 - DNA, 1068 bp, Homo sapiens
ttgtccccctcatttgtcctatgggcagagtgtaggcagcagcttttcacaagaagcttgttgatagaaagattaattttttcacctttagcatttccattgagtgtctgcacctctgtgaggaagtacggtttcatctgttacaatcgaatgggaagcagaggtgatttagctctgcctccagcattagagttagacagtttaaaaaattcctgttctaacagtttcagagtcacagcctctgctttttactcatatctcccctcctcctaaatcaactctggttttattgccttggcccagaaggcttggccagcttccagaccccaagctcacagctgcacagttggcatttttaagagacaccgttgggggagaagagggcgagtgctttgcagaagtggctgctctgggtagtgggggccagtgggcagcagcccccaggaggttcttgccgtgtgtaggggtccgactttggctttttcttcactgttcaagccaacaggaaatgccaaagagaaaggagcaaattctttctgagctgctccgccactgactcagaacttttccctgaaggagacagaatagagaggctcctcctcccccggcctttctctgtcaggaagcctatagctgttcttgtatcctgctagtttattttgtgtctgtattttgtctcaaaaccactcactcgggtatttgacatcaggcaccctgtgcctcttccctgcctgtgccttccctagtcagcccagggaactgcacctcctgctccgaggttcagctgctgcccatctgtctggacaggtggtgaaaggtgaggctccctctacaccagagccaccttgctagtatactgcactatttttgcagtcatctgttggaagacattctctggaggtactgagagctcctgaaggctttatccgtttctcatatatgaattatttttttttaagacggagtctcgctctgttgcccagaccggagtgcattggcgcaatcttggcttactgcaacctccgccttctgggttcaagcgattctcccgcctcagcctcccgagta

SEQ ID NO: 88433 - DNA, 1429 bp, Homo sapiens
gggaggcggagcttgcagtgagccgagaccgcgccactgcactccagcctgggcgacagagcgagactccctctcaaaaaaaaagaaaagtaaccgagtgtctgaaagctttgttttttctgagttatcctgtggcggctcagatcctggtgtcatttgtgccccttcttgccagttcttagaaaagcagcacattcaggatttcatttaccttttctaaagcagggttgatgccattcaatcaatggaattcactgttgtcctggcataaagcccacatgcttttgtgtttgtgtgtgtgtgtgtgtgtgtgtgtttgtttgtttgtttggagacagtcttgtagagacggagtttcaccacgttgtccagtctggtctcaaactcccgacctcaagccgtctgcccacctcggcctcccaaagcgctgggattacaggcatgagccactgtgccctgggcatccccattgcttttgagctaacaaagacatcgatccctggatttctcttggtgtcaagaccttggcgccactgcttccagaagtggcctctggcgggtggcgaggtgttggggccacaacctccgacctcctggtgcctcgctccaggtggagataaagctgctgacactttgacggctgccaaacttagaattaagacaacctcctcccagcgcattccaactgacattttctaaggcccataaaaagtaattgccttttaaaatggtgtgtaggcctagggattggctggcgaaaacatctgagtgaaggcttgggggagaggtagaagtgacctgtttccccagggaggaaagggggatacaacacctttattttcttggggagtggaaaagatgcagttgggtagttaagtttgaaagagaatagcatgacacaaaaaagagagaggggcatttaacaagaaaaatccctagagggggagattaaagtgaacaggtgctggaaaaatgtttctgcatattagagcttaattagatttgaagatgaattccagatgggctaattatgtgtgagttgttgcaggtttatttcttgtaggggcaagcctgtatttttggaaatggtgatttagtttgactggatttgatttttgcctcctaccaaatctccattgagaaaccacctcttttggggccccaggaccccgtgcagtaggccctgtgtctttagcgcccccatcacagccagcagagcgcagaatgcggaagcccatcctgactggcagccactcgtcacgtggaaggaggacacacgaccctcacccaagtcggtggaaagtcatttcagtgtccaaggaaggcaaacagagcagagctgtgtatttgcaggaatgtagcctttgatggggcggggagcaatacgtgaaatggaaatagagtccaggttcattctcctgccctcctg

SEQ ID NO: 88434 - DNA, 1056 bp, Homo sapiens
tgggcagttcattatagcagtgagaaaacggaccagtcgtaccgtttatctgttgagagcttcccgtgggtcaggtgttaggcctggggcgccacggtgagcaggtccctcatggtccctcttcttggaaactgtggaggtgtcctgttggggagcagggtgcgccgaggtggccattcacagtgctgagactagagtgtgtgagaggaagccacgcggagtggaatctgctgaagctatgtacctggagagcacagcatgcacccggcggggccagtctagctggagtggcttgtggtggacagtgggaggccatggaaagacttatggaaagtgagttctggaatgttcctgctggaggtgtcaggaggggtggtctggaggcgggaagcttttgcaacaatccaggcattggatgccagtagcctgagtcaggagaaggcagcaagtttagaggagtgagtggggctgaaatccaggtaggagaggcagtggacaggtgctgacagccggatggggtgggcaggggaggtccccgctgtagaagacccatcctgggctgcagtgtggggaacggtttggagttggggagcccagtgagaagctggtggtgttggcaatccaggccacatgtcagttccctgtggccttggggacaaggatggtgtgctgggactgagaggtttggaggcctggcaggtgtgcagagaggagcacaggctcaagccaggttcctggttttggggagcagggttggcactggtgccagagtagagccatgggtctgtgtgggaggatggtgagtccaggtgccagcacgcagagtttgaagatggagcaggacagacggttgccaggactcaggtctggaagctcaggcaagagatacaggccaatagttcccttttcagactatctgtggagaaagcctaaattaacccagaagtagatgagccaagccgtggttcagagggagaagagaagagtgcgttgagctaacccggaagtagatgagccaagctgtggttcagagggagaaaagaagagggcgttgag

SEQ ID NO: 88435 - DNA, 1004 bp, Homo sapiens
tatttgtctgaggctgctgtttatcatgttgttgtctctggcaataaaaatgggaaacaattgaaaagccctgtcccaagggcatattaagttacagctggactctgggatagcatgtggttactaaaggtatgtgtttgcaaattatttaaagataaggggtaaaacttagaaagcaaaattaaaaatgcatctatacctagagtataataccaattttttttgttattttcttgaagacacgtataggcatttgcacatggatgtggacatacatttacatgcactcacacatggggtgggagtagaagcttcctgactgtccttcaggagggaggagagtctacagctttgccctgtcccatatgcagccagtaagagaacgaggaagagccttgtggacagatgaggggagctgtgcagatgctggccttggagaagtgatttgaaggcacatttgtgtcatcgttcacgtgtagttttttaggaaagcatatgggtgtacacatagtcctgtgaggaccaggagcttcccgagggactagggccagccagcctcactcatctctggggcagccaggtggcaggacgtggggcttttctctttcacctttcttgtgaaagggaacatttgtcccctgcagaaaaacatgaagaaaacatatttaatgataactactctttgcatctggtagagttcttgtttccttttctattcttttaacttcaaaacaaagacttgtaattatggagaataaatgagtgcatttattgactatatggccaaatcagaatgtatttaattggtcttgtgttgatggcctttggttcttcctggttgttacagaaagtgccacatttaacaccctatacatcctcctgtgacatctttgtatatcttcaaaatagaattgctggggaggaaggtttttcgagttttgatagatatttccaagtcgctcactgaaaagtcacactaacatctctcttgataattaggaaga

SEQ ID NO: 88436 - DNA, 1070 bp, Homo sapiens
aacatcctgtttctaacaaggagtcagcatcttgatttaggggcatatttgggttcaaattctggaagttctcttgtttaaaagagattggtccaattttttgacctaatttgttataatcttacagttcataatcttgaaattacttaaataattttctgcaagacacaagtttctctttttattttattttattttttttttttgaggagtcttgctctttcacccaggctggagtgcagtggcacgatcttggctcactgcaacctctgcctcccgggttcaagtgattctcctgcctcagcctcccaagtagctgggattacaggcacccgccacaacgcccagttaatttttgtatttttaatagagacgatgtttcaccatgttggccaggctggtcttgaactctcgacctcaggtgatccacccgccttggtctcccaaagttctgggattatgggcgtgagccaccgtgcctggcctaaaatatgagtttctaagccctaatttttctcagtttgattttgattttgctttatttactgcataattaaccctttaagtttcattttctctgttgccaccaccttgggtttttcattcattggggcatctttaaagacagtgaaagtctcccagtgggctagtcatgtctgctgggggtggatgggaagagttgtgtgtcaggtagtgctggagagggtcatgggccgcagatccttcccgaggacagaagtgacaattgccgggactcaactgctgctcctgtggcctcgtgacgggcttctggtgcaggaattcacaggcagaggcgggcctaaggatcacacagcacacaggcactgctacactgaacgtgcaggggttgctgggtcacaggtttcagatcctcataccctcagatgcttccttccggccttgaggtggagctcccaggagcagctgtgtgaagtctgcattatattaccccttttgtattatgtgcctttctctaggaatcctttttcttagcttgtcaggaaagacctactctctgaaatgtttatttgcttgcttgttgtctgtct

SEQ ID NO: 88437 - DNA, 1146 bp, Homo sapiens
cactgcgagctccacctcccgggttcacgccattctcctgcctcagcctcccgagtaactgagactacaggcgcccgccaccacgcctggctctggctaattttttgtatttttataaaatacaaaaaaaatagagacgggatttcatcatgttggtcaggatggtcttgatctcctgacctcatgatccgcccgccttggcctcccaaagtgctgggattacaggcgtgagccactgcgcccagcccagatgtttattttttaagatacaaggggtctcactctgtcacccaggctggacttgaactcctgggcttaagcgatcctctagcctcggcctcctgagtatctgggaccacaggcatgcaccatcacaccctattggtttgttttttaaagaactaggtaaaagatatttatgaatggtttgtgttagaaaaacaagtgatttctttttgatggcatgttttcatcagcccactcttgttaactctacagaagtacaggcatgtggacaatatcatgtttgagaatcacaccgtcgctgaccgctttcttgacttctggagaaagacagggaaccagcattttgggtacttatacggacggtacacggagcacaaagacattccccttggcatcagggctgaagtggctgcgatttatgagccacctcaggtaaacatgacgggattcaagttcctgagtttctgtgtttggaggctgtgggggacgccctttcggagaggccttgccctgttcgctttgttgtttgttccccctttgtcacacaccggtgcacgtgcacaacattttctgagttattggagagtgagatcatggctcctaaaaccttcagtgtatgttactaaggataaggatattttcttacacaaccggtacatttgccactattgatccagtgtttttatctcgtctgctgtgtccaggtttgctcattgactctgtagtgtccaggtgctcagtccttgtgtcattctgtgtctcttccaccatgcagcagtcactgtcttaggaaccatggagaaggccacagacacacctcagcaccaatcaccagagtgtcaccagagtaacaaaaactgccaccaaaataggactgataacaatttaagatttgtttgg

SEQ ID NO: 88438 - DNA, 1120 bp, Homo sapiens
caacagtagtttttattttagcctaaagcagagtaaagatgccttaattatatatcctaatcagatttttcccatgaataagaattttttacaaatatctaagtactgggctaatgtcaaagtttctgacaatttaatgaaacctgtaggagcctcatgcccgctcagtggcacaggtgagatcagtagatattctacagtattcttgaaagctttctcggatgttagtgatagatggtaaaaaacaccacagtttggtaggaaagtagttgtgtgttcctgtatggttgaagtatgtgggacagaagctgggattcggaatgtgctggaactgtaggtagagcttccattagaatcatccttagcccatcttccctgctgctgccacgtgcttagctcctgagacactgttcaggaggtataagatacttagcatgtcatttccagcctcttgctcaacttttcaccaatgtgatgtttaagttgcttctcttctatgtagggggaagtttgttgccctggagaacatcagctgcaagattaagtcagggtgcgaggggcacctcccgtggccgaatggcatctgtactaagtgccagccgagcgccatcacgctgaacagacaggtgagatgttccctgtctgtctagatttgttttcatggctgagaaacggatatttccagaagagccccttggagtggaatgctattagcactatgcgtggtggattttcagtactttttgatggactgaatgatccttttgtggaagtggtacactgaatatatcatttttaaggcttcttgctcttggagatatggagtgcgcgccctcagttctctgttttgctggctcatatggaggcagaatgttcctgatgattatttaaaatcctcagtggttgtgaggaaactggctctgaaggttggtaaaggggcaccccttggaccagctctgagcacctgtccaggctggcttaaggagagaatgtggctcaggaaggagggagcgttccggcctttctggatgttctgctgtccttgtcccgcctctgagtagcctgcctcgccttcctcctgccgctgtgcccttagagaaaacggctccttagagagaat

SEQ ID NO: 88439 - DNA, 1250 bp, Homo sapiens
ggggattcaccatgttggtcaggctggtctcgaactcctaacctcaggtgatactcccacctcatcctcccaaagtgctgggattacaggcatgagccaccacgcctggcctggaattgggtttttacaattgaattcaaaaatggaaattgaacttttcaaacatagccattggccatgcatggtggctcacgcctgtaatcccagtactttgggaggccaaggtgggcggatcacctgaggtcaggagtttgagaccaccgtggccaacatggtgaaactccatctctactaaaaatacaaaaatcagccgggtgtggtggcaggcgcctgtaatcccagctacttgggaggctgaggcaggagaatcactggaacctgggatgtggaggttgcagtaagccgagatcatgccactgtactccagcttgggctacagaacgagactgtctgaaaacaaaacaaggatagccattaactcttgtttgcttcaaagtcttaaatgttttacaaagtttcatcattgacaagacctttgcttttttggccactttattcattttaattgacacctttgtgaacagtacaaatttctttaaaagagcaaaatagcaagaggaatttggtaaatgatgggcactttccaaatttggtgaatactcttctagtagtgtctggtgtgtatggtatgtgtagtgatactttagcatttcattaaatttctgttctttgggccttgttttaggttgcaaaggagtttggcttccaaaataatggcttctcggtttacatcaatagaaacaagaccggagagataacagcctcctccaacaaatccctcaacttgctaaaaatcaagtaagtgtcctctgaggaggaagcagggaatggggggaaatgaggtccccatgatctgcccgaggttgccgagttttatcctctttcctcatcacaccactcattatggtcttatcaactgaccagaatacacatgaccgtgttgcttgccaggaattcagtaattatcctgaatctgcagttaccattgagcagatttgattgactttgcagaattctggaatttgtgtcactgaggagaaagttattgtctttgtccatgtacggcgtggagtgagctgcatactcagctgcttgtctggagtgaaagaccttgaacacagctgtgtgccgggaaatcatgttagccctgctggcttgggtaggagtgctgccactgcagtggcccatgc

SEQ ID NO: 88440 - DNA, 1097 bp, Homo sapiens
taaccctacatgatggggctctgtgctgagatgcaatgatgtgtaaactgaggcatgtggagatggaagttgacatctggcctctgaaaaaagtgtccccaggggctaggcatggtggctcacacctgtaatcccagcactttgagaggccgaggcgggtgtatcacctgaggtcgggagttcgagactagcctgaccaacatggagaaaccctgtctctactaaaaatacaaaattagctgggtgtgctggtgcatgcctgtaatctcagctacttgggaggctgagacaggagaatcccttgaacctgggaggtggaggttgcagtgagtcgagatcatgccattgcactgcacctgggcaacaagagtgaaactccgtcttaaaaaatataagaaataaaaaaataaaaacctgtccccagactggatgagcagggcctgcagatggccgagtgttctgtatcttagagtggtgctattggggttggctcacctccttcctggagacctgctggactgcccccaaggcgtatggactgcacagtgccactgaaacctggcctcttgctgtagcacaacctccaacctgctgagccgctggtaccctgaccctgcatctgccacagacggcatgaggcaggtgaagtgagtgtggtagtaagagccaggcctcgagttagaaacaagctggtggccggacgcagtggctcacgcctgtaatcccagcactttgggaggctgaggcaggcagatcaccagatcaggagttcgagaccagactggccaacatggtgaaaccctgtcactactaaaaatacaaaaaattagctgggcgtggtggcttatgcctgtaatcccagctactcgggaggctgaggcaggagaatcgcttgaacctagaaggcagaggttgcagtgagctgagatcgcgccattgcactccagcgtgggtgacgagcaaaactcggtctcaaaaaaaaaaaaaaaaacaagagccagcattctcactggttcacttgttcagtgaacaggtattgccgtgaaacgccccacaggtgtgccaggtggggctcagatgaagcacaggaaatggtg

SEQ ID NO: 88441 - DNA, 1050 bp, Homo sapiens
cggaagaccccgcctcctcgcggctctagggccggcgcggtgacgtgcgcgtgcgcgcactggagggaaaaggcggaagcggaagtcggggggcgcgccagctcgtagcaggggagcgcccgcggcgtcgggtttgggctggaggtcgccatggggcgaggcagcggcaccttcgagcgtctcctaggtaacgcgtccccacccgacggctcggccttggtcagcccgcagcctccgcccggcgctgagtcagcgcggccccgagggcccgaggggcgcggaccggccgccctgcccgcctctccccggcccgctgtcctcccgggttcggagccgccgatcctggaccctcggcgcggccgtggggtcggcgtccgtcgggcgttggcaaatggggctctgcgagggtccgcgcagggcgccaggggcgctcggcgacctcgctcctccgcgggcccgggcattcggccgatttcctcttgaccgacgagcacccggccgagtgggccacaaggcctgagtcatgaaagtgggtgactcagtcggatgttaggctcgcacttgggcttctgacccaaaacactgggcctcgaagggtggagccggcagtgttctctctgggaccttcgagctctcttgggggctgcgggtcccagacccaccttttgttcccacactggcttcgggaagtgcctaatggtttaggaaggcgttttctcacgtttttggaggtgaaagctgatcctatctgagcctcctggaattgacgcgttttgggagggaaacgaatgttgatgtgcacgtgcccagcagcacgtggaaaatgcgtctaatgtttgggggtaggagcttgggtggtcgaatgggctgcccaagcttgcctttttgtcaagtagggttttcaaggagacttcaagtgagacaccttccttgccaagggaaccagcaagcagactgagtatctcagccacacaggtagttcagtgcttcagggatgaatccagaggttaactactgaatcagtatagaaagtggacgtggcttggcttg

SEQ ID NO: 88442 - DNA, 1022 bp, Homo sapiens
aatgaattgagcccgggaagtggaggttgcagtgagccgaggttgcaccaccacactctagcctgagcaacagagtgaaactccatctcaaaaaaaatgtagaaatgaggtctttctgtgttgcccaagctgacctcaaactcctgacctcgagtgatccgcccttctcggccttccaaagtgctgggattacaggtgtgagccaccgtgcccagccccgttactttgatgctcaaagtttcccaggtgtggccatgggaggcgtcagtggcttctctgttgcgtagggccattggtttgggttgctcctgagtttctgttgctagatactctgtgctcgtcttgtatgttctcaaccctggaagcagccatttctccaaggagcccttgttccctttagtggagggtggtctggatcttggttagaagccaagatcaagattctgggtgtgctcacagctctaggttgttagcagacagagctggaaagtgtgtatgtgaatacaagtgcacagttgtgggtgcgtctgtgtatgtgcgaatacatgcgtctttgtatatgataaaaaccgtgagtgcagccaggtgcggtggctcatgcctgtaatcccaacactttgggaggccaaggcgcgtggctcacctgaggtcaggagttggagactggcctggccaacatggtgaaaccccgtctactaaaaatacaaaaattagccaggcgtgatggtgcacacctgtaatcccagctacttgggaggctgaggcaagagaatcactggaacctgggaggtggaacttgcagtgagccaagatcatgccattgccctccagcctgggtgacagagcgagactccgtctcaaaaaaaaaaaaaaaatccatgagttaattccagtacttgcaattttaatccaatagcacagttttcttttgcattgttttcaatatactcaattgctcagccctagaatacacaaaaagtagttttaagaatgctaacctggcccactgtggagacgatgcc

SEQ ID NO: 88443 - DNA, 1078 bp, Homo sapiens
gccgtggaaagcgccggggtcggccccagatgaccttggacgattccctgctcctcccttggcctcagccttttccgcagcaaaggcccatccgtgggtgcggcgttttgcggccaggggcccccatgttttgggaggctttgcgcaggaagatgcacctaagtaatagtttcgccaccgctgggttgatgtagttcattcaaaccagaaacttgaggtttgagtggtatggctgcaaataaacacgtggctttctaaggctctttgaagaatttaaagtaacttgcaaatcttatcaatacggaccccttgaggtctgagaaccctggactgggaccaaggagctaggtaatttccggccctagtgattaccagcctgagcttatggcacccaccagtcccccagttgtcctgcccctctggtttctgcagccccttccattccaggactgacaagtctgttttaattgggggtgggggctaggcgacaggtgccatgtgtctgtgccgtgcgacatatgaggagcagcggccatcagaggtgtgaggccctcgctggtgcacccctggataacgcccccaaggagtacccccccaagatacagcagctggtccaggacatcgccagcctcactctcttggaaatctcagacctcaacgagctcctgaaggtatcgtgagagggtggcacagacccaggggctggaagtttcagggcccctgtgttttgttcctggtgtattttgggagtttggtaaattgtcaaaagtgtgtttgtccaggtgcaaggtccatgccaggctagttgcccctcctcagtaggttccggctggtgtgagggccagctgtggacactgttctctatctctgcagaaaacgttgaagatccaggatgtcgggcttgtgccgatgggtggtgtgatgtctggggctgtccctgctgcagcagcccaggaggtgagtcctgggcagaatgaggcatttctggggtgcccagttcgcctgtggcctcatgtgccgtggtcccgtatctcaggttctgcagctaccgtcattgtctgcagcctgcacacctgtg

SEQ ID NO: 88444 - DNA, 1115 bp, Homo sapiens
gggtggcccagcagtggaggcgttagctccccccagccctttgtcacctggctccccttctttcctgctccctaaggcggtggaagaagatatccccatagcgaaagaacggacacatttcaccgtccgcctgaccgaggcgaagcccgtggacaaagtgaagctgatcaaggaaatcaagaactacatccaaggcatcaacctcgtccaggtctgtgccgcggtgggggttccgaggcaggttccgttgtggtggccagggcccccagtccctgactttgctctctctggcaggcaaagaagctggtggagtccctgccccaggaaatcaaagccaatgtcgccaaagctgaggcggagaagatcaaggcggccctggaggcggtgggcggcaccgtggttctggagtagcctccagctcggaggacttgtgttcaggggtcctgggccccgggcgaggtcccgccctcccgtggtcactggctccgcccccagcaccaggcgcccagtggagccgtttgggagaattgcctgcgccacgcagcggggccggacaggccgcacagacctactgtggcgggagggaggggcggctgctgcctggtgacggcacccggaggcccaccaggacgcgccaccggtgaatgtgcctctggtggctgctgagaaaaatacactgtgcagctcagtgtgtggagtgccgtgctcaggccgggctgccgggccagtgcggggatccgggcagcgtgtggagtgcggtgctcaggccgagctgcggggccagtgcggggatcgaggctggtacgggatgggaggcttgttccctgcctcctcagcagacatctgagagtctacagacattcatcaggtccccggtgtgcagggccctgtcctgagaccccacagtgggcctggtggacggcagtggtgtggaggacctgggcagcgggaaccctccctgttttcagtgttggccctctttaaggcaacaggaagttcagcactcgcctgagaaaccgaggcagccttggagccggcgatgccacccctagcttaggctgcaagtacccctgaacctaaacccggccacggggctgcgcagggggattggggag

SEQ ID NO: 88445 - DNA, 1008 bp, Homo sapiens
catccatgctagcagcactggaggagtttgctggggaaagggaggggcctttgaagacagacaggcacgcatccagccatgaacgggcgtgttgcagaagtggccgggaggtggttgtctgggattaggggagtgtgccgtgtgctggggccggggaggtgcgtggatgaggtgggaaagatagaggcctagctgaggaggatgcgctgcctccgaggcgcagggaagcctggggtagggtcataggggtccctctgaccacagtcctggtcatcttgcggggaagggacaggcctgccagaggagcggggacggggtctgcaggtgagtgaggctggggtgggcagagggctgtgggggagcatggaggacacttctgagggagaagaggatctgggagggcaggagctgagggcaggcactctcgtgacgtggatgccaccccctggggcagggggccctgagcacaccactctctgcctctgcagcctggcagggtgtggagcgagacctgcgaggccaggtgccgggtggcgagcggggcctggtggaggagtatgtggagaaggtccctaaccccagcctgaagagtgagtgggggctgacctgggggcagggctgggccggcaggccgggcctcatgggcaggaggggcctgtgcccaccacctaccgcgttgtcccctggcagccttcaagcccatcgacctgagtgacctgaagcgccggagcacgcaggatgccaagaagtcctagagcgcccggtgcccctccccggcctccggaagatcagggtgcgaggtgtcggttccctcctgtcctgtggtcctgcccctgggatgggggtgccttgctccagcgggctgcagatcccagcactggcgtgactgacggctgaggcctgcctctccttcccaagcccccttccttcatccttgggggtctcaggctgcccccatcatgggggtctgggccctgcccaccctcctgccctcccccagccacctgg

SEQ ID NO: 88446 - DNA, 1861 bp, Homo sapiens
gatggagggccggcccctggtgctgcctgtggcctgtcattggccagagcccaagggttggaagtagaatggtcacaccccagtggtgactgtgcctggacttcatgctggggctgttgtccctgccgagatgtggaccctctgtagactccatggtgccaagctgggagacacacatacgccttccatgcccagtggaagggtccaaggctgagctgggattcccagggttcctgacacagtgggggctctgattcatcctgctataggcagaaatcccccaggcgtcactcttcctgggaagacccctgtgtagctcgtaaagaccagggttggctgctccagtggccggtggccatgtccgccgtggccggctagtccccggtgtgagcagtgtggggtgctgggggccggcagcctcagctgttgcagccaacctgcccgccccgccccttttcctgtatcccaggatctcgaggacctggaagaagcagaggagccagacatggaggaagacgatgatcagaaagctgtgaaagatgaactgtaatacgcaaagccagacccgggcgctgccgagacccctcgggggctgcacacccagcagcagcgcacgcctccgaagcctgcggcctcgcttgaaggagggcgtcgccggaaacccagggaacctctctgaagtgacacctcacccctacacaccgtccgttcacccccgtctcttccttctgcttttcggtttttggaaagggatccatctccaggcagcccaccctggtggggcttgtttcctgaaaccatgatgtactttttcatacatgagtctgtccagagtgcttgctaccgtgttcggagtctcgctgcctccctcccgcgggaggtttctcctctttttgaaaattccgtctgtgggatttttagacatttttcgacatcagggtatttgttccaccttggccaggcctcctcggagaagcttgtcccccgtgtgggagggacggagccggactggacatggtcactcagtaccgcctgcagtgtcgccatgactgatcatggctcttgcatttttgggtaaatggagacttccggatcctgtcagggtgtcccccatgcctggaagaggagctggtggctgccagccctggggcccggcacaggcctgggccttccccttccctcaagccagggctcctcctcctgtcgtgggctcattgtgaccactggcctctctacagcacggcctgtggcctgttcaaggcagaaccacgacccttgactcccgggtggggaggtggccaaggatgctggagctgaatcagacgctgacagttcttcaggcatttctatttcacaatcgaattgaacacattggccaaataaagttgaaattttaccacctgtccttgcctcgggtttatgatctcaccaagcccggagagctgggctggaatgcggacgccaaggccatctgccaggccttagtggggttactggtgctgagaggcctcgcccctgggacgaggtgcagatgcagaaacaggccccagtctccccagcagagctgtgcaggcttgcgattcccggggaggatgccttccctgcctgtaggctgctttacctggactctgatggggcttctgtgattctggaccctggatgtggacacgggtggagccacccagccccatgtgatgctcagactcctggtcattccctcccatccccgccgtggagtgacgagaaatcaggtggactcaggcttcaaggatgggtgagaggaacagggggccctgcttatcactaacccttcacacgataaagggcagggctgggcgcagggacgcgcgcctggaatccc

SEQ ID NO: 88447 - DNA, 2703 bp, Homo sapiens
atcacttgaacctgggaggcagaggttgcagtgagccaagatcatgccactgcactccagcctgggcaacagagcgagactgtctcaaaaacaaataaaaaagaaaatagctttgaccacatgggtgccctgaaaaggctaggggccctggggatgggccacacttcaaggttgctggaggaccacgtgcgccaggcttgcattgtggatgtgaagccagctgttgaattcacgggcagccataaggccgtgaccagagccagtcttactgtcgaggaacagccatgtcctgtacccattgctggacctgtggctcgaaaccccacgggagggcagggctgctggctgctgtgacttcccacgtccagggagacccgggcccaggggctgtgctcccagcagcaatgctcagtcagggccctctttctgtccacagtttgatgaaggccggaacaactttgaaggggaggtcaccaaggagaacctgctggactttatcaaacacaaccagctgccccttgtcatcgagttcaccgagcaggtgcggctgccctgcagcccccaggctggggatggggaggagtgggttgggggtggcatgaggctcccggtcaccactgctgtccagcgtctgacattggaggccattgggagaatcttctgcattaatagtgtgtgactcagacccagtaacttaagtttataacacagacagccccgaagatttttggaggtgaaatcaagactcacatcctgctgttcttgcccaagagtgtgtctgactatgacggcaaactgagcaacttcaaaacagcagccgagagcttcaagggcaaggtgagctgctcttctgggtggctcgtggggcggtgccagggagcagtacaactcttcccgaggtgacaagtgtggggccttcctgaggctgcctgctggactggatcgggcacctgattcaggacagcctggatgtaggcgaggggccagccaggccagacctctgctcccagtcacctgctggtctggttgggcaaccccggaatccaggttggaggaaaaaggcaccggagcacggtctgcttccgagcaaagtcagggctggaggcagaggccagccgtctcccgcacctgtgcaacctccttttctcccccagatcctgttcatcttcatcgacagcgaccacaccgacaaccagcgcatcctcgagttctttggcctgaagaaggaagagtgcccggccgtgcgcctcatcaccctggaggaggagatgaccaagtacaagcccgaatcggaggagctgacggcagagaggatcacagagttctgccaccgcttcctggagggcaaaatcaaggtgcaggcgcgtccccgggccagggctgcctcccgggtagagccgccaccttggggtctctgggctctcagtgtcctgggcttcgtcctcaaagtaagatcttcagagtaagaggacggagcccaagatggtgtgaagaccaccattcttgtcacacctttggggacctgtaggagccctcttgtccacacggctggcccagatgctcctcagggaaacctcctggccggcgagggtgcggcctgcgtgggctcattgggcccagcccactggcccagccttctctttctggattcttggcactgttggtgtctgcggctgccaccctggtgtgcccagggcagccacgcacctcagtcccgggcagggtgagggttggggagctctgtggtcccccaggcatcgccgcccctcaccgtgccctgcctgccctccagccccacctgatgagccaggagctgccggaggactgggacaagcagcctgtcaaggtgcttgttgggaagaactttgaagacgtggcttttgatgagaaaaaaaacgtctttgtggagttctgtaagtgttgccctttcagctccccaggtccgtgccaccagggcacgcgcaaggtaggcagactcctggggaagcgtctgccagtggctttgtgtccaggacacaccctagaactgctttcttttcagatgccccatggtgtggtcactgcaaacagttggctcccatttgggataaactgggagagacgtacaaggaccatgagaacatcgtcatcgccaagatggactcgactgccaacgaggtggaggccgtcaaagtgcacagcttccccacactcaagttctttcctgccagtgccgacaggacggtgcgccttccctccagacggggctggggcgggctctgggaagagcagtggtccccacgccagcctgggtgcctctctggaaggagcctggggctagtcaggtgggagaagagctgtgggagctccttcagaagcacccacctttgtttttcgagagagatgggatctcactatattgcctaggctgtttttgaactcccaatgtgctggattccgggtgtgagccaccggaccgggcctgctctgcctttctctagggaggaggagccaatgccaggagattggctctgggccgggaccagcccctgcactcatccctgtcttccacaggtcattgattacaacggggaacgcacgctggatggttttaagaaattcctggagagcggtggccaggatggggcaggggatgatgacgtgagtggggtcacagccctgggctggtctctgggattcagccccttggccccacgggacatg

SEQ ID NO: 88448 - DNA, 1393 bp, Homo sapiens
aaaaccccgtctctacaataaatacaaaaatgagctgggtgtggtagcgtgcatctgtaccccagatactcaggaggctgaggttgggaagattgcttgagcccagtgggtggaggctgcagtgagccaagattctgccactaccctccagctgggtaacagagtgagcccctgtgtcaaaagaaaaaagaaaatgcagagagatcagagaaaaaaaatgggtttgtgatcctgttattcagagacagaatcaccctcttccctctccactccccataaacacaaccacagtctcacgtacactggggtttaggaggcgggcggacggcaccgggcctcttccatggtgggagaacatcttacttaggttgattcaggtgtcctcagcctggctggcagagagcagagacgggagcaggcgcggcagggcaggcggcactccctgtttgagagtagaacctacatttgtttggggttagctggcagagaggctgatgacatcgtgaactggctgaagaagcgcacgggcccggctgccaccaccctgcctgacggcgcagctgcagagtccttggtggagtccagcgaggtggctgtcatcggcttcttcaaggtagagaccagagcattccagtcttccttccttccgtcatccattgaggaggggtccacagcctgcagctggcagttctgcacgtgtcccccctggcctgggctctacagggtctgccctactgcttggtgctgcgggatcatgacgacctctgcttctccctcctcattcaggacgtggagtcggactctgccaagcagtttttgcaggcagcagaggccatcgatgacataccatttgggatcacttccaacagtgacgtgttctccaaataccagctcgacaaagatggggttgtcctctttaagaaggtgagtggccccaggcagctctgcccaggttagttctggggttggtctgcagagggtggcgttgctctccttatcgttaagggaaccttgctcctggcacctttggcccaataggtatgttctgcagctttgccaagttggggtgttgcgctgatgcctgtggcctggtcttcgcattcagctgtgggctttctggccactctcctgccacagccgcctcagaactgcttttgactgttagcttttttttttttttcaattatgataaaacatgtaacaacatttgccctttttttttttttgggagagtcttgctctgtcacccatgctggagtgcagttgcgtgatctcggctcactgcaccctccgcctcctgggttcaagtgattctcctgcctcggcctcccgagtagctgggactacaggcatgcactaccatgcccagctaatctttgttttagtagagatg

SEQ ID NO: 88449 - DNA, 1057 bp, Homo sapiens
cagccgcagctccgcccctaaactgggaactcctccccactgccacgttcgacgaaggaacgcgcagagtgcgcgcatcccttggccaatcaggaggcgcagagtccgtgctaccgaaaggggcagccattccagacccgtggaaggtgcaggcgaaagccaccaattagaagccaaggcagaaaaagttcttgtcgggagccaatgagaggctaagaaagacagcgagcgcgaggtcctcggccaatcccgaacgaaggccagggagcactcaggagcgtttccgaatccggggccaggcctggtgtgagtgtccaatccgagagcggcaaagacgagcctcgaagtccgccggccaatcgaaggcgggccccagcggcgcgtgcgcgccgcggccagcgcgcgcgggcgggggggcaggcgcgccccggacccaggatttataaaggcgaggccgggaccggcgcgcgctctcgtcgcccccgctgtcccggcggcgccaaccgaagcgccccgcctgatccgtgtccgacatgctgcgccgcgctctgctgtgcctggccgtggccgccctggtgcgcgccgacgcccccgaggaggaggaccacgtcctggtgctgcggaaaagcaacttcgcggaggcgctggcggcccacaagtacctgctggtggagttctgtgagcgccgggcctggcgggcgggcggggctcggggccgctgagccaggctcttgggacgcaggcacggcccggcagcccccggggtcgggacccccggcgcgcccggaactgaagggctcccttgctgcccgccttgggggccatgtcaggggctccctgggggtgagagccgggctgggagccggggggccgtcccgatgcccgccctgcgcacggcaggatcttcctgttagtgcgagaagaacaggatcgacctgtgtgagcaaacagagcaagccagtgtccagccttgccgagtcctccccgggggccgacccggaaggcgccccgctcctgcccaccccaccttcagcttgccacagcagtccttccgatg

SEQ ID NO: 88450 - DNA, 2952 bp, Homo sapiens
cgctgagccgaccacacacgtttacatgtgactaccacggccagaggagcaaccctactgagggataccgagccccgttaccccgtagggcgagggcctgggcagctcaagagcggcaagaccctaagagagggtttagtgtgggccccgccggttgattctggggcctgctagccccgccccacacatacagggggctgctgcctcctccatcgtggagggggaggtgtgtcctctctccccatgatcggctgcagttcccattttgtcttagatgttatacctggggtgggggcacctcacactgccccagaggatgcccctgagcaggaatcgcgggggtggagaggagcgaaggtggcccccttggagcccttttggagctccggctgcagcccacactcctgctcagaagtgcgcctccgttggggatccaggtccaaggcctgtcaccgtcccgcccacaggtgtcccgacccaggctaagcttgagcatggctgagcaggagcccacagccgagcagctggcccagattgcagcggagaacgaggaggatgagcactcggtcaactacaagcccccggcccagaagagcatccaggagatccaggagctggacaaggacgacgagagcctgcgaaagtacaaggaggccctgctgggccgcgtggccgtttccgcaggtgagtctgggctgcgggagccgggtggccgcccgttcactccagctgtcttgccgctccccagcccctacttccactggtgggggtggggccctcacctgctgtcactccccagaccccaacgtccccaacgtcgtggtgactggcctgaccctggtgtgcagctcggccccgggccccctggagctggacctgacgggtgagtgccctgcggccgcgggggtccgggcggcccctggtggggatctcgggaagtgcagccagggggccgcgcagggctggggcttcgcgcagggctgctgggcagtcattgagggggaggtccccccaacaggcgacctggagagcttcaagaagcagtcgtttgtgctgaaggagggtgtggagtaccggataaaaatctctttccgggtaagctacaggctgctgtggccagggaatggaggcggggctggggctggggtccggaccgaccttccctgatcctcgcttcgggtcctgcaggttaaccgagagatagtgtccggcatgaagtacatccagcatacgtacaggaaaggcgtcaagagtgagtggggccccgggcagggcagagggggccgcttgggtgcgtgctgccaggcggggaagcggggccgctgaccgccctcttccttgtgccgcagttgacaagactgactacatggtaggcagctatgggccccgggccgaggagtacgagttcctgacccccgtggaggaggcacccaagggtatgctggcccggggcagctacagcatcaagtcccgcttcacagacgacgacaagaccgaccacctgtcctgggagtggaatctcaccatcaagaaggactggaaggactgagcccagccagaggcgggcagggcagactgacggacggacgacggacaggcggatgtgtcccccccagcccctcccctccccataccaaagtgctgacaggccctccgtgcccctcccaccctggtccgcctccctggcctggctcaaccgagtgcctccgacccccctcctcagccctcccccacccacaggcccagcctcctcggtctcctgtctcgttgctgcttctgcctgtgctgtgggggagagaggccgcagccaggcctctgctgccctttctgtgccccccaggttctatctccccgtcacacccgaggcctggcttcaggagggagcggagcagccattctccaggccccgtggttgcccctggacgtgtgcgtctgctgctccggggtggagctggggtgtgggatgcacggcctcgtgggggccgggccgtcctccagccccgctgctccctggccagcccccttgtcgctgtcggtcccgtctaaccatgatgccttaacatgtggagtgtaccgtggggcctcactagcctctaactccctgtgtctgcatgagcatgtggcctccccgtcccttccccggtggcgaacccagtgacccagggacacgtggggtgtgctgctgctgctccccagcccaccagtgcctggccagcctgcccccttccctggacagggctgtggagatggctccggcggcttggggaaagccaaattgccaaaactcaagtcacctcagtaccatccaggaggctgggtattgtcctgcctctgccttttctgtctcagcgggcagtgcccagagcccacacccccccaagagccctcgatggacagcctcactcaccccacctgggcccagccaggagccccgcctggccatcagtatttattgcctccgtccgtgccgtccctgggccactggcctggcgcctgttcccccaggctctcagtgccaccacccccggcaggccttccctgacccagccaggaacaaacaagggaccaagtgcacacattgctgagagccgtctcctgtgcctcccccgccccatccccggtcttcgtgttgtgtctgccaggctcaggcagaggcgcctgtccctgcttcttttctgaccgggaaataaatgcccctgaaggagctgggggtgtctgctgcttggcttctccagggtgtggcaggggagggcctggctcctctactgcctcacgggctttaggagacaaaggggaagatggggaccctggtggggtggtgggaggggaagggcagggcccccttgaagtgctgtggctgctgggccccttgcaactatctggggagaaaggaatgtgactcccagctacagtagccctaggcagcaacagtctagaacagtgcagaaggcc

SEQ ID NO: 88451 - DNA, 2428 bp, Homo sapiens
ggaggggctggggtcagggctcccgaatctacaggcccttcaagctggtctgatatcggactgcttcccttgctcttgattttggcctttaccgtttcttggaacagcccttgggtgtgttgtacattttcctttgttgaagaggatagtggcttaattttgtgcccgttgctagtgggctttgcagcttcctctacctgcatcgtggtacacgtgtcaggtccccacaatggcaggagccctcagacccaggtgctcttggaagttgctgtccctcctgccccgcccttccctcatttcccgttaaccactgtcctgcctcccagagaaccacccccaaagcaactcacgcttccagggcctgtccctgggccaccagaaggaacgcagttttgttgcttttctgacaactgctctctgcaactcccaggaactctttgctgaatttggaacgctgaagaaggcggctgtgcactatgatcgctctggtcgcagcttaggaacagcagacgtgcactttgagcggaaggcagatgccctgaaggccatgaagcagtacaacggcgtccctctggatggtgagtctgggggtggacccacgctgactgtggggcttgtggagtttggggctggcacctgtccaggtaggaatatggggtacccctgtggctgaggacactttgcatttgcccctttgtctctctcttccatctgccacctctcatgctgccccacacatctggaccaacctcttgtgaacccccatccagcaagctacatccctcccctccttcagctccttccggaagattcacttctgtgaagccttctcagaaccgccatagtacacctctgagtgcggggctgtagtcgtaaagacaaaggtaccggttcttcttcgtcaggtcacccacacctctccacccacgagcaccccgatacctcagcgagcagcccacctagtctggactgagaaggagtgaggaggtgttggtggggttgcttccttgccattttgttctcccaccagtatctccaggccatttcccttgtcgggggcatttgagacgcacagaggccctttccagtgtttgcatggagaccagggtgtggcgccagctgggtgggtttcagagcctctcaatagaacgtgccttctcgtattctttgccgcaggccgccccatgaacattcagcttgtcacgtcacagattgacgcacagcggaggcctgcacagaggtgacttccggggcctctggggaaggggattggccgagggtgaggctgcgtcgctcttagggtccttccgggtgtgtgaacggtttcgtcttccttgctagcgtaaacagaggtggcatgactagaaaccgtggcgctggaggttttggtggtggtggaggcacccggagaggcacccgcggaggcgcccgtggaagaggcagaggtgccggcaggaattcaaagcagcagctttcggcagaggagctggatgcccagctggacgcctataatgcgagagtgagtcccgggggagccagctgggggcctggtcaaagccgcagtggggagcaggccgcctgtgaatgcaagcctctttctcctctgtgtttcagatggacaccagttaaacagaccagcaaatccgcgtgcggaacaggacccaggcgtctcctcttgctccctggttggggggcggtggctggggctgtgcggccaatgatggatttgtttcttttatgttttaaaataggatttaaaaactcatgtaaaggttttttttttttctttttttttttttttaattctgaaacagacctgttttgtaccgagttatttttgggataaattttactggttgctgttgtggagaaggtggcgtttccaccttttccataataaaatagaaatgtgtgtagaactggaactgtttgattcgtcccactgttggagtccaggcctgggccaggattttggtgtctgtccagctgggagggggtgggagaacctgagttggggatggagggagcagccccatctggtgttggacacctgaagttggcatgggttgtgggggtggcggggggtccccgctcctggagggccgaagctgcctgtcttctttcttatcttctttcctgcctcacacctaacaccttcctctctaactcaccaggtgggaggacacctttgcccgggagccacctgttgacccttgtgcctgtgcctccaggtgaggggaggttggggtgggatggctgccctgtgtgccgtccacaggcttcccacagccagaacatctctgggctgttcctttccttcttgtactctggttttcagagaaacgtggattcagcagttttgactttgtagtgtaattcctttttctgtttgtttttttgttgttgtttttaaccttgccacggagca

SEQ ID NO: 88452 - DNA, 1031 bp, Homo sapiens
gctcatagcagggcataggggttcacgcctgtaatcccagcactttgggaggccgcagtggcagatcgcttgaggccaggagttcaagaccagcctggcctacatggtgaaacctcgactactaaaaatacaaaaattagtcgggcgtggagtcacgtgcctatagcctcagctactcaggaggccgaagcacaagaaatgagctgagatcatgccactgcactacagcctgggtgacagagtgagactctgtctcaaaaaaaaaaaattaataaaaataaaagtaaaataaaatagaaacagggctcacgatgtttcccaggctgggttcggactcctgggccggtatgatcttcctgccttggccccctgagtagctgggactgcactgtggcaggcttatacctgtgttggtgcctaaacgttctagctctgcagactcaatttagccagtcgtcctgttccctccgccgcaggctctgctgccatgaaggtgaagattaagtgctggaacggcgtggccacttggctctgggtggccaacgatgagaactgtggcatctgcaggatggcatttaacggatgctgccctgactgtgagtgtcccctccatgctgtctgagcggccccgactgtgagtgtcccctctgtgctgtctgctgcctgctggactagcctcagtagctcctgttaaatacctgcacgaaatacccagtttcattttctttttttttttttttttttgagaccgagtttcgatcttgtttcccaggctggagtgcaatggcgcgatctcggcttgccgcaacctctgcctcccgggttcaaacggttctcctgcctcagccttccaagcagctgggattacaggcatgtgccaccatgctgggctaatttttttatttttagtagagacggggttttgccttgttggctaggctggccttgaactcctgacctcaggtgacctgcccgcttcagccttccaaagtgctgggattacaggtgtgagccactttgcctggcccaca

SEQ ID NO: 88453 - DNA, 1114 bp, Homo sapiens
gcaccccagcccgcccgccgcccctcccggccctccgcagcctcggcccgccctcgccgcagatataaggcggcccaggcggtggctgctccgagcccggacgccgccgcccaccagtcagccggcgtccccatggcccggtccgcgacactggcggccgccgccctggcgctgtgcctgctgctggcgccgcctggcctcgcgtggtacaagccagcggcggggcacagctcctactcggtgggccgcgccgcggggctgctgtccggcctccgcaggtccccgtacgcgcggcgctcccagccctacagaggggcggaacccccgggcggggccggcgcctccccggagctgcaactgcaccccaggctgcggagcctcgtgagtccggcgtgccggggactgatggggggcggcggcaggacgtgggtgggggtgcggcggcccctcagcctttgcttgcctgccccccaggctgtgtgcgtccaggacgtcgccccaaacctgcagaggtgcgagcggctccccgacggccgcgggacctaccagtgcaaggcgaacgtcttcctgtccctgcgcgcagccgactgcctcgccgcctgagcccggacctctcctggcaccgctgggggccccccgcccccaccgtcccactcggtgaccccaggcccctccggcgcgggatggcgccccaggtctcccctactccgctcaccccgcagttaatggcaaacgaataaataaatgaggcggcctcggagtgaggggtgctggaggactggcagccaggccacgaggggaacgggacctggaaatccccaagcctgggtatgagaaggcagccgagtgtgcggcggcagggcaaggttggcctgggccgcccagaggtcttcagacccaggggcgaagctggccacgacccagccccgcggtgaagccgcgcctagccttggtgctccctgggggaagtgcagggccacggctggcccggttcccagtgtcctcccccagcccttcgctccccaactcgagagccaaatctgtgagggcatgggctggagcccctggctgccttcctcttgcccccatcccttctggccaggccaagtccgag

SEQ ID NO: 88454 - DNA, 1110 bp, Homo sapiens
agcaacctccccgacttcttcccatgagggacagccgggaggggcacaccctgtccccccaaaaagtctccgggctgagctagccgcactctggccgcaggaggtcaatcactacaaggggaagaactaccccatcatgaatctgcatgaacggactctgagcgtgctggcctgccgggtgagtgggggccaggagccagcccaaggatggggagacattcccacaacatcccccctactaagggcctccctgagccagggcaggggggcttgggtcactggcagagctgcacccagcaccccgagttctgtggcacctgcccatacctgtttgttgaggcatgaggaggggtggtcaggtctccagatgctgttccttcttgtctcatggaggagccccaggggtccccagcctgcccagcccatccctgctactcactggcagccccgccccatgtctgagccgtctctcaccaccctgtggccctggcttaccagtagcagggaccgagcaagtctttctgcccccactgtccccacagtacgtgtcagaagtggtgattggagccccgtacgcggtcacagcagagctcctaagtcacttcaaggtgaggctccgcatgggctcacctcgttccctctgttcacctctgttcctgcatgggctgggaatgcaggctggctgtgggctcctaggcggggcccaggaggtacctgggctgaggaaagggcagggtcagctctcccaacccccggggcctgtgctgggctgtgggtggcgacggccgctgcctccccggggagggctcctgaccccactccttctccaggtggacctggtgtgtcacggcaagacagaaattatccctgacagggatggctccgacccataccaggtgggtcatgctggcccttgctgggcacaggggttgccattggcacctcccagccatttaatgactcactgtgcctgcctgggaaacgggcatggtggcgcagctgctccgactgcaccactcccatgggaccctgggcgctggtctccctctggggcagggcatcagatgggtcttggggaggtcagcagggaccttcatcccgctcctcctc

SEQ ID NO: 88455 - DNA, 2165 bp, Homo sapiens
cttccagggatcagctgcttggcttctgctggaggtgcctccctgtgggggcgcagcctgcctcctgctctcagttcctcgccagaggctgctgcccttcctggctgggctcaggaggctccttgtaggcatatgatggggagggggtgcccctacccacctccaagaggctacagccctgtgtctggccatgtgagccctggcctttcaccgggttgctggtttcttttctgtggggcccagacttctgtaaagcacacagatgtgggtaagatgaaaaactgtggcccaacagggcttaaccctatggatggtgggatttttatccaatagtttggcctggtgtgcccacaggatgggaacagggaggcaccatcaacacttgtcatgttaatgagcttttctttgctcgaggtgttcagagacaagtcctgtgtctacctgcgtcagcctgaaaatggaaatattggctgttgactcttgtcatttagtgacttcatccccctcccctcagtctgatcttgtctaagtagaatccaggcgttagttggaatcatatcataagtatccatgaagaaaacgtcatgatctgcctcggagtggggagaaacaggccctccttgtccttgtgcagcccccacttttgtcctggctgtgggtggccatccattttgagcacctctgccaggctgcagacctggaggcgaagggagtgtggaagaggagggtgtaagggtcgacgcgtgctgaatgggaggtgcaggtcctcggtgcgttggcagaagaggcttctggagtttcgaggccatacctcctttcaagagctttggatttggggcgacttccctgggtctaggggagtgttcctgtcccctgtcaggtcagccctgcggagccactccacccctcttccccttcccctggatttcctgacatagatggtgtgttcatgtgcaggtgtgagtgtgctgtccttctgatctctgttgatcccgctttcctactgagagggtggtggagagggtggtggtctcttctcacctcagtttttctgacacagcgaatcgagggctttggccaaggccaggtctctcaaacttgtccgccaagtaaaccatgatatatgtcttcccttccaccttaactttgccccaactcctcttttatcctaacatggacgctcagatttcagaggaatacccagcagggacaggtcagctctcaccaggagagtgaggcccctggctgctgctcggggtggcactggtgttgctggctcagctcttggtgcatgtttcagatatgtgtgtacacttctgactggtgatcagggcccggcccacggccctgagcggctgcagcctgctttgggacgatggtcaggtcccatgttgtccctgctgcctccctctggagtggccacttggccaaagcgcccatccacatctggaaagtcggagccgcagcctgctgcaccgtttccgctctgggatcttgtgagttacttttttaggctgtggtttggtgaaaggaaccaacacattaacgatttttcccccagaagccactgaataattctttttggtgtatttttgccttcctgttggctgtctggccttggagcaggtcgggagagtagagtacataatcagtgccacacagaggcagggcgtgtctgagagactaatgcctgtcctgcctctggcctgtgtcctgggtgtgtaccatacctgctgggccagtcccacacatttccaccctgcccctggagcagcagctttgataccatgggtgtcccttgagtctgagctagagtgtgtccccgataaactgtgagacctccctgttcttggtgaccccagttgggctttggcccctccagcaaccttgtgtcccagccctgcccttcttcccaccccctcaatctgctagtccctgaagcctttaaccaaacgggagtgggcacagaaagccttctcctggcaacaggacaagggctgcccgcgtgtccagccctgttgctctcctggcgctgagaggtgggtccaagcagagttgatcagtccctgcctgccctgcctaggtctagccaggggaggttgtgtgtgtgggagaagaccccgggatctgctggggtgggatggaggttattaaagatctaagtg

SEQ ID NO: 88456 - DNA, 4304 bp, Homo sapiens
gttgcggagccgtgaccatctgtgcctcctgcgtgaggtgggcttattagcctctgggagcagagggtgcatgacaggccccagctctgcccagccttgagggctggaggagggcgggggcagcttctcctcagtccagctcctgggatccctgcatggtccctctcagcccaggtccagaggccaggccaggagcctggaacgcactggctgtgctcagggctgcccctcccccaccccccggcgcacctttgataggaggcgatggcttgcacttgtgctgagttcaggccttctgcggagggcaaaatctgtcgaggaggcacttttccgtgtgatctcttcaggaagtcaccactgtcattgtgcttagcagcaggggtgggggcgatgggggtgggagaagctggtgccagggcagtgtctctgcaccctgacttgcactcaaggctggggggcccctccatgcttggctgagggcctgtctcctggggcagtgttgtgccggacgtgtaggaaagggctcctgtgggccttctgacctccagctcaggtcttccccatcctttatctggaagaatccagtggctggagcctcgggaccttgcctctgagctggcttggctgtggggaggggtctctggcctcccctccctgctctgtgcttgcagcctcacctcctggtcccaggctgggtgaggtggagtcttgagcctggtgaggatgtgtgcatccgcctggccacacttcagctcccctgatgagagtaagaagccccccagcccataatttcctgaagtgatcctagctcctctggaggagtctcccatctgtctgcatcaaacctggaaagtgggggatggagcatgaggcgggggtccatgcccaagggtctggtgggagctgggctgagctgggaatcccagaaacatccttagcaagaaagtgagagcagagtgctggagggaccccgagtggggaagagttggttgttaagtccggccaccccagcacttttgtttttgctccctggccctgtgggcactcacccggggcagggaccagagagcaggctgcagctcggaggggctgactccgccagccttcacgttgggcaggcccggggtggctcactgtgggagcccttgtgaaataccctggatggggtggggcaggggctgcttcctgcaacccaaagccacaggatggttactccatcagtggaggaggccgactgggaggtctagaggggcctcgggccaggctcctcccagctgatggcctgccacctggaaggtgggggaactccctggtcagtcctgccaacagaccagagctagatggacggcccacccccagcttttcaaagttaggaggctgggagactcggggttccctgtagcctcctctctggccaggtcccccgtggggcccctgtgcacccagggagcagggggctttgtccgaggccggctcaggggaggtggctgtagaaggtaggaccctggaagatgcacacacagggtcactggctggccctcacctgctattggccaggctgggggctgcggctctcgtggggcgctgttggctggcgggccagggagtgcgggcgcggcggggaggcagaggcaatgtgctgagtcagcgtgactcgccaggaacagccgcgctctgggcagtgccggggttatttttaaagctcccggcttccttctaggcctgcctctcccgcgtcttattccttctaatctctcccctgccccttgtcttgcgcctgccttcctaacagccttcagttccccttctcccgtcagaccttcctgacctcccacctggttctctaggggcagggtggacaggaagcagctcagcccagcctgggagaggccaagggctgcctcctatcaggtattgggggctgggcacctggacagcaggctggggcgggctgtgcggcaagggctcttgtgaactgggccgggggcgggggggggggggtgcggcgagggtggtctccagggtactgacctgctccgtgtcttgcagagagcgcctgctcgctgtgcccccgggttatgacgacccccaataaaggaaacaaggccttgaaggtgagtgggcagggacaggagcctgtgggctggggtcggggggcacagtgggcgtgcccgcttggcctgtgaccacctgcactgtgccccaggtgaagcgggagccgggtgagaatggcaccagcctgacggatgaggagctggtgaccatgtcggtgcgggagctgaaccagcacctgcggggcctgtccaaggaggagatcgtccagctgaagcagcgccggcgcacgctcaagaaccgcggctacgctgccagctgccgcgtgaagcgggtgacgcagaaggaggagctggagaagcagaaggcggagctgcagcaggaggtggagaagctggcctcagagaacgccagcatgaagctggagctcgacgcgctgcgctccaagtacgaggcgctgcagaccttcgcccggacggtggcccgcagccccgtggcgccagcccggggcccccttgccgccggcctggggcccctcgtcccaggcaaggtggccgccaccagcgtcatcacaatagtaaagtccaagacggatgcccgatcgtagggacgcgcgtctgcccaggcgggtctttgcggggccactaggcacatggcgaatttggctgccctgtccctctgtttccttctcttctctttcctccctctcttccccacccttctctcttccctgcaaagcacaacctgtaccccaggggcgccgggctgagcccctttgatctcgtcattgtcgtcgtgtgttttgtatgttgggattggtcagttcggcggtgacgtggggtcgccccaaccccttttgtaccagggccatgcaggcttggagtccagagttggtgctgtgggaacggactagagagagttgcgggagagagaaggagcaggcacgctgggcctcgcgtgtccccgagcagtgagggtcccagtgttccctccactcccgagtggccacaggctcgcgggctgggaaggattcactctctttagccccaggggagcagctcagcttagcccagcatgaagagatgggctctgctctgagagtagggcgggcttgaaggccctgatgggtggaccaccagcctgggcgcagtggtgctgggggcgtgcagctgggcccaggggctgtgcactcaggcctgacccgttgcactgaacaagaccaaatctctggttgtgcgcttaacgtgagggtgggtccagtgtgccctgcgatgggtcccgtgtcactgtttacatgacctatttgtgtggttatatagccctttatttaaaagagagaagttccttttacaaagttattaaattaattatatgtttaaaagttaaagaaaaaagagctgcagagtatttataaaactgtcttttagaaaaaaaacaagcaagaagaccatttgaccatatgaatggaaaagggaagaaagtataatagaaactttgctagttaaaaaaaaaagaaaaaaaaagaaaaaaaatccctttcttgtaaacttacggacacctctttgtggctgttggagtttagtttttatatacacagagttatcagacattatttataaaacttagtttaaaaaaaagacaaaaaaaaaaaagccaagccgtgagccgaccagaaggccgtcctctttgatatcttttgcaattgtaccgaaagtgacttactcctctgcccttcctgcttccgtctcttgccggtgccgtggtgtcgtccgtgcctggtgaggttttgtgcagcggtaaagtgctggtgcttctggtgacctttgacctgtgggtgtcacttcttgtgtctgttttcccgtgttcgttttttgggtttagttgtgcttttgcttctgctggcttgctggacctgggctggggtgccaagtggcgcctgctgcgtcagagctcaaggaatctgtgcccaccaccagctcctggtccgtaggaggtgagacatggggttctgtcatgcccccctccactgagccttggctacatctgtgtctagggcttgggctgatctagtggcggggtaggtgaaactggggtcccttggggcgccccacgctgcttccacacccaccacctctggccttgggtggtggcattacagggatgagggagtcactgtgggtggccacagggctatggccaagcgttccctggccgtcttcctctggcctcagctttgttcctataggctgccc

SEQ ID NO: 88457 - DNA, 1359 bp, Homo sapiens
cccttcccaggcggctcttttccggcagctggtcctggtcccaagtctggagcagttttccaaactgggaaatagttccctgagtgagggaggggaggagcttcggtgggccgagctagccaaaggggaagtcggctttccctgggactggcctggttggacagcccctggccagagatcgaggtcctgggagaaagaggggtgtgtgtaccaagccctgggtgacagtgggctgggcagggaggaagcaggggcagctctaccaggaaacggcaaaggggaggaagcagcccagcctctctccccagttggccctggagtctgggttgagactgtaggtggtgggagcttcagggtgcctagccttggggtgcagcagatgggctggtgtggatggcacagggtggcagaacgcagcacccagccaccctaaagttgtcgctacctgaagtggggtctcagcgttgtgtgaagttagcaaagggagtggccctgttgggtgtctggcctggcagcccaggacgcttagaaagtggcagcttgggagtgatgtggccagagccacctttccttgggtatgtggagattcacgaaggttgacttcctttgcccaggagttcatttcatggctgggttaggctactttgtggtttgccctcagggatgccccccgccccccgccacacacacacacacacacacacacacacacaggtccattctcagtgagcaccccccacacatacacacagaacacaggtccactctcagtgagccccggggcttatagattccagatgtttcaatgttttagctgaccgttggcctggagtttgatgccctgggaaaattttggggtcctggagggacatttatgtacatctttttttttttttttttttgagacggagtctcactcttttgcccaggctggagtgcagtggcgcgatctcagctcactgcaagctctgcctcccaggttcacgccgttctcctgcctcagcctcccgagtagctgggactacaggcgcccaccacgacgcccggctatttttttgtatttttagtagagacggggtttcaccgtgttagccaggatggtctcgatctcctgacctcgtaatccacccacctcggcctcccaaagtgttgggattacaggtgtgagccaccgcgcggcccatttatgtacatcttctcagtcacttatgcatcagtggaaactaagttttaggttctgttcaaagagtgactttcaggagctgagagcttatggagcagaggccatgactgccggggagtttcggccgctgggctttgcagccaggtggggctgtctgtgttcaggcacgggagttt

SEQ ID NO: 88458 - DNA, 1024 bp, Homo sapiens
cgctgtccccagttcaggtctgcagggtgggtgaggacgtctttctcgccacactgcccactctccagtccagacaccctcagactctgcgagtgccaccctgtaacagtgaggggaacacgaggggcctggcctcacctccagcctgcaggggagacaggtgtaaacccacatcccgtggtggggccacgagaactcaggtctggggggcactgcggggagatttggtgatgctgagctgattcgaatgaggtgagaaggagcccagcagctgtgtgggggcgtgtcgctggcagaggggaataaaggtgctgaggtgagggtgacagcatcgcccagggctgactggcactgggagctgtgggcttcactccctcttcctgggtgcacgcttgtgctccaaagccaacctctccctgcctctctagggagctgcagtccatggctgaccaggagcaggtgtcaccagccgccatcaagaagaccatcctggacaaggtgaagctggactcccctgcagggaccgctctgtcaccttctggccacaccaagctgctcccccgcagcctggccccagcgggcaaggattgacacgtcctgcctgaccaccatcctgccaccaccttctcttctcttgtcactagggggactagggggtccccaaagtggcccactttctgtggctctgatcagcgcaggggccagccagggacatagccagggaggggccacatcacttcccactggaaatctctgtggtctgcaagtgcttcccagcccagaacaggggtggattccccaacctcaacctcctttcttctctgctcccaaaccatgtcaggaccaccttcctctagagctcgggagcccggagggtcttcacccactcctactccagtatcagctggcacgggctccttcctgagagcaaaggtcaaggaccccctctgtgaaggctcagcagaggtgggatcccacgccccctcccggcccctccctgccctccattcagggagaaacctct

SEQ ID NO: 88459 - DNA, 1044 bp, Homo sapiens
gctctgattggccagcgcctggcggccgcgcccggattcgctggcgcgacgggggcggggcctgggtgcgggtgccgcgtggcggccgcagcgctgaggggtgggtacgacccgcgcacggtagctgggttggggtcgggctccgggaatggtgggcggcggtcgccgggtggggcgcgacggtagcccagttctgggcggggtgggaacccagacgggggacccctaggcgccgggccctccctctccccgtacttttcccccttcccagtcatttcttctgcggaacctccacccctccagtgggtgcgggaccctaggcagcaggccaggcaccgccgctctgactgggggccccgaagcagttaacgggccggacagcaaagtggaaagttagaccagctgggaccaggggaggtgggcacccggctgcgggaggagcggccaggctggcactgcccccctaacttgctctcgatcctgccggtctcgtcccgcagagccggtgccatctgtgggggctttgggccaggggtctccggacagcatgagcgtgggcttcatcggcgctggccagctggcttttgccctggccaagggcttcacagcagcaggtaggcccccaggtgggggacggtgaggcccagtgggagagactggcctctttccacttctgcagggctgggggctgaaggtgggtgctgggtcacaaggcctgagtcctgcgggaactggcaacttctgtgtgtttggggctttacctgtgctgtctcactcttcttcctgggaatggggagggagggaagccaaagctagccatgaagaggaactgtttccggccgggcgcggtggctcacgcctgtaatcccagcactttgggaggccgaggcgggcggatcacgaggtcaggagatcgagaccatcctggctaacacagtgaaaccccgtctctactaaaaataccaaaaattagccgggtgtggtggcgggcgcctgtagtcccagctactcgggaggctgaggcaggagcatggcgtgaacccg

SEQ ID NO: 88460 - DNA, 1062 bp, Homo sapiens
ggggcctatgactgacacccctggggagagttgggccaaggctagctggcctgtgagcctcagcagcactgcagggggcctgggagggtgctgagctctgcctggggtcgggggcagcagcggggacctgggggtgctgagctctgagcctgggatagggggcactgcaggggcctggggggtgctgagctctgagcctgggatggggggcactgcaggggcctgggggtgctgagctctgagcctggggtgggggacactgcaggggcctgggggtgctgaactctgagcctggggtggggggcactgcaggggcctgggggtgctgagctctgagcctggggtggggggcactgcaggggcctgggggtgctgagctctgagcctggggtgggggcactgcaggggcctgggggtgctgagctgtgagcctggggtgggggcagcagcgggggtcaggggaggccgaactgagccccgccgcccgcaggccctgtgttcgtggtgcagtggctgtttgacgaggcacagctgacggtggacaacgtgcacctgacggggcagccggtgcaggagggcctgcggctgtacatccagaacctcggccgcgagctgcgccacacactcaaggacgtgccgtgagtgtgtgggccccgggagccccacgccgggtagctccctccttatttaaaaatagaggtcctgagaaaacaaaagaagaaaaaccagaacaaaaaaaaatagaggtcttgtaggccgggcgcagtgactcacacctataatcccagcactttgggaggcccatgcaggtggatcacctgaggtcaggagtgcgagaccagcctggccaacatggcaaaaccctatctccacaaaatatgcaaaaaattagtccggtgtagtggcaggcgcctgtaatcccagctactcaagaggctgaggcaggagaatcacttgaactgggaggtggaggttgcagtgagctgagattgtgccactgcactccagcctgggtgacggagtaagactctgtctcaaaaaatacatatatagagagagaga

SEQ ID NO: 88461 - DNA, 1082 bp, Homo sapiens
gcccggcggcgggtcacgtgagcggaaaatggcggccccggcaggcggcggaggctccgcggtgtcggtgctggccccgaacggccggcgccacacggtgaaggtgacgccgagcaccgtgctgcttcaggtgcggccgcccgcccggggcggacgggtaggcgggcggggggcgctgcgccgaggccccgcccattgcggtcggcgtcccggtgttcgggggcggggcctcggcggccaatgagcggcctcctgagcggcggccccgccccctgctcgccgtcacctgcgcttccgctggggtcccgggggtcccgggggtcccgagtgggggcggggcggtggcgagccttcccaggggtgaggtagaacggcgccgcgtgtcacccgcatcgagtactcggcgcccggccgagcccagctcgcgagggcgccgggaagagggaggagtggagccctagacccgcgttcccattccggggcgtcccccggagcgggagcccgggttgcgcggtggcagatgtcccggccgtggggcctggaagcgatttttgccgagtcactcactgcacttttacttgggcaccttgtgaccgcgaatcaattaaatgtaaaagtattggctgggcgcggtggctcacgcctgtaaatcccagcactgtgggatgccgaggcgggtggatcacgaggtcaagagatcaagaccatcctggctaaaacggtgaaaccccgtctgtactaaaaaaatacaaaaaaatttagccgggcgtggtggcgggcgcctgtagtcccagctactcgggaggctgaggcaggagaatggcgtgaacctgggaggcagagcttgcagtgagccgagatcgcgctactgcactccagcctgggagacagagcgagactccatatcaaaaaaaaaaaaaaaaagtatttattgagcctctgctgcgtgggggaccgtgaggatccgaaggtgcacacgactcggagtttgcgggagcagcccacggcgtggggtccccaggcctgggcaggtggagggcgcagccaggaggctgttggtgccaggcgtgcagagtgcggaa

SEQ ID NO: 88462 - DNA, 1050 bp, Homo sapiens
gtcatggggatggaagccaccccagtggctgtcggggtgaatggaggcccctggagatggcagcgggttaagcacgagcacggaattctccctcccaaaacggaactcagacaacagtgacggagcctaagagcaaagccaaagccacgggcaggggtgagcgggacccgaggcaggagatgacggagcctaagagcaaagcgaagccacgggcaggggtgagcgggacccgaggcaggaggtgacagagcctaagagcaaagcgaagccacgggcaggggtgagcgggacccgaggcaggagatgacggagcctgagagcaaagcgaagccacgggcaggggtgagcgggacccgagccaggagtggcgccgggcagggaggcaggcagccccaggcgctgtgtgggcactgggtgagaagcagggatcccggcgccctggctctgtgctgcttcctgagacgagagtggcagagggcaagaagaaaaccaaacagcgcggggaacagaagtcaggaaagatgaacgtctggaaggaaatgcccctgggccgggcggtgcccccgggcgtgaacagaatccagtgctcccacaggcacaggtgcttggtgagggccgtcctccctggctgtgctgtcagtcctcagatggggatggaggtaaggaaatggcccagagtggcctggggctgccactggggaggggccgagggtgtctggagaggtggggccggcattgtggtagcataagcctcttcaacagactttgtaaacctcgtgtgaaacttagtttaagaaacaacaggcttggccaggcgtggtggttctggaagtggctttggagctggctttggtggtggctgtgggggtgggtttgggcgctttggaggaggttgcagtgagccgagatcgcaccattgcactctagcctgggtgacaagagcaaaactccatctcaaaaaaacaaaaaaacaaaagaaacaacaaggctgggcacggtggctcacacctgtaatcgcagcactttgggaggctgaggcgggtggatcac

SEQ ID NO: 88463 - DNA, 1022 bp, Homo sapiens
aggtaaagccgtggctccgggaaagctgggtgatttctgcagccctctgggtgtgctggggtgtagggatgggctgctggtgaggacagggctctgccaggtggagcactggcctgtggccacactcagggtgggtctgtgcatgctgctgggccagctcagagctctgcggcccgtccctgtccatccctgcccgtccctgttcatccctgtccgtccttgtccattcctgtccatccctgtccatccttgtccatccctgtctggacctggctgggttgagaaggccggagcctgccccaggctctcccaggctctgtctagccgcttggcggctgggctgtcatgtggtgggtgatgccctctgcgggcctccctgagcccagtggctcctggcctgcagccacagcttctgttcccggcagggcgcatgctgctgcctgggctctcgtcagcacctgtgtttgcgcccggctttgtcatacccagacaggacatgaacacagagagctctagactcactgccttgtccccagcacacagccgcgccttgccggagcggggccccagcggggcggggtttgtggtgcataaagaatatgccctcgaagccagcagcagaggcgtgtctgccctcctggccgtcccgctggcttctggccctggccgggtggggagctctgctggctggagagtgtgtgagagtgtgccagtaccctgctgcgagcaggcacccgcggaagcgccccaaagcacttcttgcatttctggcttcggagcatggtgtctggtggcttggcctggcctggggtccccgggaggccctgggtcttgcccctgcggacattgggacttgcagaggtctgcgtgggggagggggagtaggggctgtgtctcctcgggcgctggaatttcccccgggccctggcgtcctgcacactgggccggcgtagaaggtctggaaccgattgcccaccacccctccctgagatcccgcatgagggagggaatctgatccctct

SEQ ID NO: 88464 - DNA, 1060 bp, Homo sapiens
tggcgtggcgcaagcaaagcccgccgtggcgggaccctcctagcgctcgtccctggcctcacaggggccttttgtttccacgctggctgagtgccctttgctggggtgggggggcactggcccggaggggccctggggggccaggacattccccgcatttatccccatttggaagctccctggctggggctgtgacggggaggttcaggtctacgtcctcccttgaggggatgagccacggggctcaggacccaggcccagcactgtcctgaggctgtggccctcagggacccttacaccctttggcttttgtgctgggccattgactgtgccctcgctagaggcagcttctccaccccttcctcacaggtcagagttagcgtatgggacgtggccagccaggcccgatccctgcccaccccgagctgagcaccaggaatggccacccccgtgggtgacagcacgttcctgcctctctcgctccgggcagtgggtcctggcaccagggcttcctccttgcagcccagctctgccagcccaggcctcagtgagcttgggtcccagctgcggagaccaggctgggggagacacggtcaggcatgggcagcaggtcctgccccggctgcagaccagactcaagctgggccttgtggagggtgtggaccggcaggggccagatgtggggggtgggtaggatggaggccagagagggcacgtggcctgtggtcctggtggtgccggtgcccggagggcttccctgggctctggggtcccggtgcaaggcgcacctgtcctggctgctcctcctgcaggtgacgggtgaagctgccctgcggggcacgacgctgcagtcgctgggcctgaccgggggcagcgccaccatcaggtaagggcagtgctgctggggccgaggagtctatttagctaaaaaaaaaagtggtctcaaaggaaaggagaaaggacacgtggcaagtggggagtaggtgtacccaggccctcatcatggagagcgcctggtggcctctgcctgcctgtgggcgtgggggctgggctgccccga

SEQ ID NO: 88465 - DNA, 1097 bp, Homo sapiens
ctaccccgggaggagggcagtggtgctgtgacattcaggggcttgtgacctgtacccagacggccgggcggcagcagcccaaggtcacaggggcctcccccagggaaagggaagcgcttaggctggggcgggggtggggctggggggcagcgggtggcagtgggagtgctctccagcagggcgggggtcccaagtgtggcccgcacggtggcccagccacgccgagcacctggagtgctgtgggaggaacagggctgaattcccacccctcggggaaaggcccaggagggtgggagcagtggcccaggtgctggggcagcccggggctggcgtggtggaagagctgtctgtatgttctttttctcctctgcagtgggggacttgcgagacttcgtgaggagccacctggggaaccccgagctgtcattttacctgtgtacgttttttctcctgagcccactcctgcctccagtgctcggggccttggtgctgtgggcacaccgcccgtcccagctggggctcgtggcagcttctccacaggagcagcatctgtggcctcccgcccaggtgcctcctgcagcccatggtgtctgtgtggagacctaggagggcccttctccccgagccaggcggtgggagccaggcttcctgccttctctctcagcgccctgctcccctctggagccctgctgcaccccagcctggtccccacccctggggctcaggccactcctgcccgagggctgtgggaagggtgggtggacagggagtggctggcctcccttggagggtgtctaggtggcaaagggttaggctgcccactgcaaggggagccgggctgcacgggtggtgtcccctgcaggtgggcctgccccccaccggcccttccgagccctcagctggagtttctgcagcaggagtgtgggcacagggcgtgctcgtgaggggctcttctgccccacttgaggcgtcacccccatctgcaggcctgtcttccttcgggcgcatggatgggcgaggtccacggtgcttcctaacacgtaggtgccttctctcctcagtcatcacccctccaaaaacagtcctggacgaccaca

SEQ ID NO: 88466 - DNA, 1003 bp, Homo sapiens
tcagctggaggcggccgccttgggcttcagctgccccttccccctgcccggcctctcccgctggccccccggtccctgctaggaacgccctggtgcccatagctgtccgctgcttctgtgggtccctgccacctccctgagggctcctgagggtggggccagggtgagggtgccgggttcccagccctgctgggccgccctccagagccagaagcaatgaatgtcctgtccttggcctgtgggagagctgcctggggccttccgaagccctctggcctaatggtttcctcttcaaagcctcttcagatattttaattagccacagaggcgggtttttttttaagtggccacaggcctctacagaggcctgggttggaggtgagaagcttgctcactgcctggggctgcagccgcttactgagctggggcaagaaggctggcagctgccaggggtgatcaggagcaggactgagcgggattccctgcagcggaggcaggggaggggtgagacagtcccctctcagcccccgagctgccgggcggactccgggcctccttcctccgtctccatcccctcccttgctggccagccagttgataaacattgaatttggaagatgccttgggatggaggaggaccagtgcccaggcctgcagcccaccctcccgctgggaggcccctgagagcactggggtgctgctgccctgtttctggggacgcttggcttccctaccagccaccgtctcctgccctccatcagctcggctctagcctcggggcctctcggggtggtgtccccggtgacgtgcctgcctgcctgcctgccgtcagagagctggcggggctgagggaaggaagcctgcctccctggcaggcaagcaggcggcgggcgcggaagcaccagctttcacgtctctggcagagccccactccggctgcctgctgcctgggggatgtccaggggccggcccccggcttccgagagggacagcgtgcgtgggt

SEQ ID NO: 88467 - DNA, 1113 bp, Homo sapiens
ggctgcctggctcagtgctccctgcacagaggcgcagacagggagcccaggtgccccaggcctggctgccaagcctacttccctctcctggtgttcccgagtcctgcccgcccctttctgtgcgtcccgtggggcagtgctggttgggggtcctggcctgtgggggctatgatgagaaccaggtgcctctctgcatcggtggcctctgagggagccctctcgcccggcagcaggtgggatgcagatggggctggccagggctcctgtgcccacagcagcctctgggcagtgtaccctgggcttctgtgagcagccgcagcctgggtgtgaatcttggaggcccggtggtggcggagcatgctctccatctgggagaggctgagaccatggcagctcctggcgctgtcctccccgtgcccccttcctggctccccagcttccggcgcctctccagggccactcgggcagcccctgcccaccccacaggcccttctctgctcacaaggctttgatcccaggcggcacaattgggttttcaaagcattcacggcccttgtttgtgtccctgggcccccggctggaggctgaggtttcggcgttcctgggcctggcctttgaagcttcctcttattaatcttttaacatcccccagccccactcccacccccagcctgtggccctgagcagcctggagccgggagggggaatctggagctgggagggggataccccagcctggcagctgcacccctccacggtggtcccggcgcatccgccaggacccgccacgcctggccccaccttcctcgggtgcagaggccagaggagggaggacggtgatgctgcatggcttgaggaccctcgaggccccagccttcagctggcttggggcttggggtggtcccatggagggcgctggtcccaggacgccctggccttgcttacaggggtagggctggtgtcagacaggaagctgggcgatgggctcatgggggccgggcaggcagagcctgtctgagggtggagctggggcctggccctgggggtgtagctgccttcacagcaggggggtgctctgcccacacccggcccctgagccccccgccctccctg

SEQ ID NO: 88468 - DNA, 1060 bp, Homo sapiens
gcacttcaaggatgacaagaccaaaggtgcgggtgggggtgcgggcgggaggtgggtccccgtgtctgtcctcagggaccctttcctgcaactctgcagggccaaggcctcgggagggcgggggtatgtctggagcacccagccagagcggtgggtgagggtcccgcataacctccccctgccttgcagtgagcggggacgcgctgcagctcatggtggagttgctgaaggtcttcgttgtgggtgagcccagggcccacgctccctccgggcacagcatccggaattttgcgtttttccagcgggaaaaccaagacgtgttttcccgtttcccacaagggcctaaacttgggtctcctgagcctgtttgtcaggtgctgtggcctggttctgggggctgcccgtgggtgttggggggggcaccggcccaggctgaggccctcactgggctcgggtttaagatccccccagcatcccccacctctcgcgtttctcaccgcagaagcagcagtccgcggcgtgcggcaggcccaggcagaagacgcgctccgtgtggacgtggaccagctggagaaggtgcttccgcagctggtgcgtgagcgtgggtcggggcgcaagtgggggtgcccggctggctggccctaagtgcttctcttccccacagctcctggacttctagggatctcagccgtggctgaggccacccccagaggagcccctggtccacagaagcaggccttgtgtttccagcggcctctgataagaggcagggaaggacctgaaggatttggagttgattcaaacaagatctctgggagtctccagcctgtgcagaaggggcaggactgcagtgcactgcgggccttggagtgtccagtggggacactggtgtgggaaggggcagcacctggggagtccctgcctctcctccctgggacaatagtgtgcatgccacccggggtcctacaggcaggtgctgggaaaggcctggccagcaggtagcctgtgtgtttgacaaacagcagctggcagcgctgcctcctgcccacattcctgccac

SEQ ID NO: 88469 - DNA, 1088 bp, Homo sapiens
cctgacagggctgcggctgtctctgtccccagttcctcgacttgatggagactattgataagcagcgagaagagatggccaagagcagcaggtgagcgggcccagggcaggggcagggtgaggcttcagggatcaggtcctggctcagactcagatgggaccaacctgagcccacgagtgaggccacgaggaggtcgctggaggctcagtgcccaggcgaccatagatgcttaaggaacagcagcagctaccgaggccagaggggtatgggagcgctctggggtttgggttactctctgcaccctcctctctgcccacagggcgtcggcagcccgtgtagggcagcttcaggaagccctgaatgagaggcactccatcatcaacgctctcaaggccaagtaagtggggggtggcctcaggatacttcagagacgtgcccacagggcagagaaaggtggtgtgaacctgtgtgcaagtcctgtttgcaaagcagaggtgggaaatggtgaggctggggcagtaacccagaagccttcctggaggaggcgggtgctggctggggttgactaggtgcccagcaacagtgaaagcagcgaggcctttataaggcaagtgaaactccaaccggggcgggggtgctgcccctcctttctgcaggctgcagatgacagaggccgccctggctctgtcggagcagaaggcccaggacctgggggagctcctggccacagcggagcaggagcagctgagcctgtcacagaggcaggccaaggagctcaagctggagcagcaggtgggtgggcagggcttgagaggggtgggccaaggggtgcgtggcggcttcgtgaccctcactacccataccccgttcccctcccaggaagctgcagagcgggagtctaaactcctcagagacttgtctgctgccaatgaaaagaacctgcttctgcaaaaccaggtagctgtggtggatggagccagggagcccagggtgggcgcggcagggctgggctgcagcttccctccctggtgccggctttcaggtagacgagttggagcggaagttcaggtgtcagcaggagcagctg

SEQ ID NO: 88470 - DNA, 1061 bp, Homo sapiens
ttgggggcggcggggggaccccggcaatgtctgagccgtagtacaggctgccgttgaagagacaccaaggcccactcgttcagggtgtgcatgctgcggtagtttcctgctaggccatctgaggcagtgctttctcagaatgaacaaggttctcaagagacacctgcctttcagggtggggagtccgtgaggagaaggtagggaggcccgctctccactctggccccacaatccctgcccctgagcaggtggagcatatgacccgtcacctggaggagagtgagaaggccatgcaggagcgggtgcagaggctggaggcggcgcggctgtccctggaggaggtgagtgcccaccaggcagggccaagctctgccttagtcctgggctgaacaaggcaggggcccctggtgttcgccgcctcaggaccagagacctcttcctgttcccagaggctcataggccccaccttggggacccacccaccagtgtgcccaagaagctaaagggacttaggtggcattcggacttccttggccttaggaaccttgcccagcgagctaggtggcagagcagctgcgtggccctcaggaggctggcagagaggagcccccctggctggggttggctggatgggccagagagagaagggccctgggccagggacaggagaacgggctggcaggtggccatctgtgcaggagctgagccgagtgaaagcagcggcactcagcgagcgtggccaggctgaggaggagctgatcaaggccaagagccaggcccgcctggaggaggtgagccacacatgtccgccaccctccgggggagccaggctgcccggcattgcggcccgcatgcagactccagagcttcggtctgagtggggaggcgggagtgtggtgttgaggtcagatgagcacaccctggacactggtgggtccgcttcagccttggatcagggcctgagacggtggagaggtttggcccatctctgcagcctgtgactacacgcatggatggatgggaggggtggtgtgaccgaagagggaggaggagagcccaga

SEQ ID NO: 88471 - DNA, 1073 bp, Homo sapiens
agccttcgtgcctggcaggagctgagcctcaaggaccaggaaagggtggccgaggtgagcagggtgcgcgtggagctgcaggagcagaacggccggctgcaggcggagctggcggctcaggaggcgctgagggagaaggcggcggccctggagcgccagctgaaaggtgagccagacccttgtcctcccgccgcccactggtgggacgtgaggccagccagagagcggggctggccaggtctcccgtgctgaggccgtgccacggtgcgctggggctgcgtccgctcactgcgctccttgccctgcagtgatggcgagcgaccaccgagaggcgctgctggacagggagagcgagaacgcgtctctccgggagaagctgcggctccgggaggcggagatcgcccgcatccgggacgaggaggcccagagggcgagcttcctgcagaacgccgtcctggcttacgtgcaggcgtcccccgtgaggaccctgagccccccaaagtgagacaggccgggaggacccgggcgcagtaggagtgcatcaggcggcgcccgagatggaccaggggctgcgtcccgcccgcgccgcctctttgagacccgggtcgtctgttccacgcggcggttgcggcgactgttggtggtgtcgcggctgcgggggaaccccgtgggaggcgcctgggaagggctccctaccggccccttcttcccggtcgacgccacgtgggagcacaccgggaaggggtcccgcgggcgcgtctccccctcgccttttgcgatgtcaccgtgaacgctgcggccgcctgcgcgcggcggggtttggaaatacagcgcgtttgcactttgtgatacattctggccccgcctctccctccaaacgcgcgaccgtccgtgcctctccaaacgcgcggccctctgcccccagccctgcagggagggcctgccggggtgcggctgttcgcccctcctcgccgctgccttgaagggacgggagggccgcgggggctgtccgtctgggggttcgggcggctgcagaccccggagttcccagctggctcccggcggcagggggc

SEQ ID NO: 88472 - DNA, 1042 bp, Homo sapiens
ggaggtgcggcaccactgcccccacacgcccatcctcctggtgggcaccaagctggacctccgcgacgacaaggacaccattgagcggctgcgggacaagaagctggcacccatcacctacccacagggcctggccatggcccgggagattggtgggtaggcgctggcggcctgcaggggaggggtggggaggcgcagtaagggcctccctgtaccccaccctcactgtctcccctcctcactgccgctaggctctgtgaaatacctggagtgctcagccctgacccagcggggcctgaagacagtgtttgacgaggcgatccgcgcggtgctctgcccgcccccagtgaagaagccggggaagaagtgcaccgtcttctagagccctggcccacccgagcctgagggctggcggggagcagccctggacgtgtccgctgttgtgttgagacgtgtggtgtccctgagtcggctgtggggagcggtgggggtgggccggggggaagcatggggatgaggctgggtggcaggatcctgtcctctctgccgcctcattctggggtgtggctccagccttccctggcccccgccggaggccgggagggagcagggtctccctcagggctgcaggggcaggtgcagggaagccccaggatgggcttccctggagggggagggtgggggggagttctgttccttgtgccccgaggtggggcagccccttctcattttatacaataaacattctccacctacacctcttgcctctcactacctgcccttctgtcctggggcggtttgctcctaattcccctctgtgatggtgcagagcgggtccatcacaccccagccgaccccagccgcacttcagagctgagttcccaaaggcagcactaagcttcctccaccctaccccaggggaagagggggcctgctgagctgctcagccccccaaaggagccgacccagatcaaagcaatagctagtgcattgagccctagggatgattacttggctgtgtacaaggcctccctcaggctga

SEQ ID NO: 88473 - DNA, 1555 bp, Homo sapiens
gctgtgccctcagccccaccccagccccagcctcgccctcatcaccgaccccagccccagccagcttgggttcctcttcgtaggctccaccaagggtgccctggacatgctgaccaaggtgatggccctagagctcgggccccacaaggtgagcagggctggggtacctcccccaacctaggacaccccacttgccctgctgaccccagctgtcccggtgtagatccgagtgaatgcagtaaaccccacagtggtgatgacgtccatgggccaggccacctggagtgacccccacaaggccaagactatgctgaaccgaatcccacttggcaagtttgctggtgagtcaggtgggagcccagccagcgtggtgccagcagtccctgtgtgtgccctgggtaggggtgggagggaaagatgggcggcagcctccttcctctatgcccctgacccccgccctgcccacagaggtagagcacgtggtgaacgccatcctctttctgctgagtgaccgaagtggcatgaccacgggttccactttgccggtggaagggggcttctgggcctgctgagctccctccacacacctcaagccccatgccgtgctcatcctacccccaatccctccaataaacctgattctgctgcccagactatgtgctattcctaggctgccagcaggtagctgggggcttggggccaggtgtggaacgcgggcagagacccatgacattcacattccaatccaagggggagcgtggctcccactcctgaggttttcaggcctggccagttctctgtcagggaggtgggaggtggtgaaaggtcacctcccaaagagggtggtgaatttcagcaaggttggccttcgggcctgtccagaacctctggggtgagacggtgtgtgcatgtgagtgttgatggccccctctgtgagtgtacagttggctcctcttccttcaagctaatgagtaagacaaaagggaaacaaggagaacgtcaagcttctccacttcgtcggtgatctgagccactttgttgaatcagatgatggttttcggaaactagaagagcgtttcctcaacttgtgctattcacaatgtaatgagcatagacacagcaccctgaagtctaatctgcattttatcatctgaagtctagacaagtaaccataagtcaagcctcctcccaccacggctgatttcaagctaccagttagatgtcatttaacgtggagctggaggagatgccctcagcaccctgttatgtggtgtttgtgtccataggtcccacagatgtacataaccgaggggcagagaaaacagtcgtgtatgcagaaataagtaggaagtgacgtttgccgattttgcttttaataacacaaattgtaagcttctataatttgttaatgatcattaacaactggctagcaaaattgttgagaattcagcagttggctttcctgagccagtaggagctgcccccacacagcacaaggcggaagcagacagtggccctcatggcaccccccaatcccgagtgactctaatcccgg

SEQ ID NO: 88474 - DNA, 1027 bp, Homo sapiens
accacatcgtctttttgcaataatcttggcagggaaaaatatgctagccagggtccactacgtcgatttcaagcacggaagatgggtcacaccaggcacttcaaaagacccgtccctgaggcagcggagaccccgccccgccccggcgcgcccactcctttcggccaatcactgcagcggggagcagctatttgaatgtccccaccgcctatctgaaggccgccctgccattggccccgccgcgccccgcccatcgtggccagagcttcaagttccgcagccccagtgcggagggcggagactgcgccgacatggagctgttcctcgcgggccgccgggtgctggtcaccggggcaggcaaaggtgggcggcggggaaaggtgggcaaaggccggcggcgggcagaggcgggcaggggacgccttcactgagcccgctcccggcaggtatagggcgcggcacggtccaggcgctgcacgcgacgggcgcgcgggtggtggctgtgagccggactcaggcggatcttgacagccttgtccgcgaggtaggtcccgccgggtcccagcgctgcgaggcggcgagccaggagggggcggcagcgagcgggggcggtacctctgtgcgcgactccgcctcccctcgcgggcgctgcgcttctcaccgcggcctgggcgcccgcgcaccctctctcggggctggtggcctgcgtgggcggccgggtggtcggcagagccgccggggcccccgggctcagaaagaggccgaaatggctgcgaagcaggccccgggcaggagtcgctcgggcgcagggaggaagtgaaccggccggaggtagcgcccggctgctggccccacagtcccgacaccttcggaactcctaactcctttacttgtccggctgaaaggtcaccagccccagtccccagctgtgccgcttgctgggcacagagcctctggtaactgccccctgatacacacagtgcccggggatagaacccgtgtgcgtggacctgggtgactgggaggc

SEQ ID NO: 88475 - DNA, 1151 bp, Homo sapiens
cccggggaggccccgacgctgcccaggtcacgcggcctgcggagggcccaccctgccagccaagctctgctccccaccagcctctcacactagccgcttcccggggcgtggggctagtgccacgtcccctgaagaagcgccagcagggaatccgcccttccaggccaggtcagggcgagctgcctccgtcctgtttccactcaagagatcccaaccgatggccgcctgcttcagcctcggtggcaccagcagggtcagcgcgtgagggctagggctgtggttggacccaggcaaggtgtccaggcatgtcagacagccacgttgtgccctggcccttgggggcaggtggggcacaggccttaccccaaccccagtgccatcctctacgtgcgtgcttcccgtctctgattcgcaggcgaccgtgtcatcaacaccaactgctcggcggtgcgcactcgtcaggccctctgctgcaagatgtccgtggagtatgacaagttcattgagtccgggcgcaagtacgcggcgctgacccgacccgcagagagctcagagccaagctgggtgggggcctcctgtccagccatgccaggccctcgtgcccaggactcccctcgcccacaggtggttttgccacgtggatgatgacaattatgtgaacgccaggagcctcctgcacctgctctccagcttctcacccagccaggacgtctacctggggcggcccagcctggaccaccccattgaggccaccgagagggtccagggtggcagaactgtgagtgtcggagcagacgccatcggagcagacgccttccttgacaccagcccgggaggcacagcagagggcgtggaaagctggcttgagaagggcatagggttgggggcccaagctgatccacccaggtggtttgcatgtggtgtttcaggagcaggccaggaggccctcaccgtactgggcagagagggggtgtctgggccaggtggggagggtctggaggctacgggtcaatggcctgcagaagcccccggctctttttgctccaagaagcttctgttacctgggtgggatctcctaaggggcagcttaagaaagatgcctggggagtcccatgaagagtcaggggtgagaagccctgtcctgggcagct

SEQ ID NO: 88476 - DNA, 1130 bp, Homo sapiens
cgcaagctctcagaggccaccaggtgaggccaggggcttggcgagaggaagcagaggccaccaagggagcgcgggtgtctgggactgggcccccttcctgtgccctgcatctcccacccctgtgctgggaagtcgggcgggtagagctctcgctctcttttggccagcagtggaagtgccctgtgtgtgtgtggcttctgtgtgtgtgcatgcagggctttgattccaaggggagctgttggagactgtggctcaggggccgcctccctgctggtttccccacccggctgtaggctcctggggcagcagttctctctgtggccctggtgcagactggtccctagaggtggggtttgaggccagcgggaggtgcccacctgtgtgccggttgggcctttgagggcagcctgagattggcggcttcctcccctcctccctggcccccgtgaccgccgccatcctgatggccaggtcctctctcagggagctgcagaacgcacccgacgccatccctgagagcggcgtggagcccccagccctggacacggcctgggtggaggccacgcggaagaaggcgctgctgaagctggagaagctggacacagacctgaagaactacaagggcaactccatcaaagagagcatccggcgcggccacgacgacctgggcgaccactacctggactgtggggacctcagcaacgccctcaagtgctattcccgggcccgggactactgcaccagcgccaaacacgtcatcaacatgtgcctcaatgtcatcaaggtcggcctgcctcggcgggcgggggtgggcagcatggctgggccattggggcgcccgggctcacttggctctgcgcccccccgccaggtcagcgtctacttgcagaattggtctcatgtgctcagctacgtcagcaaggctgagtccaccccagagattgccgaggtacgggccacctcctcagagaccttgcccccaggattcctgaccactgctggcccctcctgtcctcccccacctcattctcccccagatctgaatctgccttcatcccctctcagtctgggggctgggcatcgagctctaggaaatgtggagcatgggcctcacgcatgtggcttcctcc

SEQ ID NO: 88477 - DNA, 1038 bp, Homo sapiens
gctcaaggtggcatggatgcctcaggacggccccttgcttccagccaagcccctgcccaggcctggaggggaagagagtctgggtgggtgggggtgagggagaggcatctggcttgggagcagttcccagggctgcatccaggccgtgggcatctggcagaggcttccccagtggggctgctcccctgctggccagcctggccccgggagtggtgctggccacaggctcccgagatttcctgtgcccagggcaacagatgtgtgttcagcctgtgccgcggctgctgcaagaagcgagcctccaaagagactgcagactgcccaggtgagggcgcctaccacccgccccgcagcaggcaaacagaccccctccgcctcctgacccccgactcctctcactcgctctgccaggtcacggattgctttttaaaaccaaattggagaagtctctggcctggaaagaggcccagcctgagctgcaggagcctcagccagcagcacctggaacaccaggtggcttctccgaagtcatgggcagtgccctggcctgaaggcccacaacccccacccccaggactgctgctggagcctggacacgtcctacttaagaaaatgccttttactcagggaatctcctgctacttaatgtggaaagacacgcccatgtcccccttcggcccactctgggggcctggaaatgctgcagtggggagcaggccccaggctggacctgccctgtcctcagcacgcgtgtgcaaaagtgaacaataaatcatttcaaagatgcgagagcccacagcctgtgaccactgccctctcagacccagggaggcatgagccggggcaggtgcggttggggccagtgggggcttctgaacaacaggatacatctaaatgaaggcagcatctgggtagacaaaagtgggggcttaggtcccctccccacctcccctaggcgcctccataggcaagtggccaaagcctccgggagcttcgtgatgcctcacagccttggaagcaccgcctgcgaggccacag

SEQ ID NO: 88478 - DNA, 1051 bp, Homo sapiens
cacacaccttccacgtgcccctcggtgtccttggtggaggatgctggtggctcagctgtgtcctccctcagtggacgctcggattttaaatcttttcttccataacatacttctctgagctcctctgatcctggtggatttgcccgtgggtcaagaggttgaccccagcttctgctgggttctcagaggtgaggccatccgtggccacagccctccctggagctggtggttcagagcttggggctgcccgagctgcggactccatctcagaggccccggactccctagtgacgagtcctgaatgggctgcccgagggaaaggagggcactcctcacagcagcggcactcgccacggccgcctggcccctcacccagactcagacccgtgtggctgtggctgctgggcccctctcacagtgtccttgggctctgcccgctgccctcccctcaggcccagggaggggagcaaggagaaggcaggtgcgcgcagcaagcgggccctggaggaagaggagggtggcacggaggtcctgtccaagaacaagcaaaagaagcagctgaggaacccccacaagaccttcgacccctctctgaagcgtaagtgctgcttccgctgatgggcccgagagagcctcttcatcacccccatcctccctgttgccagtaacaggaacccagacttgtggtcagcaaggctcaaggcccagagctggaagcagacacctggagggcttggcggagtagtcagccagacttggggtcagaacggggaccctgtgcaggccacagcccgtgcatgtgggacatgggctcagtgaatcagatgaggctatgggacaagcttttcagccaggtgaagctcgtctacagctcagggcctcgggtccctgcggctgcccctgcccagcctcacacaggacacctgagcagctgctgagagggaggctggggtccccgggagtgtgtgcatgggtcttgttgctgggccaaaggcacgggacgaggctgctcgcccctctcttagccaccagtggcaaggcctcagcctag

SEQ ID NO: 88479 - DNA, 1610 bp, Homo sapiens
actacaagctgcgtgccgctgagcagtacacacccaaggccaagtaccatggcaacgtgatgctactgcgcgccaagacgggtggcgcctacggcgaggacctgggcgcggactacaacctctcccaggtgcgcaaggggcctgacgggaacggggacagggacaggagtggggtgggacggcagctgatcgcatcccctgcaggtatgcgacgggaaagtatccgtccacgtcatcgagggtgaccaccgcacgctgctggagggcagcggcctggagtccatcatcagcatcatccacagctccctggctgagccacgcgtgagcgtgcgggagggctaggcccgtgcccccgcctgccaccggaggtcactccaccatccccaccccaccccaccccacccccgccatgcaacgggattgaagggtcctgccggtgggaccctgtccggcccagtgccactgccccccgaggctgctagatgtaggtgttaggcatgtcccacccacccgccgcctcccacggcacctcggggacaccagagctgccgacttggagactcctggtctgtgaagagccggtggtgcccgtgcccgcaggaactgggctgggcctcgtgcgcccgtggggtctgcgcttggtctttctgtgcttggatttgcatatttattgcattgctggtagagacccccaggcctgtccaccctgccaagactcctcaggcagcgtgtgggtcccgcactctgcccccatttccccgatgtcccctgcgggcgcgggcagccacccaagcctgctggctgcggccccctctcggccaggcattggctcagcccgctgagtggggggtcgtgggccagtccccgaggagctgggcccctgcacaggcacacagggcccggccacacccagcggccccccgcacagccacccgtggggtgctgcccttatgcccggcgccgggcaccaactccatgtttggtgtttgtctgtgtttgtttttcaagaaatgattcaaattgctgcttggattttgaaatttactgtaactgtcagtgtacacgtctggaccccgtttcatttttacaccaatttggtaaaaatgctgctctcagcctcccacaattaaaccgcatgtgatctccaccaccgtcctttcttccctcctccctgacctggcagctgcaagctctccagctccaccccacccagtcacggggccgtgaaggggatgccctctgtcctctggtccccagttcccacacacccctaggccatgtcccagagccggggctgggccggggagtgaggaaggagcccgcgtggcagccccgggcttcccgggaaagcgctgggactggcgggggggggggtaccgaggctctggccaagaaacaccaccagtgagaaacgtgtaggaggtacagacactgggaagttggcttcagctgaggagaggcccctcgtggagaatagtatttgcttgaagtcagtggattgcaggcattcgccctgccaaagatgccgtcacagcctcaccaagacggtgtcaatagcgccactggctggccaggttgacccagaagacttgggtttaggcaaaggagtg

SEQ ID NO: 88480 - DNA, 1048 bp, Homo sapiens
gcgacgtgggcattttggtggagacgatgagcaccaacgacacgatcgtcagtggcacgctgccccagcgcatggcgtcctgcctggaggtgctggacctcttcctgaaccagccccacatggtcctgagcagctttgtgctggctgagaaggctgcggcctatagggacagggacagccagcgggacctggtggaggccgtggcacacatcctgggtgagcactcccagtaggagccgcgccaggtgtttcccctgctggcatcagggtcttgggacatagcagtcgtgcccctgtgcgcctcagtttccccatctgcagagccagggtgcgggcgcaggtgtcactgtggtggtggtgctttgggagatgcacagcccacgcacccctgggtgtcagccctgccgcatacaggccgtccccatgccccctctggagttgccgacccggcgcatcccttccaggcatccgcgacttggctgctgtcaacctggacagctcactggcggacctgggcctggactcgctcatgagcgtggaggtgcgccagacgctggagcgtgagctcaacctggtgctgtccgtgcgcgaggtgcggcaactcacgctccggaaactgcaggagctgtcctcaaaggcggatgaggccagcggtgcgtgtgggtggccaggcgggagtggggtccccgggcctccccagcccttcctccttgttgtctggaccgtgtcccggcaggcataccgcccttcgtcacgggtgccattctgagcgttcccaccccgactcccacctgacgtagcaccgtggggacctgcgtgcgtgtctgtgtgtccttgcgtgggtgccagggctctgcacccagaccagcctggcatctgcccctgtcttcacagagctggcatgccccacgcccaaggaggatggtctggcccagcagcagactcagctgaacctgcgctccctgctggtgaacccggagggccccaccctgatgcggctcaactccgtgcagagctcggagcggcccctgttcctggtgcacccaat

SEQ ID NO: 88481 - DNA, 1547 bp, Homo sapiens
ttcccgcatcccaggcctgctcagcccccatcccctgctgcagctgagctacacggccaccgaccgccacccccaggccctggaggctgcccaggccgagctgcagcagcacgacgttgcccagggccagtgggatcccgcagaccctgcccccagcgccctgggcagcgccgacctcctggtgtgcaactgtgctgtggctgccctcggggacccggcctcagctctcagcaacatggtggctgccctgagagaagggggctttctgctcctgcacacactgctccgggggcaccccctcggggacatcgtggccttcctcacctccactgagccgcagtatggccagggcatcctgagccaggtgcggccgccgggcagggggacagggtgggggccgggtgagggccaggcgggcagggtgctgaccaccgcccccacaggacgcgtgggagagcctcttctccagggtgtcgctgcgcctggtgggcctgaagaagtccttctacggctccacgctcttcctgtgccgccggcccaccccgcaggacagccccatcttcctgccggtggacgataccagcttccgctgggtggagtctctgaaggtcaggccctgccccacctccaggccccaccccacctcccaacttgccgagtgtggcctgaccctccccgacccgctgtagggcatcctggctgacgaagactcttcccggcctgtgtggctgaaggccatcaactgtgccacctcgggcgtggtgggcttggtgaactgtctccgccgagagcccggcgggaaccgcctccggtaggagcacggcccctcaccacttccccttccccaccagcctccccatccccagcctgagctccccgcctctgcccccaggtgtgtgctgctctccaacctcagcagcacctcccacgtcccggaggtggacccgggctccgcagaactgcagaaggtgttgcagggagacctggtgatgaacgtctaccgcgacggggcctggggggctttccgccacttcctgctggaggagggtgagcccccgacactgccctgcccctcccgggagactgcacccgaaggccccgcagcagccccacctccctgtttccctagacaagcctgaggagccgacggcacatgcctttgtgagcaccctcacccggggggacctgtcctccatccgctgggtctgctcctcgctgcgccatgcccagcccacctgccctggcgcccagctctgcacggtctactacgcctccctcaacttccgcgacatcatgctggccactggcaagctgtcccctgatgccatcccaggtatgggtggcatggggccgtgggagtggactgggccggggagcagagaccccagcagctaggacctgcctgggagcccctcgggagggaagggcaggcggtgaggggctcagtgccgtctcccccagggaagtggacctcccaggacagcctgctaggtatggagttctcgggccgagacgccagcggcaagcgtgtgatgggactggtgcct

SEQ ID NO: 88482 - DNA, 1050 bp, Homo sapiens
ggaccacagagggcacccacagctaggcatgcagcttgggagggagcagaggggcccggtgggctctgggaggtggccccagggacctgggagttccacagcaccaaccaggccctgtgtgcaggtgactcggggaggctgctgtggaaggataactgggtgagcttcatggacaccatgctgcagatgtccatcctgggctcggccaagcacggcctgtacctgcccacccgtgtcaccgccatccacatcgaccctgccacccacaggcagaagctgtacacactgcaggacaaggcccaaggtagccccgccccagccccagcccagtgcccccacccaagtatgccgcactcacccagcctgtccccacagtggctgacgtggtggtgagcaggtggctgagggtcacagtggccggaggcgtccacatctccgggctccacactgagtcggccccgcggcggcagcaggagcagcaggtgcccatcctggagaagttttgcttcactccccacacggaggaggggtgcctgtctgagcgcgctgccctgcaggaggagctgcaactgtgcaagggtgaggtcccagccctgctggcttcggacacctctggcgatgaggagcgatcgcctcccctcacgttgaccccagacttgcttctccacggggccccctttggggtcagcaaccctagcccaaccctccggccggagctcacgatggcggcctccctccctcccccagcccccagccttcctcgtccctggtcactgttcctcagtcttgaaagggtacttgggggcaaagatgacagattcagcctaaggtcacaccttggctaggcacagagtagcccctgcagctgaatgcggcccctcactgcgtccacagtgggcaggagtcagcctcccagtggtgggcagccccttcctcaaccctcagctatttctcatcctgtgggcagagcggggtggtggccccagaaggacagagtgggtctgagagcccatgccaggcagatgccctggggctttgggaacaccaggc

SEQ ID NO: 88483 - DNA, 1902 bp, Homo sapiens
atggggctgagcctcatgcgcctggaccgcttccgagattccatcctacgctccgatgaggctgtgaagccattcggcctgaaggtgtcacagctgctgctgagcacagacgagagcacctttgatgacatcgtccattcgtttgtgagcctgactgccatccaggtagggcccagcctgccagcgtgtgagcaacgccagccccagggctctggctttccctggagcccaggagctgcagtgttgagtccggggcccctgacagcccctttgctaggcagagccttgtgctgggggcaggacgggaggggaggaggggtctcagtggggctgtgtgggggccataggggcttctttcctatcaggagacctgggagggtcgatggggcgcgggggtggagatggcctagtggggccgggggccgcccccaacagctgcacctgctggaggttgcaacctgagtgtcctgttcccaccccagataggcctcatagacctgctgagctgcatggggctgaggccagatggcatcgtcggccactccctgggggaggtggcctgtggctacgccgacggctgcctgtcccaggaggaggccgtcctcgctgcctactggaggggacagtgcatcaaagaagcccatctcccgccgggcgccatggcagccgtgggtaggtctcccggaggggcccccagcacctccaagaaaggaggctgccttctcgctgtggggtcctcacctgcagccctggcctggcccccgtaggatagagtggcccccgctggcccggggacacccagctcggacacagccgtgcgcgagtcccctgcagctgccccactggccccacacctggcagccttgggcctaggcacgtgtccatgggcatcaggcctgcgtggagcccccgtgtgatgagcacacagctgcagcatagcaagaacccaggggctctggtgaagccaacacacgggtcatcagggttccctcagactggtgccctctgttggcacccatctctgagccccatgggccacatgtgggcaggacctggaaagaaccttggctgcagaggactgagggggccaccatctggggactgggctcccaggagctgcccctggagtggcagctctgtaatgacacctccacccacgggtcaaacacagcagggggcgaacctttctcatgaaggctccaaggctgccattaccacacttgtcattactgcccccagctgcaggcagtgtctgggtgggtgggtggctgggagcggctcggtgtccacgctaagcctctgaggctggctctgccataggcttgtcctgggaggagtgtaaacagcgctgccccccgggcgtggtgcccgcctgccacaactccaaggacacagtcaccatctcgggacctcaggtgggtgctgcggcctgggcgggctcctctgtcccctgcgcctgccattgcaagtctggcagggacacgcggccacggtctacgccccaccaagctctgacgggcctggggcatggggcaggtttgtcctcaggtcccttgcccattccctctcggttcccttggggtgaggtgggtgcgccctacctctccgagcctgaggtgggtgcccagccaggatgcttatccaggctcccacgatgtccaggccccggtgtttgagttcgtggagcagctgaggaaggagggtgtgtttgccaaggaggtgcggaccggcggtatggccttccactcctacttcatggaggccatcgcacccccactgctgcaggagctcaagaaggtggactaatacggcctggggggtgcggggcgggccaggggacccacaacccagcactgacctggcccctcatgcaggtgatccgggagccgaagccacgttcag

SEQ ID NO: 88484 - DNA, 1120 bp, Homo sapiens
cgtgcagtgtgtgtccagcctggtggcaggaggtgtgctcaggggtctcgtgtgctcacagccccacctgagccgcagcacccttccttgcagggcccagcatcgcactggacacagcctgctcctccagcctgatggccctgcagaacgcctaccaggccatccacagcgggcagtgccctgccgccatcgtggggggcatcaatgtcctgctgaagcccaacacctccgtgcagttcttgaggctggggatgctcagccccgagggcacctgcaaggccttcgacacagcgggtgagtgtgcggctgcgcggccagggcaggcgggacagtggcacaggacggccccccgcacagtccccacgctgagcaggatcctgccagctccggggatcccccacccaagcacccaccccacaccccagagctcctcctggtggggtgggggccggcgtggggctgagccccgggcctgaggtgctgctctacccagggaatgggtactgccgctcggagggtgtggtggccgtcctgctgaccaagaagtccctggcccggcgggtgtacgccaccatcctgaacgccggcaccaatacagatggcttcaaggagcaaggtgggctctgccggggttccggggtgctggggggcaggtgggagccggggctggggctgcagcactgagccgagccctccgcaggcgtgaccttcccctcaggggatatccaggagcagctcatccgctcgttgtaccagtcggccggagtggcccctgagtcatttgaatacatcgaagcccacggcacaggcaccaaggtgatgccccccccccccgccccactcaccaccccatgagcctaacctacgcccatgcctggagaggtgacctggccagagcccctcaccccccatgtttcccacaggtgggcgacccccaggagctgaatggcatcacccgagccctgtgcgccacccgccaggagccgctgctcatcggctccaccaagtccaacatggggcacccggagccagcctcggggctggcagccctggccaaggtaggtggggctgggcttgggggtccctcaggctcctgctccctgggactgggttgcgccat

SEQ ID NO: 88485 - DNA, 1089 bp, Homo sapiens
ccggggaaagccaccaacagccgccttcgcttcccgtgggggaggccgcggaccctgaagggcctggaggagcccccggctcggcctccccgcgcccacaaaggcgccgccgcatcctcctcccggagccgccccggagccgaggcccagcccgaaggggacgccgcgagggaggaacgggggggcgcaggggccgcgccgggaccggcctccccatcacgtggcgcagcccggccgaagcgcaggggtcccgagcagcccccgcccggggcgaagggaggccgggcgcgccgcggtgttcccaccccctgcctggccgtcgaccccgcgtgaatagcaagcggcgaggacccagcgtgcgggcctggagctggcccggggcagccaagcctctgtgaatcgcagcgggtgggaaggcggccgcctccctgccgggacggcccaagggaggccgcactgccgaggggcggcgcgcgtatcaggccctggggcctcgtgcaagtggccagaccagcgctggcctccgccccctccccccagggccgcaccagccctcatgctggaggaggagccggcggcctgggcacccgttccgggtcttagggacctgggctccagggagggcctcctgtggtgtgtgggttggtatggggaggcaagcgtctgtgggttcacccgcgcaggtgaagggtgccaggcaacacctgcgtgtcctggccaggagtggttctccaggttggaccctgctggaggggttggactggctgggtcggtccacagtggggcaggggccacctttcccccagagcataggctatccccatttcgtccctccccagccctggtggctcttgggctggcctggacagcgggcccccaccccaacacgggtgagcatgggtgctgagtacccccctctagggctcccagccacctccatgccccggctttgggaccctgcctctccatttctttgatggcccttagcaggctggccacctgaggccttgtccccatctcaggtgaccctgcctgctcctcactgtgagccccctggtgccctagggatggcctgggacaagctccagg

SEQ ID NO: 88486 - DNA, 1040 bp, Homo sapiens
tcttctgcctcagcctcccgagtagctgggattacaggtgcccaccaccacgcccagctaatttttgtatttttagtagagacggagtttcaccatgttggccaggctgatctcgaactcctggcctcaagtgagcaacctgcctcagcctcccaaagtgctgggattacagacgtgagcctccgcacctggcaagtttttgcttcttctttgtgcctgccacagaaagggcgtctgggtgcttctgttagcgaatgtgcttgctgcccccgctgtgaggacagcaagggctgtgtgtggcaggggcgtggcattgtgtgtgcaagagctctaccgaaatgctgtgtgtcacagttcactgttgtccggccctccccaagttctcgatgtaatggaagttactttggttttgaaaaggaacatgctgttctttctgagtgtttgcattcaacacaagaggaatccagaagtgatgcacagagaacaaactctgtccccatcccattcccagggtggctgttgcaccacgccctccctcctgcccctgaggcccggaagccaggcgaggagcccaggaggcctttggatcgcagcccacctttgggacaggtgcagccccattttacatctcaggtaacaccccttcatctaagacatgcatttttaaaaatatttccctaattgtgtcgttttcattacagaaacttcagattacaataaacacaatataaaaagcctccaattttcaggatccagatatagttattagtaacatttcaatgtgttttctgctgggtttttgttttgttttggtttggttttggttctcatttgtttgtttgttttttgagacagtcttgctctgttgcccaggcttgagtgcagtggtgcaatctcggctcactacaacctccccctcccggttcaagcaattctcctgagtcagccttccgagttgctgggattacaggcatgcaccaacacgcctgactaatttttgtatttttagtagagatggggttttaccatattggccaggc

SEQ ID NO: 88487 - DNA, 1089 bp, Homo sapiens
gctgggccgacccgaaagtgagtccgggaagtggaggccatggcctgagtgtgggtcaggttctgggtgtgcacctggttctgggtgtgcgccaggttctggatgtgggtcagattctgggggtgcaccaggttctggatgtgggtcagattctgggggtgcgccaggttctgggtgtgggtcaggttctgggtgtgtgccaggttctgggtgtgtgccaggttctgggtgtgcacctggttctgggtgtgcatctggttctgggtgcgggtcaggttctgggtatgcgcctggttctgggtgcgggtcaggttctgggtgtgtgccaggttctgggtgtgtgccaggttctgggtgtgggtcaggttctggatgtgcgcctggttctgggtgtgcgcctggttctgggtgtgcgcctggttctaggtgcgggtcaggttctgggtgtgcgcctggttctgggtgtgggtcaggttctgggtgtgcaccaggttctgagtgtgcgcctggttctgggtgcgggtcaggttctgggtgtgcgccaggttctgggtgtgtgccaggttctgggtgtgtgcctggttctgggtgtgtgcctggttctaggtgcaggtcaggttctgggtgtgcgcctggttctgggtgtgcgcctggttctgggtgcgggtcaggttctgggtgtgggtcaggttctgggtgtgcaccaggttctgggtgtgcgcctggttctgggtgcgggtcaggttctgagtgtgcgcctggttctgggtgtgggtcaggttctgggtgtgcaccaggttctgagtgtgcgcctggttctgggtgcgggtcaggttctgggtgtgtgccaggttctaggtgtgcgcctggttctgagtgtgtgcctggttctaggtgcgggtcaggttctgggtgtgcgcctggttctgggtgtgctcctggttctgggtgtgcaccaggttctgggtgtgcgcttggttctgggtgcgggtcaggttctgagtgtgcgcctggttctgggtgtgggtcaggttctggatgtgcaccaggttctgagtgtgcgcctggttctgggtgcgggtcaggttc

SEQ ID NO: 88488 - DNA, 1052 bp, Homo sapiens
cgcacacccagaaccaggcgcacacccagaacctgacctgcacctagaaccaggcacacacccagaaccaggcacacacccagaacctggcacacacccagaacctggcgcacacccagaacctgacccgcacccagaaccaggcgcacactcagaacctggtgcacacccagaacctgacccacacccagaaccaggcgcacacccagaacctgacccgcacctagaaccaggcgcacacccagaaccaggcgcacacccagaaccaggcgcacatccagaacctgacccacacccagaacctggcacacacccagaacctggcacacacccagaacctgacccgcacccagaaccaggcgcatacccagaacctgacccgcacccagaaccagatgcacacccagaaccaggtgcacacccagaacctggcacacacccagaacctggcacacacccagaacctgacccacacccagaacctggcgcacccccagaatctgacccacatccagaacctggtgcacccccagaatctgacccacatccagaacctggcgcacacccagaaccaggtgcacacccagaacctgacccacactcaggccatggcctccacttcccggactcactttcgggtcggcccagctctgcacggagcctgttccccatctcgatgagctgctctttctccaggcggaggctgatgatttttctggctgcctccttcagctttctctggagtcggtgcatagataaggtctggggggcacgtgccactgaccggaggtgcaggaaaagctccccctggtcctcggcctccataggccctctcttggtgaggccctgtaacaaaactcacaggcagacacccctgtgaggctgccctcatgggaggacgccaggggtgcccacccaaggagcctcttcacctgctcttccagggtgggcactgctggctgtcactgggtgacatccttccaaaagaaagacaaaaagagtcgctgctcccagtgcttcagtgggttccttctcttccacaaatagaataa

SEQ ID NO: 88489 - DNA, 1030 bp, Homo sapiens
gtggctgggtccaccctgctctgcacttgctctgggggctctcccagccctgcccaccccgtggctgggtccaccctggtctgcttgtttgctttcatagctccgttcctttgtgcataaccgcgtttatgatcttttaaggttgttgctttcctccctctccctgcatgctggctcttctggttttgtgggcatcaccctcatccatggtgttgggttttctccggcatctgggcatccttggcgcctgctcgtctttgtattgggcgtcccagtgtgcccatccacaggagctcgggagcatgtcagcccagcgcaggccatgcgagagcaggagggacagcggcagccctgcctttcccatcgtgcctctgcttttcctgtggaagggacctcaggaagcattaatgctgagcggttggacgtgtccttaggtacaagcaacagctgtccctggcagtggaaagggagcggagcctggagcgtgatcaggtgcagctgggcctggactggcagcgccgctgtgatgacattgaaagggaccagatccaaaagtcagaggccctgattcagggtctgagcatggcaaaaagtcaggtgtgtgcggccaccagggcctggggccttctcggcgtctctgcagaggtggggctgggcaggacgggtctggttcttaccaaatggttctttaaatttgaaaacactaaacctcactgagtaattagagtaataaattagagtaataaaaatgcaccccgcctgtccacccgccttgactttcttgcataagctgtttctgtagttgaccagccgcgtggtttgagtagcgctgcatgatccccgctggcctgcaagggcagcctggggtatgcatgggcaggaagggtttggcggcctggccacagtggggagcctggtgctctgagcatctcccacctatgtgtgccattggagcctcagcaggcatgggagctgcccggtcatccacacagggactgagtcccagcgtttttcccaggttgctgccaag

SEQ ID NO: 88490 - DNA, 1126 bp, Homo sapiens
cggtttttggttgtcaggttttttttttaattgtatcctggacattttgggttttatgttgtgagactctgggccctatttaatttcctcttttatagatgggtgtagcatgctggtccaggtggggctggaagttctgctaccccgtgggtcctgctgaagccaccccttcataaaagcaaagcaccaactttcacatgtcaagtgcaccttgaaaatgtattacctttgctgaatatttggtatggcttttcttaatgctgttttattaccatagtgacaagaatggtgagattgaccaccaccgggaacagtatgaaaatctaaaatggacactggagagaaaacttgaggagctcgacggtgagcttgctctgcagagacaggtagagcctctgggtcggccccttcctgggtgctttccctgcctgcccactgtgaaactgaaatcatatagggctgaggaaaagacaaccatttggttcattgcctgcattctccttgggagtaaaatggggtctttggggcagatgccactctgggatggtctgcagggaaacaggatgggatgtctacatgcagccacctccacagtgtttccttgttttctttcctcatggattagtcagggttctccagggaaacaggcaataggagacgtgtagatatataggagataaattgtaggaattcactcgtgcagttacggaggccatgaagtcccacagtttgtcatctgcaagctggaaaacctgggaagctggtggtgtaattcagcccaggggcaaaggcctgagcaccagggagccactgatgtgagtcctggtccagctctgaaggcccaagatgcaggagcccaatgtccaagggcaggagaaggcgagtgtctcagctcaagcagagagagcgagttcacccttccttgcatttcgttctattcaggccctcagtggattgaatgacgcccatccacaggaggagggctagtctcttctggaaacacccttgcagacactcccagaaataattttttaccagctatccgggcagcccgtagcccagtcatttgacacatggaattaaccagcacacctcagaaatgatgaaacttttaaatttattttta

SEQ ID NO: 88491 - DNA, 1073 bp, Homo sapiens
tctgcaccccactctgggtggtgttgggagcacccaccccacacctggctccaacgcttgctcccccacagtggccctgggtcagaccccaggcccaggccgcccttttctgcaggaaaggaggtgggggtgtggacaggtggcaccatccctggccagtgagcagcttcacaggacgcccccctctgaccccacagcccccagtcttgacttctcccccagacccaggtgcctccacctgcccctggctgccccaacttccttttgttcccagttccagctacagggccctccaggccctggaatgtcctcctaggggcctggcccccaggtccttcccaccctgctccctggcaggcttaagctccctggggtgcgcagtcccaccttttccaagagcaacctttgtgggaggggggcgggcaggaaggggaggctgggatctgcttcctccccatgggctgccccgagagtccctacctctgtgtcctgaaatgacttaggaaatgcggagaggcttttctccaagggtcaccacagccgctgccccagggagggtggcagaacaggcccccggacctatcagggccagatctcaggtcccagggaaccttccagggtcgggggagccacacagcccacatcctgcgtccttgggaaccccgcacaccattttccagatcccagcagggccaccccgtcctgacccagtcttggccgtaccacccagcaccagttgccgccccatggacaggactggggccaggactggccgggtcaggggaagaaagccgagtcacggggaaggacattccggccgagccacagccccgcctccctggggtcctgggctgcccagctcctgaccctgcctgccttacagctccctgcccagaggatctggtgacacaactgtcacagcctgtcattccacacctgtggccacaccgtccccagactccagacccacgcggggcgtgtggcgggacgtgcccaggctggatgggggatgcagccaggacggtgccaggggaggctggtgccctccaccacacagagcctagacccaggac

SEQ ID NO: 88492 - DNA, 1121 bp, Homo sapiens
atacgaaaagtgggttggtcaggagcctccctgggtgttgggccagtcaagagacaggagccgcagagtggaagggaagcccttagctctggccggggcctccaggggtggctggagtcggtgagggacgatggggggagccgaggggcggctgtcctcctctctgtcccagaggcatgggctgaaagggtccctctcctggtgatggccagagtcaggcctgctgggcgggaaatggcagttggcccaccccaaggcccaggggcttgtccatgctgagcacaagggtgggaggtcttgtgtctgttggggccggggagtccaaggtcccagcttcactgcacaggcctggaagtcaggtgggtgctggcctgaccctgctgaaggagggtctattccgccagcgtggtgtggaggcggctgggctcgactccctcatggagggaaggaactgaggaggtgctaggaggccgtgggggggtgtctgcccccagagaggctttgagtgcatgggggctctgccgtggcacgtgcagcgtctgtcccccagggccccatggtgtggacagagtctggggtgggcacctggaggcctggtctcaaggcaggcttggtaacgaccccatgtgaccttgggcagggcccgccatccaggccacccagaaagccatgtggcctgcacgatcaggccagaccccactgactggagcggggcactttactttggaggggcagctaccagagggctctatggatcccagcccagccgtcaggccggacgggtcccccctactggcctgcagtgacccttatgccaggctcggctggctcagcggtgggtcctggggtgacctggccacgtgggacagaagggcctgtgccgctccctccagtgaggtgccaaatgtgggccacactctgggccccagcgggggccttccgggcagtggcgcagagccattggaggtgcccgggccctggggcaggggcggggcgggagcagacagagctcagggcgtcctcctagcgtcacctgcccgagtcaggcccatctgtgaaatgggccacgccgggcagccgcacgcaacggaaccgaaccgccgggctcctgctccgagacc

SEQ ID NO: 88493 - DNA, 2299 bp, Homo sapiens
gggggctgcttgtcccaggaggtaatctgagtcctggccgagcccaaaaaagccactgccctttagagccagctgtgagggtgcaggaggcagtgcagagggagtgggacccacagctgctagcctccctccaaaccctcctgcctccaccagacaccaggtcagggggccacaagtgtgggtgccgggcagctgcccctcagctgagctgccgggccacccagctcgtgtccctcccctgccaggctgcagctgggatggtcacccgggcagcctgagtcagcctgctttctctctcaggtgaggcggaaccaaccctcctggccatgggaggggccgtggtggacgagggccccacaggcgtcaaggcccctgacggcggctggggctgggccgtgctcttcggctgtttcgtcatcactggcttctcctacgccttccccaaggccgtcagtgtcttcttcaaggagctcatacaggagtttgggatcggctacagcgacacagcctggatctcctccatcctgctggccatgctctacgggacaggtgagggtggcctcacaccgggccccctgtccggggctctgctggcggatcctgctgggcgcgtgtagctgggctcagcaacagggccttccgcctgctccccagggaaccctggagggaagcccttggggccaggatcctgctgggcagcaacatgctctccacggggccaacccaggcagggcgcgaagtccatcctggcccctgtccaaacgggtcggctgtatttatagaccgtctcagaggacaggctcctgagagccgttcctgaaaaggtggctgttcctgagctgcagggacccaaggggcccagcaggcggcgctcacgtgtcatcatggcctgcgctcggggagcctgcccacggggtgcccctggtgccccgcggggggaggggtggtgtgggaaggggaggccggctccaggctgtgagctcagtcggctggcgggggtagagctggctgcaggcccggcccctctcagctgctgccctctccaggtccgctctgcagtgtgtgcgtgaaccgctttggctgccggcccgtcatgcttgtggggggtctctttgcgtcgctgggcatggtggctgcgtccttttgccggagcatcatccaggtctacctcaccactggggtcatcacgggtgagtggggccggccggtgggccgcacgtgccaggaggggcaggggccgtgcacttctgctcctgggtccaggcctctggaggacagcagggcgggtggctgcggggtgtcccggccccacctcgttgtccccctctcgagtgggtgggtggcaggggctctgcaccctgggagcctgagcctgtgggaacctgggggcagagatgagggtctcgggctttggggcagccttggggggctctcaccacattccctttcctccagggttgggtttggcactcaacttccagccctcgctcatcatgctgaaccgctacttcagcaagcggcgccccatggccaacgggctggcggcagcaggtagccctgtcttcctgtgtgccctgagcccgctggggcagctgctgcaggaccgctacggctggcggggcggcttcctcatcctgggcggcctgctgctcaactgctgcgtgtgtgccgcactcatgaggcccctggtggtcacggcccagccgggctcggggccgccgcgaccctcccggcgcctgctagacctgagcgtcttccgggaccgcggctttgtgctttacgccgtggccgcctcggtcatggtgctggggctcttcgtcccgcccgtgttcgtggtgagctacgccaaggacctgggcgtgcccgacaccaaggccgccttcctgctcaccatcctgggcttcattgacatcttcgcgcggccggccgcgggcttcgtggcggggcttgggaaggtgcggccctactccgtctacctcttcagcttctccatgttcttcaacggcctcgcggacctggcgggttctacggcgggcgactacggcggcctcgtggtcttctgcatcttctttggcatctcctacggcatggtgggggccctgcagttcgaggtgctcatggccatcgtgggcacccacaagttctccagtgccattggcctggtgctgctgatggaggcggtggccgtgctcgtcgggcccccttcgggaggtgagcgctgcgcccccaggcagttccccacacctgcccttcccgtcagacgcccgctttgcgaggggggggacgcgcacccctcggc

SEQ ID NO: 88494 - DNA, 1028 bp, Homo sapiens
tgggccgtgaccaccaggggcctcatgagtgcggcacacacgcagcagttgagcagcaggccgcccaggatgaggaagccgccccgccagccgtagcggtcctgcagcagctgccccagcgggctcagggcacacaggaagacagggctacctgctgccgccagcccgttggccatggggcgccgcttgctgaagtagcggttcagcatgatgagcgagggctggaagttgagtgccaaacccaaccctggaggaaagggaatgtggtgagagccccccaaggctgccccaaagcccgagaccctcatctctgcccccaggttcccacaggctcaggctcccagggtgcagagcccctgccacccacccactcgagagggggacaacgaggtggggccgggacaccccgcagccacccgccctgctgtcctccagaggcctggacccaggagcagaagtgcacggcccctgcccctcctggcacgtgcggcccaccggccggccccactcacccgtgatgaccccagtggtgaggtagacctggatgatgctccggcaaaaggacgcagccaccatgcccagcgacgcaaagagaccccccacaagcatgacgggccggcagccaaagcggttcacgcacacactgcagagcggacctggagagggcagcagctgagaggggccgggcctgcagccagctctacccccgccagccgactgagctcacagcctggagccggcctccccttcccacaccacccctccccccgcggggcaccaggggcaccccgtgggcaggctccccgagcgcaggccatgatgacacgtgagcgccgcctgctgggccccttgggtccctgcagctcaggaacagccaccttttcaggaacggctctcaggagcctgtcctctgagacggtctataaatacagccgacccgtttggacaggggccaggatggacttcgcgccctgcctgggttggccccgtggagagcatgttgctgcccagcaggatcctggccccaa

SEQ ID NO: 88495 - DNA, 1677 bp, Homo sapiens
gaaacaagtgtctgagtggctgggcggggccggcaggcacagggaggaggtacagaagccggcaacgcttgctatttattttacaaactggactggctcaggcagggccacggctgggctccagctgccggcccagcggatcgtcgcccgatcagtgttttgagggggaaggtggcggggtgggaaccgtgtcattccagagtggatctgcggtgaagccaagccgcaaggttacaaggcatcctcaccaggggccccgcctgctgctcccaggtggcctgcggccactgctatgctcaaggacctggaaacccatgcttcgagacaacgtgactttaatgggagggtgggtgggccgcagacaggctggcagggcaggtgctgcgtggggccctctccagcccgtcctaccctgggctcacatggggcctgtgcccacccctcttgagtgtcttggggacagctctttccacccctggaagatggaaataaacctgcgtgtgggtggagtgttaggaccaacggtttcctaggagtatgtggttttgctgtgtggcctgtgtcctgactcgcacgtctgctgatggcctggctgttcctaccgtggctctgtcctcgccagctttccctgcagcggcatagcattcgtagcaggggcaggcgctgcatggagggggctgcggggcaggtgcctggaggccgctgtgccagggtggcctctgaaatgtgccagggagcccctacgtggtggttagatgggagctgaggtggaacaagccactttattcactgctgtgtttaagaaacaggaccctcctgccttccctttttcgcccctctgcctggctggcagtgtgcgtggtgtggtcagtgcccagggctggtctttgcaccctgtcctccatccagcccggcccagcgcttgggcttgtcctggacacctaacacccacctgccctcgtggccagcagtggcctgcgtggctgggagcccggtcagaggccgccggggccctcagtaggtgcgtcgtgggcgctggggacggcagcgggtgccctggcgggccgcgtgcagccggagagatgccatgtccctgctcctctgcaatgaaaagcaagcgaaaagtgcacatctcaggtccagctgtccccatctgcccctggccttgcgccagctgggcttgagctcttgcagcccaggctcctgcctgcagcctcagggctgtggaggcctctagcagggctcaggctggcgggcagtgccagcagttgcagggatcaaggtcagactctgcacagctaggcccatgtgtctcggcagagtccaccagtcccacccagcagctgaagggagaaagacgaggaggcagggagcagacgaggaggtggggagcaggcagcccgggcctcagaggacacatggccttcccccgctggcacccccacatcagggccaccaggggactgctcacacccaggggttgccgcctctggacctggctgtccctggttctgctgacctcaggagtgacctgggcttacagaggtactggcagggaggtcatgggccgggtgaggggtgctcgctcctggaaccctgtttccaggtatctcgggccctcaccctcccctaggcaggaagcagtctctctagctcaactgtcacccctcgtctgcc

SEQ ID NO: 88496 - DNA, 3367 bp, Homo sapiens
atctcacaggaaggctttggccgtgtgtccttcctgccagactctgccagcaccagcacacgtggtggctgtgagcagcagctcccgttttgaatcccaagggggaatacaggaggctcaattgctctgagcgcctcacctgtttgctcgggtgagctggagacacagtcaccgtgggcagtgactcatccccggccagtcttcctcctcgggccgtcgctcttccctgttctttctgctcctctcaggagaccttgcgccctgtggagatgggaggaggcagcaggaaggtctcccagggcttgctggccgtggctgggtgtggatgggtggaagaccacgtggcagcctgcctgtaggtcacagaggcccccatagttgtagggccccgccccagcccggactccgcctgggtctgttccctcttcgccccctctcttttcgggctgttggtgttcggccagggctctttggctacagtagcctgggccctaaaggccatctagttgctgagtctgtttggggtttttacttggtgagaagaaggccttgtcattccaacagtcgatgactcgctttgatcaactcctgcccaggactaggcctgagccctgtcgtcgtaccggcgaggatgtgcgtctcccctgccttcaggctgtgccctgagacccagttgtggggctgcccagcacctgccatcctgctgggatcaggttttcttagtgcttgagaagactcaggagggcctgtcccatgccattgttggccttaagagcaagtgattccagaagaggagtgggcaccactctcatccagaggcccgtcctgagaggcaagtgaggctgtgctctgtgcctgggctcccccaggtggcacctgtcggtctgtggacctggttgaggcaaggatgcccatctggacatggagccgacacaggtagtcagggggccagcgggacgcttaccaacagctgtcttttccccacctcagaatagcattcctttcgaacaccacggcaagtagctgctcgtctcccatcggaaggcagcactgggtgagtgtgcgcgtggcgggcgccaggcagcagcgccaggtgggtgggagccaccatgccccacccatgggagcttgcaggtgggctgggcttgcatgccaggtgctggaggtagagtgaggcttcttctgctctgttcttcttgtggggtgcagagcggcggcagtccgctgcccagtcttggggggaggctgtccacagagagctttggaacagagtgaccccaggagaccatcctgttggcctgtggcctccccgtgactgcgttccgtgtgccgttgctctcctcctgtcctgggtgcccacccgtgaggcaggagtggcaaggcgggtgccccgagcacttgagttgccttgtctgcggtcggccgtgcctggaggggcgtctgtgtcctgctcagctgggtggctccacgcttggtgttgggggctcctaagctcttgctgcgccacactctgggcagtctctgccatgccagcttttctagtcgcctctctcttcctgtctcatttatctctgtccttgttttgtgtttcttttcacacttggtctctgcccagccgtcttgtccacgcagcttcgtctgtattaactcctccagccgcagcccactcactccccgccgtcggtgcatggccggcgtccacgctgtgctccctcctcggcggccacgcgcgctcggcggctccttccagcaggggcttgcgcttctgtcgggtctgtgccgctgggagacccgctgcagttttcacactgtgcacactctggaaatgtgttgacaggaactgcttttcatgtcttccctgagaggggtacccattttcaaacaccaggttcctttccaggaagggaggcaggagcacccgtctccgctccactcggatccttcgaccctgccgagcccggctccgcgggcaccttgcttgcatgcctcttcctccttcccgtcttcctgtcactcgttctgctgagcacgtgtcccagccacagaggcccctgtgcgtggcgggggacgcaggcgtctagactggggctaggcggtggcggtgcgtcccctccctgcccagcaccgtcactgtggtatctgcctggccggctcccccagccccatgctgaccttctcctgtgctttggctccgacagattcctggtcgggtggcttccagtggtcttcagtctgtcgtgcaccgatgagaactctccttattgctgtgaagggcagacaatgcatggctgatctactctgttaccaatggctttactagtgacacgtcccccggtctaggatcgaaatgttaacaccgggagctctccaggccactcacccagcgacgctcgtgggggaaacatactaaacggacagactccaagagctgccaccgctggggctgcactgcggccccccacgtgaactcggttgtaacggggctgggaagaaaagcagagagagaattgcagagaatcagactccttttccagggcctcagctccctccagtggtggccgccctgtactccctgacgattccactgtaactaccaatcttctacttggttaagacagttttgtatcattttgctaaaaattattggcttaaatctgtgtaaagaaaatctgtctttttattgtttcttgtctgtttttgcagtcttacaaaaaaaatgttgactaaggaattctgagacaggctggcttggagttagtgtatgaggtggagtcgggcagggagaaggtgcaggtggatctcaagggtgtgtgctgtgtttgttttgcagtgttttattgtccgctttggagaggagatttctcatcaaaagtccgtggtgtgtgtgtgtgcccgtgtgtggtgggacctcttcaacctgattttggcgtctcaccctccctcctcccgtaattgacatgcctgctgtcaggaactcttgaggccctcggagagcagttagggaccgcaggctgccgcggggcaggggtgcagtgggtgttaccaggcaaagcactgcgcgcttcttccccaggaggtgggcaggcagctgagagcttggaagcagaggctttgagaccctagcaggacaattgggagtcccaggattcaaggtggaagatgcgtttctggtcccttgggagaggactgtgaaccgagaggtggttactgtagtgtttgttgccttgctgcctttgcactcagtccattttctcagcactcaatgctcctgtgcggattggcactccgtctgtatgaatgcctgtgcttaaaaccaggagcggggctgtccttgccacgtgccaagactagctcagaaaagccggca

SEQ ID NO: 88497 - DNA, 1051 bp, Homo sapiens
agcggactgccgccgctctgcaccccacaagaagaacagagcagaagaagcctcactctacctccagcacctggcatgcaagcccagcccacctgcaagctcccatgggtggggcatggtggctcccacccacctggcgctgctgcctggcgcccgccacgcgcacactcacccagtgctgccttccgatgggagacgagcagctacttgccgtggtgttcgaaaggaatgctattctgaggtggggaaaagacagctgttggtaagcgtcccgctggccccctgactacctgtgtcggctccatgtccagatgggcatccttgcctcaaccaggtccacagaccgacaggtgccacctgggggagcccaggcacagagcacagcctcacttgcctctcaggacgggcctctggatgagagtggtgcccactcctcttctggaatcacttgctcttaaggccaacaatggcatgggacaggccctcctgagtcttctcaagcactaagaaaacctgatcccagcaggatggcaggtgctgggcagccccacaactgggtctcagggcacagcctgaaggcaggggagacgcacatcctcgccggtacgacgacagggctcaggcctagtcctgggcaggagttgatcaaagcgagtcatcgactgttggaatgacaaggccttcttctcaccaagtaaaaaccccaaacagactcagcaactagatggcctttagggcccaggctactgtagccaaagagccctggccgaacaccaacagcccgaaaagagagggggcgaagagggaacagacccaggcggagtccgggctggggcggggccctacaactatgggggcctctgtgacctacaggcaggctgccacgtggtcttccacccatccacacccagccacggccagcaagccctgggagaccttcctgctgcctcctcccatctccacagggcgcaaggtctcctgagaggagcagaaagaacagggaagagcgacggcccgaggaggaagactggccggggatgagtcactgccc

SEQ ID NO: 88498 - DNA, 1397 bp, Homo sapiens
cggaacccggctacccgcggcctcccttccacagcctccggccgcctgcgggggacgcaggaagtggctccccccacacccctcacccctacctcacacacgggtgagtgcccccctcccagcgctctggggctggctctggggtgacttcttgtgtcttggggttggtggggacaacagggtacttggtggtggacactaagtgccctgtgtcaggcgatgctcgctcctgagggtggatgagccaggctgcccaggcgcctttagaaatgccggcacctgctggtgtgcgtgattcctcccgcatctcacgttcctcccctgtgagccccttgacctcgctcccatgtccctttgtgtccctccggccggatctgagtgttggtggccatcggccacagccaggtcctgactgtccaggcagcccagggtcctctctggccacagcctctcatagaaagccccgagtgagaggcagcagacgggggcggcccactccgtttctctccctgtcctcagctaacacctccccccggcccgtctccggcatggagagagagcggaaagtgagtatgcggctgcaccgcggggcccccgtcaacatctcctcgtccgacctcacaggccgacaagatacctctcgcatgtccacctcacaggtaggtgcagagctcccgggcgggcgctgggcctcgggctaccccgtccgagtcaagagcgggctgtggtttctccagggcttcttctttcctttcttccccccatttttgagagtttttaatctcgccagggtgtggcgtcttggttgcagatgaggcttctcgggagggcctgggagacatgctgggccgtcatggggcttgtctcctggttgcaggtggccagtctcaggtctcaggtccctgaggccagcaaaccgtgggggctttctcctgctgtttgagtgccccgctgcccgcagccgtccccaggcagctgacaccgctcgcctgcttgcgccccattgtgggtgcccccagcccgagggagccttcctcattcttcctcattcttgccactggccagggatggaggcccgtagggacctccacgggcttcttgtgagaccctccctggtggcatgccctgcaacgaggctttccttcttttgacggcctcacctgtcttcccttggacgagaagtaccctgttgcgcagcccaggcctagccacggccaccgcctcttcagcatcctgcagcggtctctcctctcctcgctctggcttttgttgtcttttgcgtttgctaacgtgctctttgaactagaacagctttctccatatggatccattatatttcttcaaatagttttctgggttgttcgccaacaggggcagggttagtggggcagggctgt

SEQ ID NO: 88499 - DNA, 1218 bp, Homo sapiens
ggggcctctctctgcagtggctgccctctctggccccctccaggagctcgggagatttcctttgcatttgtaggattgccccaggatacacacctcaaatgaaactaaattgtgctttatgacttcttttttttttttaagacacagtctcactctgtcgccaaggctagagtgcagtggcgtgatctcggctcactgcaagctccgcctcccgggttcataccattctcctgcgtcagcctccccggtagctgggactacaggcgcccgccaccacgctctagaactttttttttttttttttcagtagagatggggtttcactgtgttagccaggatggtcttgatctcctgacctcgtgatccgccctcctcagcctcctagagtgctggggtgacaggcgtgagccgccgcacccggccgtgacttgaatacttttcgatgctttctcaaggcttcaggtcttagaaatctgacaggtgttttgcatctgtccttctccccttgagtgtgcagcagcaggaggtagacagcgacgttggcagagacaccttgagtcgcagttgggtttcatgagttagctttgagtttcttgttttgtagccgaatttgccacatacctgaatttctgccgttccttgcgttttgacgacaagcctgactactcgtacctgcggcagcttttccggaatctgttccatcgccagggcttctcctatgactacgtgttcgactggaacatgctcaaatttgtaagtcgcactgccagcacgttcgctgagtgtggtgtgcgggggatggcttgtcagtgagaggccggcggccgtcttgttgaggggctgtaccatatagggagtgtctctggttgtgaagggcaagtgtgtagtgggcaggacctggactgagtgggtgtctgcctgccagaaaggggtgccaagaagtaagacgccattagggaacgcagaggggtccatggaattcctgggtgtggacagcaggaggccccttccctccctgtcaccaagcggagctagggcccagagcatgccctgggggcagagggtgggggctgggggtgcgcattcccattcgctgtgccacatggtcgtggtgcccacgagatgagtggggttggggcctggtgaggtgctacccgtctagcctgactgaccctgtcatgagctgattttccctgtggctttcttgatgcggtgtga

SEQ ID NO: 88500 - DNA, 1089 bp, Homo sapiens
aagatctgcattttagaaaacaaatgatgtccgagaaggcaaaaggcctaattctggtggtggttcttgaattcactttgagactaaaccggggagttgacaaataatgggaagaaattgtttcatccagaagccaccagatcttgccactgccattcttgtgcagtgtctgctatggatgatgcagattgtccccttgtgcagattgtcctgttatgggtggtacagattgtccccttgtgcagtgtttgctgtgggtggtccagattgtcctgctatctctgaaaaaaagggcagcaagcaccactcattgcggttttccttcctttcacgtgaaagtcaagtggtggtgccaggttctgatctttacgtttgcttgatggatgctgccttccaggagaaagctccacagcgagtgcattctgttctctgcagcttgggaagaatgagccttaaaaacacactggtcactgcccatagcagccctgggcagtgggtactgagctcttcagccttatgttgcaaatgaggaaactgggtttagaaggctgtgtaacttcacagaggacagacttgaacttgggcattctagccccccaggctactgctgaagcagctgtctgctcccagagaaggaaatggcggccaccctacgtggccttcagctgtcaggaatgtgccccagatgctcccacctgtcccaaatctggttgggacaatagattcaatacctgaaatagtagaaagaaactaaaagtagctatgttggtggaagatttggatagacacctagtttttatgaaaacctactggactggtgggcaaaacctggggacagttgtaactgctctttccaatcctaacatcccccaaaagcagccttagctcactccctccttggggaacccctcagcaaaggacatttacttagttcacagctgcttttcgtcaaggctgagatggtaggcatggtttgagggagggaagaggggagtacgtgtgtagaacccgggccagtgggtgacggttctgtggctgagggtgggcgactgtcttccatcatctttttcttgtgaaatattgtacaac

SEQ ID NO: 88501 - DNA, 1258 bp, Homo sapiens
tttaaattttgcttcatattgggtcatggtttctgaaatcaagagtgtgtgtgaataggccagacgcagtggctcacacctgtaatcccagcactttgggaggccgaggcaggcggatcacgaggtcaggagctcgagaccatcctggctaacacagtgaaaccccgtctctactaaaaatacaaaaaaagttagccgttcgtggtggcgggcgcctgtagtcccagctacttgggaggctgaggcaggagaatggcgtgaacccgggaggcagagcttgcagtgagcccagatagcgccactgcagtccagcctggatgaaagagcgagactccgtctcaaaaaaaaaaaaaaaaaagattttgtgtgaatttcaatgcatgctccccgtggtgtcgtgtgcccctcagtggtcactggagctgttgccagtggcacgtgtgttgctcagtggggccttcctgatgtgtgatccctgagtgaggcctctgctccttcgcatgctttgcttatagcttgggggaagtcccttcatactctctgggctcgttttctccgagcaaaacaagggttttgaacttggcgaccatcatgacctcttccagctcagttactgtcccagttctgcgagccctcagcccagggccttaggtacctggtgttccacggtgggccaggtgtggagcagagcgctcctgtcctcccctcagagtccagctcttgcgagttccctggactttcaaacagttgggctgatggagcaggagggtattctctgcggggatttcagagccatgaagcgtgtgtctcaacagcagagcttcggtctggcaggagccctctttgggaacagagctttttgtctgaagagtggctgtgccacgtctgtggagccctcccagtgagaaggctccgcggcacatttgtaggtggatggttgggtgagtccccttgggcaactggccaaaggaaaacctgttcagggcctctgttagcccttttgtcacgggaaagggaggactgttgatttgattctttgacatcttttctcagcacaagcacgtaatctgtgctactacaagaaaccgacgtttctaagtttatgtgacacaaaatatctttggcagcacctgtggtcctggggaacccgttacagagaggggcacccagtgtgtcccatcacgggcctcacgtgaccagaggaggccacaggaatgaaaaatcccatcaccaacccagggaaagctcagcagagact

SEQ ID NO: 88502 - DNA, 1231 bp, Homo sapiens
ttgaatttgttttgttgacagaatgtcttttgtataaacagacaacccagacaacctggtgatctgcgtgtcaccaggttttggtttgttttgaatctgacacccagggctcagggtctttcaaattctcattccccttctagtagtgcttctcggatttaacctgtggtgaagaaccaggcttgtaattttcaacctgttgcatgccaaaacttgtgtataaggtcaaaatgctgcagcgatgccagattgcagccacagttactgagcgcctctgtgctgccttgtgcactgatggcagcttgaggatctgactttcagcagcatggctggtagagtgtgggggtgcccccggtgggcgaggtgggacagggctgcaggccagggggtctgagcagtgctcagcgaccttgaggcaggtggtgcctttggaatgcacagaccttggtgttctgcttcttgatgcttctgcccagcaggtgacgaggtccctgctgcaggccccagagagttgccatcctcacatctgtgtacaggacctgcatccagctactcccctgtagagactcggggcgaccttggtgtcggttccacaggagggctggctctgtgtgcttgcacatctgtgtgcttgcacagcgagaggtcccggccccatgatagggtgtgattcgtgttgtgtgccagagcggctggtgatgacttttgccccacgacagtcagtgctgcaggtgtgactggcagacattagctttatcagctacagagaagtggagtgagagatgctagtcagcagactgtgtggccccaagccatcggccccaggccatggggtcactgggctgccagctggcgagggtggcggtactgtccgaggctgcactgcgcctgcttgggggtgcagggagctgctgacataactagtgggatgagtcaccctccctcccggctggcgagttgagttcagagtccaggtccttagaggaactcagagtggtttttcatttacacagtacatttttcgatgaagtcatttctcttgtaattggatagactgtcccaactgtaggcaggaagaacaaaatttgttacctcgagtactctgaagagtctctgttgatagtaagtgacgttcttaaatctagaatggtcactggcggtgacccggtggtggcgattcctgtggaacgcagcagtggcaaggggtttggggcccaggctggaagtggca

SEQ ID NO: 88503 - DNA, 1583 bp, Homo sapiens
tgagccaagatcacaccactgcactgcagcctgggcgatggagtgagactctgtctcaaaaaataaataaataagaagtactttgaaactatctgttctctgatctgagaccttgtcaaacaactttgtgctttccaaagatagattaagacaaattttggtgtggttgtcaccaagtaattccagaggtggagggtggaaggctgtctcctcactcagcattctaccctccaggcctcacctcgcgctgggcatacagtcatgctggatacgggattgcgggcggctgtggctctgacaccctggggttggagcccccagacagccgtcccagacagccacccatcagggtacacgtccagttacttgagtggggttaggcacagctgatttttttttttcccatcagcattggctcctagcctacactgtggtcctttcagacgaccccacggaggaaaggcgaggtggtcacgttagccggagtaaggcagtttgaaagaagcgtgggtctgagcagaatggcagttagagtcaaagatggctgatctgaagactatgagatggatcggtcatccccaccatagttttgtttgggcagccagttacacataaatcgaggaactaggtcttcatcttgacctctgtgtgtcgtgtatattctagtatgagtatcgttaagaccattcctactgttgtcactttggtatcctccaggtggggttcaccttgctttgagcttggcttttgggttcttgtttttctaccggggactttctgtgctttcagatgtttgagaccaggaaggggggaaggctgtgcttcagtggagtgcctgtgggctagaagcgtggtgtgggcctgcctgccccgaccctgctgtgacagttggagggcgggtgctcactgcagggccctgccaggttgtcgtgttccaaaattgccccttcaaagggggcagtattttggggctatttcttgaatgcccaggctttggaaagtgggaccccaaaaagaacaatctgtcttcagtctgagattgccagatccgcaaggcccttcaggagggcaggttgggaaggtgacacagcccacacacacctgtggagcgcacaccttggcagcctgttgtgtgacctggccccggccctgtgccgccctccgcatccgtgtccatgtggtgtggccataaaccagaagttctttcacttatgctggcagagtaccactggaaataaacttggtaacatttgaaaacagccagtgtccttaatgtggaccatgagttcccagccccagaaccacaggggtgtctggcggaagaggactgttcagctgggctaggctagagggagaggcctgctgtgttcaccccgcaggcggcccatgcagagaggcagtgagagcccagctggtcctgcctctgttctcacctgtagtgtgttctggaggttagtggcaggactggattacctggctggtgggctggacagatgaatctgttggcatctgtacttgatcccatcgcaccatcagcttgtcagggcctccatttgtccacctgttacctggatggactgact

SEQ ID NO: 88504 - DNA, 1066 bp, Homo sapiens
agtctcaaggtagatttcaaaaacaatgggattagaaggttttgggttgtgtcatatttacaatggaaaaatatgcacgtgaacacaagtgtgatgaaaggttggcttaaatcttcaagtttgtaatttttttttttttcctgagacggagtttcgctcttgttgcccaggttggagtgcaatggcgtgatctcggctcaccgcaacctctgcctcccaggttcaagcgattctcctgcctcagcctcccgaaaagctgggatcacaggcgtgcgccaccacgcctggctaatttcgtatttttagtagagacggggtttcttcatgttggtcaaggctggtctcgaactccggacctcaagtgatccgcccagttcggcctcccgaagtgctgggaagccaccgcgcctggcccaagtttgtaattttaaagtaacttaattttccgcacttgttagtgggattgtgcaatgcacgagttattccaagatcccctgaatttgaggatatgtagcctgaggcggtgtgcctgcagaggggctgctgcagacctttgaggggagctgttttctgttccagcagccctagctttggggtgtgttttaactggggcacctgtcagctagggtcaggaatcccctgggatgtcagtaatgcctctggtcataccttttagatgaagccacatgtggacagtctccagttctcacacccttcccacttgtcaccagagagaggactcaggacccggtgggctgacagcgttaggacgaatccacacatatgggtggctcatactttcggtgcctggttaacctgccaggtgaccctgtcacatgccatattgttgcttttgaacctgtacatatgccttagtggactgctgagtaagcaggctttagacatttgggtttggctattaaacatttataccaggtggtcagctggatgtgttcttggcagtgtttgggaagtcagagtgcttggtcaatggaagtcgtttggcttatttatagaacaatggattttggcgaaagttttaaccccaggatctgagttacactgc

SEQ ID NO: 88505 - DNA, 1809 bp, Homo sapiens
gagggcatgtcctacctctacgcctcctggatgtatcagcttcaacatggagatcagctaagcatttgcttcacctgcttcaaggctgcctttctagactttaaagacttgctggagtcagaggactgggaagaagacaactgggaccctgagctgatggagcacactgaggcagagtcagagcaggaggggtcctcagggatggagctgagctgggggcagagcccaggacagcctgtgcaggggggctctgaggcatgggggccagggaccctggcagcagccccagaagggttggaagatgcaggtctggacccccactttgtccccactgaactatggcctcaggaggctgtgcccctgggcctgggccttgaggatgctgactggacccagggtcttccctggagatttgaggagcttcttacctgctcacactggccaagcttctttccttcatagcaggggtttctcaaagtggacctgcccccaggggagcccgtggtgttgaagctgggcattacctgggcagtggaccctgccgaggctgaggcctagttactggccctgcagcttgtctccatggtgggctgctatgataccatctacctacagaagatgaccccagacagggccctgaggaccccagggcagcactggaaattgctgctggagcctggtgaagtgtgggtggtgagactccaagatgcaccccaagagcaggacctgcactggtggatgctgagcattctagaaacatcgttaacaggacacagggcagagctggtccctgcagcctcagccctgcagaagaggattcaccatagtctcttattcaccctggaccaacagggagagcaagaagggagactcagcctgtaagccacagtcctccagccaagaacaggatctcagcacccctgagacacagagcaggggtcctgaggaaagcctggctgttgcaggagcctcggccatgggggagctgccctgtttccagcctcagtccagggccccagaactgagagactaaggctcatgtagctgccattgtcctgggcacaccaggacatcagagactgggaagggccagcaattgctgttccacaacagccaggggagcagttggcaaaggaaacatggggagcaactttaggggctgggagatagggcctgttgtggcctcagagggaagcattacaaatattcataacctggaaacaagttcttaccagttgattgtcacatagttctggatgtgttggcctgaatggctgttgtgctgcttgtgacatggggggcagggcacagaacttgtgcctatttcaccttggccatggggagggacattgcttgtaaaacacatgctctgcagaacacaccagaatctgtggtgacctggatgtgttctcgactttgccaggacaatctcaggggtgccacaagaccctgtcagcagcactaggatctctggtctacagtggagggagagctggttttaaatgttggccgttgatgcaatttaaccatttaattcctgttgctctatatgttgtttttaattttaaaaagtcataaaagctttcaaacaagctcctgtgtaagtcattcctcagcaagttttgttgattggccttatccttgtcctctcagtatctgggctaagccactttgctggcttgaaatcccaccaaatggtgggaacagaggatagaagggaagaggagcacgggagagatgagggttctggtcggtttccaggctcatcatgggagtttgtttcacattatttataaagaaatacagggc

SEQ ID NO: 88506 - DNA, 1037 bp, Homo sapiens
ctaacaataaaaaaagttagctgggtgtggtggcatgcacatgtagtcccatctactcaggaggctgaggcaggaggattgcttgagtccaggaggtcaagaccgcagtgagctgtgattgtaccactgcacttcagcctgggcgacagagcaagaccctgtatcaaaaaataaaataggccaggcgaggtggcacatgcctgtaatcccggcactttgggaggccgaggcgggtggatcacgagctcaggggtttgagaccaacctgggcaacgtggcaaaacactatctctacaaaaaatacaaaaatgatccaggcgtggtggtgtgtgcctgtagtcccagctacttggaaggctgaggtgggaggattgcttgagcctgggagttcacgctgcagtgagccaagatcatgccattacactccagcctgggcaacagtgagaccctatatcaaaaaataaaaataaataaataaaaatacatacttaaagaacagccatgttttgaacaataaaaatgtgttgtcaaacatataattaatatagatatgtgccccaaaattttttttaagtctatagaccaaaccacatgtaaaggttgctaatgttggccaggcacggtggctcacgcctgtaatcccagcactttgggaggccgaggtgggtggatcacgaggtcaggaagtcgagaccatcctggccaacatggtgaaatcccgtctctactaaaaatacaaaaattagctgggcgtggtggcgcgtgcctgtaatcccagccacttggaaggctgaggcaagagaatcgcttgaacctgggaggcggaggttgcagtgagccaagatcgtgccattgaactccatcctaggtgagagagtgagactccatctaaaaaaaaaaaaagtttgctaatgttgaggagacagatgatgccaatgatgatgatggctatgacggtggtgatggttatagtggtggtggtaataatggtgatggagatagtgaagatagtaaagaaggcccacaggaagagacct

SEQ ID NO: 88507 - DNA, 1016 bp, Homo sapiens
gggagacagagaggtgtttgcgagttggatgttttatcttgtctttcctgattctttgttagaacacccccagggcttggtttttgttctcaacctgtgattagaaataagatcctaaagtgtcagatctggaaggcccatgagagctgaggagatcaaatgcccggagctcgggagatcagatgacctggggtgtctggagccagtggtggcctcatctgcagcatcttcctctgtcctgcccaccacagagtccctgctggccccggggggcccctcctccgccacagggcccctgagcattgctgcgtttgtttctccagctcctccttcctgcagaagcagttcccagaggggcaatttctccagcctgcctggttggttgtgttgattggttatagttgctctttcaggtgaccgcagaccctctgaaggctgtggccgtgggtgtggctctatggccacctctctctcttctcctctcccaggtcgcgtctccttcttcacctcggggtccgagaacctacaccgcgtggagaaggtccactggggcacccgttacgccatcaccatcgccttcagctgcaaccccgaccatggcatcgaggacccagcgttcccgtagccagcagccgggccaaggtaacttcaggagggcccgtgtggaggcagccgcgccagtcgtgcacccacccccacgtccacccgctcctgttgcacagagtgccttaggaattctctgattttgatttgctgacgtgttaatcttttcatctgtgagtaaatgaagggaaccagcttttcacttctccagcatcatgtgtgcttgggctgtaggcctgggagcctgaggtggaggccaggaaagggacccagcaggacggggcacaagtccccatctgtgaatggacgggactcatccacccaggttcagcaaccccccgggactcgtccaggttcagcaaccccccggcccatcaaagactggctaaagcatcagccataaatggggacaa

SEQ ID NO: 88508 - DNA, 1062 bp, Homo sapiens
tagcagggactacaggcatgtgccaccacacccggttaattttttttttttttgtatttagtagagacagggtttcaccatgttggtcaggctcgtctcgataccctgacctcaggtgatctgcccgccttggcctccccaggtgctgggattacaggcataagccactgcgccgggcctgaagtggcttttataaggagcatgtctggctttttttttttttttcttttgcttaaaacccatgagtctctattgcaatatttctcaaactcccgggctcagaaggcagttagtgtgtattggagatccctgaagggaaagggagggaagagtccgtgtttcctgagtggacagcgctggccccaggcaggaagccctcgtttcaggggtgacgtgtgagtgaaggccgggtcatggtgcatgcactttgatgatcggggagcgttttctctggcctcactccgtgtttgggtgacgtggcctgttttctgttctcagcaccaagaaggaccgagccccgcgggaggtgcagaggctgtggcagaggccgtggctaaggaccgcgggcctgggggctggctttgtgctcaccgcactcctgctctggagcagcttgggggccgacgacggggtcgcagaggtcctggcccgccgtggcgaggtcgtggcagggagattcatcgaggtgccctgctctgaggactacgacagtcaccgcaggttcgaaggtagttcaggaaagcaacactttaaaatgagactcagtgtggttaaaggacattggctgcgacgaaggggtgggaattgggttggatgtggtatgcttgggggtagcagacaacctctcccctcctgcaggctggctagtccacgtctgactgggagtgcaggtgtttcgcgccctgcccatcactgcccggccacggttggcgttttagtaagctgtgcggtccagcggaggagatggtttgccttggaaagatagggatgagaaagtcaaaaccagaaagattttttgactggagaatgtggtagagtcagagaatgttggggaaaatgtaa

SEQ ID NO: 88509 - DNA, 1050 bp, Homo sapiens
cactttcagtttgtacatacgaccagttacacacaatttacacccacaggctctgtgcgagcctctctcagcagccccgcatcgccgctgcgggacagccacgctgggaggcgtcgctcgggagcccggccgtccctcttcaggtactggcgcgggggaaacgcttccagccaggagccgcccggcctagcgcgcagagccagagccgcacccgcacctcacctgcgccgccgcggtcccgcgaggtccgggggcgcagccaggcccggccgccccgccctcgcggccgccgcctccgctctgagccccgccccgctcggccgccgattgctcgggcctggccgccagcccaggggccgatggccgagcgcgtcgcactcgcgtccctgcgccgtgcctgcctcgcgctccctgttacggcgttcgtccccgggcctggcgcccgcgtccggcccggctccgcggcggcctggtccgatggctcctcagcggagggccgcaaccaaggcgcccgagggcaacggagcggccgagcgccggaaccggagcaggtagcggtgaggaggggaagggcgcgcgctgcggcggcggacagggccatggagtgggcgggactggggctgatggggcggggcctggcccgacccgggtgggggggtgggggggggcaggtgggcgtggtctgccgcggggggcggggtctaccgcagcccatgctgggagcagggcaggtgcgggcgggagccgcggtagccgacggcagaggcccacctatcccagaggggcaggagaaagagaagggggctttgctcccagcctgatgagctgctgctgctgctccgggaacctgccgtttggctgtcgctgtcccgtggaataacccacccagcagcctggaaagtccgcctgagccaggagcgtgcctccgccttcacttttaaaccacgaaacctgctttccccgtggaattctagaggatcgggtgccatggaggaatggcttagttttaggattttaaaatgttacgggtgatcattggtttgcaggtat

SEQ ID NO: 88510 - DNA, 1070 bp, Homo sapiens
ggccggccctcccacctcggagcccctcatgagtcctttcagcctggcccagtgctgccctctgacctccatgccctcgtttgctggttccactgcctccctgcacttgttttgcctgcagggtggagcaagcgcctgctgcacctgcccacctctccatttcccaacaggagtcgggttggctgccgatatccggctctgacagagcagcacctgtggcttcaggggtttgggttctgactgggagggtccccagccccccttcttgagtgtccaccctggtgagggtgggggtgaggccccagcggccacggggcccccgttcctggaggttcatggtggtcagtgcatgtcggtttccaggaagccatcttcgacaagagcacagggaaggttgttttgaagacgttcagcctctacaagaagctgctgactcttttcagagctggccacgaccagggtgagtcgtggggagcgtggggacatgggacacggccacagaggcggcgcacttgggcgtctgggtgactcacggggcctagaggggggcctggaagtgcctttggtccaagctcacctgcttggtgaccagggttgtgtcctgcccgctggaagcaggatcccacggatacgccccacctgctcacctgctcagcagggtcctagagcctcctgggttctttagaggtttggcccctggggagagtgggaggagcaggggtctgaggagcaggggtctggcagagcaggggtctgaggagcaggggtctggcccacccgggctcgggcagcctctgtttagctgcattctcccgtctgcctggcagccacttgtccgcaggtgcagtctggccccagcggcaggtcacaggacggggcagggagagccatggcagcccgtgggcgttctggagtggggccacctggcttcttgcgggccttggcgctgctccagctttcctgtgggttctactgggcctgcagtaggggctggatggtccgaggaactccccacccttgagcctgggcactggcccagctgtggtcagtaccagtttcctgtagatgct

SEQ ID NO: 88511 - DNA, 1044 bp, Homo sapiens
gggtggcctcagggagccgtgggatggtaagagggggcacagagctagaggagcagtcagagggctggatcacaggcaccaaagaggaaggggtctaggaggaaggggtctagcagtggggtgagcttccagaacacaggggtcatttacttcctaccacgtgacagtgctagggctgggttccacccttgtcatctgcatggttccctagtgtcattgtgggctgggccctgtgtcctgtgtcccttcaccaccttgagctgctcagtggcagagactgtcctgcttccagccccttgagcaccaggcctggaccctggtattatctccaatgtttactgtgaattctgtatatgggtgttaccctctctaaagaagcacattaaagagtatttgttgaataatcatgctgaaacgtcatctttcatagaagggagaattccacaagttggctgatgccaagatatttttgagcgactgcctggcatgtgacagctgtatgactgcagaggaaggagtccaactttcccagcaaaatgccaaggacttcttccgcgttctgaaccttaacaaggtaaggcattcggggcatttgctgatgctggggagctgacctggaggaagtggaggtgaggcctggcttcctgcacagaagcctctgctgggacatcggatgcacatctcagccttttcctggtgttgctaacatcctgctttgaccttccaaacctctccatcaagagcaaaatccccgcacaatttcctgctcccttaataatgctcaggcagtggtggggggctggcatcacccctcaggctcctgtggcttaagcggggcctctgcctggtgaggtcaggtaacacgggtgttggtgatcatgcgggcagcacagagccggagctcctgctgttctgcctcggctgcacgttttcggacacgagagttatgttctaatagaccgatcagcttggggcaaggcagagacactccaaggaagtaaaaattcccaaagctccttccttcagctcatccctgcagacctc

SEQ ID NO: 88512 - DNA, 1027 bp, Homo sapiens
tttatgaagttatcgtttactctgcttgaaacacaaacttgctgtctaggaaatgctaattattcctcaggggctcacttctagatcattgcaagtacagcctttgtccacacaaactggaatttttttgttttttgttttttgagacggaggctcactttgtcgctcaggctggagtgtagtggcgcgatcttggctcactgcaatctccgccctttgagttcaagtggttctcctgccccagcctcccgagtagctgggattacaggcgcctgccaccgcgcccggctaattttttgtatttttagtagagacggggtttcaccatcttggccaggctggtattgaactcctgacctcgtgatccacccgcctcggcctcccaaagtgctgggattacaggcgtgagccaccgcgcccggcctacaaattggaatttttaacgctttcggttgttggagatgctggtaagagctgttgcttttcttcttgacttgcgtgttgtgtgtgtgtgcatgcgctgttctgtttcttagcatggaaaggtgcaccagcatattccttaaactttggtagtagcattttaaagaatgttattttcaggccgggcgcggtggctcacgcctgtaatcccagcactttgggaggccgaggcgggtggatcacgaggtcaggaggtcgagaccattctggctaacacggtgaaacccgtctctactaaaaatacaaaaaaaaaaaaaaaattagccgggcgcggtggcgggcgcctgtagtcccagctactcaggaggctgaggcaggagaatgtgaaccctggaggtggagcttgcagccagcgagatcgcaccactgcactccagcctgggggacagaggaagactccgcctcaaaaaaaaaaaagaaattttcaaatgaaaatgctatttatgtgtgtttatactgtagacggtatgaaatcaatggtagggtcctaatggctaccctttaatctgacttttttttttttttttttttttttacaaaatac

SEQ ID NO: 88513 - DNA, 1140 bp, Homo sapiens
gttgcccaggtgggagtgcagtgacgcagtctcagctcactgcagcctccgcctcctgggttctgggttcaagcaattcttctgtctcagcctcccaagtagctgggactacaggtacgtgccaccatgcctggctaactttttttgcatttttagtagagacggggtttcaccatgttggtcaggctggtcagaactcctgacctcaggtcatctgcccacctcggcctcccaaagtgctgggattacaggcgtgagctactgcgcccggtcgaggacaaggttcttatttgtccaagggcctggtctggaggctatgattagtaaagtgttttttaggaagatcaattggacaggacagtttgggtttgttgttgctatttttgttgccatggtaacaaactaagtataatttatgaataaaaataggcaactctttaacagttgtttatactttgaaaatgtcaaatgaatttgacacattctgatcagtaagatcccagaatatctaatagtcaaatataaatagaacaagttgaatttactattgcctacaactatttaacgtgctaaattaaaactctgtttatttagaagagtgacccctgtcctatgccaaatgaactctatcagttctacccagtggtaattccacactttctttcttacgtggcctgaatcccacactttctttcttacgtggcatgaatcccacactttctttcttacgtggcatgaatcccacacttactttcttatgtggcctgaatcccacactttcttatgtggcatgaatccctcactttatgtggcatgaatccctcactttctttcttatgtggcagattgtgtttggtaatgtcagatttgaagacttgtttattaaatcagagacagtatcttccaaggtgaagactggagagagatgagccgacagtcagtggcttctggagctttccaggtggagactccaataaatgaattgagggaactcacagtgattctgtcctactcagaatgcagatgggcagaactgagcttcccggagaatcccagtaccagaaagaagaagtaagaaggagggggtcctgggaaggagatggccaagggacatggcttggcaatcaggaagtcttgggc

SEQ ID NO: 88514 - DNA, 1039 bp, Homo sapiens
actgatgtgttttttttttttttttttgagacagagtctcgctctgtcacccaggctggagtgcagtggcgccatctcagctcactgcaacgtcctcctcccgggttcaaacaattctcctgcctcagtctcccgagtagctgggattacaggcgccaccaccacgctctgctaatttttgtatttttagtagagacggggtttcaccatgtgggccaggctggtctcaaactcctgactgcaggtgattcccctgtcttggcctcccaaagtgttgggatcacaggccaaagtgtgagtcactgtgcccggtctactgttgtgttttcaaagtggcttttttggtcttgtatttttcagaatacgatagcattttgagtatatagagaatgttttaaaaattctgtgtttttgccatttctgagctgttggaggatgttaggataatgaacatcattttgatagccatttgagctgggtggaagaagatgtggtttaaatataaaatgtctgttctgggtcctccttgaggacctgttcccactttgccaagcttccccctggacttgtccacacgtgattaaacacagctgaaatcctgtacacttgagtgaactgcatgtaagtgttctgtgggctgggctgattcatctttacattgtacacttcctggggttgtagcctttgacccctgggtgacctcctccaggaattctgggtactcgataggactcaaatgtttattgctgaattggttggatgtgggcttctgagtttggattgggtgactactgtaccataggaaaccatgtaaaacagttataaatgtaagtcagattaaattcacttctgattctacagttgctcccacttttttttgtttttgttgatggtagactccccaaagtgacttttttggccttgtacagtcatgcatcacttaactgtggaaatcattctgagaaatgcattgttaggtgatttcattgttgtgcgaacatcatagagcatacttgtacaagcctagatgacacagcct

SEQ ID NO: 88515 - DNA, 1091 bp, Homo sapiens
atagccagatgttgtggcaagggcctctagtcctagctacttgggaggccgaggtgggaggatcacttgaccctcggaggttgaggctgctgtggactgtgattgcactattgcactcaagtctgggcagcagagcaaaacctcgactcgaaaaaaaaagaaaagatggctgatatgtagaggggtaacctgtggaagcctggctgcacatggacaaaatttcttgtgattgaataaaaatgttctaataatgtgtgtcagggcacatgacttgtcgtactgcttgatagttgttgcggctctaatataggaacaagtcagaccatgaagttggtggcttgttgttcccgagtctttgcaccgggtgctgctcttctgcttctcctgcagagcatgtgcacagacctggctctaggtcgtcatgcctcaggctagaggaggggccaggctccttcttgctgagaactttagcagagctctggaggagaccctcctgggactgcgctactggagcacatccttatcgcacatgagatggtctctagctctgatccttctcaccacacacttcagcccatccaggtttgactttagtgactgggtgcctcagcactcactcctgttcctgtctcctcttacagatggtaacgaactcgttgaaacatgtccccagaagtaatatttattttccatggatcttttatcttgttctctcttaaaagttgtttttcaggctatgccttttcttgttgacacaaatctacctgttaattattgagtgctgaaaaacacacattttttgggggcaggttcttgctctgtcgcccagctggagtgcagtggcaccatcttggctcactgcaacctccacctcccaggtttaagcgattctcctgcctcagccttaggagtagctgggattacagatgcctgccaccacacctggctgatttttgtattttttgtacagatggggtttccacatgttggttaggctggtctcgaactcctgacctcagcttatccacctgcctcagcctcctaaagtgctgggattacaggtgtaagccaccgtgcccggccttggcctt

SEQ ID NO: 88516 - DNA, 1100 bp, Homo sapiens
catgttttcgaattgtattactttcatagtaagaaaaatgaggtatcaggctgggcgcagtggctcacacccgtaatcccagcacgttgggaggccgaggcaggcggatcacctgaggtcaggagtttgagaccggcctggccaacatggtgaaaccccgtctctactaaaaccacaaaaattagccgggcgcggtggcaggcgcctgtgatcccagctactcgggaggctgaggcaggagaaccgcttgaactcagagggcggagactgcagtgagccaagatcgcgtcactgtactccagcctgggcgacacagcgagactctgtctcaaaaaaaagacaaatgaggtatcagaggaacacttaaaagcactgagaatctttaaatctagtaaatttaatacaaaatatggtaacttcaatattcgttttgtgtttgttttttaaatacaggatgattcaaagccgccttactcctacgcgcagctgatagttcaggcgattacgatggctcccgacaaacagctcaccctgaacgggatttatacacacatcactaaaaattatccctactacaggactgcggacaagggctggcaggtaaatgccttcagtttgttgttaaatagaggctgatggataccgagaagaaagtggagcggctgctgtctggaacacaggcacaggataggaaggtagaagggggggttggagcctcccgtgctgagaggaagaggagttgggggccggtgctgccatgctctgcctcaccttctttgtgtggagcagaaggaagcgtggttctggaggagcgtctaggcctgcatgctttactgttgtggaaattcatgtgtctgcataggatttgtgaagtgtggattgtttgagatatttccctttgaccaatgcagttcatatttgaaatgtaggagaaatttaaaacccagcctatccttccctttggcattctcctgtcttcctcatctaatcctgctaatggacagaagttttgaagtttgcagagacagttttcaaaccgcattttaccaaggaacacttagaagacatcttaaccagttggccggggtaaaaaacagatg

SEQ ID NO: 88517 - DNA, 1089 bp, Homo sapiens
atttattgaaggggaaaaaccttttttgttttaaccacagatgtataaacatgttatgttaaaaaatagcctaccggccgggcacagtaactcatgcctataattctagcactttgagagccgaggcaggtggatcgcgtgactctaggatttcgagagcagcctgggcaacatggcgagaccctgtctctacaaaaaataaaaaaaaattagctgagtgtggtggcttacgcttgtagtcccagctactccagaggctgaggtgggaggatcacctgagcccaggaagcagaggttacagatatctgtgatcacaccactgcactccagcctgggtgacagagcaagaccctgtctcaaaaaggaaaaaaaaagcctaccagccacgtcttccatatttcctttgtggaggggcttgggggtctttaatcatggaaggtacagaatgagacccagcctcccctctggcccaccttgtgcccaccccccatacctggagtgtctataccctgtcctgcctgccttcctgtctacagcaagggggtatctcttaattgaccattaggaaaatgctggatttggagagtagttccatattcagttacatgtcagggtctcttaacatattgcatgctaaattctggccgtatttactctataaaactgaggctgtgcttcaaactatatacatacacacacacactctctctctctctctctctctctctcacacacacacacacacacacacacacacacacacacaaccagataataacttctacccatgttccagtgaccatggctttatggctttgtcaaggagagaaactccacatggggtccagcttgctctgtgggagtgtgtgagggtccctcagagtttacagcttattctgatggtttgagataccagttacctggggctttgtcagtgtgtttctaagaagctttattagactctaatgtgtttctcttaagtggtatttctgtgtgttttttctaacatccatttatttgagaactacctatgaacaggacaaggctttcttgctaaagagggtggctggataaaggcctggcctcagt

SEQ ID NO: 88518 - DNA, 1060 bp, Homo sapiens
acatggcccagccctcctctccatgtcacccgtgaagtagctccatccacagggcccagatccctcccacacatagcccacccctcctctccatgtcacccgtgaagtagctccatccacagggcccagatccctcccacacatggcctagccctcctctccatgtcacccatgaagtagctccatccacagggcccagatccctcccacacatggcctagccctcctctccatgtcacccgtgaagtagctccatccacagggcccagaggcattaggatggcacttggacaacccctgagatgggttgtaaagtgttattttatattttgtatgttggatttcttagtcacctttgacgatttgaaattcaggctgaggcttgcaattctaataaggttaattggggaatttagaaatgatttttggatagctccagattttgttttgagtgatcaccattttaacactttaatagcttaattttaaatctacacattaatgtaaattcacgaaatgtttctatgaacccatgacgttcgtccggctttggcctgagtcaggtcccagcgggggctttcttcagggtgtctgtcaactcttagctgggcttttttctgagatggagtcttgcttctattgcccaggctggagtgcagtggtgcgatctgggctcactgcaacctcctcctctcggcttcaagcaattcttcagcttcagcatccttagtagctgggactacaggtgtgggccactgtgcccggatgatttttgtgtgggtttttttttttttttgagatggagtcttactctgtcgcccaggctggagtgcagtggcgcaatctcggctcactgcaagctctgcctcccgggttcacaccattctcccgcctcagcctcccgagcaactgggactacaggtgcccgccactacgccccgctaatttttcgtatttttagtagagacagggtttcaccgtgtttgccaggatggtctcgatctcctgacctcgtgatccgcccgcctcggcctcccaaagtgctgggattacaggcgtg

SEQ ID NO: 88519 - DNA, 1092 bp, Homo sapiens
ctgccggctccaccgtcagtgcacgggagctgcttagagagggcagctggctccgccccacagccgtgccgcgtatgtgggtgagggcccgtgacggccctgtcccacacaggctgagtctgtctacccgagtgtcccgctcagttcacaggcgtaggcgtgcagagacgtagaacttacacaacagtacttggttgtcaggagacaaatgacaccccctttgcaaagtgcacttattaaaacagcaagtgctttctgagtgcgtcagctgtaaccatgcaatgtcttcttctcggtgacacaggagtgccccagcctctcccaatcacgcgggagtgctgtctgctcactctagtggcgcccagacccctgagagcctgtcgagggaaggttcgccggcccccctggagcctgagcctggcgctgcacagcccaaactcgctgtcatccaggaagcccggtttgcccagagcgccccaggtgagacagcgggagaggaagcgagggccccaacagcgtgagccagacgcggacgcctgggctccacagagaagaaacagccggactggaggcctgcctgtccctctgtaccttatactagtacctgattttataggccttggaaaactaatagcactgggagtgttttttaaaaatcaatgaaggttctttaaacgacactgagtagatgcctgaaataacttagaattaacctgtttcttagtttgtcattcaaaaatccatgaaacagcccccgcacccccaccccccgcaaaaaaatcaaaacaaaacaaaaacccatgaagtagacaaactagacactggaagcaaaaacatgtcctttttttttttttttttttttttttgagacagagtctcactttgtcaccaggctggaatcttggctcgttgcaacctctgcctcccaggttcaaagaattctcctgcctcagcttcccgagtagctgggactacaggcacacaccaccacacccagctgctaatttttgtatttttagtagagacagggtttcaccatgttggccaggatggtctcaatctcttgacctcgtgacctcatgatccacctgc

SEQ ID NO: 88520 - DNA, 1023 bp, Homo sapiens
cagtctccaccttccaggctcaagcaatccgccctcctcagtctcctaaatagctggggctgtaggcgcacagtaacatgcccggttaatatttgtcgtagagacagggtctccctatgcccaggctgatctcaaactcctcccacctcagcctcccaaagtgctgggattacaggcgtgagccactgcgcccggcccagtttcctcttttattgagtattgacattttcttttttataaagaactgtgggaagaggggttaccagatatctaaatagagccaaaattgcatttttagcagttagagataggaattaaataccccttttaaaatactacacctccctcattattagtaactttactattgtgaggtgaaatagggccatatcctatattttaaattaaagtttgtatgttgcttgtcagtgctgagtgtgagaacctttgtttgtagaagtcagtatctgtaagtgtcagtcctgctgtgtctttcaccagggtcacctctgtccagtcagccagtcttaatcaccgtccagcggcagctaccacaggccatcaagcctgtcacctacactgtggccaccccagtgaccacctcgacctcccagccacccgtcgtgcagacggttcacgtcgtccaccagatcccagcggtgtcggtcaccagtgtggccggactggccccagcgaacacgtacactgtctctggacaagctgtggtcaccccggcagccgtgctggcccctcctaaggcagaggcccaggagaatggagaccacagggaagtcaaaggtaggcggaggggaaaggaggagaggggagaccacagggaggtgaaaggtgggccggggggggaaaggaggagaggggagaccacagggaggtcaaaggtgggccgggggggaaaggaggagaggggagaccacagggaggtcaaaggtaggcggaggggaaaggaggagaggggagaccacagggaggtgaaaggtgggcgggggggaaaggaggagaggggag

SEQ ID NO: 88521 - DNA, 1013 bp, Homo sapiens
gcggtgacgcccattgaaaggtatgaaatgactgcacactagctggattatcactcagccgtttaagaaataaaagcaaaaccatcacgtgactgagaccgtgtgtgtgaccgcagcaaagcgcagcgtgtggatggatcagagcccctcggtgcagctgtctgcatcttccaagcactttacagataccttggaatgtatatttttgtcttcttactcagaaggtttgcagtttgtaaaataatcaggattctgctctgtcctgtgtgtggggtcagctccctccacagagggctccagctctgttggtcacagctgatggggttctctgattgataggagacgagctcttgagctctaaggaacagtgaggtcgccggtggggagcttggctgggacaccaagcaaatgcatcgtatgtccccttggagacgtttttatgcagctgtgtatgttactatccagaaggagtcgggggtagactttcccgtgtaagctcagtccataaactggttacttctgatcctggaacgtggacttcacatgataggtctggatctgtttctgttgggatcacaggtaaggaaaatgtccattcaaatggtaaagaagggaggagggtgttttttttttttttttttgccgtaggcaccattctgcatcttgaacccagactgaagtgtgcctctcacagatggaaggtgcacacgctcctgtctcctcctcactctgccacgttcacttggctttttcattggtacctaggaatttaagaatatcgaagcgagagcagtaacaaaccatagatgagcagactcccacaccgggttttcttgcccgtctttaaggcactgtttctaaattttgaacttagctctgaatccccaagaacttgagcacagcaagggttgctgagctgctgtcgccgcagccctggcccctggtgctggagctgcagcacctttgggagaggtcctgcgtcgtcctcagctgcgtcgctgtgaactcccgct

SEQ ID NO: 88522 - DNA, 1046 bp, Homo sapiens
ttggattaaacctgtttcccggttatgtgtagggaacagcagagtgatgcacgaactttgaacattcgttatggggaaaacatcctttaacttcggggtcgtctgccagagcagggtctgggagggtccatgcagttcccgctggtgtggagggaaatgccctggtctggcctccgagcccccaggtccaccgtctcccctcccctcatttgtaagaatagctacacactaacattttgggaaggagaggcacataactttttttaacatttggtaactaggttatgggctctacattgtcagctacttgggatatatatttaattttcttaaattcccgttaaactctattttatggttttgatttcagattgcaaacatgtaaaacctgcatagcagcgagttctcggttttgccggtttctttagttctttactgtcactgtcatgtaatcagctaattctctgtggatgttgctgtaaagtatgcatgttcctttcatgtgtatttaatcatgatgtttaattttgcacacttatttgtaatgtttcttttaaataaaagtgactaattttgttgtagtctggacctgtaatgggaagtagaattgtgtgttatgaagccaaacactcttccccttgctgtgagaatctggttggagtgtaggcttcagaacagcctgtgggcctgaagaggcgccggcctgtgacaggacaaggtggaagccagggtcactgggtgcggagcctggagcttcactccctgtgtcgggacaggacagcctgccctcctcattccctgtgtcgggacaggacagcctgccctcctcactccctgtgtcgggacggggcggcctgccctcctcactccctgtggcgggacggggcggcctgccctcctcactccctgtggcgggacggggcggcctgccctcctcactccctgtggcgggacggggcggcctgccctcctctctccctgtgtcggggatgggacggcctgccctcctctctccctgtgtcgggacggggcggcctgccctcctc

SEQ ID NO: 88523 - DNA, 1244 bp, Homo sapiens
ccagcaccgcgctgtggcaccgatggccgcccagttccccttatttctcctgtgggctcagtgtgtcccgcttacggtctgcacggccatttgggatgtcttcagcccccatccctccagtttcccccaggaaatcacagggacaggtcttccaatgtttgtatagatgaccaagaatgtttcttaaccctgtagccaacaccgggtgattagatgctcacaccaagacagtcaggattcccggccacggtgccgaccgaacgcattcagtggggaccctggggcctttcagggctttcagagcagctgcctggctccaagaggccctttgcagttcagctcagtgggactcgttgcttttaacttgagggaaagaaacacacaggtaaaatggtctccttctatcccagcaatttgtgcagacggcagctactacaaattcctgttcaaccccaagggggagtgcatccgagatgtctacgcgcagtttctagagatgaccgatgacaagctgtgactccagctgggggcgccacagcacccaccacctgccgccttcagactctcggggctggtgccagtgccccaggggcctcctgggccacgggctggaggggctgcccagggaccttggtctcgaagccatacgtggttgtctgctttcctaaggactcccatttccagtattaaagagagaatcatcatcaaggcaccgtaggtaactcagtggctgtgaccagctcgactggcggccactggctgttcccatgagttcagctgtgacgttagcttcagtggctccgccgcatcctcacactgacgggggctccatacggacctggggactgggctgagagggtggacgagttcaggtttgtttttgcagcagattccgtcgttcttactgagtctgcagcgggggagtgaacaagtgtgcagatgtaagttcttacatgataagcagattgaatacaacaccagcagcttgccttagaaaaggagaaaggaattccttttcccgcccgaacatgaagaaaaatgacctgaccctgtagagagaacacagtgtgaatgtttcccctcgtgtgagcccagcctgtggtcttctccgtacccgcaacgtggtcatctgtgcccgtgacgtcacctgtgcccgtgcgtggcgtccccgtctccgttggggccattagaatgaggcagacaccaggccactctagaagccgagccgtcacacctcaggcgtg

SEQ ID NO: 88524 - DNA, 1430 bp, Homo sapiens
ggagtttgagatcagcctggccagcatagtgaaaccccatctctactaaaaatacaaaaattagctgggcatggtggcacatgcttgtaatcccaactacctggggaggctgaggcaggagagtggcttgaacccaggaggtggaggttgcagtaagccgagatcgcgcgactgcactctagcctgggtgacagagcaagactccttctcaaaaaaaaaaaaaaaaaaaaaaaatgagtcctgtattcccagctacttgggaagctgaggcaggaggatcatgtgagcccaggagttcaaggctgcagtgagctgtgattgtacctgtgaatagctactgcattccagcctgggcaacacagtgagatcttgtctcttacaaaaaatagaaaattgctgcgttacctgtcttgactttctcttttcttttttattgtaaaatatacatattaacttgtaacattggtctttttaaaactatcatttcagaatttctagaaggaggagttggccatgttgaaatgttatttcgctgcaactatttagctttagttggtggtggaaaaaagccgaaataccctcccaacaaaggtactgtaattgtgtattgaagaatcatgcctcacgtgtcccacccagtctttttttgaatgcgtttatgtttgtggccatgtgtgattttccctagtagttctgtgaaatatccaggactggtcactggggaggaagcaggcgaagagggcaccaggtctctattcccagatggagcacctaaagagcatcactcgcttgcattgtcatagaacacgtgcgtttcagtcagtaaacggaaaacgggcctgctgcaccttaggttgacgtcgtaaatgtcatgaattcattttaaagcaaggtagaaggattttttttcttacagagagccattgacttaaaggaacattagtttcatagccacgtggaacaaaacaccacttgggctctgggtttcgggatatgtttgtcggagtgggagtacgtgtgtgtatgcagatgatgtggcgtaagagctctggcccttttaagtagagggaggagtagatagctttcctgacagccgtgtgcctcgtgccagcttaacctcgctgttggttgaggaaagagggctcaaggcgaaagatccaggaatggagggcagaacacagggaagaggtgggaggcgggaggtaggctgggtgggggaggtgggaggcagatctgggggaggcttgaatgccaggtaacgtgtggccaggaaggagatgccgtcagatctgtgttttgggaaagttctggtctagatgcagtgcatgaggtgagtgaagagacaccagaggatggggcaggtgtgggaagcccccgtttatggggagaggcaggaaaagtggagcaagcatcctcgtctgagcccagtg

SEQ ID NO: 88525 - DNA, 1033 bp, Homo sapiens
acagcttctcagaagcctgtgttaccagccagagccaagcctgaactggtgtggtgtgggggcccttctcccagggcctcgggtggagttgcttttcttggcctagatttggcagtgcctgaagggagcctcaaaccagcatctcctgcttggcagcgggtgagcttgctcccgagtagctcgacagcctgtgatttactgggcttggagaacatgccccaggggggggaagctggctcgcacgttgcagagaagccagcttgggtgggtagccatcgaaaggtggggcgggttaggatgattgctgagaaactccttttgtttgcagcttgtgctgtgctggtttctagaacaacaaaaacagacctgcagtcattcctcatttaccatgcagggctgttttcctctaatccctggtgtcatcacctctgtctagtgtatgcttttcagcaggtggttttaatttggttcccattatgcttccatgaaagtgggctgtgccccccattttatggcctagcttatgagcactcaagaccattgatgactagagtgcgctctctctggccgcgtcctcctgctgacaggtaccccatcccaccgccacgctgagcactggccactgcacactgcacactttctctggtgaagatggccttacttttcagtgaaataaatggaaacaaagccctgtcttcattgactcgttccttccctgtcgtctcttttgccctcctgcacccatgcctgggaaagtggataacttttggggcttttctctgtgtgtgctgaatgcccaggaggctgcctgtgtaattcagctggaaactgtccccagggtagagagaagtgtgaggagaaaaagacccttcgccctgtaaatgtgtggggttctggtttctcccttactgcagatggtggcgggccctggccttggtgctgtctcctgtgtgtagctggggacggtggaagctgggctgggcctttccaggtgtggggcatccaggccagttacaagagatgatgcttgctt

SEQ ID NO: 88526 - DNA, 1014 bp, Homo sapiens
ctgtcggcgggaggagcgtccttggtgacgtgaacacagacctccctcttgggctgtcgtgcttgtcacccacgctcattgtgcccactgtcagagccttctgagaagttactcagatgctctttcagctgacctggttttataggcaagcattatgagttaaacggcacctctgcccgaggtcacggcacccacataaaactggtgaacgttcactttctgtcatttcccagcctcaaggcagagcttcctgcagggcactgcagctccagcccccatccccctgctctgtccccgccccactgccccttcctccatctccttgtcttccatcacctcacctaactctcagctctgtcttcagcttctcttcttttctcctgtcccctgtcagttggttgcagtcttgtccatttcacttccagcccatctctgaagccgccatgcacttccaccccagcccttgtctgtcccgggaatgctgtcctcctggcctcagcttgccctcgtcgcagcacccgggcgtctcctgctcgcaggctctccctgtcgtgctgtgcccagtgctaccttgagcctccccttggctcagcctcctgtcctgctattgtcatcactgcatgacaccgagtgattccccctgaaaaacagagcaagccacaggaaccccgtggcctgtgtgttctccccagccgcagtgtgctccatggcttctggggttgctgcagtgtgccctgtggcctgtgtgttctccccggccacagcatgcccgtggcctgcgtggtctctgtggccgcaggatgcccgtggcctgtggggtctccgtggctgcagtgtgcctgtggtcggttgggcctttgtgtgtgctgccccccttcagattggctccctgccctctgagtacttgctctcctgacctccactgatgttgcttcacagcaaggaagtcgagtaggttcaactccagcagctcttggttcatgatttgggatgatgggggtcttggtgatgtct

SEQ ID NO: 88527 - DNA, 1066 bp, Homo sapiens
cgaatccttgtaatgtctgattttcttactccccaaaaccggttttcattcttgagggacattgtcgccccttaaggacacatgcagtggcacctgcttcagttgtagaaccaggtacccctggcagcatcctgggtcacctggagtgacgtggtgctccctggagatgaggctcacgccagcgtgaaaccagggtgggaactggggtggagggccaggggagctctgcagtggccagcagtggggtggggacagagggcacagcatggcagatgcaggggcactgccccagaccagctcttgtgccgtggccacacgcagccctgtctgtgtttggtggggagagtccctgggtgtggctggcagtgccctctgagggcaggaaggaaaggatgtctgtacaggatagagtgggggcccatcctgagagggcctcaccacagagacttgattctgtccaaaataaagacacctgagatgtggtggcctcacgtcttcccagtgtggagctgtggtggcgtctgaagtgaccgctttgcacttggcattttgatgtatggggagagcttttagagcctgcagttcttttttttaatgtctctgcttatttttttccagacttctttaatgtttagacctctttattgcgatctaatttacatgccataaaatgcactcatttaagtgtacggttaagtggtttttatatatttacagagttgcgcaactattgccataatttaatttccgaacattttcattgcctccaaaggaaccctgtgtttaagaactcactctttactctccccagcacccccgccctggcagccatgtctccagtgtctctgtgaatttgtcttttatagacatttcctaacagtggaacctacgacatgtgatctttggcgtccgaattcttcggctgagtttctctgtgtcgtagcctgtggagtgcctccttccttcctgtggcagagccttgtcctgctgtgtaaatgcaccacacgccacgttttgtccatccttttcatcagctgatgtacatctgggttgtttccacctttca

SEQ ID NO: 88528 - DNA, 1176 bp, Homo sapiens
cctcagcctcccaaagtgctgggattgtaggctgtacctggtgtgttttcaatttctttgatggtgatatttgacccaggttttaaattttaattaagtccagctcatcagtctttttctttcttgtgtttctggtgtcatagctaagaaatcattgctgaccccagaaccatgaagttgtggtttcatttaacgttttgttccatccgaagtaagtgactcgtaatgtttatttgtgacactagatgtgtgtgagggtgtgtgtgtgaatgtgtagctgggatggaatgaagtccctgcctgtggggagccagctccaggttcactcaaaggagacaagagactctactggcttgtgtgtgtgctctgtcatgtcttatggcaacatgcactgaccccaggcagctggggcgagaggatatgggtgttggcatcataaacgaaaagggtaaagctatggttcagaaactgacacgtgatgtggaatacactggcccatgaccttcgcatggttggttggccccttctgcctggcggtgccctccatgtgagctgaaccctctttgcagcccccattctgttcctggtgggacatggagaagctgtgctgtctctgcacagggcaagggttctttcaggcaggggtgaaagagatcccatcttggggctgactcaggaggtgacagggctgacatttgatgagcatttgcagcatgctttttatgtttttgttttagacctcacaccattcctctgagagccgtcttgtttatataaagctatagttgggagccacgtgtggtggcggtgcctttaatcctagcctcttgggaggccaaggcaggaggatcacttgagcctaggaatttgataccagcctggacatcatagtgagacaccctctctgaacaaacaaacacacacacacaaacactgcagctgtgggagccaggaagtctttctggtgtcacagctcatgctcagcccttcggcctcctccatgtcacacggctgagctgtccctgcacctccttgtctccttggagagttactgtggttctctgtcagtttggtttgaaaagtgaaaacaggctgggcacggcggctcatgcctataatcccagcactttgggaggccaaggcggggggatcacctgaggccaggagttcgagacc

SEQ ID NO: 88529 - DNA, 1047 bp, Homo sapiens
acacacccgcaggtatgtacacatgcacacctacacagtcgagtgtgcatgccccccacggatatgcacacgtgcatacccacacaatcccatatacccacccccacaatcacgtgtacacacccccgcagatatgcacacacgcacacccacaggatcgaatgcgcacacacccacagatagcacacacgcacacccacacaattgaatgcgcaccccccacagatatgcacacgtgcacacccacacaatagaatgtgcacacacccgcagagatgcacaagcgcatacccacacccgcagacgtgcacatgcacacatccacacgatcaaatgtgcacgtgcatctgcagacatgcacaagcagacacctacacgcactcgcagacatgcacacccacatgggcgaatgtgcacaccccccccacacagatagcacacgtgtacacccacacaattgaatgtgcatacacgcacccgttcacaggttaatcgctgccacagctatcagctctttttcattgactgttacggcaaaatattctaaaggataacatagatttatgtttatttgcattttatgtttccttatggttcatatgagtttattggaaaattagcaacatacacatcattttggggaatggaaagtgaggcagagtaagccagaacattcactgtaacattataagcaagtagaataaattgataataccttcaccagtaatgcactttccctagtggaaataaattatttgtataaatagcctcttgatgtttgtgtgttatttagttatacaaatcacatttttcttttttacatatggcactttaatgttagtactgaaaatgttttttctgacattttttcagtaattgtcatttacatcaaatatgcagctagagctaatagaaaaacagttaaaacaatttgttgtaatggtgagatatttataaggaaacatttataaaagatcttctgtaagacagcttagacttgaaaatacatatcagtcttagagtcattcaggtgtttttacaaccaaa

SEQ ID NO: 88530 - DNA, 1087 bp, Homo sapiens
aaacctgtagtgatcgtatgtggctggagatggagccaggtgcttagggatcggccccgggtgaggcaggaagtgtctcgggtcttgggttccgtagactgacagcaggggtgcgtcacactcaggcgagctcccagccagcaggtaaggcgagtagatggtggccagcccgtgctctgtgtaaaagtgaggcgggtactctgggattgtggggtgcatgtaaggggaaatggccccaagcccctttgtagatgagattttatgtggaaactctggtggaaggaaaggtgagccggctttccaggggtagccaggagtgtggaaggccgacttggtgtggaaagacacggccttggcagtggggttgtgtaaagccagtgtctcgggcgcctcggcgttgtctggccccttgagtctgtgctcgccgactggaacaaatgcagaaggccgagctgcgccttccagagcaggctgggcaccgagggcggcttccggagctgggctcttgcagggtgatgccctgtggagggctggcttctgtcccaggcacctgtgggttccccgggcttgcagctccaggttttccttgatgtcttccctggcagagctgtgctgaagcttcgagtcgaaggcagagagtccatttgcgacagacttggaagaggctggcttcgccgtggcatcgggctggttggtttgcttggggtctagtgagttagatttagggcacttgggaactcgatcctgctctgatactaaagtaatcgagtttttacaaagaccatacttcatgtgattaaaaagatgtgacttctcattgcaagtaaagggacattggaaacatttatacttgaagggctttcctggaggcctggggatgtaatgtggcttttttggcttccgctctttgaggagactcattttcctccttatgccttggactctggctgtccaggtggcgtgatcactgtcgacgccgcgtgcacttcgtggtttctaaagaggcacctcccgctttgctttctttcccgatcacttctatcagaagccagctctgcgtgctgagggtctggcgagagcctccgtc

SEQ ID NO: 88531 - DNA, 1038 bp, Homo sapiens
agtgtggtgtgtggtgcgttgagtgtctgttctgagaatgcctgtaagcctttgagttttgggaactttcatcctgtgacctggacctttcctcgaaagcgccctgccgggggctgaggacaccgagccccctcccagggtctggacagagtcctgtcccagggctgcccgactctgcttgggggttacacgcttgaagcagtgggtgtgtgatcggccacactctcacgtgaaatacgaaggggtttgtggctgtttccccttaacatgtacccacagtcacagagtgcccctcacttttacacagagcgtgggctggccaccgtctacttgctcctacctgctggctgggagctctcccaagtgctgtgcgcccctgccgtcggcctgtagaacccaagaccatggatgctgctgcctcccctggggccgatccctaagcactcgtggcagtttctgcccactttagccacgtcgttggtgtattctagtgtgcttgtttaaaaatgaagaacattcgaacacaagactctaccctactgcttctaaagtcagctttatcattaagtagcatttatgttgtctcagatatgaatacaaatgctatatttatgttgacttaaatggttgaaatactgttggtgaatttgtacatcctgtgagtgacagcagcattgtgagacatgctttcacggtcacccggttcctgctggccaggaggcatggccagcagcgcctgcccgtccagatgcaccaccaaatggaagaaccaaagctttgccacactcctgcccgagaggagaccagagtgagtagtatccgctttagagatggttgggtcatgggaggaagctgtcctggcccttaacctttagggagtgggttcagccctctggccacacccactcaggtcctgggacccaccagaggctgtgtgtgtgatgtcagagctggcctgctcttttggattcttccagagggtctctgtgtcccccttaccagcctcaggtttccttcagaggctgtgccgcacgccca

SEQ ID NO: 88532 - DNA, 1052 bp, Homo sapiens
gggctgcaggcttgaagaaggatgtgagtttctggagtagcctggactgcacagccagggcctccccggcatgtggcggggccagcgttggcctgggtcccacttggctttgatctcgtggggctttggtttttggaggtcctgggtgcgtctccaccatggctcccgggttcccttgcgcacaccgagccagcagctgctggggcctcagggctcgcagctcacaggcttctgacgcctcagcctggagctggcgttgtgcccctcgcccctttacctgtgccatcccggccgcagacccaagggtgcccttggagccgtgcccgccggcctgggtgtcaggcttgtccaacgggttcttagagaacctgggccccatccctccttggcccacgcagactccaggcatccggccgggcgggctgtgagtcaggctgcaccaggtgagcgtgtgggatgctgctggtgcgagcctccctgcccaggagccctgcgcacccgggtatcggttggggtgtgcccttccagatctccctcccttggtttgtcataggtgaccacattttaattaccagcttttatgcccgtcaatttgggaacgtgatacaatcttgatttctctaactttcacaagttcttcggtgggtcctgtaacagtgggtgcttgggatcagagcatcagagtggaattttcgcagggaaatggaaatgcctgatcgagctgggcggtggcagcagccgctcctcactcttcaggtgcctggctcttctgagagtcagttcgggggtttagtggctcactttttctaattggttcctagctttttgctaaagaaacttggattaactgttcttttgcctcatggtgtgaatttatactgttcctgttttataaataccagaaggagcttcgtaggtaacttttaccatgtgttgaaggtagcattggttttgaaaacctgatttcctcagtgtcgcacacgggtagcttaagaggtgggataattgttggagtagtgaatggatttccctgagaagccaagtgcaattta

SEQ ID NO: 88533 - DNA, 1024 bp, Homo sapiens
agcgtcagtggggaggccacgttcatggctgctgcccggggccacctccccgtctgcactctgcagccatgcttgtctcggtcagagggggaggccagacaccacattaaaagtgaaaaatgtaagcaaacaaaatggctttgccaaaatcataatgaaagttaatggcaaaaataggataagaatccgagctgaatcttaaagaatataaagctatctggacaacagacaagtaaaccacgtaatccctcgtgaacaatttttatattctcctgtaacaccaagatccatagttcatactttacctctgggtcacagaagcctttgagaatctctcaaagcccagaaagatgaacacactgtctccccagagaaatccgacagacgcacacacaaaattctgctttactttcaggagacatcagaccccagctgcagatgcacggctggaaaccagaggcttctgtgctcgttctgtgtgcccccaactccaccaggagagcacggggcccaatgcccccacccagagttggctgcacgctccatcgtgggaccgcagccgcgcgccccggagggaaaccacactccagctgcagccgaaacctccaccgactgcactagcttcataagccttcctcagagaccaaggacatgctggctacgtgcacagaaagtctgcactcatttcctaggagtctcttcccctcccagggcaaccctccaaggtggctgttcacaagcatgacgccagcagagagcctgttcccagagtgatcacaccgcaggtcccccactgagcccaggactgatggagcacagtggccaccaggactgcagaccctgcctggggagggtgggaggccctaagggggcaggtcctgtgatgcctcctgagggtacacccagaggctgcacacaaacctgctggtgaatctgcttcaggccctgcactgcctgctcgtccagatggtccgtgacgggcctgcagaagttcaaacacagagctgaagtcacactccccaag

SEQ ID NO: 88534 - DNA, 1038 bp, Homo sapiens
cagtttctggccacctcctcagtcagcagggcgggtggccctgtttgggctccaccccacacactgggcctggagggctccttcaggtgctccttggggtactggaggacccctgccttgggcctcagtcctgtactcttcacctcctggtgttggagccagcatttcatatgttgcattctgtccagttttctacttgcaggaggggacatccaaccctgccactctgtgtgggccagaaaccagggtctcaggagtgaatattttgccctccccagggcagcgcgcctgcccttgtgcaccagggtcccgctgtcagcgccagggctggggcaggtgtcccagatgggcagagcagcccggagctccgcctagcttcgctcatggtagaaccgcagtgcactgcttctctaggctggatagggggctctttctggcatctgagattagtttctataaagtaagagctgagcgctgcttggaattagttctgtgatgggataccagtcaggactagaatgtccagtaaaaattaaaaatcagcatcaccccagctaggatgggagacctctggaagatggctgtaccacgttttttcctttcttttcataaaaggttgctcatgctcagtaacacattcaactagttctcattttaatgctttttggagcctgaggttacattggcaagcatatttcatggtgttttatacgtcaagaggttcttctaattctgatgttttcattccttttcaggggtctgggaggacagctcatgagacaagcaggtaagtctgaaggcctttgcagccctctgcagccctttgccgcagccatcgttgagggaggtgtgctcgtggcgtgcagggcggcccattagcccccagggtgaagggctgggtgtgtttcttctgtggaggcggcatctgtgatgtgcttggtttgtccagtggttcctacgagggagagattgagagattgagattgagagagagaaagaggaagttgtgagctgggaggggttgcacccaggagccac

SEQ ID NO: 88535 - DNA, 1024 bp, Homo sapiens
tctgcgatgtggaagatgaggctcaccgatgtttgtttgttagctcacacattttaaatttcaggatttgccagactgttggtgtgaaagcaggagccccagacgaagctgtgtgcggagagaatgtttcccagatttactgtgcgctgctgggctgcatggacgactacaccacggacagcagaggggacgtgggcacctggtacgtacgtagcagtgggtgagcgcttcttctgagaagcccatctattccgtggaaactcggaggccccgggcttttctgcagggagaaatctttgtagatttgtgccgtgttttgcgttttaaaggctctggggaagatgacctgttctctgctcccgggtgagcctgcgtggcagggctttgcaggtgcttgtccagcccgtcctcaggtgttgggcctgtgtcgtcctcgttgacagggtgtgagggaggacgcgtcttcaatgaaaggctgccggctgcttacattgggttttgccaacatttcttgctgtagtgggattgataacccctgaaacgcctgtgtgtgtaggatgcctcggggccccggtgtgtgtggctgtgggtggctccctgcacacgtccctgtagcgcacagggaacctctgcaggccccgtgactccctggcagcgtgcctgggctctgtgtggggttagtcacgggtgtcgaattcacacaggctgccggcgtggtgggcagaaccagggttggaacccccctctcaagctgggtgtctctgcctctccttgtcccatcagggtccgcaaggccgccatgaccagtctgatggatctgacacttctgctggctcggagccagcctgagctgatcgaggcccatacgtgagtgtcacgtcgcagctcttctgcatcctagagggcagccccgagcttggggaggctggcggggcgggcggtcctggtgctcagtggcatttgcactgctgggcacacaccctcctcccagagagcctctctggtccctgaccccaggtttgtg

SEQ ID NO: 88536 - DNA, 1049 bp, Homo sapiens
gtcttcctctttgccctgagacctttactgctcaaaatggaatttggggcagaaccaagacccagcccaccctcccttcccctctttcccgcctgtggagaagctcggttgctcacgtctgttgtggtcgccgccccacgtccctgttgagcctctagaccggtttctttgcaacaaaagccttttccaccggttcctggttggccggctgagcgcaggtgtagtgtgcatccggggcaggcacgcgtttctggggccccagtgatgcctctgcttctcccgccctgcagggcgtcccggaggacctgctgttcttctacgagcacctcaggaagggcggcggcgtcatccgcgtggaccagagtctcctgctgtatcgccaccacccacaggcggccacgcactgcgtcctcgagtgagtcagccccgcccggccccgggacgcctgagaggccaggaacacgggaggcgcccgaggtcggggccggggttggtggggccgaccccagaggctgtggtcaggctctgccttgagacccagggtctggtgggacacggggcaacagcacatcccgagggtggcggggattcggcgtccacgaaggggcatttcccaagggcgccagggagcgccagggtgaaggccgaacgtccttccctagttcccagaggtaaaatgaccacgcgccgggtccttctgaaaccctgtgctccctttaacccgacgggagtctcatgagtggggtccggcggggaccacaggcctggggggcgcagctgccgtggagggtggcagaggcacggccagggaatcgcagcacccagtgaggacgcgcccagtgctgcggggtccgcctccctctcccgtgtcactgtgaggagcggccacgtgggcccgggtctgggggtgccgcgtggctgcgttggagccgtggcaggggtgaggcaaatcggggtgaaactgcatgtagaattccttccttagatccgggcagacagttccctccttagaactgtgaggacacagaggtctcggccacctgcctgcc

SEQ ID NO: 88537 - DNA, 1860 bp, Homo sapiens
ggctcactgcaagctccacctcccaggttctcgccattctcctgcctcagcctcccaagtagctgggactacaggagcccgccaccacgcccggctaatttttttgtagttttagtagagatggggtttcaccgtgttagccaggatggtctcgatctcctgacctcctgatccgcctgccttggcctcccacagtgctgggattacaggtgtgaaacactgcgcccggcctaatattcttttaagttaaagaatattagagagagttttgcatcttttatagttggatgaaaacaaatttaaagtattttggtgactgttgtgacactccttgtctaaaaacattcatctattttgaaaacattttgcttttcataaagtactttttatagattagctctaacttgaggcatatcccatttgtatgaattctgccaataataaaaacaatccgttgtaaagttctgaaggaccgaggtgaagggctgaaatgagccgtcctgctgcctgtctgaagtgtgggtaaggagacctcgtggggaccctattctacactttaataaaatatggttggtttggttatagctgaaagggacgtattttcctgtaatgatattttttcttgaatagggagagttatattgactattagataacatagatccaaagtgtctcttttcagaagtgctgggtatttgaaatgggctgattcacttattacgattcatgcactaacggagccccactttcctaataacgtcgccgcttgctaaaaccaaaatgaagtacaatccccactcttctctccaggaggaaggaatgttaatatctcgccgccgtgtgagtttttcctgctgagaccatggcaaccagatcccctcacaaagggactggcctccccaagcaggagccccacgcaaacatttgactttcttcaaggcaataatattaaagcaaattccttgtctctgccaaacacaggattcattgtgagaaacttccagcttccttagtgagataagtcttccttcgttacccaggctcacggatacccttctctcctgaaacctgacgctaacaagccgcattgtgagcagagcccctgttgaacagtgtgcctcgtggaaggccccttccggcccttcgtcctcacaggtgcctccgcctgtgtttctcgtgaggagcttcagggcactcacctggccctgcagcgatgatggaggcttggctgcagcggccctggagacacggcccaccatccatcccagggcagaacaggcgctcgcctccccgggtgcatttcctccctgcgcctgtttatgcccctggctttttgacatctgggatcctctggctaactgggttgagctggctaaactttagggattaatgctagaaattaaactgctacctggtatgaagaggggcactgctccgggttggagaacgcagagagggtgggagactctgtgcgtctcgcttctgtgcggctgtgcggtcccagtggtgccgtgagcttgctcgatgcccccccggaacagggcagcccccgtggggtgggagccctgccttcccctccttgtagtggagacgggagagtgccacgggtgtggccgaaatgcacacttggccactgtccctccaacagacaactttctgcagcttgtcttgatttggataccagagagatctattgcttaattctgcacacgtctgttttgctttgtatgactttcctgggtgccatgatgtctgtaactgtccggtgttgccagcctcttttctagggaaagtgggtatcctgccccttggagcctcctcagcaccctcattttgggctaaatgccacctctgatccac

SEQ ID NO: 88538 - DNA, 1017 bp, Homo sapiens
tacaatggcgcgagctcggctcaccgcaacctctgcctcccgggttcaagcgtttctcctgcctcagcctcccgagtagctgggattacaggcatgcaccaccacaccagggtaattttgtatttttagtagggacggggtttctccatgttggtcaggctggtcttgaactcccgacatcagatgatctgcccgcctcggcctcccaaactgctgtgattacaggcgtgagctaccgcgcccggccagaactcgttttattcttattaacctaagtccaggaagagacagagtgaggtttcatttgtaaagaacttgactaaattgtgttttcaacacaatttcaacttttcttttttggatataaattaagggtgaggacagactaatctcttaagtatcgctccgtatcacttaatattataatgtatgaaattaagacttaactcctgtaatcagttgttttgttggcattgaatttcctggttttactccatcccactttataaatttttgttttgggcttcatgagaaaaggacaatgagaaaaggacactagctacactagcccgaaacgaagtgtaggacaaaggaatcgagagatggacgtcaggcctcccatttgctcagctgggttctttgaacacctcctgcccgatactttgttaaaacattgttttttgtgggctgaggggttacttaaaggggttactttgttgcaggttttctaacatggtttgccgaaatgcttattccacctagaacatgaccagccagcacctgtaatcccagctactcgggaggctgaggcaggagaatggcgtgaacccgggaggcagagcttgcagtgagccgagatcgagccactgcactccagcctgggtgacagagcgagactccatctcagaaaaaaaaaaaaaaaaccaaccagttattttcatgagtgagttggaagatacccagatacttgtttcaaccaaaatgatgtttctgatcagtgattggaaaactcatgat

SEQ ID NO: 88539 - DNA, 1050 bp, Homo sapiens
gccccgccccggtcctgccgcccagtctcctcgctgcagtcgctccggagctgcacgggtgttttgcgtgttgctgcgtcatcgccagtggccggtttgaatgagactcgtcgcaccgaagccgccgccaccaccgcgcctccgcctcggccgccgccgcagctgctcctggtccccgtccctttgccgccctcgtcaggcccagctctcctgcgccgccgcctcccgccgcgccccgccatgccgctctactccggtgagccctgtcctggcctcgcgcgcagcacaccggaccggcgctaggcctccgcgtaggcctggcctgcacgggcgggcacccggcatggactgggaggggccggggtggggtgcgcggggccggcggcgcggagatgacccaggcaccgtcccctctcccggctgggtcggagccctgcgtggcaggggagcgccgtccccctgagccaccgatgggtggggggagtggagatggggaagcctctcaaagtcgtgactctgcagaatagtttctgacgctgccctggtgtgcggtgaaagtgagggtgtgtcctggggcgctgggccaggctggaggtgcagggagattcctttgggcttctcagtggtcgccgtggaagggagcggggaagaaggggagggatggagcgacccttcttggggttgccaagcggcgttcgccgcccttcgtcgtccttcgcccttctcttgccccttgcctttgttcgaccgcccctttggtaccagttttagttttgtcccgaggcagattgtaaacctttttgcttcgttttcgtttcatcaaacgttgcattggatttctgtatccgaaacgtggtgtgagctttcagaagtagatgaatacacatatccccggggtgtcatttcttgattggcgtttgacaggggcttgtattgtttgcttgctgacagtccagggtactggccagggatcacttttacttagggaatggaccttgctgctccctagccttattcaaaatggcacctaaaatatgtgtggtgtctcca

SEQ ID NO: 88540 - DNA, 1288 bp, Homo sapiens
atcattttgggaaatatttcaatatgatcatattgttggagtaggattcagaagacttgggagtttattaaccaattttatgacattagcaaatcaatctacttctctgaagtctcagtttctttttttttttttgagatggagtctcgcactgtcgcccaggctggagtgcagtggcgtgatcttggctcactgcaaccttcgcctcccgggttcaagcgattctcctgtctcagcctcctgagtagctgggattacaggcgtgcgccaccacacctggctaatttttgtatttttattagagacaggctggtctcgaactcctgacctcatgatccgcccgcctcgacctcccaaagtactgggattacaggcgtgagccaccacgcccagcctgctgaagtctcagtttctttaactatgaaatgagaagttaggtttgatccagtgaaattttattcagcacctactgcatgcatgctcctcttgattaggtaagtgttatgggcatagaaagatgaatgacatgttttgactcccgataactgcctaattggtgatcttctaagggtctgtaaatcttgtcttgttattttttaattaaaaaaattgtgattttgtttgcagttactgtaaaatggggaaaggagaaatttgaaggtgtagaattgaatacagatgaacctccaatggtattcaaggctcagctgtttgcgttgactggagtccagcctgccagacagaaagttatggtgaaaggaggaacgctaaaggtaaaatgtagtccaaattttcatcacattactattattgtatactttttgaaaaataacgccagaaaattatttaattttaatgtagcatttgaagtgctttttttatatgatgagagtatgtcagctatggtgttaaaactgtcttatgcctgttagagtaagggagaaatattgtagctgtttgacaacactatatggtattataaaaacatcgttttaaaactctttttacttttgtttatttttaacttttaggttctgagatacatatgcaggtttgttatataggtaaacttgtgtcacagggtttcaatgtacggatttcatcacccaggtactaagcatagtacccgataggtagtttttttttttttttagatcctcttcctcctcccactctccaccctcaagtaagttccagtgtcttttgttcctgtctatgtgtctatgtgttctcattatttagctcccacttacaaaagagaacatgcagtttgcttttctgttcctgc

SEQ ID NO: 88541 - DNA, 1026 bp, Homo sapiens
gcaaattatttgaaaccctggctttagtaccacttgtgtttaaaaaaaatttttgtttttttttgagatggagccttgttctgttgcccaggctggagtgcagtggtgagatctcggctcactgtaacctctgcctcctgggttcaagcaattatcttgtctcagcctcccgagtagctggaattacaggtgtgcaccaccatgctcagctactttttgtatttttagtagagatggagtttctttatattggtccggctggtttcgaactcctgaccgcaggtgatttgcctgcctcagcctcccaaagtgctgggattacaggcgtgagccactgtgcctggccaaaaaaaatttttttaattgccataattttaaataaaatctgcatataggataaattttattctgttttgaagtacattaaaataaattgattattagattgtgttcagcttgtacagtggtggttaaatgtcttttgtttgtctttgaaacaggatgatgattggggaaacatcaaaataaaaaatgtaagtattatcttatgaacgtttattataatgcagtaacctcattatgataccaaaatacattccagatgactttttttcatgtgtatatccagttgttccagcactatctgttgaaaatacttaccttttcccattgacttgtgttgggctctttcttgaaaagtagttataggtttgtttttgggtttttgtttcattgatctagtagattaaagttacactagtaccaaatggttttgattactaaagctttataataaaagccttgaaaaaaaaattagctgggtgtggtggtgcacgcctgtaatcctagctactcgggaggctgaggtgggaggctgaggcgggaggcagaggcaggaggcaggagaatcacttgaacctgggaggcggagattgcagtgagccgagatcgtgccactgcactccagcctggcaacagagcgagactccgtctccaaaaaaagagtcttgaaataagatagtatat

SEQ ID NO: 88542 - DNA, 1054 bp, Homo sapiens
acgtaacacctcattcctattttatggctgaatagtatttcatggttcattcatgttacagcacacgtaacacctcattcctattttatggctgaatagtatttcatggttcattcatgttacagcacacgtaacacctcattcctattttatggctgaatagtatttcattttatggatatatcacattttatttatccattcattttgttgatggaaatttgaattgtttctcctttttggctgttatgagtaatgctgcagtgaacattcatgttttttgtgtagatgaacgttttcatatagtaactctatgtttaatgttttgaggaactgccacaatgattttccaaagtgacggtaccattttacattctcaccagcaatgtgagaaaattgccaatattgtctgtctttgattaagccatctagcgctatgaagtgtggtatctcattgtggttgtcatgcacattttttttagtggctaatgatgttgggcatcttttcatgtgcttattggccatttgtatatcttctttggagaaatgtctgtttaaatcttttgcctgtgttttaattgggttatttgtctgtttaaaaattcaattgtgtttttacatatatacaagttccttacccaatggataatttgcaaatcttttcttctatactataagctgtcattttactttcttttttaaaatttatttttttcctaagtctgttgtatgcagtctccttttacttttcttgatggtacgtttgtaatgcaaatgttttttaattttgatgtagtttaatcttaattttaattttttcttttatcacatatgcttttggtttcatatgtaaaagccattgtctaattctaggttacaaagacttacttctttgttgtttttcaagagttaatatacttttagctcttctattcaggcctgtggttaatttttatgtatggtgggagggagggaggtatttgcctattattttgcatgtgtatatccagttcttccagtatcatttgttgaaggctattgtttccccactgaa

SEQ ID NO: 88543 - DNA, 1810 bp, Homo sapiens
cctctcagtatttctgtcagtttccttttattttctaagtttttctttataaacttcagtgttaatgttatttggcttaatggatggttttacatgaattaggaattacattttattgctctaatatgggaatttttttttggatattaaattacatatgaccttccttagttacaaaaaaaaggttgataattcattagtatatctttgccataaatgtagaaatagttacatattcatgttaccctataacaagaagtaaaattcagtaacagcagcgattatatagctaattacatacccaagtgatgttcagggtatgtctgctatattagtacttaattttaatttcaaaaatgccttttaagaagttgctaaaatgtcttaacagggaaatgtaatgattttcaggtttttaaaaatgaacacacataattcaggcattattgtgaattattgtgtattgaaaaattaagaaaattcgttgagtcacatcagtttccgaaagatgcaaacaaatgaaaaagggaaaaacaaaatccttcaattgagtacaatttaacacaatactctctgtgatttctttcatactacttaacataagcatagaggttttgctttttaaattgagatataattcacatctagtgaaatgcatatatcttaagtgtttggtttgatcagttttgacaaatgcaaattctctgtaatccatttgcctatcaaagtatagaacatttctatcatctcagaaaatttcttgggcatgccttttctcagttaatccttatcctctccacccccttccagcaactactgatttcatattagtttgcacattctgaaacgtaaaataaacggaatcctacaggtcatgcttttcttttgttctggcttgtttcactcagtatctagcttggagatccattcatattattactgactagatcagtaattctgattgctccacaatcttgccgatattgggtgatactagttttttttaaattttgattttagtcactctaatgggtgtgtagtatgtacacatagtttaatcatagtgtatatgcagtctccctctcacttcagtgtttgatattaactgaatgataatttctgagcttttgtaataagacattgtgtgagtaatgactatggtttgaatagtcatttgaaaaggaatttgcatggccagtttgttgtactgttgtaaattaagtgaggatcataaagctgaaagtgaatttagaaatcatttaatagaagcttctcagtttacagatgagcaaactgacctacaaccttaagtgacctatttaatgatacacagcaagctaatgctgaatgtaggtgtatgatttttgattgaatgtttttgatctaatgcttatttcttccaagttatttcagagattgtgttattttattttctttgtaattaatgaatagtgttgtttcacaatactttcagaaaatgtttgttttagctgggtacagtggctcatgcctgtaatcccagcactttgggaggccgatgtgggtggatcacctgaggtcaggagtttgagaccagcctgcccaacatggtgaaaccctgtctctactagaaatacaaaaattagctgggcatgatggtggacgcctgtaatcccagctgcttgggaggctgaggcaggagaaattgcttgaacccaggaggtagaggttgcagtgagtcaagatcatgccattgcactccaacctgggcgacaagagcaaaactctgtctcagaaaataaaaaataaaataaaatgttcgttttatatg

SEQ ID NO: 88544 - DNA, 1642 bp, Homo sapiens
tgcctcagcctcccgaatagctggggttacaggctgaagtgagcggatcatgaggtcaggagttggagaccagagcctggccagcatggtgaaaccccatctctactaaaaaaaaaaatacaaaaaattagccgggaatggtggcgtgtgcctgtaatcccagctactctggaggctgaggcaggagaattgcttgaacccagaaggcggaggttgcggtgagccgagatcgcgccactgcactccagcctgggcaacggaccaagactccatctcaaaaaaaaaaaaaattaagtaagtttttgtttgtattaattaaaattaatttacagtcgcgtgtattaaatatgtgactgttttactaaggcaatgtttgctttgtctttaagcccttagagatttgtttgattccatggataaaacttcttccagtattccacctattattctactgcagtttttgcacatggctttcccacagtttgccgagaaaggtgaacaaggacagtatcttcaacaggtaattagggcaaggtatttttcattctgtaaatgtaaaacttaggtttcctacatttaccgtacttactggaacatagttcgaaatataaacatcagtcttctctagttcatgccacggctgtctcttgcctggagccgcacagtagtcttaactgatatctggcttctgcctttgcccctttgcagtttctctacacagcccgcaatgtcctttttaaaatgacgataggattatgttggccccttgttcagtactccctagtgattttctaccgcagtcctaaatcctctagcccctggctttctctctgagttcatcactaccactctgtcccttgcttgcctctctccagctgcacaggcttccttaaacctttcaagtgccctcttcctgcagggcctttgctcttgttctttggctgtcagataagtgcaagaccagctccctcacctccttcaggtctcatggctccaaggccaaagccttaggctttccctgatgaccttattggaacagcacacttcccttcccctgatcacttactgtttccatcctgctttttttcgcttcataacccttatctctacttgaattttatatattcactgctattatgctgagtatctagtacagtgtttagcacaaattggagctcagcagatgtctgttgaatgaataagctattctagaatgctttattttttggaagatcgtatgtcttatttggcttaatatttttaaagaaggaaaccactttcttgcctaggagacagtgattattttggaagaactttgtagatcattcactgccaggattacttactttgtctttttttacattacaggatgctaatgaatgttggatacaaatgatgcgagtattgcaacagaaattggaagcaatagaggatgattctgttaaagaggtaattgaaatatatttgtgattatagactttcgttataccttgatttttttttttattttttttcccctcaaaggcttaaaataagttccatcttataggtagatgtgtatttaaatactttagatgctcaatctgtagtcagaatttggaagcttgcatacgacatttaaatttaatgtattatttattaa

SEQ ID NO: 88545 - DNA, 1592 bp, Homo sapiens
ttcattcaccttataaagaattaatttcttatatgtcaaggtgactgttaataataacttttaaaataaaaaaagaattttttaattttataaaagggtgtgtatcaactatacatgagattgaaccagttaataaaacatgaatcaggaaagtactgtcttctaggtcatggttagaaaaacttagaaacaatttatgtacctttgggcttctaagaccattataagaccatactaaataccagcttatagtttagagtttattgcagtttatcttttaatacacatttattactcattgttgtttctagaattgttggtagccaaatgaacattcttaagtatgttgaaatgaatcttgggagactaaaaggttttaaatgccaatgaatgatactattaattttaatggaattaggataatgtattatattcaagagtatataacaaattgaatacccgttggcatattccttatcttagtttacaaagcatgaaatgtacagaatctgaagaagaagaagtcaccaaaggaaaggaaaatcaacttcagcttagctgttttatcaatcaggaagtcaagtatctttttacaggacttaaattggtaaggacaatctcagtccatccttgttgtttgtgaattccatgtttgcgagtaagccaaagtcattattcactgggctttaatggtcatttgtagacatgtgcagagcaatacgcattttgagttgcccgatacacacagtcccatctgaggtcaaacaagtacttggccttcttgtttcagcttggtaaacaaataccattttagcaggaatgttagaactgttgttttaaaaaaaaatttctgctttttgttggttatttcactgtttaagatgaccccccaagcacagggctgagtgctgtctagtgtttctaggtgtgggaaggctgtgatgtgccttactgagaaaatatacttgttagagaagcttcagttgggcctgcgttgcactgttggctctgagttcaatgttaattaatcaacacaatatgtgaaataaggtgtccttaaacagaaacacacataaaacaaggttatgtattgattggttgatgaaaatgttgtgatcaaaggctggcgggaatctaatcctgtatttcccctaggagcagtggttcagtattcattgattcagtgcttgtggtgactttgtagaacataattaccgtgactaacaaaatcaactgtatagtcagaaatcaaacaaacttcaactagctcttcatttcatagacaaaagcattattgacatggttgcatatgctaacaaatattgggacatctcactttttaatcactgggtgttcctgcttcacactgtgaagaagcacctagtgctttgtgctgtaccttgctttattttaaagcactcaagaaatgtttgttgaatagtttacatgtttgttaagatttttccttagagatagttgttttcatgggccctataacttagctgaactgttaactttaaggaaaattacttaatctaagctactgttttcttacgtgaaaatgagagtaactatagggttgtttgtgggtt

SEQ ID NO: 88546 - DNA, 1015 bp, Homo sapiens
taatttggcttcgtttctccactgctttgctgctgaataaacttggttaaatgttaaaaagctactccacagtgattccttttgtaatatgattagtaattttaaaaaatcagactttaaaattatacaagtgtaacatgcttaaacattaccagtaggttattttaattctaatttcttttttgtttgttttcttaaagcagagcacataagtagtgctaattctttctgtgacattagaaatagtagtgaatgtttgttaaatgtagagtatatgccaaatattttaccaggttttctacatgtactgactgtaattctaacaataacactataacattgattaccactaccaccttttccaaatgatgcccagagggataaataccgtttccactgttacacgggctgtaagaagcagaaaggtgatcatgctggttaagatatgtgcagcagctaaaggctttcccacatctgttaggttaacagaggtttctgtgttatgacttttttcaaatttaacaataattcattggtgctgattggcttttatgcataaaacgtaaagaacaggagtttcttgggctctcttaattttcctctagagtgaatattctgataataaacaggaatgacagctttgttatataaaatacaatataaaattctctgaatctaagcatcatttggggcatagctaaaaaagagcaaacagtatttacactcggaggaatccacaacaacgtaaattatttgatgccttgtaagaattgaacagtatctaaaagtcttcccatattgtcatcaaattgtgtctcagtggtataaacccattgatgtactgtatattgcctcttaggtagtgctagtttttaaaaggcttactggtgtgattctatattgcagaaataaaatttttaaaactaatgtttggtcttctgttatgttctttcttagcgacttcaggaagaaatcaccaaacagtctccaacgttgcaaagaaatgccttgtata

SEQ ID NO: 88547 - DNA, 1150 bp, Homo sapiens
ttccagtatacttagcgttgtatgagaaggttaaatgtagttgaagtatctagtgttgtatactttaaatatatactactataagctattgaactatatcactattacttctatgtaaagttgtatttcaaataaaaaaaaaaaaccataagtttattccagtttgggaggtccattattttcacagcagcttgtccaatatttctgagatgtttcttttctcaggtaaattttggtacttcctctgtggttagttttgtgggttagagtatttaatggaaaaacatgttttagaaatttctcaccttaaaaaagttagaaccagatcattcttgaaaataggcactcttaagaggtttcaactgcagatttccaagtgattttcacagattttattttcaactgtatctgaattatgaaagcattacttcagatatgtgatactttaaataaatatctttataaatgtgtttacacatgttttttgtttgtttgtatataggatgttaaatttcctcttatgttggatatgtatgaactgtgtacaccagaacttcaagagaaaatggtgtcttttcgatccaaattcaaggatctagaagataaaaaagtgaatcagcagccaaatacagtaggttcttactgctgactttatactcttaatatcttaatctcccatcagtgctcagcaattactctgtcttttttttcctgcttcatttttccttcagaactatactttgtatagtattatttggatcaatctgtattacaattagcaggtatacacatcctccatatatcagtgcagatctttaaagttttgcatgtgttttattttcctttttttttttttgtgacaaggtcttcctttgtcactcaggctcactgcagtctcaacctcccaggcgcaaatgatcctcccacctcaccctcccaagtagctgggaccacaggcgtgcgccaccatgcccagctatttttttgtatttttggtagagacagggttttgccatgttgctgaggctagtctcgaactcctgagctcaggcgatctgcccacctaggcctcccagagtgctggggattataggcatgaggcaccacacctggcctttaggtgtattttagcatgagaaacagaactcta

SEQ ID NO: 88548 - DNA, 2289 bp, Homo sapiens
cgtggtaagtggacatggctcaggaggtttaatacaaattgcaggaattcttgttttagaggtagttgttttttccccccacctctgtggtttgacagtattttggtaacactggggaattgggtttttccttttctgccctagagcactgtttaactgtactgctgtattcactggtacgctttcactttaatggtttaaaattggtcatcacattcagggtgtctgttactgtactgtaacaagattttatattgttgaagtgtaggactgctgggtttacagttttaactgtggttatatcattttagtaatttggaaggtagactgtattttgtctctgtgcactgtagacagtaaatatttatgaaattgaacacttacagagaattcaaattttatttccaaaatcatgatttaaaattaaacatttttttctcctcagagtgacaaaaagagtagtccccagaaagaagttaagtatgaacccttttcttttgctgatggtaagtaacattctcattttaattgagttattgtatgtgggtctttttaaggtaaaatttacatcttaccccatatttacttattctgatgtgcttttcaaacaaaatgtcaggtttcttgaacaatttaccttaatgacatatagtaaatttactcattggcatacagttctatgagtaagttacttattaaaacatcaatcatgaagccttaactatgattggacagtagtatcttattggattctgataatactttcgtaatgtgaactttagagttattcttgttacttagcttgagaaggcacatgtctattcattgtctaatattaatggatttacatctttctttagatattggctccaataattgtggatactatgacttacaagcagtactaacacaccagggaaggtctagttcttcaggtcattatgtatcatgggtgaaaaggaaacaaggtaaagggtattcttttttcaactgttcaatattattttaacagttcatttattataaattttatagcagtgtggttttcaaactttgggtctcagaaccactttacattcttgaagccccaaagagctttggtttatgaggtttgcctctcttaatacttactgtattagaaattaaaactgagaaattaagaaagttagttttaaaaatgatagtaataagcccattacatattaatgtaaaaacaaaatgagtgagaaatggtactgatttacatttttatgtctttctgttgtctggcttaaataggaggcagctgggttctcctgttagtgttcgcattcagtctgttgcattatcatacattatgtagcctctggaaaattccagagtacacttgagagaatgtgggtggaaaaggcaagcagtgctctagtggtgtcattgaagtagttgtaacctggtggaacccctgcagtgcccttaagcctgtgtggtcactgggtcgcacttggaggactgttggtgtggccagtggagcactgctgtgcctccgatgacttgatactttttttgcagtggaactctgagacgaatcctgcataacattaattcatcttcttgtccctgttatttagatgaatggattaagtttgatgatgacaaagtcagcatcgtaacaccagaagatatcttacggctttctggtggtggagactggcatatcgcttacgttctactctatgggcctcgcagagttgaaataatggaagaggaaagtgaacagtaatcttcattttagtatttatgcttagatgtgaaaataaatgttatttgttgatcatttctataatccagagctttagaggaagacacataggtgggtttatgtttcacctcatttggaacaaaagaggacagaagcagaccactctgtgcaccaacctaaaaaattacagagaagagaaaattatctttggattgtgctgccctatataaaggtggcagaaagacatttttaaaaagcttattatttcttgcattattttaaaaagttcagagttgaaatgcctttcaaccatttccttctgtggtcatttttcttgctgcctttttcacccaagattcagcagtcagatgtttactgcacacctattacctattatttgctgttcttgcatggttcaaaccaccattctgtagccacccatcctttgccttatctaacaaacatttttccaggaaggtggaaaaggaagtgttgctctcattgtgtgactcagtgctgctgtccatcccatggaaacatgggcacaatca

SEQ ID NO: 88549 - DNA, 1035 bp, Homo sapiens
tattctatgctttatcctttccctagcatcagtcaagggtcctggaacaaagatgagtaactattaaaatgtaagaagcctatcatattgaaatacctcatatgcttggtattttctactatcactttaaaatcactaaaattctgaaacagacattaagatttgggaattttttctttttttttttgagacagagtctctctgtcacccaggctggagtgcagtggtgtgatctcagctcactgcaacttctgccttccaggttcaagcaattctcccacctcagcctcccaagtagctgggatcacaggtgtgcaccaccacatccagctaatttttatatctttagtagagacagggtttcaccatgtggccaggctggtctcgaactcaacctccagtgaaccacctgcctcagcctcccaaagtgctgggattacaggcgtgagccaccgtgcccagccaagatttggggaattaagaaaggaaatacaaacacaactgagccaaggaaagaatctgactgataacatcactgcattcagcatccaaagaaatccattacttttacaactttgtatttctttttaaaatacaggcaggcaaagaagataacaaatatttttaaatggatgcttaacagcacagtgttaataaccatcttcagaaattgtacagtattaaacatgtcttcagccaagctccaacactcagaagacaaaagacttgaggtcaaaagctattaatccctttttttttattattattaaatgtcctcattttctaaaaataagcaaccagagcttgtcaacattttcttaagactgattattacaaagccattccaaagttaaatgtacaatccacagtacatcagagagagacacaataataaatgtataatcaaaggtactattattgatcacaatttattttaaagtcaggaaaagcctgcaataggctggacaaatacttgattgtgcccatgtttccatgggatggacagcagcactgagtcacacaatgagagcaaca

SEQ ID NO: 88550 - DNA, 3745 bp, Homo sapiens
tttcctttcttaattccccaaatcttggctgggcacggtggctcacgcctgtaatcccagcactttgggaggctgaggcaggtggttcactggaggttgagttcgagaccagcctggccacatggtgaaaccctgtctctactaaagatataaaaattagctggatgtggtggtgcacacctgtgatcccagctacttgggaggctgaggtgggagaattgcttgaacctggaaggcagaagttgcagtgagctgagatcacaccactgcactccagcctgggtgacagagagactctgtctcaaaaaaaaaaagaaaaaattcccaaatcttaatgtctgtttcagaattttagtgattttaaagtgatagtagaaaataccaagcatatgaggtatttcaatatgataggcttcttacattttaatagttactcatctttgttccaggacccttgactgatgctagggaaaggataaagcatagaataccagccagtttggctctgattttgagttatttataataaagtttggggattatcataacatctcatatctttgtgtatgttgttttaatgctcggcagagcacaacactgatgataactattaaaaatagaaaataacagccattttactttcaaatctgatgtgatgcaatctgtgaacactaggaggggataaaataagcattgcagggaaacttatttgtaaatagcttcctcacctaaactttgacttggcaatcaatactttctactttgtggaggggattaagaatagaatgggcaggatgagaccatgaaaattataatgattcatgtatatttgtatgatgcttgtaactttgcaaagtcttttttattcattgtctcatttggtcagaacaattttattgaggacatgaatttaacaattagaatttagattttctgactgtagctactaaatgttgtagctactagaccaggtgagctaggtttagagcaaagtatataagccttgtatggactatattagaattttaaaaattgtaattaattccttatcatcattataaaaagcttgatttttttatttgatctaaaaaagcattattccaaagaattttttcaagtagaaatgggagttagttataccagtgttgtttttaactaataaggctattttagaattcagccttgcctgtaaggtctttgagaagggagaggagtaggccaaaaaaaaaaaagtcttgattcctgaatgtgccttatatgctgtgccactcacaccgaggccatcatctcaacattagagttgtgctagattactgcttgactgactagctaggttaggcctaagagtgtttaccgaataatctgcactcactcagtagcccttcttcaggattaaaaacgatgatgacctcatcttagagccctaaagggaaatgcttatgtgggaacaagaaaagtcggtggtactgtcttctgctactactacttagtgctttgctgtgtatagggtgtgttcacatatatctcagttgaatgtcacaagaatccctgaagtgattaaaagtcttgagaggtcaggcaatttttgtaaggctagaaggaaaagtgaggttttagacttcatttcttttaaagttggcaaacaaacattttctgtaatggacaagatagatagattagatagatagatagatagatagatgatgattgattgatgattgatagtaaattatttcaggctttgcaggctataaagtgctgcagctccttagctttgctgttgttatagtgtagctggagccatagacagttagttagttagttatgagtgagcacagctgggtgccagtacaattttaatgatcaagactcgtggcaggcagaacaaaccatcatttgttgatcctctgcttgaaagcacgaataagtgagaacagagcagtcatatggtttcagaaagtgttattctgggatttcaggataaattttgtaaaactactaacaaacaacacacaggaaactaatttggtataagaaacgacatatccctaaatagtgcttatttaacttcattataaatacatctacttaacaaaaaaatatattttgtgatcttgaggtcacttcgtttaggtcattatctcaacccaacctccccaaactctggtttgagccaatatgtgttctattgttctcagagcaccagccgactgtacaacaattgttataaaaatgtttattgtttaccaaaaccagtggacctcttatcaaatgctgcttggtaacaaaatctatcacagttttaataaaaagaaaaaaaaaagaagctaactatttgtctcattgtcattagttagactttctgcaaggtcacttaatccagacttattcagtgcattaatcagattctcaggtgttgcatgaactccctcttgatcttgccaggcaaccaggagctgcttagctctcatcttcatgtcttcactgtcacactcaatctgcctaatttctgagtctttcatttccaagtagggagccagaatcttccattgttcacccagcttgttggcaaatacctctatttgttctcctgttacaggtttgtctcgccgaacatcaggacctagaaaatgaagagaatataaattatgcgcaattctaagtatacaacagaaatggaaagctatggggccaataagttttattaaccacctttagtagactttattttaaaagtaaacaattattttttatattctccgtaagttgaataccactcttaataagcatggtcaataatcaaagctaaagctgttacctataattacgtaggctttccctgaaatgaggtgctccccctccaataaccaataattaacagaggtatgggtcgccttcaaatgtattttcattcccttttaaagcaccattacttcccaattttattgcataaaatgtagtgtttttaaagttattattaagcaatgttttaaattcctcactatgtcagaaacagttgagataaaatgggagaagttgagaagtcgatcaaattaaataatgtacctatcaacaaagaaccccaatcgtcttcaattttgttaaataaccaagaaaattcagttcttactttcattttccttcagtagagcatcattatcttcctcatcttcatcctcacctgtttttatttcttcagaaggaggctaaaaatgagaaagaagaatgtttgaaagaatgccagcctctgaagtaaggtaacaggtattttgtttggataaggacggttgtgagattccaagtacagggtgccagaacctcacccctgagagcgttaaatgacagtgtcaggtaaggatcctaagtgggactatcttcacctgcagaaggagtgaacttgggaagacctcagagttggaaagactccccacccccaatctgggaagcaggaagtcagtaaaaagcacagttccaggatttgcaaatacccagggtttatttagtaaagacggcctcaaggaagccagtagcaacagtgtccttaaaagtttctgattcttatcttttatctttgataaaagacaatataatgcattggcaaacaggaaaaaattcatgtctgtgtgtataggtgcataacagtttacctgaagtatcacgaactttaattttttgagacggagtcttgcttggttgccaggctggagtgcagtggcgagatctcggctcactgcaacctccgcct

SEQ ID NO: 88551 - DNA, 1082 bp, Homo sapiens
taataactttaaaaacactacattttatgcaataaaattgggaagtaatggtgctttaaaagggaatgaaaatacatttgaaggcgacccatacctctgttaattattggttattggagggggagcacctcatttcagggaaagcctacgtaattataggtaacagctttagctttgattattgaccatgcttattaagagtggtattcaacttacggagaatataaaaaataattgtttacttttaaaataaagtctactaaaggtggttaataaaacttattggccccatagctttccatttctgttgtatacttagaattgcgcataatttatattctcttcattttctaggtcctgatgttcggcgagacaaacctgtaacaggagaacaaatagaggtatttgccaacaagctgggtgaacaatggaagattctggctccctacttggaaatgaaagactcagaaattaggcagattgagtgtgacagtgaagacatgaagatgagagctaagcagctcctggttgcctggcaagatcaagagggagttcatgcaacacctgagaatctgattaatgcactgaataagtctggattaagtgaccttgcagaaagtctaactaatgacaatgagacaaatagttagcttcttttttttttctttttattaaaactgtgatagattttgttaccaagcagcatttgataagaggtccactggttttggtaaacaataaacatttttataacaattgttgtacagtcggctggtgctctgagaacaatagaacacatattggctcaaaccagagtttggggaggttgggttgagataatgacctaaacgaagtgacctcaagatcacaaaatatatttttttgttaagtagatgtatttataatgaagttaaataagcactatttagggatatgtcgtttcttataccaaattagtttcctgtgtgttgtttgttagtagttttacaaaatttatcctgaaatcccagaataacactttctgaaaccatatgactgctctgttctcacttattcgtgctttcaagcagaggatcaacaaa

SEQ ID NO: 88552 - DNA, 1065 bp, Homo sapiens
aaggtaagataatatgggtagtaaacaatttgtaaacagtagccaagaaaaaaaaggacttgcttacgatttttcttatgtatgtgtccatttcatgttaaggctgtatccctaaaacacatgtattgcagctgatacattgaaggcttttcgatattaggatatttaaggaaaagatgttaaatatatctgtcagtgtgagtttttcctgcccaactccagggcttgccaggagttgtcgtctttattagcaggtggaggtctctgctccaaaattccgtcattcccttctcacctccctcagacctcctccaaagctgatttgcagactaagccagtaatacatatctcacaaggtgtggagctctgcaggacattcaagctaaaagatgcaaagaaaatttttaagcaaaaaggagttcatttatttggggtttcacaaaacctcattaggctctctactgtctatctaaatacttccatccatttcctcctatcctgtccataactgaaggtggagcccactgttacttaacggtatttgtgttaaggacactgagcaatgccgtattagttgtataatgacttcactacctgctgggtttgaatcccaggctcgtcatttgctggctgcagtgcagctctttcagacttgtaattttaaggtagtagcacatggtaaacactcaaaaaatgttatttcttatccttctatctattttggaggtttggtatagcatagtaggaagatgagggactttgaagtgagacgtgggtttgaattaaatctttatggccttgggcaaatcagtgagacacggtagtctctgtttaatatgtacatgtacttgttccgagaattcaatgaataatgtatgtaaagtgttcagatcctagccatcaatatttattggatgtctttaaatcacctagtgcattatgagagctcagttagtggcagctattaacaatttgggtttgcctgttgccttttctagggtttgggtgttttattcgttgtattttgaatgaatcttaatgtagcatgccatactgaatgtgcat

SEQ ID NO: 88553 - DNA, 1117 bp, Homo sapiens
atttccttcaattctttgcaatccagtttctctaccattccctccattttcttctttggaaatcctactagacagatgttggaaattcccaatctattcaccatggcttttaactgctcttccacttaaaaaaaaaaaatctgtctgtgctgcttgctggatgaagttctcatcaccttcttcagttcactagttctttgttcatctatgtccagtgtatagtttaattctgtgtgctgagttttggtttcaattattgtatttttcattcccaagactcccgattagttgtatcgactgtcctacttcatttcagcctgcttttgtttcatgatttcttgttccttttcaatggatgttatctcatcgattatctttttgagtatccaaaacatacataaagtcttggtcaggctatatatttcatctggaataaatatatatatatatcccaatagttgattttgctggtgatccttcttagcattagatttatggattttggaattttaatttatcagagttttgaacaggagccttttcttttgggatgtttgtttacttcctttcccctccctctctgtgtacatccttccctgtctagcagttttgcatctgcttctaccagggcccctgagtccaaaagtctagaagaagtcttatgatgacttcttggagcagctgtttcataagtatactgagcatatcacatatctggtcactgagcaagcagatggacacaaagctgtctttgttatccctaggctcacaacttcctataaaaccatagcccttggcagaagactggcaatattttttcttagtttcttcccaaaactggataaaagttccaccctagtccttggcttcaagaagtgaatctggctctggccccttgtcccacatggtgcacatttagtctctgttacttgtagccaaattcctggacaccaccacctgccttggatagagagtccagcaggcccaggctgcagttttgctcactacttggcatttctggtccatgaagatatttatcttgtttctggaagcccagccttgtctcttttgttttctcgtttatattttacccgtcattgctatgtgtttggagcaa

SEQ ID NO: 88554 - DNA, 1668 bp, Homo sapiens
cgggcatggtggcgggtgcctgtagtcccagctactcaggaggctgaggcaggagaatcgcttgaacccgggaggcggagcttgcagtgagctgagatcgcaccactgccctccagtctgggcaacagagtgagactcctttaaaaaaaaaaatttaaattaaaagaatatgtattgacactgtagatttgtgacatatcaagattagaagttgaattagtagtgccataataaagttactagataaagggcttatttttgtgatgctaacttgatatgtaccatatatgtttttctcatactggtgcttcttaggatataatatttttagttaggatatgatacctgtgacttttaacatagattcagattaacattggtttaaacaacataaaagttgatttttccccctcatatcgaagtctagaagcaggcagtccaaggctggtaagggagcactgctcggtgagattgcctagacccaggcttcttctaccttcttcttccatcatcttggtgtttgccctttttcctgtagtgcaaggtggctcacgctcacatctgcattctagccagcaggaagaggaaaaggccagtgataaaatatggcccaaaagttgcacatatgacttccgctctcaactgattggccagaatttaatcacatgaccatgcgagcagcaagattggttgggaaacataatctttaattctgaataaccatgtgtccttccaaaattcaggggctccaccagtgtagataaagagtctattggggtctatgagttccctaaaatgatttgtaaaagtttatataagcatttgtgaatgtgtacttttctgataactttcattagcttctgaaaacggtttgtgaccaaagctaagttaagaatatttagatatttgtaaaagaatttgaatgatttatttaatataacgtttattttattagctctattccaattgattacaacctgtatcgaaaattctggtcacttcaggattacttcaggaaccctgtgcaatgctatgagaagatttcatggaaaacttttctcaaggtaagttgccattgacagactatcagaagcccagtattttatagacagtgatagagctaaaacttaatcttgtctaacatacttttcactatgtaattctgcctcttacatttttataccaatttcataacaagtgaaattataaattaatatttaaaccactaatattgtgaagtagtatataagaatcggatatttaaaagttcgtcattacagccttgctttttttgaatataatgagtgttgttaacataaattgatattttgcagaatatattctatctttgtacaaaattattttagctatcttgttgaaacagaagtcctcaagtcatggctctgggccagatctaacctactgcttataaacaaaggtttattggaatagtaccatgaccatccacttacctgtggctgtttttgcactataatggcacagctgagtagttgcaactgagattataaaggccacaaagcctgaaatacttactctctggtcctttacagaaaaagtttgccaatcctgttttagaagaatttgttatatttttcttggctacttaaagatcagttgtccttttttgtcataattaaaatctaagat

SEQ ID NO: 88555 - DNA, 2701 bp, Homo sapiens
taattgatgtatatatttgaaaaataagtcttcttagttttaatttcatttccttgatcattattggtgttgaggaacttattatatgttggttggaatttatttttcttctgtgaattagctattcatgctgtttgctcattttattgttgaattgtcttgtgcatttccaaaacatttagccctttattcccagagggaatctattgattatgtttagaaatgtagatttgaaactttctactgtcttcatgactgtgttatatcattgtcatactgctcttgagttcttctgtccatcaggtaaaattctgattgccttacagattaactataggtctagatagttagtgactagacttctctaactgtgggttgcctaggaatgtgtaactgaccacttattctagcatttatctcttctgtctgatgactgcttcatgacaggctatacatttttttttcaatttagcacactgaagatagagaagaaggaatggatgtagaagaaggcgaaatgggagacgaggaagctccaacaacgtggtgagttttcagagcctaagctttttgatttacagagataatctcctaatttattgagtatcctctctggagtgaggagatagacaaggaggaaagaaattataagaaatttctttcatttgtaattttcatgtatattacttaataaatcgtaaatcactaatgggctttatctgctggtttctatattatgtgcagacagttcattgtttatatagactaccctatgcataatcccagcatttgaaaagccaaccacaggcagccttaggagctcctccccttaatcccttccattaaacttgtggacccagtgcctgtgtgtattgggctaacttttaatgaaataggcaagttaagaagcctttcctccttctctccccttgctcttaaaactgtttcttatctcctcctctgtagccctgtgctttctttccaaaagcaatcctcagtggcatagataggttctagaaactgcaacattaagtgaaatgatgtatgatgaaatcaattttcccataggctaacaaacaaaagttaggttcttatggcctatttctggtcacaaaaacaatcaccaaactcctagataaagatcaaaatgcttctgttattaaacattgaataaatgtgagctatacatgcatttgagaaagattaataaaaacaagtaagataattatttgcctagttattccaatttaaggttgtgggtggccagagcctgtcacagcagctcagagcgcagggcgggaaccaaccctgtacaggacgccatctgctcacagtgtgtatacccacccacccacactcacttatcctggaaccatttagacatgccagttattttcatgtacacctctttgggatgcaggagggaatctgactacctagagaaaacccacacagacatagggagaatgtgcaaactctacatagaccgtggccccagccaggaatcgattttttttttctcatcaacgttacaataaaacaatgttgaaggaaacatcgttatttgaagactttccataatttcttcctagtgctggcttagaagcaatgagcaagagaaaagagaaggcattaaggaaaattttccttcactggcactcttccaggtgtctgaggtgatgagagtcattagttataattgaaagaatttccattactgtctagaaaatcaagatgggattcctgtatctgcccagggagatgtatttctggcatcccagaattcaaattcaaacacatctccagaagaaacattagaggtagtgtggctccaagcttaactccaatacttcctagtcatgtgacctggggccaattacttaaccttctacaacacagtttccacatctttaaaatgtagtaatgccacctactctctacagttaagaggattaaataagacgatgatcagaaatagtctattaaggcactaattgtttatatgtagtggtaagtgtaaagcacttagaatattgtctattcagtgtctagtagctattatttgttatcgttattatttttttttagagacctatttattcattatacatgaataaagtaggctttaaggtctggcctgagcaacataagggctctggggcaagttagtaggctacaagatgatgagtcacctgaagtgtaaacagcccaaaagacactggccagtgcagttttgtctgcttagattttgcctaagactgtatagacaattcatccctattggttatgtttgtaaatcacttaaataagactcaacactcagctgcctctgtcacagtcactaatgttgaatagagggagaaaatacgtgaggaattactttgtgacagctgttatcaccagatggtcttaggcactgtaatttacaaagcagaactcattacccatctacctacaatatgaagtccatttcagatttggctcaaatacaccagtaaacatttttgttaagaaatttcaatgtataacatcctgtaaaatagctgaacatttaaaaaaatatatcaagttttccagagtttttttggttaaaatagttacaagacattctattttacatagtaactgggtctctgatttgttattatttgcaaatacaataattggttacatttgctttgtgtgggtaaacagaaaattc

SEQ ID NO: 88556 - DNA, 1123 bp, Homo sapiens
tattttcttttacttataaatgtatagcagtcctagtatataatacaggtaatcctgaaacaaagtcatggattcttttaagttcaaagcttattaatgtaaagttgaatcacactgaaacatgtagatatgaaccatcatatccgtatttcataatgtatgcctatttttgtgtttggattttctctcagtcacaactatttagctatatagacttcctttcatttctctttttttaacaaatttttattgtgaaatataacgctcatatagaaaagtacataaagcgaataataatgaaacaaatactgtataaccactatctagctcctgaaatgggacattgcttgtcctccagagccttccgcctccccagtatgttcaaatatgcgagattttaatatctccttgcttcagtcctcccttccttaatattgggctaatgtaccacctactttatatgttctgaggattaaatgaattaaaacatgtgaagagcttacattagtgcctgcatgtagaaagacctatagcatatgttagcagtggtttatgtgctttctttttgtcatcttatgtctgtgctgttttctttcatacttattttatgtggtcagggttaatatagatttaccacttcttgtatttctggctttctgtctgtgatcattttcccttttagacttttcttcagtgcaggtctgtgttttgcctaaaaatcgttacttctcctttattttttttcctttctttcttccaaactcctgttaatattggtattttgacctcctcccaataggtataagattctagattggcactagatacaggatttcatctcacgggaaataatctttactttgtcttctgtttcccatttttctattgacaagtcagatgtcagtctcacttcttgaagataatctacatttttttctctgcgcttaagattttttttctcctttggttttcttttagttttactatgatgtatctctgtgtaaatttctttttatttgtcctgcttaggattgtggacatcttgaatgtatggattagattcttccatctagtttgtaaaaatttagccattatctcttcaaatattgtgtatgcctcttta

SEQ ID NO: 88557 - DNA, 1379 bp, Homo sapiens
agtaaatgctctagatcttgtcaagaattattgtcatcattactgagtgcacatatcaaaaattacttaagtatgtcctatttggggacttttaggttgcttccacttcttgtccttttaaaaccttgttatgagtaacaaagtgtaccttttaagatattcttcagaattatttttcataggctattctactctacagttttttaaacttttaaattggcttgtgctccacttgaaggtatttgtaccgcatctacaccttttgtattgttgggagatgttttggattgtcttcctttggatcagtgtgacacaatattcacttttgtggaaaaaaatgttgctacttggaaatcagtaagtgccttagtttcttttcctgctaactttatctttctatagatccagaattctgagggtagatttttttttttaaatttatttgtagtattgctgaatgccaacaagtttctgcctatgaaaaaattatatactgctctctcgggagagccaaataaaaaccatgtgtggagaaaaacttgaaatacaaaatttgatttaatttgtgtaataaaaattaacttgaaaattcacactttcacatgtttaaaacagttacttagtatcatgttttcttatatctgaaaatatttttatttcattgaaaatgttatttgcttaaaaaaagtgaaagtggcatagtagattctcagtgcatgttagtgttctttaatatttcactctggcaacttattattgaagaatgtgtaacaagttctgaagaagagtgataatttccgtcttaatttcagaatacattctattctgctgggaaaaattacttactacgtatgtgcaatggtaagtaattgagtgataaaatgattgctttttaagtgtaaatatgcccagaaaaacacatggttgaattaaataccagtgataacattttaaagatagattaggtatctgcatttttaactaacaatctgatttgttagaactcattattcactttaaactgtttttgttctgggcataagcttaaagtcagaaacgtagtaaagtttgtctttttcatgtcatgttgaacttgttttgttcctaatttatagtacttttttgtggcagtggtttcggcccccaatttaagaactactgctttaggaaaatactcttgacacactggtttagaaacttttaggtgtggttgtaataaacatagaattatcttttctgtgtaacgttcattttcatatattgttagatctcctaagaagattgtctaaatcccagaatacagtcttctgtggacggattcagctctttttggccaggcttttccctctgtctgagaaatcaggtaagcttttatgcat

SEQ ID NO: 88558 - DNA, 2930 bp, Homo sapiens
atacatcctgtagtggcgcaaaaggtctagtccaagaatatttagcttaggagctgggattccattccctcattttcctctggcatcctcctcatcagtaaacttacataaataactgagggctctccaacttcggtagagaagtctaaccatgaaaaatctgaatttgtttaccaataatggggcacctgaatgaaaggaaaagtttcaacagtttattcttggtcaagcaaaggttgggtccccaaaagctagattcccttctattggccatagtacaatgtccctttctctcagacaagtctgattaaaaaatgattctttccttttcttcagacttagtcacttttccattgtgaggcattgggcaagttcttttccttttctgtgcttcagtttcttttgtgagaggggaaataccgttctttcagtgttgttgtgtgtaaaacagcacttaatgaacactcagtaaatgctggttattatgattttatagaacctaagcactgtcttccttctattaaaaccacccctcagacacatgggtgtattagtagttaattctcatagccctgcctttgccctgtgccactggctgagttatggcttcagcacttctgtccttgattagcttatagccttcatcttgctaatataaccattttcttgagaccattggattttgagtgagttgcctgttacttgacatacttctacgactattgattctatatgttactgttaaattttggtaacttcatattagaaaatattgttttctataagaaatattgtattccatatttctgatagtcaatttaatatcagagtacatgtttttactgttaatcgagtttagtctgaactcttgcccctaaattaaattgtttctcctctgttggtagataaatcattcatcatgtgaaaacgttttagctattatttctcttgctattgggggagtaactgaaggtaagtatggttccgttttgttttgtttaaagtaatcttggacatgacatgctttatttaaaacgtcttctccccatacttctccacctatctgattttgtttattcttcaagttctgcctgactcccaactttgccaagaagtcccagttgaattagttcactcttatttctcatctctattatgcagtgcacattttggcacttcctttgttctccagttgttttgttcattcagtaaattttcattgagcatctactatgtgcctggtactgagctaggacctggagattcaatggtgaataaaacatattcccctgcttatgtggagctaatggaagaaacagatgtatgcatgccttactatggtgtaagtactatggtcgaagtgggaatgaagtgtagttagagggaatagagccaacatggctctctaaacttcagtctaaaggagtcaggagaggttttagaaaagaacatgagaactagaatgtgaggtatgaagaatttgttagacatactaagaaaggaatagctagagaattgtgtacagcaggaggaggagaggacaatgagaatgatgaggaaagaagcaggttaggtccatttataaagggcactgggtgccatactaaagagcagctgcaggccgggcgcggtggctcacgcctgtaatcccagcactttgggaggctgagacgggcggatcatgaggtcaggagatcgagaccatcctggctaacacgatgaaaccccgtctctactaaaaataaaaaaattagccgggcgcggtgtcgggcgcctgtagtcccagctactcaggaggccgaggcaggagaatggtgtgaacccgggaggcggagcttgcagtgagctgagctcgagccactgcactccagcctgggcaacagagcaagactccatctcaaaaaaaaagagcagctgcagatgaatgattccatttgaagtgactgctggcaggaaaactgggcaggagcctgttaaaatggctgtgtgtgatagctttagaagacttcgggtaaacaatgcacatagtacacagagcctaacacaaaataggagctcgttaaatatatgcagaaagaagaaataaaaaattagtttatcagcattcttctttaaccaatttggttaaaatactcatttgattaattcaaataatatatgtgaaaactcctttttaatctgtaaagcattattcacattatgtgttattttgatgcttctataaaaactggcacacacctcccagtataggggcaaactattttatgaacttaagttcataaattcactttgttaaatgtttatacaagctgcctaatcattcattcattaggcatagttagctgagtcccacaatgtaatattccttgtctagtttcagtcaaacagtgttcagtgtgtcctgagttcattgattacctttatacattattcttgcacagctggtgatgtttttaatgaagaagttgtacaaagtctagtctatacttggaacttttgagaaggataaggacttaagagcttaaactgtaaaggcatagtgcatttttattttagggataatttttctttttgagacagactataattggttatgtgacatgtttttaaattatccataaatatattttgttaaattcaatttggccgatatttattgagcttctattcagtgtgagatgctactggttaaagcatacaaaaatgcctaaccttaaaaagctcatagtctacattcaaaggtgactagttaggatgtgctaaatgctacagtatatttatgtagagtgtgcttcaaaagcatagatgaagtagcctgcttcaggatatcagagttatttagatgagctgacattcactctatgcttagaaagatggagttgaaatttaccatgtggtaaagaggaggaagagtatgcagaaaacaacat

SEQ ID NO: 88559 - DNA, 1054 bp, Homo sapiens
aatttgacttctcttacaggtattcaggaaggaacacaatgtaccaaatgtaaaaataactgggcactgaagttttctatcatattattatacattttgtgtgccttgctaacaatcacagtagccattttgggatataaaggtaagcatgctttcttttttttcttccaaataacaagtgttccttcattaatttaagcatgagaaaactcatatttgcaaatacgaagtatttcattcatacaactcagatgcaaaataacaacatgataaacttcatctctgtatcttaaacttacagctatgagatctgaaaggggggacatagtaattccttttgactcatttcagcaataatcagcgtcctctctgagagttataaagttttttttcccttgttgcttttttctacctatttctagctactccttcttcctctatttttttttctttcgtcctatctcttggaggctttatggaaaccctggagtcagcacacaggaaaactatattgacagagaataagcaaaacacaagatctccagagatacaacatacttcacccagggatcggccaactaattcccttttttctctgcagcacattcactgtggtcactgttgtttatatagctctataaaaatactgccctgtagaaattaagcacagaggcagcactaccacctcaccctactttataggatgttgggcctaaacatatctggtttagggtaagggcaggatttttgcctgaatcctccagacttgcagacacagtaagttccccatgcacctttcagagaccataggtagaaggtgtcgtgattcagaatcacaaaactacataagcccttttctagaaaacagccagggaaaccttctttaaaagacacgtgaggcaaacacggccatttggtttcagaacagaggcagacgtggagtctgtggatcatcaggtcttccctctgctgtgtggcccacagactgacccaggaaaagaaagactccaagtgaattccctccaactggtcattcctcccacctctctcccag

SEQ ID NO: 88560 - DNA, 1113 bp, Homo sapiens
catggatgttcggtgacaaaaccagaattgtaacccaggtcttttgattttagtgcagttattttttacctttcaaggttcaggcgagttatccagaagagtagtgaattgtaggtaatgatagccatgcccagcaggtaccaagctacagtagcacaagttgaaaaattacaaacactgtaggtagggaaggctttctgcagttaacttagaaaaaagcatccatttgattggcaagaatgctccaaggatgctctttgttcacggagagacaggcacagtctggttcctggatcccatgaatggccccaggtatacactggctagtagagacaatccaaagatttgttctttccaccctttatttaccaaacatgcaaagtatgatgccacgtatgaattgtggatgaggatattctcagcagaatgcgagattattttcacaatcattgtaggaactttaaataatcttacctgttgatattcaatagccagatcttcccaaaagtccttactcattgtaaataataaggataaacttgaactctaggttttaaagattgcctttctgagtgctatacttaagtaaaaataactattgccacctcctgccaacattttcattaaacatctaaaaaataacttggtgtgtggtggagaattggtggatatagactgttttctctggttccccctgaaaataccaagatgggagataaattcagacattgatagctctgctgccacagtgcactaaattataaactagtgtcccaaaagacaggattctcctcccaatcaacaagagtacttataaccagagagccataggtgctcagtatagaaccaaaacaacaacaacaacaaaaacccccaatttatagtcagggaggagattccggacctcagtaccataggtggacctggtaccacaacacatgtgtattcgctgaagaactgagacactttgatgcaattatttgccaaaggtttcaaaaagcaatccacccccaaattgtggagggtaaaatgttctttcctgttctcttctctgtttgcgcacacacagtaccactcaccgcattccagttggcacctgcacacactcctaaa

SEQ ID NO: 88561 - DNA, 1042 bp, Homo sapiens
aaacgagaaacccactgttctagcactagaagaacaagggaggctgtgatagcatcattcccacttccagccccctctggggttagaaaatggatcaaataattggttgctgatcttaaatttcctcagcattcatgtgtgtttacacccacactgaccccagtaccaggttgcctcccaccctcctttctggactcctgtcctctgtcctatggaacgacaaaacagaattgggcacaattttctctatttctgactttactcaattgcttttctggtgttggcctcatcaatggacaagctgctggaagttgactgagtataaaatgctataagggaaacattgtaggaaaaaaagcatcccattattcctgtctccaaaagcaagattggagattggggtcttctctaagacagacgccaccacctgcacccgggacctccagcaaccacctccacaaagcctatgtaaacagtgtaatgtgttttgatattaaccttgtaacaaacatcttaagtttccttcatgttggtgctggaacaggagtgttcaattactcactaattttgtagacatttgttgaacatctattaggcatctggaactgaggatacaaagataaacgtacatggcattgcctgaaaggaatttatgatctagcaaagggcacagacgtgtatatagtctgctggaatatattatgataagtgctacactggtggtgtggatgaaaggccacacgggcacagataggagctatgagttccgccaggatttcacttatctaaaagacaggcaaagggtattccaggcagaggaacatgcgtaggcagacgcagggcaacatgaaagtgcatggcagattcaaggaatgttgcaggtcggtgtgatgggatcatagattcatggtagagagtggcttgtttatatacagtttatgtacagttgttagaggtgggaagaagatttgactccgagctccctagataccaaagaaaaaagggaaatatgaaatttgctgtgcctccgagctccctagat

SEQ ID NO: 88562 - DNA, 1017 bp, Homo sapiens
aagagagcatggtctggatgtattgctaaaagaggccgtcggaaataaaggaatactttggggttaccattgctaaactgcgtattttctacccttaaaggtgccccaagttagatacctgtctggcaaattacgtagtcctaatcataggtgttcttaagggtttatgtcttgactgaaaagggacaaatcacctggcaaggagaccactacctaaccctggtgactcttaccttacagggctggacagacatgacagtgtgaaaggcctttgtactctcagccatgtggcttgctggaccatctgaaggcctactgagactgtcctgggaaggggacagcaatccagtgactcacccagcagtaatttgcctgggttgactggataggcctgtcctgtagattggtatccaaagattaatatgatgggtgagaacttttagctccaatccagctggtgtgacccaaatgcataaaactcactcttggcttctcatcgaggaactaagttggagatattttaaaatgcttgaatggcagtttggagtctatttgaaaacactggcaggaatgtctagataagactaccatcagtggtcaatcactggaatcactgaagtatttcaactgagtgaaggaagtgccactcagcttcagtctgggtggcagagtcctttcaaatgtggcttcagcaccgactttctgtgcattactcatgctgtgaagtaggtgatttaagccactgactttctaaattaaaggcacaaaaaggcagacatgtaattcttttaattacacattcatatttctcttacattcctctgagtcgttcatgtctgcctcctgcctcatcagcctacaagcagaaaacaagcaacagggaatgtggaagatctgtaaagggatgaaaaacccaactcacttgtttgtactgtggcttttctcaaagaaaaataaaagcaccgtgtcgggaaacagacaatgggagatctgacttctactgatcgtagggaatag

SEQ ID NO: 88563 - DNA, 1029 bp, Homo sapiens
aaaaccttgttcttccattgttgctgaggaaggcttgaatctgagctattacactttatgtttcttaataaactccagctggggagaaattaaactggggctaccctactttgcctttttcaagtaaaagaaacgtataggcttcaacatttcaacaattgtctgtcttggtagaatgcttataaatccatatccatgtggtcacatgctcaacctcatgataaaatggcaagcctgatcaaatgcatgtggtgtggggtgacctcacaggccaggtgggagtcctcctccgttatttttaataacagctttatagagatataatttatgtatcataaaattcacccatttaaggtgtaccagttcagtagttttttgcaaatccagaggtgtgcaactaccaccatcaatttagaacattttcatccatccagaaagaacccttgtatccattagcagtcacttttcatttccctccaactccctttcacccttccatcctcagccaccactaagctactttctggttctatggatttgcctgtgctgaacgtttcatatcactggaatcacataatatattgtcttttgtgtctggcttatgtcttcaagtttcatccatgttgtggcatgtagcagtacctcattttttaaaaatccggaataatattccgtgacatggacggaccacattttacttatccattttcatcaattggtaggcatttgggtagtttctactttgtggctattataaataatgctgctgtgaacttttgtgtgggcttgtgtttttaattctcttgggtatatacctaggagcggaattgctgaggcacatgataactctgtgtttaatctttggaggaactgcctgagtgtatcccaaagtggttccaccacttcattattaagtatcctcattcccttcaccaaaaaagggaaaaagaccagcttgaattattttgctgtagtactgggatgatgtgtattaactaaaaagagatagaattggaatgacctaagagt

SEQ ID NO: 88564 - DNA, 1032 bp, Homo sapiens
cgagtataagttcttagtcgtcctttcctctttcctttccgacaggagcaccccaggcaaaaaatgtctcgcgggtcattggcgccaggctttcaggggacagtggggcggggcggggtgggcacaggacgttaggcagccgttggccctccctaaggccacaccgtcctgccgtcctggatcctgcgccagctgcgcgggggaggggactcgaaggtgtgtgagccaggggctgaccttgaccgctcagataaatggagcgcagccttgacacaggggtggaggtggttttgaatggggaaacccattcgtggtgaagcagattcactgtagctagcggaaaagccctccggcccacggacccatctagagacgaatacatagcagctgctgtggctgattggcgtgggacagcgtggggagttttgtctgaggagagggatccacttttctgcagctccaagcccaggggcctttgatgagccatagacctcatttttaacccacctttctgcttagacattgagcaagttacttctcatatagcttccctatatgttaaaaatggagaaaataatgcttagtaggcaattctgataaaagcaggtgcttgcaaaaatctctctgttgtctgaatataaactgtaccacaagcgagtgcggatgaacgaggactgcatttaaagataagtttttacactttcatttctctgtggctcgacacttctgatgcctccctttttgttcctgggacacatgcttggtgttgtcttcacacctttgtgacaggattagcactagtgggcagtggatgatagctcctcccttttgccacatgttcatccctgccctcgccaccatctcactgtgtggaattcctgtgtccactggtcaccggggcacagaagtgctgtctcagcctgaatcgggccactgatgggacttgcagcctgggagctccaccgtgatctctggcccactttgcgggagtctaggctttctggatgctccagggcctcacgtcccagggca

SEQ ID NO: 88565 - DNA, 3938 bp, Homo sapiens
atatcttgaagaaagtcaaacaggtaatattagataaggaaactttcacagaagtaattcaatataaagttatgtagttggtatatttggcaaaaccaagactagaactttcttctgaattcctgttttaaagttctttcagacaggatcttgccaccattcctcagtaacccaagtttggtcattgttaaatgttaatattagaaagtaccagtacctcatagtagcaccctaaattcttattaatcaaatggggttggcttttgaagacattagtattaaaaataagatataagatggaatgaaaaattagacatgttaaaacatagattagcattttctaagctcttcttgatattctcatgtttaaaatttattttgttgctttgttaaaagaattgtttcactaaataatatactttgaatgagttagtggctagggggtttgttatgttttcctagtggtagttaggaccattgttctttaatgttttaatcttgtgtattaggtatggtgaaccgtgaagtattagaacaagtggagcgaggatacaggatgccgtgccctcagggctgtccagaatccctccatgaattgatgaatctgtgttggaagaaggaccctgatgaaagaccaacatttgaatatattcagtccttcttggaagactacttcactgctacagagccacagtaccagccaggagaaaatttataattcaagtagcctattttatatgcacaaatctgccaaaatataaagaacttgtgtagattttctacaggaatcaaaagaagaaaatcttctttactctgcatgtttttaatggtaaactggaatcccagatatggttgcacaaaaccacttttttttccccaagtattaaactctaatgtaccaatgatgaatttatcagcgtatttcagggtccaaacaaaatagagctaagatactgatgacagtgtgggtgacagcatggtaatgaaggacagtgaggctcctgcttatttataaatcatttcctttctttttttccccaaagtcagaattgctcaaagaaaattatttattgttacagataaaacttgagagataaaaagctataccataataaaatctaaaattaaggaatatcatgggaccaaataattccattccagttttttaaagtttcttgcatttattattctcaaaagttttttctaagttaaacagtcagtatgcaatcttaatatatgctttcttttgcatggacatgggccaggtttttcaaaaggaatataaacaggatctcaaacttgattaaatgttagaccacagaagtggaatttgaaagtataatgcagtacattaatattcatgttcatggaactgaaagaataagaactttttcacttcagtccttttctgaagagtttgacttagaataatgaaggtaactagaaagtgagttaatcttgtatgaggttgcattgattttttaaggcaatatataattgaaactactgtccaatcaaaggggaaatgttttgatctttagatagcatgcaaagtaagacccagcattttaaaagccctttttaaaaactagacttcgtactgtgagtattgcttatatgtccttatggggatgggtgccacaaatagaaaatatgaccagatcagggacttgaatgcacttttgctcatggtgaatatagatgaacagagaggaaaatgtatttaaaagaaatacgagaaaagaaagtgaaagttttacaagttagagggatggaaggtaatgtttaatgttgatgtcatggagtgacagaatggctttgctggcactcagagctcctcacttagctatattctgagactttgaagagttataaagtataactataaaactaatttttcttacacactaaatgggtatttgttcaaaataatgaagttatggcttcacattcattgcagtgggatatggtttttatgtaaaacatttttagaactccagttttcaaatcatgtttgaatctacattcacttttttttgttttcttttttgagacggagtctcgctctgtcgcccaggctggagtgcagtggcgcgatctcggctcactgcaagctctgcctcccaggttcacaccattctcctgcctcagcctcccgagtagctgggactacaggtgcccaccaccacgcctggctagttttttgtatttttagtagagacgcagtttcaccgtgttagccaggatagtctcgatctcctgaccttgtgatctgcccgcctcggcctcccaaagtgctgggattacaggcgtgagccaccgcgcccagcctacattcacttctaaagtctatgtaatggtggtcattttttcccttttagaatacattaaatggttgatttggggaggaaaacttattctgaatattaacggtggtgaaaaggggacagtttttaccctaaagtgcaaaagtgaaacatacaaaataagactaatttttaagagtaactcagtaatttcaaaatacagatttgaatagcagcattagtggtttgagtgtctagcaaaggaaaaattgatgaataaaatgaaggtctggtgtatatgttttaaaatactctcatatagtcacactttaaattaagccttatattaggcccctctattttcaggatataattcttaactatcattatttacctgattttaatcatcagattcgaaattctgtgccatggcatatatgttcaaattcaaaccatttttaaaatgtgaagatggacttcatgcaagttggcagtggttctggtactaaaaattgtggttgttttttctgtttacgtaacctgcttagtattgacactctctaccaagagggtcttcctaagaagagtgctgtcattatttcctcttatcaacaacttgtgacatgagattttttaagggctttatgtgaactatgatattgtaatttttctaagcatattcaaaagggtgacaaaattacgtttatgtactaaatctaatcaggaaagtaaggcaggaaaagttgatggtattcattaggttttaactgaatggagcagttccttatataataacaattgtatagtagggataaaacactaacttaatgtgtattcattttaaattgttctgtatttttaaattgccaagaaaaacaactttgtaaatttggagatattttccaacagcttttcgtcttcagtgtcttaatgtggaagttaacccttaccaaaaaaggaagttggcaaaaacagccttctagcacacttttttaaatgaataatggtagcctaaacttaatatttttataaagtattgtaatattgttttgtggataattgaaataaaaagttctcattgaatgcacctattaatcgttttagttgctattcatattctcattcgttttttaaaaactgatatattctgaatttattcttccattgagaaaaaaatgttcagttacttgtaactactgagcagaatttaatcaatcctttattaaattcagaacattattgaactcattctttgtggtcaattttcttttttttttgttttgttttgttttttttttgagacggagtctcgctctgtcgcccaggctggagtgcagtggcgcgatcttggctcactgcaagctccgcctcccggggtcacgccattctcctgcctcggccacccgagtagctgggactacaggcgcctgctaccacgcccggctaattttttgtattttttagtagagacggggtttcaccatgttagccaggatggtctcgatctcctgacctcgtgatccgtccgcttcggcctcccaaagtgctgggattacaggcgtgagccaccgcgcccggcctgtggtcaattttctatgtcaagtgagtgacattatttttacaagtattttc

SEQ ID NO: 88566 - DNA, 1057 bp, Homo sapiens
gcccaggctggagtgcagtggcacgatctcagctcactgcagcctccacctcccagcttcacgccattctcctgcctcagcctcccgagtagctaggactataggcacccgccaccacgcccagctaattttttgtatttttagtagagacggggtttcaccgtgttaaccaggatggtctcgatctcctgaccttgtgatctgcccgcctcggcctcccagaatgctgggattacaggcgtgagccaccgtgcctggcctcaaaattaagagatttatatagtttctagggggaaggagaaattttagctcacttgaaattcagcgatcagtattactttagtttgttacttctaaactcttgtactgaagtatcctaatgttgagagtgaaagcatataaaatttaatctttaggaaaaactgttttgctaatcttatgggttttgcatgttatctaacatattcctcttccctacagttccctccagctgtagatctaatgccatcaaattttatcacccactttgtctggttgctgttattcactgataccattcaagttattctcatttaatgactcaccattgtcctctccaacaaaactcctctcctgtcttaactcattgtcatcttaatacacatggtgatgattcttctattaccctggtctcttgtagcttgaactcttctcctgtgtaatcttgtctttcactctaccttagccagtctttccatcttcataccttaaaccttaatgttaccaataactgcaaccctttcaaaatctatttcatgcatctactttctgaccaccacttgccatctttccagataactccctccaccccaaccctagcaatttcttgatgctaccaggatctttactccactgtttctgccaccttttcctgcttctcacccccttcatgaaacaattctactccttaaattccctagtgaagcagtataatcactcctttgctgatttcacccttctctgatttcatcatcattgcttagcaaaatcaccacattaaataaatccaactctgcct

SEQ ID NO: 88567 - DNA, 1115 bp, Homo sapiens
aaagatatacagtaagtatttgagttaattaacatggacttttaaaagtagtacaataaaattttccagaatgatataaaaagtaggaaaacccataaacattataactcaatagaatattcactcatcaaccaatagttaactacagctattaggtgccagactgtacttaaaagttacacatattataacatgtatctttggcttactagagcttcaacctctattttcttaaattgttttctgttcccacagccaacttattttttatatcatcagctgtctaatcaggaagaaatgtgatttatttcaatatgaattttaaaaattaaagaatttttatcccatgtatcttgtacatttaaagaattgacactgatgactacagtagagatattgacagaacattagccctgcatatgctatgtttacacaaatagatttttaaaaaacaattaagcaagatggtcaacattattttaggtgcaaaatttccaatcaaatggacagctcctgaagctgcactgtatggtcggtttacaataaagtctgatgtctggtcatttggaattctgcaaacagaactagtaacaaagggccgagtgccatatccaggtaagcttgcattttatagctcttggttatctcatgagtggctttatcaggagtttattaggaacagaattgtaagcggggaaaaggcctttatttcttctcatagtccccctgcctctccctctccccactccttccctttactgtggcattggatgggtaactgtggcattggacgggtaagtcagtgaaagccacgatccttgacagggtgagcacatgagataggccccacattcacctcagctttctcaggacattttccaaaggggcctcttactgttctctcagataataaacatatcttaaatatcctggctcatccaccctataccctaaataactgttctttcccagtagtgtgattggtgttttgttttttttttttttttttttttaaacacagtcttgctctgtcacccaggctggagtgcagtggtacagtctggctcactgcaacctgtctcccgggttcaagcaattctcctgcctcagcctcc

SEQ ID NO: 88568 - DNA, 1111 bp, Homo sapiens
tttcccaggctggagtgcagtggcacaatcttggctcactgcaacctttgcctcctgggttcaagtgattttcctgcctcagcctcccaagtagctgggactacaggtatgtgccaccacacccagctaatgtttgtatttttaatagagacagggtttcaccgtgttggccaggctgatctcgaactcatgacctcaaatgatccacctgcctcggcctcccaaattaatgggattataggtgtgggccaccgcacccagccagtgttagatttttgaaatctgaatttagcctgcatttttattatgttttctggttttcctgttatcttctagactataccctgttaccatcatctccttctaaaataatatgattttcagtgacacaatttgatattaaccataattgtcttctctctgcttccctttgtatcgtatgtcttgtgttttttgtttttctctttccaagattgctgatggtatggcatatattgaaagaatgaactatattcaccgagatcttcgggctgctaatattcttgtaggagaaaatcttgtgtgcaaaatagcagactttggtttagcaaggttaattgaagacaatgaatacacagcaagacaaggtaaaattacttttacataaaagcttgtaatgtgttgtgtgttttgcttaactctcttgactatacagggttttccagaataagaattgttttagcttccctcagaagagtcatagagacattgatttcattcataaaatcatgtactgctgtggctttctgatagttatttcctccaagaaagaacttgactaggtatcctttgcattatacatagagcaagtagtagcctctttacacttcttttgacatgacaacaaatatattttaatttctttcctagaaaggccagaggttctcagtcagaggagatattgccctgtaccgccactcaccaggggacatctgacaatgtctacagacttttttggtggttacaacctgggggctactgcttgacatctagtgggtagaggccaggtatactgctgaacctcctacagtgtacagaaatgtgcaggcaaacccccccttccccccacaac

SEQ ID NO: 88569 - DNA, 2180 bp, Homo sapiens
catatttgctgtaggaaaatttttcccctcaaaaggggactgaaaccaaaagttaagaaattatacagcctattaattgatagccagaacacacctaaagacccaaagcacctggcgctctttggaaggaatgtctactgcaaacagttgccaaatatgacatttttttgtttgtttgcttgtttgtttgttgtttttgtttttttgtgaggtggggcctcactctatcccccagggtggagtgcagtcacatttctctgcagcttggacctccctgggctcaagcgatcctctcatctcagcctcctgagtagctgggattacaggtgcatgccaccacacatagataatttgtgtatttttctacagatgggatttcaccctgtttcccaggctagtttggaactcctgggatcaagcaatcagcctgccttggcctcccaaagtgctgggattacaggtgtgagccaccacacccagcccaaatatgccctttcaaagagtatattagatgaaccagaggggaagggagggccaggcatggtggctgacctgagcaacatggtgaaaccccatctctacaaaaactaaaaaaattagcaggacgtggttgcacacacatgtattccctactcaggaggctgaggcatgaggattgcttgagcccaggaggttaaggccatagtgagctgtgattgtgccactgcactcccatctggggtgaaaaaatgagactgtctcaaaaaagaaaaaaaaaaaaaggagaaaaggacagggaagatgtttaaatcaagatattggaagcaggccaggcacagtggttcatgcctccaatcccagcgctttgggaggccgaggcaggcagatcacttgaggtcaggagttcgatcccagcctggccaacatagcgaaaccccgtctctgctaaaaatacaaaaaacagctgggcgtggtggcttgtgcctgtagttccagctgctcgggaggctgaggcacgagaatggcttgagctagggaggcagaggttgcagtgagccaagatgacaccgctgcactccagcctgggtgactgagtgagactccgtttcaaataaataaagactttaacaattaaaaaagatattggaacataagaaatataatgaaggtaaggctaatagcccatttagctctgtatattaattttaagaattatttaattgggagaacatggtaaaattctgtgttgtcagaccactgggtacaattatttccaggcgggagagatttagaatacaagataacaaaagtcctttctatttttaaaactctttaattcctcattttggtattcacttagcacttgtccctttataatctgtccaaactcattgtcccatgcactccagcataaacccactgttctgctctttgttttcatgattttttcatgttttctctttgacctggaatttggtctccctagctctggaccagtccaccaactacacttccccgatccagtttatggtcaggcattccatttagttgtcatttctatttagtctcctttaatctagagccattcctcaaccttcctctgtcttccatagcattgttacttctgaagagaatagaccacttttatgttttaaatgtgccttaatttggttttgtgtgatgttttctcttgattataagccttaacaaataatagtgaagccgtaatcagacttctagcctttttctttgctgttattcatagtactttgtagttttcagagagagagcttggtcacagcagtagttccacagcgactcatttagctacctatatttagttttaaccacacccaagatattcctagttgtctgaattcttgattcagatttacttaaaaatatgtaagtatttaatactactttttgaatcagaattgggatattgatcaaagcgaggaaaaaatgcctcttgtcaggtaaagttaatgcattttctttttttgcatgtgttatcagaagttttcaaaatttcagcttagagacctcttctaggacctagataattatttggaaactgcaaaactgcacaaaatttaaaaaaaatgaaaagctaagaagttttgtgttgtgatttggggtggaggagtattcatttcaatcctaatataagatttgcttattttttatgaatatcttgc

SEQ ID NO: 88570 - DNA, 1795 bp, Homo sapiens
aggctagagtgcagtggcgcaattttggctcactgcaacctctgcctcctgggttcatgcgatccatctgcctcagcttccttagtagctgagactacaggcatgcaccaccatgcccggctaacttttgtatttttagtagagacagtgtttcactgtattggccaggctagtctcgaactcctgacctcgtgattcatctgcctcaacctcccaaagtgctgggattacagacgtgagacaccttgcccggccttaaaaataaattttacaaaatgtttcacttatgtatatttcatgttttgctgcttatggacaactccctttttgttttgtgcttttagagtaaaactcgaaaggacttctgtttttgtttttctacagtttaaacttaaaacattgatacactatatgccccttaatttttgtaattgatattacagtatagtttattcatttatctagaacatgctgatggtttatgccacaagttgacaactgtgtgtccaactgtgaaacctcagactcaaggtctagcaaaagatgcttgggaaatccctcgagaatctttgcgactagaggttaaactaggacaaggatgtttcggcgaagtgtggatgggtaagaagcctgaatttttgttttctgtcattgtttagctgtggattaaagtgcaacaatttatgataaaatatgtttcaatatttaagagaagtgctgttcactgaagtttggtctaaaatcctttaaaatataaattcctaaaatgtgttatttctttaggaacatggaatggaaccacgaaagtagcaatcaaaacactaaaaccaggtacaatgatgccagaagctttccttcaagaagctcagataatgaaaaaattaagacatgataaacttgttccactatatgctgttgtttctgaagaaccaatttacattgtcactgaatttatgtcaaaaggtatgtattagtatctccttaggtatttgtgttgataatgtttttaagagtcttgatttgtatgcatatagacttatactgttttctaatttaagatttttatgtagacatatttggatagaagaaacctgacactttgtttaatggaatagtgattatccagttattccagaggatagtatgacgtttaaaaggaaaagtaggcaggctgaattaattttgaaattaagtttgactaaaacaaatggaaaagctagaaaggtgaaaaatagaaagtgtttgtacacatttaattaaaatgataaaatcagaaagatacttacatttttagtactaaagcaaagaaataaggtaaagttaaaatgaattagttttctcattttaatataaacataattcctatattcaggacttctaggaacttttttccccactgctttctttttttttttttttttaaatagagactggggtctcaactatgttgcccaggctggtcttgaactcctggcctcaggcagtcctccctttttggcctcccaaagtgctggtattaccagcatgagccactgtgcctggcctccccactaccttcaatggaagtttcttcattttccttaactctagaccacaagatgggatcttcagtaacagggttagttagggggaggataaagagaagattgatactctttcctctttttccctgtgcagatggtacttagaggaactagtaagtcagcagataagctgacaggcctgatttttatgtgtttgatttcatctgctttattattatttttactcttgaaccaataatatacagtagtca

SEQ ID NO: 88571 - DNA, 2398 bp, Homo sapiens
agcacttgcattgtagttatgtaggaaagtatccttctcttttagcaagtacacactgaagtatttgaggcactaattcagcatgtttgcaacttacaattagttaagaaaaaatacatgtgtatatatatacatgcacacacatacatatgtagagagggagagagtatgacaaagcaaaatgttagccattggggaacctagttgtagggtttattgtagggtgtatgggagttctgtgtcctatttttgcaacttttaaaaagtaaaaattcaccttcagtgacacactacttttaggttaaaccagtttatctgggattcataaacgctactttattttcatgttataacacttaacaccgtaccttgtatatgataggtgctctatcaatgtttgtttgcttttattaatgatttgtaatgtgtctcaataactctttgttctactatggtgcttcttactttttgttttgtccttttgtctttcttctcattttctgtgagctcttccatagcagacactgtcattttattcacaaaaccttattaaattaaacccacacatatttagagttactaataatttgggtatgatatgcctgtgtcttactgaatgcagatgatgatgctgttaccagggaaccacttctattcttcctgtcatagtcttaatatttccatttgtcactgacagaaagggtctgttattttgctgcctttccctctctactgttcctgtgactgtcaggtggagttttgagagacacattgagtagttaatatatagaaatactgtaagagtatattctaacagtaatatttgtgatattactatttaatcaataaaactcttacattttcctgtattttgagccatgttctctagctattctttgtcgtccaaacctatcccagtccattcttactgacacttctgtataatttttctgaacctcatacttttcaattcaaaacacttaatttttttccagatggtattttggcaaaatggggagaaaagatgctgaaagattacttttgaatcctggaaatcaacgaggtattttcttagtaagagagagtgaaacaactaaaggtatgaatattgttatattagtataagtataaaatttcttggggcagtattttgagaaagatatagtgaaagtatttatttttcacccaggtgcttattccctttctattcgtgattgggatgagataaggggtgacaatgtgaaacactacaaaattaggaaacttgacaatggtggatactatatcacaaccagagcacaatttgatactctgcagaaattggtgaaacactacacaggtatgtgaatatttcaaaggtaaaaattatttcttcatattctagtttatgaggacaaaatccatatcctcatttctcttaagatttaacacacttatttacacataatacatgcccaataaatgtctgttgtattctaaagggaggaacaggtaatacttagtacttgcattgtgctactcagataatgtgctaatagactctcatcatttgggtccttatatcttactggcatagtatttacattggagttcatttcaccacatgtaccttatgaaaataaacctaaaagcaaatatttatgggcacttagtaagtaaaactaaacattgggtaacagaaaaagctatgtcagaaggattaccttcctctgcatgggctggatcgcataagctttcctaaagtataaatccagtgaaatttggtctgacgatgcatttttcttatcctagaaaattaacctatagcaattatagacatttttgtctttcaaggacctctgaaggtatttaatattagaatcttctgtctcaaaatttttcattaccaatttggcatatgaatgcacctgaaagtctttacatgattaatactaggagaggggatgtttccatggtaatgtcttcaatgacagctagctgcaaactgagtctatcaagtcagccagcaatcttgacattgatcaagcatgttaccaagcagtggcatcacttgtaattgcctttgtcacaatgtgaatttatgtggttattttagtgagaataggagagaacatgtctcatttataataagaaagattgtataagcagaattcataagtcaagctgttatgaatctagggttccctgactttgtgtctcccttatttaaaaaaatcagtctcctgttaggcatgtggattgtgcctttaatcccaactactgatgcaggaggatcacttgaggccaggagttcaagaacagcctgggcaacatagcaagacctcatctcttaaaaaaaaaaaaaaaaaaaaaaaaaaggccaggcgtggtggctcactcctgtaatcccaccactttg

SEQ ID NO: 88572 - DNA, 1042 bp, Homo sapiens
tattcactatcgtctgtcttaggttgaaagaattgtgttaaaaaaagaaatcttataactaagtgtgtaggattttgaggctttatttggagcagaagtatgcaattgtgcttcctttaattcatgtaacctattttttaatatcattctttgagtttaattcttcatccaatgaatgcataaataaaaaatgaaagtaataccctttgtttacttcagatacaagatagcactgcaatatattgtaccttgggcaatagtctaccttgcggtgattgctgttttatgtgttgcagggaaggagattggtgggaagcaagatcaatcgctacaggaaagaatggttatatcccgagcaattatgtagcgcctgcagattccattcaggcagaagagtatggcactacttcatattttattaattattttgatttttgaaatgttttaatgcacattctacttagccacaactttacacacacagaattatataccagtcttaatacagcttatgtatcatattaatagatgttacttaaaaattaataactaatgtcatactattcacttagagtaggatcataaacgaatctgcatcagtcatatttccttatgcctagtctctctcttttatgttttcacttaaatatgtatctataagccttttgcatatttttcagactgtctcacttcaaaaatttgccttctgattatcctcattccctgccttgacttattttttaacttacagcttatatatgagggtgtgttgatagggatgggtatattggtatatatatgcatcccatatttatgatgccaagacttacattcttcttttttttgagacagggtcttggctctgtcgcccaggctagagtgcagtggcgtgatctcggctcactgcaacctctacctcccaggctcaagcaattctcctgcctcagcctcccaagtagctgggactacaggcatgcaccaccacgcccagctaatttttgtatttttagtagagacggggtttcgcctattggccaggctg

SEQ ID NO: 88573 - DNA, 1733 bp, Homo sapiens
gtgtggcggcacatgcctgtaatcccagctacttgggaagctgaggcatgagaatcacttgaacctaggaggcagaggttacagcaagccaaaatcacaccactgcactccagcctgggtgacagagtgagactttgtctcaaaaagaaacaaaattaaatttgtttctccaagtctacagagttttataatttgtagaatacagtagttttatggaaggtcttcggagagtttaagactagttattgctaccagttattgagttattgtcccagaacataaaatatggtcatgtctctctactttaaaattcttcagtagttccaacttctaaaaatagtttctggagactacagaaaaaactatccttaagcttttttttttttggctggcaatagttctttttttctgttttgttaagttagctacataatttaccttggtcttttttccctctgataggtggtgttactatatttgtggccttatatgattatgaagctagaactacagaagacctttcatttaagaagggtgaaagatttcaaataattaacaatacgtaagtgtcatgaatattttgtgagagaaatactgacagaaatctggtctttacacaggaaccactgagctggttgatgatccagagatgagagaggtagggcatgggctgcccactgtgtttaacgatgcattggcttctatagatgcatgttgcaacactgctgctgtagccagaagttattacttctacaatttgtgctgctgtggttctgccataaacagtagagatttaagaatgaagagttactgaggggagtacatgcaagtgtattatttttttaaaaaactttataaagagagtttgatgctcctatttttctaagtaccagatggtgtaaagatcttgtctcattctattaaaaaaaaaggagggggagaaagttgggtaaggaacccatctactttccaattgatgaaattaagttgtgtttttccttttgtgacagactttttgtctagaggtacactgtagaaaatttgatgctcgttgtagaaagtagatcgaataatttcattagcaagcataatgaccactttgtaacttctcaaaatatatatttatggtctgcttccagtcgtattttcttccatccatgttcccatctgctaccagttattgttccggaacataaaatatggtcatatccttctacttttaaaatattcagtacctaccacttgccatcaagataaaaggaaaacgacaatgataacaacaatcattcattgagaatttactatgtgcttctcccctcttctaactctaatacccagacatactgaattacttgcaattttctgagtacgctggagtttcttatactctcatgctttcacacatactgtttcttttttctggaatgtgatttctcatctttccatttctttcctttatttagctaatcctactcacccttcaaaatatagttaatatgtcctttctcaagatgcctttccttaacattcttcctcccctgcctggcccagtccttatcccctgctggattaagtatctctcttaggtgtttacatagcaccctatgcaaacctcaatcatagctgtcatcacattttgaattacaatttgtcacttgcttgttattcttttagaccaatggttctcaacctgggacagaatcacccaggggatatttggcagtatctggaga

SEQ ID NO: 88574 - DNA, 1059 bp, Homo sapiens
ggcaacagagcaagactccgtctcaaaaaagaaaaaatttttttttgatctgacaagtcagtgggattatgttgagtagagtatatacatattcaaattaaaaatatgttggctaaaggatacaaaatttagataggaggagtaagttcaagagatctattgtagaacacagttaataacaatatattgtattcttgaaaattactaacaaaattttaagtgttctcaccacaaaaatgatatgtgatgcaatgcatacgttaattagctctacttagccattccacaatgtatatatatttcaaagcatcatgttgtatgcaataaatatatacagttttttaaaagaatattaatatattatggagtttttaacctgaatacctgccttgaataattttaacactgagatgtcatgcatattgtatacatctgttttattatttgttttgtttgcaaataatagtttggctgttcagtatgctaatctctttaagcatctgcacataatgctaaatatgacagtttttgaatttatactttataattcatatcatccataccattttattttatttatttttttgatacagagtcttgctgtgtcacccaggctacagtgcagtggcataatctcggctcatggcaacctccacttccgggtttcaagcgattctcctgtctcaacctcccaagtagctgagattacaggcatgcgccaccatgcctggctaatttttgtatttttagtacagacagggtttcgccctgttgaccaggctggtctcgaactcctggcctcaagtgatttgcccacctcggcctcccaaagtgctgagattacagacgtgaaccactgtgaccgtctgataccatttaagacaaaacatgacatttttatctttaagtgttaaatatgtaataattttgctaaaactagtaaattagttattactggtaatgattagatgcaattgttcattcattatttatatgaagaacactgccccactagtttgtagtagtcatcaatcctttttctgtcaaataattgatttg

SEQ ID NO: 88575 - DNA, 2696 bp, Homo sapiens
aaaattggtagtaacctgatggtgattatgtactggatcatgtcattaattattttattaactcattattcaaatagttattgagcccccccccactgtaggcaccgggaacataaagattaaaaacatatacctttccctcaagaatttgacaacttctcaggattgtaaagtactttgcagtattaaagtcttatagtggttacttaatagatgttaattaaatgacagtagagtagcgataatacagaatttctcccagatgctgctgatttaaaaaagaaaaatcctaaagctcagacagtttaaaattttcccccaagtcacagatagtaagtaggagagctcagatttattgtcctattccagaactccaattattacattattatatccttttagagaatagcaagaagtgattgttgacaacctttcgtggagacagaaggctcttaaaaaaatagattcaaacaattttaaaagagagaaaatgagctcttttgtaaagggtcccgtatcaggatgctttttcactgaagtaacaaagtatagctggcttaaaaaggtagagtgagtttcaggattccttgatagagcagttccatggtgtcatcaaggactcagatttctttatctctattctgcagcccttgggagtgtctgctttatccttaggcttggcaaaacagctgccagcatcaaatcaagcaatatatgtcctcattaacagccagtgggtgcaaaagataaatccccactacaagcatagactgactatacatttgtctcttcagtctgttccaactggaccaaaaacaatagccaggccaggcgcagtggctcacacctgtaatcctagcattttgggaggctgaggcaggcagattgcctgagctcaggagtttgagaccagcctgggcaacatggcaaaacactgtctcaactaaaaatacaaaaaaaattagccaggtgtggtgttgcgcacctgtagtcccagctactcgggaggctgaggcacgagtagtgcttgaacccaggaggcagagattgcagtgagccaagattgcgccactgcattccagcctaggtgacagagcgagactctgtctccaaaaaaaaaaaaaaggcaatggccagaggactgccatacactgattctgttagacttcatttagggagttatgcatgttaagtcaattacagtcttaattccagccccctaattctgaatacttcagtagtagatggccatgagggcatttctaagtctttagcaaaagtttacttttagagttatgtttgggaaagatagtaatctaaaatggttgaatattgatacttaaagacacactttagttacctaaagcaatttacttatatgaaatattctattaggggtattcatttattaactcagtgtacactcagtgtctgtgtatcaggtatggagaggtgagcaagacaaagtttctgttctgatggagcttacattatagagggttggacaataattaatgaataaacagctaaacaggatggatgattaatgatccttaaatgctatgaaggaactaactagaatgatggtgaaggccctgcagttaatcagggaaagctatctcaagaagaaatcatttgagctgagattttttttttttttttttggagttggagtctctctctgtcacccaggctggagtgcagtggcgcagtcttggctcactgcaaccttctgcctcccaggttcaagccattctcttgccttagcctcccgagtagctgagataacaagaaacaaacaccacggcacccggctaattttttttgtactttagtagagacggggtttcaccacgttggccaggctggtcttaaactcctgatttaggggatgtgcctgccttggcctcccaaagtgctgggattacatgcgtgagccaccgcacccagccttgagctgatatttgataagtgagaatgacccacctatgtgcaatcctgggaaagagctttctagagagaggaaataacaaatgcaacatttaggagatacagagagacttggaagttttgagtattagtgtggagactagtataaacagaggggagaattgtattatatgggattgaagagttaggagaccacgattactcaggaccccacagactctggtagcgagtttaggttttattcaaagctaggaagaaactgctgaagagattaagtaaaggatttgattgaattttcttttgagaaaaactgactctgacatctgtgtggggaatggatggtagagaagcagtatagaagcagatgagactggcactctcagtagtccacccagtccctgtgagaaatgacaaggacttgggttagggtagcagcagtggaaatggaaagtaaatagtattttagaggtaaaactgatagcactagtaatggactcggcttgagtacctgattagatggtagggccatttacttagataggaaagacttgggtatgtaaatataggttagaggagaaaaatcaagagctttgttttgtaataaattttaaatgcttattagacattcaagtaaagatgtcagccgggcagggtggctcacacctttaattctagcactttgggaggccgactcaggtagatcacttgaggtcaggagtttgagaccagcctggccaacatggtga

SEQ ID NO: 88576 - DNA, 1332 bp, Homo sapiens
gctcttgttgcccaggctggagtgcaatgacgcaatctcggctcaccgcagcctctgcctcctgggttcaagcgattctcctgcctcagcctcctgagtagctgagattacaggcatgggccaccacgcccagctaattttgtatttttagtagagacagggtttctccacattggtcaggctggtctcaaactcccaatctcaggtgatccgcccaccctggcctcccaaagtgctgggattacaggcatgcaccaccacgcccagctaattttgtatttttagtagagacagggtttctccacattggtcaggctggtctcaaactcccgacctcaggtgatcctcccatcttggcctcccaaagttctgggattacaggcatgagccacgatgcccagccatgatgttaacgtttctaagacaacccataaaaatcagtttaactcatattgcacctgaaatttacttaaaaatgtgaatcacgtatgacattagtaatatttcaaaatgagatgagcagcaatgatgggtcctatgcattgatactggggtgctggtggaattggactgaaattaatgggctatcctagagttattggaaagataagtgcgtagatgtgtgaggcattaggctcaatactctggattaagaaaatgaggctggaggacaggttaagcatagtaatggaagacttgatagggtgaggagaaaaggtgtgacttttgagggaagaggactttaagatggttatgggtaaaggaggtgaggatgaggaattaagctgggaatggaaactgaggtagttgggcaattataggagcctctgttgtgaattgacatggtatttccgagttggcctcctatcagaatttaaattacagtattactgggtttcccccataatttttcctccttcatacaactgctgttctttcaaagtataatttatgtaataattaatgctgttttcttgatatttagactttggatgcaggtaattttgtaaattccttgtaccgacttttaagatttttacagttaaactttttttttttttttttaaacggcaaagaacagtgcttggccctgacagaaagtggggtggggaacagtagacctttccccctcccagtttttacatattttgtggatatatattgattgttacaattttgccttcaggcttaagtatattgagtcaaaatcttccagtctggtaaccacaaaaggtatcttcttataatgtgcatttcttggaagactgggaaggttggatgcattttcatatgttaattggcctttcctgtgttgtgaattgtctcttgata

SEQ ID NO: 88577 - DNA, 1094 bp, Homo sapiens
aggctgctctcaaatttctaggctcaagcaatctttccacctcagcttcccaaaatgctgagattacagacatgagccgccacacctggctgcttttgccttttctcacatgggtcagttggaatagttttataacttgtctaactgctgtcattttttcttctttctaggctgtataattcatccttttgtcatagttattataaaacacatatcttctgctattcctcaaaacaaaaattctggattcctaatgctccctggagaaagtctaaaagttattgcataacaaataatcttctatattaaatctcctctagctgcctgtcctacccagctcacaaacagcccctcacactcttggaacagagaaattttctgttcctaaaatgaaccatgctgtttcaagcatctgagccattctgtacacttttcattcttcctggaatatccttttctttcccccaagtctccaactcttcaagaccaagctcagataccacttcctttgcaaaactttttttcctaagtgctttaagcagagctgataacatttgttgtatttccatggtattttgtacatacctccactctaacattttgtcacactctagcatttttcacattgtacagtgttgtatttgtttcatacatttgtgaccttttaatgaaaagggaccatttattgtcctcccagctccttttacagtgtctaatatacaatatttttagtttttggttttattttgatagcttttgaggtacaagtggtgttcggttaaatggatgaattatgtagtggtgaattctgaggttttggtgcacccgtcaccggagtagtgtacgttgtacccagtatatagttttttttaatcccataatgtatgttattaatgaatatataagtcagtagcttggaacttggaagagacttttccatataaatgttttatttttttattttgggggatttttcttgtttggtttattgtttgttttttctttccatcttttattttagattcaaggggtgcacgtgcaggtttgttacatgggtaaattgtgtgttgtggggtttggcctacagataaatt

SEQ ID NO: 88578 - DNA, 1093 bp, Homo sapiens
aaataaatcatgtaaccttgttatatgtgtgtttctgttcaaagatgccgtatatatattaaaatgtaaatggaatgaagtccttcagaacatgcaggtatatttgactttatggtagagatatggtccttggagcttgaccatataaaaacttgatgtgcagcaaatcctattttcccatacgttcttattcaggtggctcttagtttcctatttccaagtggaaacaatagcagttgctaaataatgcagaaattgatattatcaattgttattgccaccctgaactgatatggtattaattttggcaagcaggtgaattcataaatatggaattcaaaataatgaggagcaactctgtgtgtgtgtgtgtgtgtgtgtgtgtgtgtgtgtgtgtgtatggacttattaatgatgatgtttatagtaatgaatgttgcaaagtgccttctaggctaaccacaacaatagacaaagattctattttaggtttccttagctctcttgccagtgtccctcaaacttgacactcttatgtgaagctccccttcctcctactctagggaggaagaaaaaagggaaaaagtctccatgtttgatattgtgacaaagaaggaagtcaacccccacccccaccccatcttctatcttttgagtcctggtgatttgagtaattcctgtgtggagaccagcttcctgccaaattctcatttagaggttatttgaagaacaattgcatcttagggtttcttagtttattttgtgttgctataacagtaccacagatttggtaatttataaagaagagaaatttacttctcacagttctggaggctgggaggtccaataccaaagtgctgacatctggcaagggccttcttcttgctgtgttatctcatggtggaaggcaagaggctgagagagggttagagtgagggagagagagaaactcactttaaaaagacagtgtcactcttttgcccaggctggagtgcagtggcacaatcctggctcactgcagccttgaactcctggcctcaagtgttcctccctacttcagcctcccaagtagctgggactactggtgctcaac

SEQ ID NO: 88579 - DNA, 1046 bp, Homo sapiens
gagtaccacttaaaggctattatgttcttcagagtacaagacatcaggaggcacgctgtgttagtctatcctactattggcagtattaactttgattacttagttaagtgatatctgtcaggtttcatcaccacaaaatgaacatatttctctttttagtaaattacagataaggtaatagtttttgcttccattgatgattccttggctgaattaattattgcagtaagagttgttctgggatacgtgtgctgaatgtgtagctctcttactccaagtttagtagttgggattctgtaagagagaaccttcctgtccttatttatttatcagagtgacttatggattatcttagtcaactagttgtaatctgttagtgtcaccatttttttttcttgatgctcagattctgtgtttggtcagcaagagcctcttcaaactagttcctatgtacttttgatagatccctatcatttgttgagtactactttataactatttttggtatattacaaaactacttatttctcaatatatttttgtagctgctctatagaaatctgtgtctgatagcttttcagttaattctcttactttttttgtataagggatcatgcaggtcagacacagtggctcacacctgtaatcccagtgctttgggagactgaggtgggaagatcacttgagcctaggagtttgagaccagcctgagcaatttagtgagaccccatctctgcaaaaaattaaaaaattagttgggtgtagtggcagatgcctgtagccctagctactcaggaggctgagatgggaggattgcttcagaccaggagttcgaagctgtagtgagcgatgatcatgccactgcactgtagcctgggtgacagagtgaaacctcatttcaggtaataattataatggccaggcgcggtggctcacgcctgtaatcccagcactttgggaggccgaggtgggtggatcacgaggtctggagtttgagaccatcctggccaacatggtgaaaccctgtctctactaaaaatacaaaa

SEQ ID NO: 88580 - DNA, 1006 bp, Homo sapiens
tctgatacttccagggccctaccagtaagagagaaatcatggagacaggtagatatcttagaagaatgattagatgatgtcttaaaaggtgaacgttaataaatgcagacactgaaagttgcctttgattcctgacaaaatttttaaagtttgttaaaaagatgtttatcatttttaagcaatttgaagattataaagaagtaatttttaacagttgtttagaagtgctttattgaactaccttgtctcgagtttgagtaaatgctgcatataggtcattgtcagtggtactttcttgtgttagtgagtggtcagacctgataagcttagttttcttctaacagtaaggttcagtgattgcttttctacctgtgtttttttttggttttgtttttcctctttccataataaagtgttctaatggcatgataggtgttgctttttcttttggtgataaacagagccagggatgttagcaggtttaaagctctttctatattttcccagtttttttagggggattgatagaacattgttttatttttgttatatatatgaataaagatatcttaaaattattttaatttgctttttcaattgaaggctactatgcatctctccttgtggtgaactgcttgctcataatctttaccagttttactattgggttatttgtctttttcttacaggtttttagggactcttcaatatattatagatattctttctttgtctttatgttgcaaagacttttccatgtctgtgcataatgttccttctgtaacttttggattttgtgtttcaagaatattttctccacttgaagatgatgttaaaaattctacttacaggtttttgttttgttttgtcttacaagtcatttagctctatactctggattttatgtatgttgtgaggtaatttttttttcctcagatgatatacctcactactgctagttattaaatctattttcacactggttcaaaatgccaccttttagtgt

SEQ ID NO: 88581 - DNA, 1471 bp, Homo sapiens
gctggcctcaaactcctgacctcaagtgatccacccaccttggcctcccagagtgctgggattacaggcgtgagccaccatgcccagcctcacaaccatacttcttaaaaactctggcacacattagttcctcttatattacattgatataagcaagtcatatggatttatctgagtgtaaggagagctggaaaaaatagtttctagcaggtcagccacctcccagtgagggctgcataccatagaaggggagaatgaattttgggagaacaggtaattatctctgtcacagaaggggatgaaaagtatggtagttacacaagttagacatctgtatggaaaataccacttggttctacaaatgtggttagaatatttgaaaggtatgggcatcgatggtatcttaattcgggttacagtattggtataaagcaaactggttagtccaacggactaacacatttaagaaatgtgtttcttaaagcagagcatctgactaatttaattttatatttgaggtggtaagctataaagatatttgctattttgaacttaattaggatcagtaggaaaaaaagctagtgatatgtaaattctagaaagaacctttgacgataggagtcatgtcatctcgggtttatattaaaagtagcaggaaagacagttctggattttaagatgtgtgcactagactttaggaaacattggaaaaccagtaagagtgaggcttaaaattctaatggacagtgtaccccctgaaggagtgaaaagtcttaaaatgccccagacttcttatatgaaaggttaggaagcgcactggtggagggagggggtcagagtagaaaagtattatatgtccatctacataccacttctagtgattgagaacagatactaattagccatatcaaagaattccatggtggtagtagcaggtagaaattagggtggagctaaagcggctcccctatgcatcttctcaccatttccccttttcccccaccctaccccatcagtcactccaacttgggtcttagtttttgtattgtttttgttttaatgcatgcactgtaagtcagaaggagaaactcataacaaatgtcaagtagaaaagagggttgtgaagctcttaggatgttgtcagaagatgaataggatttttacaatgaccgatgtttcagaaaaggaaaaacaatattgatgattcttagagataaatttatagctagagtaagaagtcatgaatctgtagttcaggaaacttgaaataataggtgacacagaacacatagtttatctcctttttatcttctcatttctgaaacaagaagttgctctgtaaattagaaaaactagaacaaacaaaaagaaaatagacaatacacttatctggctggggagataccatgatcatgaaggtggttctcagagtgaggctcatccattgcactttggttgtgctgacccctgt

SEQ ID NO: 88582 - DNA, 1184 bp, Homo sapiens
tttttttttttgatgaagtatcactctactgcccaggctggtgtgcaatggcacgatcttggctcactgcaacctctgcctcccaggttcaagtgattctcctgcctcagcctcccgagtagctgggattgcaagcgtgcaccaccacgcccggctaatttttgtacttttagtagagacagggtttcaccatgttggccagactggagcatgcctggctaatttttgaattttttggagagatggggtctcaccgtgttgtccaggctggtctcaaattcttaggctccagcagtccacctgcctgggcctcccgaaatgctgggattacaggccaccacacccagccacagcagcgtcttgtccttacttttaccactactatctactgaaaatctggagatattcctttgacttatcttgtctttggaatttggtagtttggggtttggcatttgggatggagattagagaggattgagaaaagtagtgctcaaacttgtataaccagaggaaggatgaggtacagttagaccatgcatttgaacagtaagaagtacacatcattatggcatatacttagcaagagattggtgttatgacctctttgtgctcccacaaaacacttatgtcaaaacacacctctccttgcactgtaattatttctttccatgcttgtctgttattcttgacctagtattcactgtgtcaaggaactgttttatagcaatctttgagaacagcccttagcacaataaatactaaataaattctgaattgtatgtagggatgtggttctgggcagatttatatgaattacagctatggacttttcgcaaacaaaacaaatcttttgagtacacctctactaaaatgttataaaactagcttaatactttttcatagctcgaagttaattctttagatttttgctctcaaggttttgttctagaaggtgattttacaaaatagcttaagcagtccttcaaatatgaatttaaaggtcattttgatatttctaatatgaactgaaaattcattgtagttgaagttaaactagtctctagtaaggtttattttaaataaatacgttgtactattttagtgaagaaagtccaagttatgctgaagaaaaatcctagatttttaaaaaatgcatttggtatctcatcacagtagtgaca

SEQ ID NO: 88583 - DNA, 1645 bp, Homo sapiens
tgcggtgagctaagatagtgccagtgcattgcagcctgggcaacagagtgagactgtctccaaaaaaaaaagtcaaatactccgaaatgtacaataattagagaatttttgggaaaaaatttctaaataaagttctagttcgttttctttaataacttaattgttttaatattttcacagaagacacaggttttacaaaattaaaatccgcttcggcttgtatgttgtaaataaccaatagaagataatcaaaatgtttattgaacgaatggatactgttctgtcatcaaatactctgtttttctgaaaattacataacatgacaattaaaactcaaaactcaattacggcatcaagatcctaagttttgacttttatctattttcggttttctagaacagtaattctttagatcagtaatttcagccttagtttttctattcttaagaatgccatgaaatctcagcataaaataagtttttgtttaaagtttatgaagattcacagcacctgaaggatgaatatgttttggttcaaaaggcaaatgacaatatggtgttggagtttcagaaatgcagagaatcattgggtcatgctattttatttgctttatgtaatggcttgctattttagtggttgatattgtggctttgcattgttgtagagttgaagaagagatctcatctgtgccaaatttttatatcacaggaactttcagtcatgttataaaggtgatgtttgtggtgcacgctttgttgtgtgaatatttacaggaagttttagtaagatcttccattgtttagaaccctacatggcttaggtcaccttcagttcacatttaaacagttttataatataagtcctatagcgaggcacaactgcttttctttaaaggaaataatctgtttctattaaagtgtcttgtcttattggtagttcgtgtatggctatggtagggtatgtattatctcttttcttcctctcagctgctccagtgccacaattaggctgagtattgctcagctgcagctgctgggtgattactaaccatccagctcctgtctaaactcagaggcagatttagcaaaaggagctatagtaacagtagagggtgaaagagaagagccagtgctgccgccaatatcgttttcacatgtctgtatgccaaggaatcgttggctgcagcagcactactgttgtcttggaactagcagacttgatggcaatatatcctggtctgcgttgggtttacctttaagatctgaaagcccactccaggaaagacagagaatcctgtaattttagagtatagaataatgtactgttgaggtactaatggactgagttacaagcctctgtgcctcaactccttttcccccccaaatctagggtagcaatgcccttcagtttctcttgttcaaatgtacagtaagctgtgagactgcaggttccttgaagcattatacttcatttcactttaagctgtgattcttagaattgcttcttttattgttgtttaggggaggggagtagaattgctggcatataggttctttggactctactttctcctaggaagtggaaggccttcaagagggataacttctagaattagctatacattgcatatccgtggtggctgcct

SEQ ID NO: 88584 - DNA, 1018 bp, Homo sapiens
ccgcccccgcgggcccgagtcgggaagttgggaagaaacttctcccctcccccggatcgcccggcgggcttgtctcgttccccgcgctacctgctcgcccctgactcggtctctgccctgtccagacctgccgggtcccgcccaagtccgacctgaggttccaggggcgtggggacactccccaccccttgtctttggggtcgtgtggaccgcccggcgacggggaggagaggtttatttttgcccctacggccgaagtaggggcgagggaagcggcccctttgggtcctaaaggctgggggtctgtgtatcggccgacgccggtagcagctgtgcggggagaggagcgggtgtgtggggcgagtggatgagcctttctggctttacttggtttgattgaaaaccgcaacatgtttaaagttttcctttgttttgggttgggggttgggaaatttaccattcagcgtccacttttacggaatcatgccactccgcctcccgttgcgttcggttccctgtccacatgtgttaaagaaaattgtcttaaagtgtgtttttcttcttgataattgcttccagctttcactttattgggcatggggcagagctgttttaagaagctctttgaaaatcaagtctggtgtagggactttagtttttgttttgtaatgagtaggacttaacagttcggatttggttgaatcattttctgcataattaattgatacaggcgtggaataacatactgtataattataaattactaaaggaaataatgaaagtctttggtggaagcacaattttatgtccatttattatgtatatacgttccacgggtgtgtgttttcacagtcgatttcacatgatatgattatagtatcttcatgtattataactgtaagattacagtgccaaagataccttgataattttaaatatttaaaccatcctgttacacttctaaagttaaattacgcactaaggaaagtattactaaatgtatacacgtgactgtgca

SEQ ID NO: 88585 - DNA, 1040 bp, Homo sapiens
aattaaagttccaggctgagaaattaatttcatatcctggtgatttccccaaatatccatcattatatggtaattctcttaaagcctggcaatataaaactacaagtcatcctaattccatgtattaaaatctgactgtttccttgctatcttttattgcttcgcatccttttctcttgcctatctaatattttactgctaaatgaaaggaaaggaactaatagataccttgcctttacatttcatggaaagatcaattaaaatgcctgtggaaaatttgttacaacccttagttaggtttggagacagatacagatctgttcctgtgtcctgtcttttaatgataatagaatatttgaaagaaatgtatctaaaagaaaaggggaactgccttagctcagcatagttccttggttccatgttttgtgcctgcagcatctcactggggaaagagatgccaaaaatgatgtgaagcctgtgggtgcttgtggtcaatcaaagaccagccagtattgccttaatgttttctgagatcttcaaaggaacttttttcaaattataacaggcaacattacttattcccttgactttcttgaaaagatgtgtttatatcctagctttacgttaaaggtctaagtcatcaaatattatagttggaagaaatattagacatcatttagtccagatcatgtgacaagcttggtgagttggagggaaattcagattttattttgcataatgaatttagaaaaaaaaactcaatagaagtcaggaaatagaatcgtaggtgtaataataataatgccgtcagtgtaaagcacagcgcttctccggagagactttgatctgaaaaggccaaaaagaacagtgagaagacctggagccagaggaagtctaaaatcactaaagtttttcaattaaatttcagttttaatttagttcatagccttagggttgtcaggttaggtagctgatgtcctaatatggacggctccaagggatgactgggagaaaatggcgaccacagtaaatgccgctag

SEQ ID NO: 88586 - DNA, 1038 bp, Homo sapiens
aacaatactggccccaaagtaggtagtaaggaaaccccttctgtaccagaaacacctgtgttcaggggatcttggcatatggcagtgactcagacccacgcccggatgtggatttgccataaagttacttgctttcttaaatttaattttattatttatttatttatttatttgagacagggtctcactctgtcacacaggctggagtgcaggtgctatcttgactcactgaagcctccaactcctaagctcaagcagtcttcccactttagcctcctgagtagctgagactacaggtgtgcaccaccatgcccagctaatttttgtatttttagtcgagatgggattttgccatgtcgcctaggctggtctcgaactcctgggctcaagcgacccatctgcctcagcctcccaaagtgccaggattacaagcacgagccaccatgcccagctgctacacgcctttgcgtcaatgttcttcacttgcagaaacccaatctaagcttctggtagaggctgtagaaatgtttataggataatatgtcctggtacatttgcaaatacaaaatagtcaaactgaaattggctaagattccattttctttccaattttcccttcctcaccctttccttcatttcagggggcattggagtagcaatgaatgttttagggatctgtagaaacattgacttggggaaatatttagttgccttttagtggaatacatgtggctaggagttccttctgtgaggcgctgaacaacagtcaggcaggcatataatggtgttgctgttatgaaggagaagagccaggggccctgtgcagggccagctttgcagtcatgttacctgtatgatttacacagttcccggcacttagaagggtcctgcgctagcttaactgtctgccatcactttatcagaattgttaatgctttttggacaaaaggctgcacatgttatgtaggcagttccggctgcaagcaccctttaaaacaataatcaaggtacagaaagtgtgccccattcagctcttcc

SEQ ID NO: 88587 - DNA, 1340 bp, Homo sapiens
gcagattaggctgtatttatgcattctccctcacagtgaaggaagaggaattgttctttctctcccttccacctcctctaataatgctcctcaatacgtattcccacgagatttacatggaaatattaaccatgagaaatcttgtgggctttttaaaagttctggctcaattataatcatgagagacaatgggaaggaaaatagagttgtttgggacattattcacttactgtctctgaattgtttgagccagacgtatataatcatcacatctctcaattgcctttattttaatccatataccttaaatcagatgaaacaagttttcttttaaaaaatccacattataatattctgcagtaaacacgccataatttttcaaagagttttatcaatgtgagttacaaaagtcacatgctgtttggagtttgcaatgggatatggtcagtagtcagattagtcaccatgatgtcctttctgtgatttttggtctacaagtaagtattgttcaaaaagatgtgaaaagcttaagagactccttacagagaaaatagattggggcaaaaagcatggagttagtcaaacagcaagaaggtttttagggttgaaatgaactagtcatatggaaatacgtctgagactagagacaaggttctaagactaggtctgtccctttcagccacatgcccaaaacagtcagggaggacaggagaagttccttgctaagaagaagattagaaggacacagtaatgctatcaaaattacctcgaaatggaggtaaacagcttaaatgaaaaaatagtagactattggtaacagaggtgggaggggtaatttccaccgacttgaaaagccaaatctctggaatttagatgagtctatatgaaagaagaaggttcaagtgagttaggtagaagcattctactaaaaccgagggcgacagacaaggaaggtgtgtgtatgttcacagaaagaacaaaactctctaagccagatgttcaaaacaaccaatccatttaaaaatggctatttttgctgggttgatttttcctctctggtaaattctgaattttgtttacagtattagcattttttcaaaagtttttcactgtgctttttgaatatttgaatgcttttttgtttacttttcagacagtttttaaaatgtattctccaccaattatgcatgctctgttcatttagcaatgccttcatgaatttatatttttcttgtcagattttacttagcgtttgcaactactggttgatgtattagtaacttttctgtatcctggagtgcttttactatttataaaagattaatttttaaaattttctt

SEQ ID NO: 88588 - DNA, 1048 bp, Homo sapiens
ctttgagggaggccaacatcaccatgggccagtggccttcagcctagtctgtgacactggggatataagtctggatctagatctgggcctagctttagatctgcctttgctctgtccttgctgcaggctctctttaccttgtcctgttctagtcctctaaattctatgatgcaaactcattctcacaagagaatcatgggccccaaatcttaccatctcaaacttacacatatcttttgagcacttttatgtattcagcttcaggcagatgctggcttttctcctgatgtgattgagaggattataatcacttcaaaggaccttcccttccctgaagatgctgtccgatttacctcatttgattcatgtcatgcaccactggcctaccatgtcttggtaagcaccacagcactattggcactgttctgtggttattagagttcttttactttaattgtttcactttatcttcaaaacaatcttacaaaggtataggtataatgagggaatagggtcacagaggctactcataaggttaataaccaagacttgaattctattctggttcctaaattaaggcactttttgttatatcatgtttgctaatgaacttgagatcttaatagtaggtccatcagctactaatcagagaggttcattgtataggctggggcaaatgtagaatggttcatatataatcacccaaacatacctttctcaatataccacatcatcattcttgtgttattaacacagtattttttgttagagattttagtgacattagttgaactgatagcctcagtcaactcagaatcacttagaatctgatgggctgctaaaccctttgacataagccataagcatttttaccatgccattgtatttcaacaactcaatcagatgagccattttaagctcacattttaaggaagctcttctgcaaaatattcacctggatttgaagctgtatggatagttagaaaagggagtaagtaaggtaagcacaagtgtagataatttatggtgatctgataccagtgtttgg

SEQ ID NO: 88589 - DNA, 1047 bp, Homo sapiens
aaagctattccttataataaacatggcagcaagtaaacagtgtgattgtgaaaaaaatattatttatagattttctacaaataaatatttgtctaccaagtaaaatattttgactgaaatgattctttgaaatgcatattgatttattatgtattgactttttaaaaattgaggtataattttcacaaaattctccaattttcagtgtcaaattcagtgaattttgaaaacatatatacagttgtctgtctgccacagtgatcatgatacagaacactttctttaccctgaaaacttctcatttttccttttgcagtcaatcccctgctcctatccttggcccctggcaaacactggtttgctttctatcattagttctgctgtttgagaatttcatataaatggaatcatgcaatgtgtaatctattgtgcctggcttctttcacgtagcattttgagaaaagcatttatactatttacagattgttgacaaatatttatccactaagtaaaatgttagactgaaatgattctttgacaagcttgccaatttactgattttgtcaaagaaaaatatgttatttttgaagtttgttcatcctttgagtgtgtgagtatagtatcagaggcttaattttgtatttatggagctattctaacttgttatttaaaaggaaaaaggtattaaacttgaagcaaacttctcatgatctcatttgaattctttccagcttcttttggtatttatagattttatatactttgtgggaacattttatcctcaccaagtttttggacttttatttttgcatcataaacacgggtactgaaagaaaaaagagagaatcttaattcaatgagtctattattcacgttgcaagagtactagttttagctttactccgaagttgtgaaacctctggaccttgttttaacaccagtttaattattgggctccttttaaacaaaggagtctgcaaattttaataacataccttgtagaacaaaaatgaaggaagatgaacatcaaactttgacttcattact

SEQ ID NO: 88590 - DNA, 1049 bp, Homo sapiens
ttagctgggagtggcgacgtgtgcctgtaatcccagctacttgggaggctgagataggagaattgcttgaactcgggaggtggaggttgcagtgagccgagattgcaccattgcactccagcctgggtgacagtgcgagactcttgtctcaaaaaaaaaaaaaaaattaaataaataaagttaatactcaggagatatatcagcagtattggaaaactgaaaagtcacctagtaggtgttaaagtcctcatttctcatctacaaatgaaaccagtaaaccaggactatggaagttcagatgatattgttcccagtctcaagggtacttattttaaatggctttctaactataaatagtaaagcctgtgatgaaatccttgaaattaatttgctgtcttttaagaacaaaatgaaatatttctctgtttctactcttaactgctaaaaggaagtggattccttcctcaataataatttttgtgttttttctcttttttaaacagaggttttaaaagactacatcaagccagatggggaatatttggagttgtttgctcgaaatttacagccaggttggactagttggggcaatgaagttctcaaatttcagcatgtggattattttattgctgtggagtctggaagctgactatgatcttgattaaagtagtggtttcttcattgtttcctcaccacttttcccttaattctaagtcatttttttattttgttaccaacccatattcttagaatataaacaggacttgtttttttcagtaagggaccagaagtgactagccttcatgtaattttaagatgaattttacttgagttgcactaacattctatgttattctagactatacaaattaagtggtaagcagttataaagacggcaagaccatgctattgaaaaagttcagaaaacatacaccgtggaccagaggtcttaatcctatctatggatgtgttttgtgtgacccatacagtgttgtaaaaaacacttagaaccattattctaaaaaatggggctatttcacattaaagtc

SEQ ID NO: 88591 - DNA, 1050 bp, Homo sapiens
ggagaatttgtgttcccattagattctccacacaaaaagccctacgaaggtcttatactggggagggttcaagaaaaaactgctctaccattgaggtaggaaaggtgatttttcaaaattgtatacatgtattaatttttacgcttttaaaaatgattagtaatcattgactttttaaaatgtttatgtttttgaaactctgaaaatggtccagtgtagaaaagaatggatggtatggcacaggaaactatattttgttttatctagtgtgtaattgtcattattatagaaaatgaaattataggaatgtctcaatacttaaattgttaatttctttcattgattgtaaaatttgtgttaaaatcagatacagaaagagaacaaaaatcaatgcagctgtggcttatgtatagaaaattgttttttaaaatatagtttactttcttgttctgtttaattaggaatgcagatgtaaacgtgctccccattccagaccacaaattaattgtcagcgtgccctgtactcttcactcacataagccaccgcttgctggtatgtttttataaaatagaattgttatcacttttgtcaaatttgaaaaaaagtgtacatttagtatttaaacggcctacagattcggaaattaagtcagacgtaggttgttaatgaatattctaaaactttatagcagaattcatagcagaatttgcctatctctatgaaatagagaatagattagttttatgttactcagcttttccagttataccatttttcagattccccttgctatcagttgcttcccatcactgggctgacacaaagaatgctgatgggcatctgaggatgcagttcagctagaccctttattttactaccggggctgtatcccttgcttgttctaaaaccaggaactcagaatagtagtcagagaaacagaagtcccttgatatttggttagtggctctcagttttacgtttttttaaaggtagtgttgcttttctggaacattgacaggtaattgctgcagcctgcaaattctcactag

SEQ ID NO: 88592 - DNA, 1387 bp, Homo sapiens
cagttggaaattgagaggtactcctactcctgagcctgtggtgactgccatcatgtgtcactgtcactcttaggctcgccccttcttccctctaattcatttctgacactatttctatctttagatagtgtcacatctcccaaattcattgtacagacatgaatgattacatcattggtcactggtgatcaactcagccttcatccctgcactcagtaaggctacaggggcggtgagccaggaactgtggatgaaaaccaatgtacatcataatctcactcatggagttagaaatttgaatctaaatgctgtgattattaattgtgccattaagcactcatttatttcttattctgtcccctcttaagttctccactgcactggatttagaaagcaatatctagaactctaatccatcttttgaaaaaaggttagttctgagaaacctagttatccaaggggtactgctcagaaccaattacagatctagactcttaaccttgcggttttgctagggtttagtgcttctgatgtgctggtaaaattgcattttctctgactagaacaattttttctttttaccttattactccattggtagtagtgattaagtagggaagatgatactggagaatgggctgacttactatgacaagtgtagtttgcaaaaacgagggattacctgctaacagcaccttctgaaattctatgcccctctctagataggtttatctcattaaaaagggtgaattcacgtagctaatgtagtgttctttgcttttacaggctactttgtccttttaaggattcaatgacttcctgacttggaggatgtggacctagtggctagacccaaggaccaaagcaagaagtcgtggggggcccaggaagacaggaggatcacattgggattccagacataagatcaggttttaaccccctttggccaaattttggctgaaaatgttgaattatcaactctgaaattaaaaagaaagtttatattaaaacattgcaattttccttagaatttctgtatatattaacatcatgaatgataaattctcttcaatgtgcatgtcaggtttttgtacttgtatatcaaatctatctgtgtgtatgaagtgtatgtttattgaaatacaagatatttaagaagctgatctggaaagttggattttcattctagttcctaattcccagaggcttttttaaaggaagggaatgtctgtggtacaccagttgtcagctgggtggttactggatcatctttcttttatcaacaagataaactatcaacttcaccagcatcatgaaccttgttgccgtaaaaaggagttcactacttctgttcactttgagtctcttcaaatggattctgtgtcct

SEQ ID NO: 88593 - DNA, 1869 bp, Homo sapiens
cagttgggcaaaattaatctaacacaaagcgtattttataataaagtattgaatagctcttgtaatttattgaatactatactaacagtgaaaaacaaaaaggttgtatggatacttgaaggatggtttctactccattgcttttgcaccatcagaaagctgaaaaatctgaagtcaaaccatcgttaagtcagggattgtctgtatattcttctgtagagttgtttttttgcttcctgaaaacattataaatttgttttttttaatattaatggatctgtttgaatcacattataatttcttaaaaataactaggcacaaaaatttgaaaattttaactaagtaaaaaatggaaggggattggaattaaatcataacatgttatatgttatagacgtaatgtttcttttcctcctttatgtcgtggaatgaagatatcagtattggcaacattattttaatgtaattctttgtcaacacaaaacataataggttaagtcttaagatattgcacgtggataggttgtttattttgttttgacctttttcattagacatattgccccttagcccagagtcgccacttccaaaagtggttgagataaaggaaacattaagattatacattaatacttcctagcatacataaaaaactagtcatcacatgggccacttagaagaaaaactattctctgttctaattctaaccttcattctttgaaacttttgtcacaaaagaaaagtggaaataatttcagtcccatcttttatgactgcctgggatgtagttcaaagatacatcaactgactagtgttggcatcattgcctttttctttttaacaaaaaataaacatgcgcctttactacttcaacaatgatcccagttggaaaggctcctagaaaacctttgatcccacccttgagaaaattatcctcccacattgcaatatgtatattgggctgcctctaattacccctcagttttcacccaagtacattacaacatctattaagtattaaatgtcttgccagacacagtggctcacacctgtaattctagcactttgggaggccgaggtgggcagattgcttgagctccagagttcaagaccagcctaagcaacatggcgaaaccccatctctgcaaaaagtacaaaaattagctgggtgtggtggtgcgtgcctgtggtcccagctacttgggaggctgaggctgcaggatcacttgagcccaggaggtcaaggctacagtgggccaagatcatgtcactgtactgcagcctgagtgacaaagtgagaccctgtctcaaaaaaaaaagtgttaaatgtcttgacatccatcctaaaggttaaaaaattattcttgctctctgagctattatagctattatttcaaatgacaatatatagagaagcacatgggaaactataaagtactctttgtaattaaagaaagttgtcagagtatctggcttcacaagtttccgatactcagctttgtgagtccacaaactcgatatttttaaacctataagatcaaaattgaccaagcttaaggaaactgattcagtcttaaccaaattcacagcaactgatctgaaggagaatgaaaatgtattaatttaccatcagtgatacacctttccagttacaggaatactcagactgcctattcagggtactcacttcaaggtcaccttaataagcaatgaattagcacaaagggaattggtttgtcttgagggatatttacttcatctaaggtatggaaaattctgatcatccattcttgccttctcataaagtctacattctcagtgaccaaaacatctcatgaatgcaaaatatagtgttattttctcttggat

SEQ ID NO: 88594 - DNA, 1022 bp, Homo sapiens
actttttgccacaaattttgaaagagaccttaggtcttttgactaattggtgctttaatttctcaaatagtaagcaaggacaacgtagggatattatcccccaagaggaatagcatttgctaattattgtctatgcttctggtagcatgtttggtatattatgactttattatactgtcatctactgctgctacactttgtcaggaggtcaagtattttattaaggcgccacagacagtaagatgttatggctcaggtctggctccaacactagtattctttttgtttaacttctctccaccaaagaaaccacaaagataaaaatcagtaggcatccagatacatttaaagtaagtagctcatatgaacactggatatggtaaataaattaccactccatgagcagagtgaaatgaccaaaagcaagcaccctaagaacgagaacacttactcagttttgactgcagctctgcattcatctcatcaaagctgtcggcaccactcataaaactctcatagcattttatggtgtagtccaaaaacaactatggggttaagcagattttagaaacaaagttatgattctctatttggtctgtttcacttttctaggtggaaatttatatttgaatttaaaaaatagtcagaaatactaagtagtcagatgaacctataaataagagacaaaaacctaggctatataattatgctatatggacttatttagtctgctacttctaaatatgaataatgaggataaaataacacttaaatttggataaaggcaatatttaaaaacagccataccttcagaattttgagaaggtcaaacaaacagggaagcttattaataaatgtaattcaacataaaatgcacaaacttaatcatctttaggaataaagcacctgatgaaaaatttaaataaactgctgatcatctaagtccaattgaattgataaggtctaattgtaaaaacccaaatgtaattaatgaaggctacaattacattgtaacttcaggc

SEQ ID NO: 88595 - DNA, 1972 bp, Homo sapiens
caacaatggaatcaatcactttgccagtattatcacaaaagctgaaagcattcccttatagtcccctgggattgtatcttcctgaagagtaaccaggacaatttcagcttgttcacatgggaaagggagcaaaataaatggctttgttttaagagaggaaaatttagagtgatctaagcatctaatgagtaatttgatatttctgtatataattaaccaagcataaaaactgcattcatttattcaaataaatattttttgtatacctactatgtgccagccaccatttaggcactgaggatacagtaatgaataggataaaaacctctgcccttatgagcttacattttagtagacagaaagaggaaaataatgaaatgagcaactttaagtcaaatggtgataagcgctttggagaaaaatcaagcaggacaaggagagtcgaagtacggtggagtaatggaaagggtttgctgttttacaaggatgggatgtacttcactaatagtgttttgggcagagaccagaaggaagtgagggagggagtaatggtgaaaacttgggaaagaatgttctaggcggatttgaggtcttaaaaagcttttggattttgtctccagaggatttatttaatgtggatgcttttaagctggaatcattagaagcaaaaaacagagcattgaatgaacagattgcaagattggaacaagaaagagaaaaagaaccggttagtaaacatgtttacacacttacttgagagctcttttagacttttgggtgtccttggatattagctgtctttatcaaaattttaaaaaatagattaacaaattaagcttcttaaaagttaaattttcacctagaaactcccaatgaaaacatgtttggtatctgtggagccttgttttcccttgcggtctatcagtcttagactaatggtgctctggatatgatgaaagattcttacctacttacataagatcaaaagtacttttgaacaaaggccctgtgttatatacctctagggagcattagtcacaagaagccctgagttttggaggtagtgcaaaaggaatggttaataaatgggtttatatagtatattgtatcctgagttttctaaaagctaaatattaatatccagttatctaactttattttctgcattattagtgaagcactcaaactgttgttgtaaaataccagattttaaatatttgtgctttttcaaccctagcaattgtggtttttttttttttctatttcaaactgacagtgtagtccccttttagttcttttgacttcctctaaaaatgaaaggaaaactcaaatctacctttctctaaaataaatttaaataatattgctttactttaaaataaaatatggaatggttattaagaataactaaagttatattcttttctcttaaagaatcgtctagagtcgttgagaaaactgaaggcttccttacaaggagatgttcaaaagtatcaggcatacatgagcaatttggagtctcattcagccattcttgaccagaaattaaatggtctcaatgaggaaattgctagagtaggtaagcagagctaatgctaaaagactgggatgcgaacctgtgtgggatttgtcacatgtaaaaacagctttgttatccatatcttttgttgttctgtggtacatgcttagagcaggctaccaagttttcagtgtgtttcgtatttgtttcctaaggctgctgtcacaaatgatcacaagtttggatggcttaaaacaacagaaatgtattatcgcacagttctagaggctgttccagcagatctgcatccctccaaggactcagggaggatctattccttgcctcttgcagcttttagtggctggcagcattactgggctatgttcacatcactccgatctctgcctccatcttcacattgccttctcctctgtgtttgtactctactacctg

SEQ ID NO: 88596 - DNA, 1071 bp, Homo sapiens
ggactcttattccaagctgtcagataaatggaagatagtagtacattacacaccaattgatagtcttaattattctgtaaatttaagtgttactaaaaccttatcttctttgtatattttaaaactgctactcttactgctaaagattactgaattagtaaactactaaaaataggtgtgatatgttttgtataaaattttagaaatgtcaattgaaaaaaacatatggaatggggctgctttaacatgtcttatgtgttctgttcttacagattgaaacacaattagcagagtatcacaaattggctagaaaattaaaacttattcctaaaggtgctgagaattccaaaggttatgactttgaaattaagtttaatcccgaggctggtgccaactgccttgtcaaatacagggctcaagtttatgtaagtaatcatgactacttttaagatttttttaattctgtgattggtatctctaagagtttgaactttggcttgttcataacccagtactaaacaaaggaataaaacactgaaactgtatcttctttcttctcggtcatagaaatcttctactatccagtaaaaaaaattgattacatataaaatagatgccagtactataaagacaaagagggcctaacccttactgtcaagttgctaatgatccccccagaggagaaagacataaataaatgctatatatgtgcttaattagaagtctttacaagttatagtgaaaagatcagttcttcccatgtagcaaaaaagactctggagatggtaaccgtggaatgaaatcttgaaagatgagacatatatgggaagggtctgtagaaagaattccaggcacaagggcacacatgaaggcataaaatgtattagagtactaagaatactggtaatcaacaaggagaaattggtgcctaattttaaaatatggccaaggaagtaattttgggaagaaaatttttaaatagctctattgtaacttgtcagttatttatagattttagtatttgagttgcccctaaaaatgccaattttcaaaatacttcagttttgaata

SEQ ID NO: 88597 - DNA, 1134 bp, Homo sapiens
tgaagtgctgtgttaaagtcagtagaacagaataaacataagaaatacaggcagagaatcctaagactaaacagttgaaaaggattaagagaaattgatacttctggataacatagcataaaaatacaacctacatatgaattgttttcaaaaaaaatactgcagtaaactaagtgtacttgtaaaatgtttaaataatagcaatgaatttccaggatagatgagcaaatcttgaattttgcaagtattcaaaaccaaaagcaggttatagtctacacttacagaaatttgattaaaaactagttttgtttctgtttgacagtatattagatttaaaatgttataacttcagtttttctccaaaagtgactcctcctatcacagtgtgtagatgcttcaggagggatattttgtaattaaatgttatatgtcacccacattcctatgtattttataggtacctcttaaggaactcctgaatgaaactgaagaagaaattaataaagccctaaataaaaaaatgggtttggaggatactttagaacaagtaagtaataaaacataaaaagtcataaaaagtgaaaattagattttaaaacctaaaattaaaagttatttatggtttctgattgctaaggaattaattttttaacaaaactatgaaaaaatgagaattgggtatgctctcgacagaaatatttgaagtaacttattaagacatttaaacatcctagccttcacacatcacatatgatgaagcgagatgaaactaagtaaattttcctttttttaatagagaagtgtctctaacttgagataatttaatatttttatactaaaagaggcttcaagtggctaccttgaaagtaggcaagtataattacggcgttagaagctaattagctgtgatagattaagaggtttctttttaccaagtttttggattctggatcatggaatttcaggagaactcaaattcctttcaaagtctatttccaaaagtgaatttcaggtagtctctgcttctgagatccttaatatcacctatatccctgaaaaggaaaattctattattgtatttagtaacctttaaagtaaacattgttagttaagaaaagttaagctacttctcaa

SEQ ID NO: 88598 - DNA, 1050 bp, Homo sapiens
agattaaatgtggttaccttattactttttgaaggaatgcatgactataatagcaaacatccaataaaattaatacaaacaattcttttttaacattttagaaaatgaacatacaaatgaaaagctaaatagctgtagtagatatagtctaaataaagctagatttcaaatccagaggcaaaaattatttatatatgaataaattgatataacaatattaataatatataatatatatgagagcttaaaaagcactcccacaacaactagtggaaaaacagatattaacatcgttaactttgaggtttctttgaaattaatttctctttggagaataataaagtttttggacaaatgataagtgagagtccaaaaggactagaagaaataacattgttcagttagttgattgataatataaaaactctataacttgttaaaatatctttgatgtatagttatgatttctcaaccaaagttttatttccccagttgaatgcaatgataacagaaagcaagagaagtgtgagaactctgaaagaagaagttcaaaagctggatgatctttaccaacaaaaaattaaggtaagaactttgccacagtttgcgtaggttatcaaaagctatgtcatgattgcttgatgagtcacatattctgacatcaaaatcaaaatctttaagctatatatatcctataatttgtatcttgggttagttttctctgccaaagtttatcgtaaggagtcattttattttgttctttaaaggacatttttctggattagggctgttttaccatagaaaaggaacatttacttttcctttatctggtattttatacttgcatatgactcagtatccttgcaaaactaaacagaatctctcctacctttttgtagagatttattgttatgtactgctaaagcctgaaccccaataaggtcttttgaatatgtagttgcccaccaagagtcattgtaaactgactatcctggtcaaattccaaagactgtttacgtgcaatctagaaggtgggtaaaataaaaagac

SEQ ID NO: 88599 - DNA, 1021 bp, Homo sapiens
agaagatacaattcagaaagggcacaaaaagagagcctatgtggtgaatacaaatatattctttttactttttttttggagatagcatcttgctctgtgacacaggctggagtgcagtggtccaatcttggctcactgcaacctccacttcccagcctcaggtgatctcctgcctcagcctcttgcatagttggaattacaggcacacaccaccacacctggctaatttttgtatttttagtagagagggggttttgccatgttggtcaggctggtctcaaactcctgacctcaagtgatccacccacctcagcctcataaagtgctgggattgcaggagtgagccaccatgcccggccctttttattcttaacttaaaaatgttatcctcttgtttgtaaattttacaattaaacattttaaaagaaattaattttttttactttaacaattgttaattctcttcactagaaacatcttgaggagcagattgctaaagttgatagagaatatgaagaatgcatgtcagaagatctctcggaaaatattaaagagattagagataagtatgagaagaaagctactctaattaagtcttctgaagaatgaagataaaatgttgatcatgtatatatatccatagtgaataaaattgtctcagtaaagtgtatttttctctctcatttcttactaatttcaaatggtgagaaggcaaggtagtatgatttaaaccagaagtcggcaaaatacaggttgaggatcccttacccaaaatgcttgggaccagaattgttttggaattgggtttttgggggttgggttttttgttttttgtgtgtttgtttgtttgtttgtttttcagattttggaaatcttgtgatatcttgaggacaggactcatgtctaaacatgagatttatttatacaccttatacacataggctgaaggttacttcatacaatatttttaataattttgtgcatgaaacaattttgactgaaatccttcatgaggtcaaat

SEQ ID NO: 88600 - DNA, 1017 bp, Homo sapiens
gggccccgggcgcgcgcgcggcgaagccccgcccctgcccgcgcggcctgctggattcgccccgcccctcgctgtcgcccgccgcccgccacccgccaccgctcttcctcctgcgccacagtcccggcggcggcgctggtcgcgggtcgcaccgtgaggctcgcgtgggcggcgataggcgctgggcccgggcccggtgaggagcgcgccgcgcgtccccttctcctcaggagtggcgggccgcggaagtgacgtggtgcacgggcaggagcgcgtttgaatcggttcccgggtgatcctcgcgcctgccgctgctcggccgccgccgctgacgaggagctgcagcgcgccgggccgaggcctcgagccgccccgggagctggagctgaaggcgccgcgcggagcgcgcacctcagccctgagcccggcggcggcaggcgtcgctgtcttttctccttttccccaatatggcagcggcggacggcggcgggcctggtggggcctctgtggggactgaggaggatggcggaggcgtcggccacaggacggtgtacttgtttgatcggcgcgaaaaggagtccgagctcggggaccggcctctgcaggtcggggagcgctcggactacgcgggatttcgcgcgtgtgtgtgtcaggtacgcgaaggggcgaggaagggatgcgcgtgtagacttgggggcgggagggtgatgagaaactcaacttgctcactgagggcaataaacctgtcacccggtcccggtcctgcggccttggcttccctctcccgtgtgcccgccatgtccgtgacctggtggccggacgcctcgggcgggccctggcccgggcctcgaagtgcagggccggctcccccgtggccctccctctgcctccgctccttttacgggaggccttgccggcccgggtggagagctcagcgtttgttggccctgggcgagcttagcccggttgcggccctgcagtctagggaaagccgttggtggtgtctgtttttacttt

SEQ ID NO: 88601 - DNA, 1692 bp, Homo sapiens
ctggctgcatgtgcatagtctgcacagaggttatatttttcaagcttgattatagaaaaatagttgatatcagttatggctacagaagatgattctgcctagcacaaatcttctgaagctaattttgctaaccaacttggattattccattatctttttttaacctaattagttttccaagacctgctggtttttcatgcctgattccatctgaatttaaccattctccattcatgttgacactacgctattttagattctcgtctgatttcctgtgatagtttaacttattaagaattgagtgtttcaaatgaatggaaggaagtatttgtgcttgtttcattaatatccttaacatgactttgcttacaggtagatgattgggggtttttctttaccatcattaaagatatttcatagatagaatttgtatattcacaattataagttcattgagtttctgatgctgacctagcacttatgattttcactcttgattacagatgaaactgttaaagatggagtcaccttatacctgctacagtcggtcaatcagttactactgacagctacgaaagaacgaattgacttcttacctcactatgacacactggttaaaagtggcatgtatgaatattatgccagtgaaggacaaaatcctttgcgtaagtatcccattcatactaattttgataaattattacctgcctttatcccctgattacgtatcccattccttcactttttgtaaatcttcttattacactttattagaagaccactcattttctttcttactcaaattcatcacggtattattatgtcttctacctgtgtcatcttcagtgaaaaaaaactctcctttaaagctaacctactagtagaacttttcttttcaactcataaggggtcttgacctatacagctttccatcgcctgtatactctcttctcctgatttcctagcctcccatagacctttcccaattaagaaaatacttgttttactttgcaaatacatatagctaggttgcgtaagtaagaagtttgtgttcatatttccatgtctttatcatttctttctacctttactacttgctagtttctgtcctttctctggaccatttgctagtgatctttacaaatcaattagtttactgaatcctctctttcaggacttgccaaagtgtctaatactacttacatgttcatcgtaaacttttgtattaaaattatttttttctcattatatgtgtatttgcaggaaattagaaaacatagataagcaaatagaacataaagaatatctctactacccagacataaccaccactaacactttggtgtttatcatttcagaccttttcatattatttgatttttaatggttttatatggtgcatacttctttaacctacattttgtttaaaaataaagtgaacatcttttaatatatatgtctctgtatattttgataatatttaggtaatataatttatttgaacagtattctttttctttttttgttttttgagacagagtctctctctgtcaccctggctggagtgcagtggtgtgatcttggctcactgcaacctctgcctcctaagttcaagtgattctcctgcctctgcctcccgagtagttgggattacaggcaggcaccaccacgcctggctaatttttgtatttt

SEQ ID NO: 88602 - DNA, 1051 bp, Homo sapiens
atgtatacatgtatatgtacctttggttttttgtaatcttctactttcccttaacagtacattgttaacatgtgtcatatcatgaatgttctgcaatataatctgttgttgcagtgacttattggctataatataaattgtgtagtttgtgttctgttgttgaacatttagattttttttctgtatttttgccactggaaggaatgctggaatgatgaacattcttgcacaccttggtacatgtctctgaatatttccttaagttgaattgtgagaaatggaatttctaggctaaaggacatgaagaattctgaggcttttgatacatactgctgctgaagtgcctttcagaaaattgtattaatttgcacttccatcagtaatgtataagtgagcctgttgaatcatttttttcatgtttaacttttcatgttttaagtattgatttgacttttcctgtctttttgaacttattttgtttcatagctttttgatgaaacacaaggaaaacctgctgttgcagtgatagataatggaagaggaatgacctctaaacagcttaacaactgggccgtgtataggttgtcaaaattcacaaggcaaggtgactttgaaaggttagaaaaccttacttttttttttttgtgggtagctatgtattttagtaaggataaaaaactggtatgcctttggatgcatatgatacattggaggttttactgttattcacatatttatttaggttttatattatagaatttttatgattgatactcagaaatagaactatgtaatattgtgcctttccattaaacagctcattttgcatttcctgaggtatgtaggagttgatatgttgggtacctgagagcttttcccctttcctaactctgtatagcctctgtagcagtagaatcattttaaaatgggctttagaaatcgcttcataccatttgcaaaatgtctaaaattgcatgtggttctgtggagctcactgttgctctactttcagagctctttttgcaaaacattcaggagtggaatctagtgg

SEQ ID NO: 88603 - DNA, 1056 bp, Homo sapiens
tacgatgttgtcccacttcctacctctagcaagaaacctcgaattaaatgtactcatgacttttctgtccttcagctctgatttgctgtttctttgcttactttatattttttagtagtatgttccttattgagatgctacttaaagctgtttaactcatatgtaaatatatgtatttcattaagccagattgttacttgtacaaataaacataatttttacttattctgttgttgaatcatagctgagaacaaaagtaaagttaccatagaatttaattatttttgtttcctttttattttagatttctatgtttgaaaaagggaaggtacctaagattgtcaacctaagggaaatacaagacgacatgcagacgttgtatgtaaacacagcagctgatagttttgaattcaaagctcatgttgaaggagatggtgtagtggaagggattatccgttatcatccattcttatatgatagagaaacttaccctgatgatccatgctttccatcaagtatgttaatctgttatcttagttataaaatatgaagttgtaatttaggacagtgatttgtttttctaaatgattatcggttgggttattcaggttagataaatattaaattttttcttatgcaagtcttagattgttaggtatttgtaatttttgtaattcctgatttttgtgtacattcatttctagatgaataaatctttaatgaactcttcttttagttctgttacgaaaccaaacttttagatatgtatgcgtattaatcctttatatgttcccttgtcttctctttatccttgttgcagttttacactttatgcagtcatatttactaactttttctttatgctttctgattttgtcttactgtagaaaggctttttacatctcaaaattatataaatctgtagcttttttgtttttgttgtcattttatggtcaatgcatctgtgtttttcttttttgtatgtagagcaaggtggggttttatttatttatttaaatttttgagtgatggggtcttgccgtgttgcccaggctg

SEQ ID NO: 88604 - DNA, 1051 bp, Homo sapiens
gtacatttttcatgcttacttgaatctgaaaataatttctaaaaagtaaacttaattttagcatcattcactaatttgttcaaactaggtaaactcgctgctattagatgtcatagatttctcagatgactttcatgtgaacatactagttctgataaaattgtgaaactgttttagatacgggatttaagctcctatatttgtaggaaggagggattttgttataggggataatctttttggatgtaagactcttttagcctcatgaataggttttaaagatgacaggcccagcagctagtacattggttcatatataagtaattattgacttctaaatgacagacagcattcgtaatgtggaaccactttgtaaacctacctttttgtgggcaaacagtataaaactacctttaggttttatagaatgcaatttgaaacatttatgtgtttgtttcattatttctcacattttagcaataaacattttgttccatttgcccttttgatctagaattaaaagatgaagatgatgaagatgattgtttcatacttgagaaagcagctagagggaaaaggcctatttttgaatgtttttggaatggacgattaataccatatacatcagttgaagagtaagtttgatttttgctgaaattatgtttttacaacttaattcttttactaactaacattttgttctgttcaagctttgactggtgtactcctcctaagaagagagggcttgcaccaattgaatgctacaataggatatctggtgcattattcactaatgacaaattccaggtcagcacaaataaattgacgtttatggatcttgagctaaaattgaaagataagaacaccctttttacaaggattttaaatggacaggtatgatttttaaatataaagttgtgaatatttgcaaatgttttatttttaagtaaaagaagacactagcagtgtaggtttttattgatattttgcatcaaaagactatgatgtataaatttttttatgagcagtcaagtgttcacattactaaaaa

SEQ ID NO: 88605 - DNA, 1085 bp, Homo sapiens
actgcaacctctgcctcccaggttcaagctattctcccgcctcagcctcccaaataactgggactacaggtgcgtgccaccacgcctggctaatttttgtatttttagtagagatggggtttcaccatgttggcctggctggtctcgaactcctgacctcaggtgatcgacttgccttggtctcccaaaatgttgggattacaggcatgagccatcgcacccagccaagatcttaatatctagcccttgacatagtagaagccacagaagcatcttaatgagaacatgtatgaacaattgtatttgctttaagggctatatttgtatattaataacctagttgtgcaatttttagctagtcttgagggtaaaaatggggtaaaactgtgaagtactttgagctaaaaggtgatttgagattgatcagtattaaaatacatgtattgattaatacaacaagaatgatttcactttgaaatttgttacaaagttgagtgaaactagtatactagtgtacttgtattctgtgaacagacctcagagacttttgatactactctttcagtagtttaatgttgaattgccaagaaatagatgattttattatcaatttattgctgggcaataaatacagtgcatagtacatagtatttgtagtcagtcagtcctgtaagatgttgaaattaattttgctcttataaagcttgtgaatcatagaagattaggacacttttaagaattatacaccgagaaagaccttatcaaaatgagttactactcctttataatacacttagaattcatttataatatggtgttagttatccaacatttattgagcagtgggtgttttcaaaagctatccagaataagttaattctattcctttgttacactgtacttttaaaatatatattttctaattttgaaacattcaagctgcgcataatggttcacacctgtaatcttggctacttgagaggctgaggcaggaggatggcttgaggccaggagttcaagaccagcgtgtgcaatacagtgagacaccttctgtatttaaaaaaaaaaaaaaaagaaggaaatgt

SEQ ID NO: 88606 - DNA, 1057 bp, Homo sapiens
tcacaggcctgtttgacatcagtgtcttccatcatctctaaggaaatttaacttatttttagattcaatttttagtagaagttgagactaaattagatgtattaaaatttaacaacagtaacaacaaataatgcaaatattggctcctcaggagctaggtaagaatgaaaaggacaaactgattttaaattccataatttattatagcattaaaaaaactattgccagaggctcaattaacaaggtttttatggtttcctaaactaaactttactcacatggagatctcagtgttttttgtttgtttgtttgtttttaatgtaatgcgttaagtaatgatttttaagtatttttttgttgagcatctgctgacatagtaagttactgcaccttttgactgtgtggtggagaattcagagatataggagatgtgctttgctcttggtgatattatatcctagcaatggggatagtgtaagcataaataataggtaagaagtggatcaatgcaatggaaagaaaggattaatagtgttttggcaggttagaaggagagaagaggagaggattttttttttttttttttactttggttggtcgtgtgggctggaagaacagagcagatcgttaaatactttggaaaagaagtaacatttgtgtggaccttgaaaggggtagaggctcaggtttacacagataattacaaggtagaaggctctctgttctctccataaatgagagataccatcatatatttaaagctatagaattggatgagatcatctatacttggtgagtatagctaaagaggtaaaaggattgagcctggagctttcccaacatttagtggttagaatgaaaaggaggagctggcagaggagactgacagggataagctggtgagacagaaggaaactagcagaatgtgacatccctagagccaagtgaagagttacaagaagaaaggagtgatcagtttagtcaaatgcttagtggtaatggagtaaagtgctttctagaaggtaatctgagcatagagatgtgcgtaggttaagtg

SEQ ID NO: 88607 - DNA, 2385 bp, Homo sapiens
cgatcatgatggagaagtatatgctacaggaggagaggttcaaattgcaatggtaagacagcaagtgataaaacatactgaaagtttcttgataacacttttgcataattgttaagatacagtatatttcgctagtgactagttttccattggataaagtggttgtagtttttgtgtggatttttatgtgtcataagttgatgtttttaataatctatacaatttaacatcatatgctcagtttttgtaaacatatatacattataactagttaccaaattaattttataaagtcatatttcctctagggcccactaactagtaaacattggagccagaattctatctcagcaatgagtaactacaaaactggagtgggttttttccctataccatgctttcttgttaatgtttgatatgttaggactacagaggttatataaaaaatataaacaaacattgtggtgtaacgtaagaatagctactgttatttatgtacttaattaggataaaatatatttctttggaagaaacaaatgggtgtttgtttttattacagctagatttaaatagttttctttgaaatgttggtaaatgtatttattcaggaacctcaggcactatatgatgaagtaagaactgtgccaattgcaaagctggataggacagttgctgagaaagctgttaaaaaatatgtagaagatgaaatggcaaggtaagtcacacttcaagatgcatgacaaaaataagaaaaattggaaagaattgtgctgtaagtattctgagtatgtcatttactctgctgttagggcatttgtagtcttagatattgtacctattgagatgaacttcttgttgaaaaaaattaagaggtctagttatacaaacagaattctgcatttgttttgtagacaaagaaggaaatcttatatatctaaagtgtcacttttataggcactatgattaacatgttttaaaaaaactcagtttggcctacaactaggatattacaatacctgctgagaggtaaagatgagtgtattagttcgttttcacactgctataaagatactacctgagactgggtaatttataaagcaaggaggtttaattgactcagtcgtgcatggctggggaggcctcaggaaacttataatcatggcataaggcgaaggggaagcaagccatgtcttacatgggcggcagaagagagagagagggaagggggaactgtcaaacactttaaaaatcatcagctctcgtgagaactcactatcaagagaacagcatgggggaaaccattcctgtgatccaatcaccgcccaccaggtccctcccttgacacctggggattagaattcgagatgagattcggatggggacacagagccaaaccttatcagtgagttataaagaagaagaaggaagtagaaagtggcttttcttcttgtatagctaatgatgcaatcattttgattcttactgaattttgattcttaggggttatcctgtcttctaaaggtaatttgtactataaacaagtagaaaaaaaaaatcaacaaaaatttgacagtttctggcttttaattccaaaaggtttttttttttcttcttcttttttttcagtagccacaggaatggttagggaggaaaaaaatttttagatgattaatcgtaaagaattccagatttaaccttttaaaatatatcagcaataaatatttaagtttctaataactcgtatctttttaattaagatcataattaacaaagtttgtggaacattaatatgctggtttcataacaggctccctgatagattgtcagtaacttggcctgaaggagatgaattattgcctaatgaggttaggcctgctggaacccctattggtatgtttgtttatttttctaataccaaaaagtgtgcttttcttttgtcttacatttccaatatgtaaaaggtcacgagatattaaaatgcaatgggaagatttggcagattcagcaaatttttgggtgtaattaagatacttttaatttttgactcataggtgcgttaagaattgaaatactgaataaaaaaggggaagcaatgcaaaagcttccaggaacaagccatggagggtcaaagaaactcctggttgagctcaaagttattttacattgtaagtatacaaactaatttagatctttaatattgtttttaaaatataatatcaaattaaatatcttcatgtaattattgatgacctagcaatctgataggcatagcaaattttattgaagttaggaatttcaggaatgttatgaatagctcattttcttggtggatatttttctaaggtttttaaaaaatacttcatcttgaattttttcatgtgggta

SEQ ID NO: 88608 - DNA, 1040 bp, Homo sapiens
tgaatcagattcagtctctgcttgctttgttgtttgagtatttgatgttcttgggtctttctgctaagtcagttacacttactcatatgttctttggctttccaattctattactctcatcttttttcttgtttactgcttttgtagagtcattgttacagggtttttggagagaactgatctaggtagctgtgatatcaagaaggcccaccttggagtgtggttttctttttttttaaatgttttaggagacttttttatacataaatctactgtgttcttttaacacctgtggaacatattttcataagatgggcgtgctgtagtttaagcagtttcctgttgatgaatcgtgttgattgtttccaagtttttggctattagaaaccgtagtgctttttggggaaaaaaaaattatgctgctttctgtacgtatgttagaatctctttagggtgataccaagaagtggacatcccaaaaggctatgccatggtaccttcacttctcactatgagagttccaattgactgcatgctcattcctggctgaactatatattcatttagcatagttggtggtgaaactgcttctctaatttttagattgtgtacctcttctagccattattggacattgtatgccaatgcttgttcatttactatgcccattttaatagtttaaagctgtggttctcaaatttgagtttgtatcagaatcacctgaaaggaaacacagcttgctgaatttcaccctgagtttctgattcagcaggtttgagataggccctagaatttgcatttctaataagttctcaggggatgctaaaacttcaggactagagaccacactttgagaacagccaatttataggagggcttcatgtagtctgaattttccttgttacacatgttgcaaatattttctcatgtcgagcttctatttaacttcatcatatatatcattttataactattgaatatcgtgttttgcctttaaagctctttcctatgaaaaggtataatggctgggcatggtggct

SEQ ID NO: 88609 - DNA, 1128 bp, Homo sapiens
aactgtgcccagtttcataaatttgtgaataaaagtttactcacctctcctctcttgactccatgcctctcatttcatatatatgaatagaaagacaaaaatgtctttcaggattgggaatgggctgctctgcctatggagtagccattctttattcctttactttagggaaaaaaaaaaaaagggaatgatgactaaatgaaggtaggtaaaagaccgcagaaagaaaaagaaaatccagttaagtaaaaaagaaaaggattgtaattgaggaagttagttctttccttccaaaacagataaattttacatagtatagtagaaaattactgtttttgttcagtattctagagttttagtgacttttacttagaattttcttattcattgccagaaatagtagctctactgaattatttgaaactttgaacaattacggaagaatcaaatatatttaataggggtcttacattatttttcatctttcaaatagttttcaggtgctccaaaccttccagtctatgttgtagattgcagtagttctggaaccagtattttaacaggatctgcaattcaagttcagaatattaaaaaagaccagacgcttaaagcaagaattgaaatacctgtaagttattattgttactcattgatattatattgagtcttcatacaaatagtcttcaactgcttaataacattttttgcaaaattgttaacttctgaaaatgaggtatttgtggttctttcagccaaagcaaagcaaagacaatatgaaatgctgtaatgactattttaacattttgtgtcaaatattagtaattgtcttgatttttacagtgtcttttatagtgtctataactattattgatttacatttccctaaaatatttttcttctattaaaatacataattttattctttcgcttttttttttttttaaagagatagggtctcactctgttgtctaggctggagtgcagtggcacaatcatgacttgctgcagcctccaactcctaagctctagtgatgtgctcacctcagcctcccaagtaactgggactatagacaaggaccaatgcacctggttatttatttattatttattttttgaaaaagagggtct

SEQ ID NO: 88610 - DNA, 1070 bp, Homo sapiens
actttggaagaccgaggccagtggatcacctgaggtcaggagtttgagaccagcctggccaacgtggtgaaacccatctctgctgaaaatacaaaaattatccatgcatggtggtaggcgcctgtaatcccagctactctggaggctgaggcaggagagtagtttgaacccagaaggcagaggttgcagtgagccaagatcatgccactgccctccagcctaggaggcaaagtgagactctgtctcaaaaaaaataaaaaggaggggaatccttttagtccacatacaattgtttttattttaagaatgtggccactgccatttataacctgatggtataaaatacggaattattaatagtataatgccatcttaatgacaaaacctgtgagtataacaatgtatgagatggtcttccataatattgaaagtaaattcttcaggagtgtaaaatttcagtacagatatcactcagtgtttgtgttttcttctctttctagagttgtaaagatgtggcacctgtggagaagactattaagttgcttcccagtagccatgttgcaagactacaaatattcagtgtagaaggacaaaaggcaattcagatcaaacatcaggatgaggttaattggatagcgggtgatattatgcataatcttatttttcaaatgtatgatgaaggagaaagagaaatcaatataacatcagctttagcagaaaaaattaaagtaagtatctctaacagattggttatttgtaagaactttttaaattttatgtttgtaagactgaacaagccgttttatgggtagcatctaaaaaagaagcttgtcacagaaaagttatactatcatttcaaattgtaagcagaataagcttttttcatggaataggttgaaatgcaaatgattcatatgtgacaaaattatacttagaaaaatgattttgacacttaaaaatctaggttttggcattttgtttagttgtgctcttcctgactagctgtttttctgcaatcataatcaacatcaccaccttgataaagctagcaataaattggtagcagttct

SEQ ID NO: 88611 - DNA, 1088 bp, Homo sapiens
taatacagaactaaaaacacctaagaagagattaaggccaaagtatggccagaaagttagatcaaacttcttttttctcaccttgctaagaataacgtccacctagatctcattgaaagctttcccataaataggattcttttcaaaaaataattgaatattgcttttcagaattaatcacatgatctgatttatatgttacttttaaacgataatggccacagtgatacttttgtggcagagctctaaagaaatgacttaagaatttttattttatctcactaaaaaaatagggcaatattaacaacaaagacaaagaggatgcctttgtatcatattagtatatgaaccacaccgtttctgaccataaagagacttttttcttgggggtgaagaagacggattataatgtagttttaagagtaagataagtggcagtaagagaacattagacgaagctttattattgttaaatatctctttttctcctaggttaattggactcctgagattaacaaagaacacttgctacagggtctgcttcctgatgtgcaagtaccaacatctgtaaaagatatgcgctattgccaggtttcattccaagatgatcatgtgtctttggaaagtgcgtttacagtaaggtttgtggactcattatattttgcagcctatggcaacaaaatactgtcctccattgcacatatatgaaagttgtttttaatgtaaaaatattacggtttctatgaaatataatagattgtctttggaataaagtgtcattggtgatagcgattaatttttgttatcactgtaatcttgcactgaattggccttctagtagctggaaccttcattaaaggaaagtttagtgccagtaacagtgaaaacacctgcaaaatgacaaagacgtgaaaaatacaaaagatacagtgtgatcagtcagtgttgttcagaaggaaaaatcctttcattgcttagtgagaatttttaaagctgagagtccaaccagagttaatatgtagaactcatattgaagggacagaattaagtgaatgtgtaaaaaaaacctttacactggcctatcaatt

SEQ ID NO: 88612 - DNA, 1034 bp, Homo sapiens
gaagagcctcttattaaggtatcatgtacaaaaatctaaagacaaacagtgtgtatatctggtaaataatgttgcaaacagagggaaagaacaagtataaaagctattcaggtagcagaaaggaggaagtataaagaagagggaaattaagaaaagataaaataaagagacattgccagaaccttttagatcccctaccccttgaaagaaaaaattcagtttctcctctcttgaaaataaaatgcatggcatgccattattgcatgggtgctatttattttctgtcatgttaccaagaaacacatctgtacgcccatgggttaatgacaaaacattttattttgtttttctgaacactaagtgataccccctgtctttctcaatgtacttttcctcactaggaaaacacacagagtataagtgtaagaggcatcaaatttattccaggtcctcctggaaataaggatctttgttttacttggcgtgagttttctgactttattcgagtgcaactaatttctggacctcctgctaaacttctccttatagactggccagaactaaaggaggtaagtcacttcatgtcttcactgaaagaatttaatatcatatggcttattactttcagattgtcagtgaatcagaatagatatattttgttgctgaagtaacaactaacagttgttaacagtaaaaataacaaaaaagcaaggtaatgtgagtcttaatactttgttatttgattcatcattgtgtcctcatttgttaaaaataatgagtgtaataattcagatcttaaaaactacattacagaggatttcaagcatgcataaaaataaaaagaatagtgtagcaaactcccatgtgccaattacctagtttctacagttactgatttttgccaattttgttctttgttttcttatactaatctaataactttttattggagttttaaaaagcatatctcagacatcaagtcatatccgtaaatacttcggtatgccttcctatgcaagtacttaaattttaaa

SEQ ID NO: 88613 - DNA, 1069 bp, Homo sapiens
ttggggtaaacggtgccatagaattactccaagggtctttgaatatcatataagcaccgaacattgtgagaaacacatataggcctattggttttcaaatgtatacaggtgctgctggtgttaataaaatatttaaagtcactacaagtttataataacttattaagcactttttcacatctgtaggtactaaaagtacatgaaaaggtgatattttaaaatgggagtccttgtaatttagtaaggtaggaactgttgtattgaagtctcttgttcttttatggtttctggaactatttcttgcctgtggaacactcaaacttagaactgaattttgtgcttagactaagaaagatccagataatttaatgttgggggctctctgtattatttctgatttgtacatgctcttctctgggtttaatcttctcatcagtttctctaattgttttccattttttgttttaaggatgactacgacaaccatactggaattgatttggttggcactataatagccaccattaaaggctctaatgaggaagatactgataccccactttttattgggaaagttagaacacttgaattccccttcgtgaatggttcggctgaaatcatggtaaattttttatatcttttggtagatagaatttctgtatttaatgcttttaaccaccatattaagacaccttttcttttgtatagctatgaagatgttctaatcatagcactaaattgggaagtcagctgaaatattttctgtttttgctattacaaattgaacccaagatctttataagtaagactctcgtttttcctatgggataacagctttctctgattctagttgtttttaactttagtgacagtacgtgatgttttatgtttcattgaaaagctgccgttatgtggatagaaacaaaaaatgtagcccaggtaaattttaattaaacaacttgtctttgttactcatttttttctaaaatgaaaatagttttatttgtattttaaaaatatacagtgcaagaacctccataaataatcaagatattgtcacctgtcagag

SEQ ID NO: 88614 - DNA, 1314 bp, Homo sapiens
catatcgatttagattttttaaaaatactacttctctgtaaattgtattgttatagtctaaacaaaaacagctactatcgtttcccttagaactgtgtgaaaaaatcatttcagataaaaatatatttgtgtcatttactagttatatgttttggtcttaaagtatatcaaaaggttttttatccattaatgagaaagacacaatttaaaaaatctttagagcttttcaaaatctcttgttctgtcacctgggactttgatgggtctatttccatgttaacagctgtaacttaaactcagcattgggctttgtgattgtttttataactttcacactatcagctctttcatgctgctttcaatttagaggttagaatcaagaagattttacaggtcaaaattttaagtggccatctctaatgtgaaggaaataactttttcttgaaattttttatcatatatacttttcacataagctgtttattgatacgatcatttggctttcaaaccaataccagaaggtaaaaagttgtatgtcttgggtagtggtggtggtgataatggtttaatggaatcttaaggatcagcctatgcctttggcctttaaaattaaccacttacttgaaaacagcataatgagttatgtaacatttatatgttgtaaattttctttttaaatcttgttttcccctattgtttgtttatatgtacagagtctggtgctggcagaaagtagtcctggaagggatagtactgaatattttattgtatttgagccccggctaccacttttatcaagaaccttagaaccatatatcctaccgttcatgttttacaatggtaagtttctaggaaataaatggttaaactccgttgttagtgatactttagataaccttgttttgctttccattaacttggtgtttattagctatctaaccactttatgacatattttagaaaagtcagtttttaaattatttaaattatctcaattttttttcttagatgttaagaagcagcaacaaatggcagcacttacaaaagaaaaggaccaattatctcagtctattgttatgtataaaagtttatttgaagccagccaacagcttcttaatgaaatgaaatgtaagtcattttgtattcaagacaaaaattatgctttggggaatgatgaggcaggtgagatcgtgatacacaaacaagcttccactttcctaaattacaagtaaaatacagaatgtttcagaaaggtggtaatgatggttgatactgtcattgagaattcttaagatgaagtatttcttattttaa

SEQ ID NO: 88615 - DNA, 1026 bp, Homo sapiens
cttaaatctaacagaggaaactgggttggtgatgctaccttgatacttaactgccatgggttccaaagcacagaactctctggcctgtcctcttccttccacttatcaatccatcatttacttttttcacttgcgttgtcactgttctagtttaggctgacatttgaaaagttgtctaattcatctctctgcctctggatttttccctccagtttatcttacatattgctagttactaagtttttgaaaatactactgtgatcctgtcatttctaatctcagaaactttaaattatttctccttttttggagcagttgaaataagttgctcactacttactattcacttatttacaataggttgttaaaattacacactgtcctacactgctgaccagagatggagatcgaattcgaagtaatggaaagtttgggggccttcagaataaagctcctccaatggataaacttcggggaatggtatttggagctccagttccaaaacagtgtctgatcttaggggaacaaataggtaagttgaataagtacttaaatagcaatttctaatttaattttactcttatttttctaagagcttatgttttgagaatctaacatgaaaaattaacaaatgtaagtaagtaacaaatgtaagtaagatgtttttgtctactactttcagcttttttatatcaggtagtttagagttatgtaaatagtagctttatcctttgtattttcattcttatatgtagtgcatgcctgtgttcccagctactcaggaggctaagacaagagtgtcgcttgagcccaggagtttgaggtcagcctgggcaacgtagcaagactccatctcttaaaaaaaaaaaaagaagaaatttctgtcattattgaataagtcagtattttattacataatcataatacttatttctatcttgaaatttgtaactatctagaacaattaaggcttattagaaagtgtatgacatgtgatctcctgcccctttttcccttccacaggct

SEQ ID NO: 88616 - DNA, 1154 bp, Homo sapiens
gcattgctgccaagtttgaaccacagcatgctcactgtcagttacacttacacatctttttattagaaaccccctgttactcatcagttttcatttgggaaatagtgatttctaacaacacaatatttaatgtatttgccttctccctgcaaaatttgtccacatggaattatattgaatactgaatatcagacaagatataaacactggcttgagagagtgatccaataaaaaacagagcacttttatatagagaactcttccctgacacagaagtaaacttaagtcaaacaaagaaaattaaatttaacaattttgtgctgggatcttaactatgcttttttatttcatttgtttatattgaatgttttatggctttaaaagtagatcccctatgttaccataacacaaattccagtgttgctcattttttcccctaaaacatgagtttggtttaatagcagtaatttaatcaaatgcatttggtttctttacagatcttcttcagcagtatcgttctgctgtgtgcaaactagacagtgtgaataaggatcttaacagtcaattagagtaccttcgcactccggatatgaggaagaaaaagcaagaacttgatgaacatgagaaaaatctcaaactaatagaggaaaaactaggtaagtctttgctttttgttaacttctactttctttatatggagataaatatttatgatgagagagaatccaaccgtaagaaaaaagaatgcaaatgattcagaacttaacaaaaactcttaacctccaagtcctatctgataaatggttataaactattctttcaccagaagtaataggcattctcagtatactttcttaattctttttctataaattatgacatattcatgtttgcatttctctaattccattgtttttattgtaaatttaactttctacattttccatcttcacaggtatgactcccatacgtaagtgtaatgactcattgcgtcattcaccaaaggttgagacgacagattgtccagttcctcctaaaagaatgagacgagaagctacaagacaaaataggtgagtttgtttgacctgagaattatgcttggttagtttaccaaagttcttgggtctcatgatagctttgtttttttgagatga

SEQ ID NO: 88617 - DNA, 1024 bp, Homo sapiens
aaccccacaaaaaaccaaaatccaaaacacttcaggtcccaaccattttgaataagggatactcaacctgtagtaccatgggagccaatcttccccacagctaattctgtaattaccattttgtttcttctgtaacaacaaacagtttaaataatttccaattataaagatagataggttaacatcatcatcgttttttaacaagataacttttatgaagcttccaattttaaaaaagaaaaacacttatctattcagtagggaagaaacaatcttatttattaatggcctgcatatttagaaagggtttaaaaacacatacatttcctgggacacaaacttacttaccaaatgtatgtccttacaaaataacttcacagatcaatagtcttgaacttacacaaagacatatatatgacatacattaggttaatatacatttcaaatgtttttgcagcaactttctaccagaaagtacactaatgtgagaatgtatgttctctttaaccccttaaaaatagtaataaaaaattacaaaataatgtaaatgtaaaattaaggctgagactacatattctagtattaataaagtcaaacaaacaatagttataaaacttggtgctgctgaatattttatatatatatatttatatatatatatatatatacacacacacacacacacaggataagtcttttgaaatttgaaatgctaccactgtcacaagttcactcattgatttaatgttgttctgggtatcttaacatttcaattcccaaatacctgtgcttttaaaatttttatcctgaattctgcattgagtttcctcacatatttacaattaaacatctagcctctagaacctcccttacacaaaagacaaaacatctttgttaaataaattcacgcaaaagtaataaaaaggttttcaagaaatagttctgacatgttcattatatttatactgaaaaatagtacatgtacttttcttcaggattaataaatgccatgtgccagttttac

SEQ ID NO: 88618 - DNA, 2007 bp, Homo sapiens
ggacacgggtgcctatgtattttcactaaaatatacatggtagctccatttactgatgcggttgtaatgagctcacatcgtgtctgaagagatggcaccagggaaaggtgtgccataagctgctccagagcttttggtatgctgagtgttgacagagctgcactcttaacatcaagagaactgtcaggagcccagaaccaaccccaggtcttggtctccattggcgagaacacaggacgtggtggttcctgagcagagagggatctgcagatacaggcttggcgctcggggtggtctcgtggccaactcttcatgcccctgccgttgtagtggaacctctacatgttttagtttgcttcacctaaaataatgctgatctagagatagagaaataggggtggttatttttccagattggagagttgaaagtccctgactgatttcagccattttcctagtgcttgtcggatgcagagacaatgttgaaatcccctaaacacagttctcagtggcaaaacctaggaaggctcatgttcccagagaagggaccacatgagccttctcccatgcaaagcttcccccagcttaaatagttgataaggactaattgtttaatgagtttatttatctacagtaggttagggatcctgggttctgtttatatgaagttcttcccagtttgtgaattctagtacagcagccatgcagccaccttatttcatagatgccatctgtgtgtcctcttgactaccttctatttagaggaagaatgagagctttgtgtgtttaactgagcttatagtaggacttctttgcatatgtatggtactgaaaaatcttaatatacatctttaatcctttttaggttgtcctttaaagagtttttgactagtttctttttcttgacagctcttctctttggacacatgggccttcttagagggttcagtctaggacccggctctcctggccctgtgttgagggtagctggtccctctgtccctgtgtctgctagcactagactttgttgctgcagattgatccagtgggtacataggctaattaatgtgagtctttttccttgtttaaaggagtccctcttgctgaaagtagatgattactattgctgtagtgttaggaaagtattaagtttgtgctgaaaatccattgccatttggtacaaatgacatttgttctttctgtgaaagagatgccctcgagtgtgtttgtacacaaacccttaggatggtgagttgaagcatcaccctcgcgctatcttcagtgacgggtgacggctcagggagatggcaggcagattgggctctaagtcattattctctcagttactccattggtgaaatggccctttccctctttgcagttcagtctaagtctcgtatttgctttgctgtctgtgtgctgaagctcgtcccgtgtgagttgctgtctgccccttgtcaggctgtgaggtgctcgtgtagacctggagcatgcaggctgcctccgtttttgggtactgtgttgtgttttgctctgtctaaaaacatctgcatagttttcaactggaaaaagaaaaaacttaaaaatgggatgtcctaaaatgaaagctgctcaaagtcacagaacaaccgagggacaaaggagattggatgactgggaagcgctggcccggaacagcccctgcaactgtggggcctgcacacagcccttccacagttggcactgcaggtgcaggccaaccctttaaagaataaacaaggaagtcagctctttcactttttacaagttggcaaaaacagacttccggggaatttcgatgttttcccgtgttgtagagcttccagggtttaataaaactggttaaaaattgagtctttccctgaagtaagtgctctttccagatgaaaactactcttttggttttgtttgaaagtaagaaagggaggggaaactttgctcttttaataattatgttcagcctatgatgaagtatttgattattagaca

SEQ ID NO: 88619 - DNA, 1156 bp, Homo sapiens
tgtacctccatttttttcccacgttttccatggaaggtgaaacctctataatcctaagcagtttcctgctaaatttgagaatttggttttcacagtaaatgagaggaagtttatttggatcttttaaaagaaaagtatgggttgagcatggtggctcacacctgtaatcccagcactttgggaggctgaggtgggcaggttgcctgaggttaggagcttaagaccaatctagccaacatggtgaaaccctgtctctactaaaaaatataaaaattaagccgggcatggtgtcccatgcctgtaatcctagctacttgggaggctgaggcaggagaattgcttgaatccaggaggtggaggttgcagtgagccgagatggcgccacagcactccagcctgggtaacagagtgagactcaaaaaaaaaagaaagaaaagtgtggggttttttttttgttttttgttttcttttcccttagccagaacatgtgggctaacagggtgtgttttctttcaggaatggctacaagtttctgtactgctcggctcgtgccatcggcatggccgacatgacccgtggctacctgcactgggtcaatgacaagggcacaatcttgccccggggccccctgatgctgtcccccagcagcttgttctccgccttccacaggtacctctccggcaggcagccctctgcccaccgccccagcatgtgggcggggctgggcccaaggtggggggatgtgtgggaacagaagtcagatgttggagccgccacgcctctcccagttctttggtccctggtggtgtcctaccacatactgctcacttgccatgtggcgggcctggtgaagaaaggcaggttctaggaaccgtcaagttttctccttccctaaacttcatcactcaaattttcttagttatcagactggcaaagaaggagaaggaaagattccagttacaaagggttgaagaaattgggtggttgtgagcactaaaattttaggaccactcactggggaaaacgaccattttgagattggtgattgtatttgtatttttttcttagagaagtgatagaaaagaaaccagagaagttcaaaattgagtgtctaaatgatatcaagaatctgtttgccccgtctaagcagcccttc

SEQ ID NO: 88620 - DNA, 1048 bp, Homo sapiens
atccttttttgtaaaacaattcattttccaaaattttgaaatctagattttaaatcttagaattaaacatctatatttgatagtaattttttacaattcgatattataagtaacatagccatttttaatacatgaaatttttttctactcctcttgttttattgctcactagctgtcatgtctgtggtgttctgtcttactcctcccacgctgaatatgtaacactttgatttcagttctgatagaatgcagaatttctccaatagaactaaacaacaaaagatggaaagcaatagtggaaaagtatgttaagctctacaaaccagagtacactatatttacaaaattttaaaatcctgaatgaatcaataaatttaggtaattttttttgtcagtgtcaaaatactagctgagaagagtttcatcataaatgttctgaactctacttttaaatatcattgattcccaaagaaatttaagctgataaaaagtaccagaatttcttaaaaagagactcttcctgtccttttccttccttcattcagtcttttaaaggttatttgtccttctcttcactaggagaataaagtatgagattttttacttttctactgcttgacttcaggaatattaaaaacattattaaaaggccgggcacggtagcccatgcctgtaatcccagcactttgggaggccaaggcgggaggatcacctgaggtcaggagttggagaccagcctggccaacatggtgaaactccatctctactaaaaatacagaaattagctgggtgtggtggcaggctaattactcaggaggctgaggcaggagaatcacttgaacctgggaggcggaggttacagtgagccaagatcacaccactgccctccagcccaggtgacagagcaagactctgtctttaaaaaaaaaaaaaaaattataaacaatttcctttaaaagttttgtcttatgcatactaaaatgtgtaggtgggcaagaaacgtattcttttgagaaaaacttgaaatgcttacacatcttaagtttta

SEQ ID NO: 88621 - DNA, 1125 bp, Homo sapiens
agcattctttctcccagttcagttttggactcacttggcaacacagaacatgatctctgaaacttttcagagcatggacctttaagctcaaggcagcctccaagctgggtgtagagaaaccacgagctgcttatggcagacagcctggagagcagtcagtcagtcctgtggttgggtgaaagttggcctctgaattagctggagcattggaggggctcttggttactctctgtcattccagtccccagaatggctttcactgaattgtgctttggcataatattaggggtgtcagcatctaatgaataaaatgtgggggtgtattcagtagctggaagtaaaatctgacattaggactgaagggggggatttggtttttattagtggaaaagttggggatggggccaaggcaataaagccacccctggctttagctgtacttcctctcctttgagcctttctggagaactccttgcagaccttttgattgtgatttgaatagtgaattgaggttgaggaacaagagtaaaacccttttctgtgctttgaactttgtagaacttgattgcatgttccagttagttatattgagtcattgaagggatttttccgtagaagtaatgttataaatgggctaggctcaggcagacttgccagagtttatttaatctagcatgtgtccgaaccatactattctggtaataatagttccttacaaaatgtagctctcactaatttattacattggttctgttggaagatgaatctctggtttctcccggggatgatgtttgttttttctgtttggctgctatggccaaagtggatgcagtagccgcaggttccaaagggtcttgggcaggaggtcagggttctttggtgattctgtgctgatcctgaactttggggaaaaagtccctaatggcagtcagtactatccaggttgctgagaaaggaaagggaatgcctcaggccctggctggagcagcctctcagatacaaaggagaatagtctcgggaggtccgtgtgtggaaatgcgtagaaacaatggtagcatgagactgttaggttgaaaattaataaggctaatgatatgaaatctggcatacaagtgagtagtgtca

SEQ ID NO: 88622 - DNA, 1033 bp, Homo sapiens
atctgctaagcacttactgtggcataggtcttggaactattcagttcatagttcttttttaatgagaagaaaaaagaaaactagcatttattaagcagctggtggtttccaggcaccacctcatgggatcctcacagcagtcctacctgacaggtgctctgaaccctgctatatgaagggggcctgtgaagcttaggttgacctgaaactgaagaaggttccatcctggaggtctgtatcaagtgggagagctgtggtataaaactccctgtctaaattcagccaagtcatgtgcttgccggcccacccctaacatgtttgtggggacccagtcagaacaggcttatcaatacagggccatataccatctgtttaaaccagtggttctcagctgcagacaattttgcccacacaccgcccccacccgccgccggggacattcagaaataaccggagacatttttttggctgtcaccactggggagggtgctactggcatctggtggttggaggccagggctgctacactcctcacctcccaagcaaagaattatctgaccaaaaatgtcaataggctgagaaaacctgtatctaaactattaaaagctgtaaatccaaagaaaagataaatgttcgaggggatggatatcccatttaccctgatttgagcattacacattgtatacatgtataaaatattattatatgtcctccccaactatgatatatcattaaaaaatttttttaaagctataaatccagtcaccacccccatggcccggcctccatggccaccagtggccctgcagaagccttgtcctttgccagctgccctagggagcctgaccataggtctgctgcacacatctacactgaccagggcacaggtctggggcagcttggcttgtgataaccacctgttcctttagctaaattgtcttcaaaaaactttcctagaggtctgaaatgaagaagaaaaacacttactgcctttgtattttgggtttatgatacacagagccttctaaagtgc

SEQ ID NO: 88623 - DNA, 1066 bp, Homo sapiens
aatctctgcctttatattcacatggcgttcttctgtgtgcatgtctgtctctctgtccagatttcctcttttttttttttctttttgagacggagtttctctctgtcacccaggctggagtgcagtggcgtgatcttggctcactgcaagctccgcctcccgggccatgccattctcctgcctcagcctcctgagtagctgggactacaggcgcctgcaaccgcgcccggctaatttttttttttttttgtatttttagtagagacggggtttcaccatgttagccagaatggtctcgatctcctgacctcgtgatccgcccgctttggcctcccagagtgctgggattacaggcgtgggccacggcgcctggaccagatttcctctttttataaggacatcagtcctactggattagggccagccttaatgacctcgttttaacttgaatacctctgtaaagatcccctttccaaataaggtcacattctgagctaccagaggttaggagttcagcgtttcttttttggaggatatacttcaacccaaacagtgggttttgagagtggggataacacatgtgacatcctctgggtttaacaggatgtctagttagagcaatatttttaaagatgcttttagttacacctatcttcactaatgatcagaaagaaactcttaggaagtaatttttagattacaactggagatttttgttcagacttgtgactgccaaaatttctgcatgttcctgaatgtttaatgacagtatctgagttgtctcattttcactcttggtttgtttctaaagtcatttgaaggttggcaaaatgactaaagaaagaacagcagtagtgtcttatgagaaagtaaaccgtatctatatcctggcatagtttcgtgaacatgttagccaggttctcatcatgctctgtccctccatgttatactctatttcttttttcagatatgagccttcttggagctttgttgcttaaaaaaaaatctgtcatgtattttcctgttctgggctctacaacgcttttctttccttaaaagtggctct

SEQ ID NO: 88624 - DNA, 1074 bp, Homo sapiens
attaatttacttagcatacctcccctccacatatatttgcaatgcttcatttatctttcattaaacttttagatatagattggcgcttactcattctgttcctttaataaagccatttgtttttgtaacacagcctgtattttaatctgatgggatttttctccctttggttttgtgacttctattttcatttaagtttgtatgtcagtatgaatgtatctattctctcttttctttcctaccacatgattttagagtcaattttcactgctggaaatagagatgctattgatttaggtttattcattggtgtccacttgattctaaactcttttctcaattaaaatagttttcaattcattcctttagaaatctgtgtcttctcactccacgttcagtgctttttcttttatatcttgctgcattaagaactattcaacttcacaagagtacactttcttattttaagaaaagtaattatggtttttctcctaggtggcaaatattaagaaggagactcatattgtgtggtacaaagatgagagggagatatcagtggatgaaaagcatgactttaaggatggtatatgtaccctgcttataacagaggtaggcgattataaatgtaaaatgtaatatattagctctctaccctctatcttaccccaaaacagtaactagattctgtattcctttcatgaccaggggatttatattagcttacttccaactgctgtaggaacacaaaagcttctctaaccttgtgatgtgtgtggatttgttaggtagcaaaccagtatgagctgaatgccacaactcttgcttttctgagttgcttttatccatatatgggcagtgaagtggatcattcttcatttgtgcttaagcctcgtggtcctaaaagtacagagacatcagacatggtattcatttaaggatagatttttatctacttcttgtctaaaagagcacagcatttaaatatatcactataaaactagtgatcactagtttttaataaatgaaggcagagtaaaaagtaaggacattaagcctcatatcaattacagcctt

SEQ ID NO: 88625 - DNA, 1227 bp, Homo sapiens
agacccgaacttcgctcctgtgcccaaacttggaactctggaaatgtggcttcgctcactggcgccttgagcttgggcgactgccgggcccgcgaaacccgacccctgcagagctgactccgggactattttagtttctaacgtcaacttgcccgattcaagagggtttgcgcaaaaacgtagcccgttgtccccctgctgcagctgttgttgcagctgtgtggctgcgtttagtaggaataaccaactcaaattgggaagttcttcagctcagtatccgctcctgtaattagaactttttttctttaagcgatgaaattttggacagagagatctggagtttagtttgtgactcgaagaaaaactccaaaatgtaataccttgtcccatttggggggaaagtttgggctaattcaattcgccatggaagtgtcttctttttaaagtagtttagtaggtatatgaatgtatctgtcagttcttgagagacctatggatttagcagagattttaacttaagtgcaaaaagtttcatatttaaaggcgaataaagcgaatatttcttaaaattattggtatttgtttcatgttctggaagggctctaataaacggtaatcagaaaagcactctattttcaaaagcgaggctttactggcaagtcagccctcacagctaattgtctttgtccagtggtgagaacttttgggtgtggcagtccaagagaacgaatcctaccttcaaccggaagtttgcataagaaatgaaacttggtttacttggaacggaagcaccaacttgaaatacactttttaaaaattgtggttagcaccagaaaataagttatacttaggctttttttttttaagtgcattgattaaatgaggcggtatatttggtcagggtttagaaagcccaccaaatactaggtgctatcacagtacgcagtgttttgtaagatggtggttttttcttgcagaatgtgtgatatttctcagaatattatcaatttgagtgttcgttttgtagaagaagtttctaggttattttacatttattgccactttgtaaataaatgctggactctaggattctaaccacagaactctaatgtatatattggtatggattaatcccattttataaatgaacatagtttctagagattctgaaaacttcttgtgtcctttggtgtgtggggaaagccactttgagaatctcttctattt

SEQ ID NO: 88626 - DNA, 3940 bp, Homo sapiens
ttgtgcacatgtaccctaaaacttaaagtataataataaagcaatttcaacttttttagattaaggggtataccctagttttctaaacttcgatgagagttgtgcatttgctgaaggcttattacatgaagagtgacagtctaaattgtttgaaggaaagtaaaatgaacaacaaactagaatcagcaaagaggaccctgacaatatcagaaatgatctgctccttgagatcatagcactgttcctgatttgactccctccaccattatttattctccccacacttttagtttggtagggaaaaaaccccacagtttctgtattttggaacagtgactgtgcagccaaactccctatcgctgaaaggtttctggtggaaaataactcatagatcagaatccagcctccttgaaaaagtaaaggcctaggtagtaacttcctcaacattacactgccagtttttgatagaattaactaccttaatttgttagaattgagactaacagccgaatctcttcattctaacaatgctttgtagcttctaaatgatcccacacggggtttttcaaggtcttcctcctccccaatcccttaattactcagaaacatcttttctgaactcacagcatttgataattatgtaccatgttaggaattatttttcattattgtcacacgttttaagtttagagtcatacttctggaatgaaaactatgactcatttcataagttgaaccaatcatctcatttctttatagttgcctccccaactatattaagctccttgaagataggacacatgccttacatttcttaactcttagctagtattcaacataattaatatgacgtttgatacatattagtttaattaacttcataataaaattgataagattaagtattgaatgtgctgaagaagagctctatatgaggccattgtcagtgctgacccaaaaaaaaaaaaaagcttttttactttaaaaatctattttataatacatttacaattcaaaaaagtgcgtgattaaaagaataggaaatatatcagaattcagaaaacatactactttacaaccaaaactaagcattttgaaaatgtatctagaggaccctcgtaaatttagttatatgagattttatataatagattaaaaaatcagatgtgtcagccgtttgacctcatcagtttctttgttcttaaaatagctgacatttctgcatcattagggaaagacaatgttgtcacacaaaacagactatttttaaagatgtgctttggcttgcaaaggcgtgacatgcctaaaatattaaagcgatatggactggtaaacgtgtcactcattgggtttcaacctcttgctccaagtccttgcgtacatttaagaattggaggaataatatattctatatctctttgtattttttaaagacagcatttataacagacgaggaaagtacatcctcatgtagtttagatgtgaatgggatttactacccccaaaggtgttatagaatgaaaatatgcatttatgaatagttttaagtcatgaaaggcagcatcctaaaagttgattaaagaattctaggaaatttgggaacagcatatatatcataacttctgtgctatgtaggatatatcttttcaacaatatattccagttgccatacggtgctgtattggatgggctggaatttgtgactatcctttgtggaatttcctattaaaatctgaaaacagatttagctttaaaaaatttgaggcagagcttttctaatcattccataattgtatttagtctggacgatatggttataatcaaggaaagaatgtaagaaattactttttaaacacatcggaaacacattcttagggtcactttggagtgctgagatctaggtggtagttcattctttgcagtccacagacttatttttagaccaatggcatagtgttttgccagatcatagctaaatgttgttttcagaacgtaagctttaaaattgttatcctggtcagagtgaaatcagtagtgcctattttagacctgcttggaagaatataactcaatgcagtgtcttacttttgctgctgagcggttttgcagactaccatcttccctgcaactctgaaggatggtatggtagaattttattgtctgatgactgagatttttaacttgaaacaaatttttgtagtttttaacagattgagtattgaaaattgcctttttattttaggtattattagacattctttttaattttaacttaaattttaccgggataaatttaggtaagagagcaaaggtagtttctacgtttaagatgttttctaaaacttttaaaattattttaaaagcttgtgctctgatttctgtttagagatcttagatacttccagtgatttagtgtgactgtaatgcaagaaactggtttggatagagtgcaatgtctataaaaactatagatgaattcccttcagtttttttatactttactattagcctttcaacaaatagtttttttgaactacttttgcctagtggtgagggtacaataaaaaatgttagttgaaagtgaaagctttaacaatatttgtcaatagagattaggagatgaagacctgttccatcagttagtcattcttactattcttcacctttctgtccaccgtactatggaatagccagtttaggctaaggctgcaaagcagggacctactgaagatgaattagtatccctcagcacccctatactgctgaagtatagaacttgggagtttcctaagtacctaattttttttgcttcttggttttttattgttatcaaatcagcagatttggttatcagctgttgttagttatatagcagtacaggacatatgtaatcttgttgagatgtgtcttctaaagacacatttctgagtagctcaaacatatcaggaaagttggttctgtgtacttttgttaatcattgttttgattcaaacttaagtaatcttagatgttgatttggtttttattgtatttcctttcctaattaggacttaaccaccaccatgtcgagcaaaagaacaaagaccaagaccaagaagcgccctcagcgtgcaacatccaatgtgtttgctatgtttgaccagtcacagattcaggagttcaaagaggccttcaacatgattgatcagaacagagatggtttcatcgacaaggaagatttgcatgatatgcttgcttcattgggtaatgctcagtttaaatattaatctattggatagaatttccatggtgcctttcatcttgatttcatgagtcttaaagctctgtaaagcctgtctaatgagtctactaaggtttgagtaaagtgtggaacagtgtttcccaccggatcaccagcagattcgtgaccctgtcttaggattgggttggggttcgtgtgtgtgtgtgtgtgtataaaaacactgatcttgattatggaagcagtattattccttctgacattccaatggactatcatatactttccagactctttaataggccctattcattaagaaaactttccccccaaatagtttcactctcatgagtgcaaacagtaaactgtatgaatgataatctttgttaccaaaatgtttactgtcattaatagttgatatgtattgtaatgtaattaaaattatgaccccttttaaaaatttagggaagaatccaactgatgagtatctagatgccatgatgaatgaggctccaggccccatcaatttcaccatgttcctcaccatgtttggtgagaagttaaatggcacagatcctgaagatgtcatcagaaatgcctttgcttgctttgatgaagaagcaactggtaagtgagaggtaacctttaattataaagtgatttaatttttagttatggtaactaaaatatacagtaacttaa

SEQ ID NO: 88627 - DNA, 2580 bp, Homo sapiens
atgtgaccattcatgccacttgaaggaaccgtaaggcttagattctttaaccatactttttattactttgtttaggcataggtttagtctctcttatcaagagatcagaagctgaatgtggaggcagaatgatagagcaaatgatagagcggagcagtgctgctaagcagctaggcatttttctaggcacttctctgctgaggctgttttaagtaggtggacaccctgtagttcatatatttgcatgtttatagtttgtaacatacagaacatgcttagtcaagtatagatattctttgtaattaaccctcagaatagtatgtattctgatcccttgttctttattctccaggcaccatacaggaagattacttgagagagctgctgacaaccatgggggatcggtttacagatgaggaagtggatgagctgtacagagaagcacctattgataaaaaggggaatttcaattacatcgagttcacacgcatcctgaaacatggagccaaagacaaagatgactgaaataacttcaaattccagccaaacgttccttgttgccactttgggtattctgagattttctcttgcatgcccttagctttacagcttttgcatttcctgttgtatttattctcagccattttgggcatatgtatctttataatcagactggaaacgggactttctattaatatcattttcagaataaaaaataggataatttaacctaccagcccttctcccccaataactgtggtctatacagagtcaatatattttttcagagaaagttattcgctcgattttttctgaatcataattaaactttatgataaaatacttacttgtttaaacttcttatttaccaaacttggcttttgttggtttcagtcgtatctcccaaagaaaggtagatgagggaaatcctagaaaatgatatggttgttagctttctcttcctccagttttcctaacaatcctatctcctctactatccattcctcctcctcctcccaaggatatccaattttaactgccctaatcaggttttctgcactttgtcttccaatttttaaaataatttcctgtagaatttgcatatatgatagtttccatagctttaagtccttaagttgacatacctgccaacatttccactttatttaaacttttgtaatttctggtcatttaaaattagaccaggttactgagtataatttcaatttgtcatatttttaaaaaccattttggcttaaaggttctgtggaatgctaccaaagagagatttttatgttatgttttaaagtgctggaaatataatgcagtattttttttattatatgtagtttttctttaacacagcaatgtgtattgaaagatatttgtttatgcagagattcaccatgagtccatgtttgagttttggacattcctgaccttcccacaatcaaaacagctgaacctgcatgcctgggaaagtgaggtcattatttcagtcctaaaaataacttctactatttgcagaaatgcagaactgtttcacagttaatcagggagtggcagacagtttcgttctttttcagctttaaaaatctgactctcaaagggcttcaagattctcttttttttccagacagggtctctcgctctatcacccaggctggagtgcaatggcacgatcacagctcactgcagccttgacctcctgggctcaagtgatccacagccacctgagtagttgggactacaggcaggcaccaccatgcctggctaatttcttaatttgttgtagagacaaggtctcattatgttgcctaggctggtctaaaactcctgtactcaagtgatcttcccacctctgcctcctaaagtgctgggattacaggtgtgagcaaccatgcccagcccaaaactctgactctcaaagagcatgagttttaaaagatttgaaatggagaaaaatttggttgaaaagatttgacaattagcctatgaagatgagtaattgacaattactataataactttaagttttatgctacgattaacatgactctccttggacaaaaccattacctcattcagtaaacaattactaaaagccttctgggcagcaggcctttgcagccaataagatagatcagctagatcctgtaacgtgggaaggccagtgctataggaatagaaggactagtcaaagctagtccttgacctcttcagcattagaatcttagaacctgccttcattctttgtcttttgtttctgaattttattcactggttaagccaaaatactttttccaggctatggccatggtgctaaaatcttgttttttgaattgaatttccatgtcaagagaaaaaattatcatatgctttgttacatctctagtgaagaacagatagcattgtttgcactatatgaaaaacaaggtactactaaaaggatctcttgcagggcccctgtttccctttcagataagtgcttaatgaaccaacttgcattaagaacaatgatgtaccctgaatgaaataattctcctaatttagtaatagcattctttgcttaaacaagag

SEQ ID NO: 88628 - DNA, 1079 bp, Homo sapiens
ggaggtggagggaggagggttggcggcgggaggagggttggtggcgaggccctggcccggacgtccaggggccgggaggctgcaggcgatggagccggtatggggagacgccctgctggagaagtggccgggtcccggccgtgcgtgggccggccctgcgccacctgggtgacctcagacacctgggccttggacggcccggctgcccggcggccaacgcctgccctcccggcgccgcggcgggtcctggcggtggattggggccgacccgggcgtgttcgtgtggagcacctgccctgtgcccaacactatcctagatgctttggagggtggaggagcctcctgttgcacggtcttgcctaaggtgaagcctccaaggaagccattagcatgccggtaaccgagtgtgtggttgatacgggctcaaatgtgatgatttacatagagttgtaattcgctcagtgtgtcttgcatcttgtaaaggtttagtttattcgtgttgattgaagaaaggaccattaacagaaatagggaaaggttacttggaaaagagtcgtgacctcactgaaggccttggattcaaccttaagagggagaacttagcgtttccggctagatgtgtgggaggtggtaacgagcaaaactcaaaagctgggaattgtgtcctgtgaaaagcaggccgtggggacaccggcgggtatggaacagaactgtaatgactaatagtcggaaataagggtagataggtaagtaggaccttcttatggatgtcttgaaaacttaggagaaagaaaagattatctaagaagccatagagagtaattttggagtcttcactaacggagtaataagaaagggatgtttagaggattcgtttggccgctttagtttaaggtagatttggaatggtcttttggtaagagaagaatcaaagcatttagaattcagtaggacctgatagattaccttgtgaaggctttgcgttttataactgaggaaagtgaaacccagagaggtgaggtaatttgtcgaaggtggtggaccctcctggactttataactaagagcacttttgagtg

SEQ ID NO: 88629 - DNA, 1013 bp, Homo sapiens
tgccattttctagctgtgtggcaagttgtttattctctttaccctgattttcgtatctgagagaagaggatgataacaatacctatatgatgagttgtcgtgaggattaaatgtgttaacacatacaaaatgcttaaatcagtgcctggcacatctttagcacccagttgtccctggttgctactgcttcttccaggtatggagcagtgggtagctactaagtttccttagggatctcttggggaagagactggaaccataggtagaccgtagagaaaagcctcatgttggaattcagatccgggacctaccttgtaatgaacatatatgtgtaattctgtttgtgacaggaaagaactatatatgtatatacactatatacaactgtgtatactatacatatatttatacatatatatatgtatttgcttaactaggattatttgagcacctgccatgtgcaaggcacactgctaagttctgcagtccaaggtggaaaggcaaaaggcaataaaaagaatgaatatggccaggcatggtggctcatacctgtaatcctaatgctttgagaagccaatgtggggggatcatttgaagccaggggttcaagaccaacctgggcaacatagcgagaccctgtctctaccctgccacccactccttgcaaagtagctgtgtatggtgactcatgcctgtagtcccagctgctcgaggctgagtcaggaggatcacttgagtccaggagttcaaggctacagtgaactatgattgtgccataaacccaataagagaggtgaatttcaaaaacattgtattgaatgaaagaagacaggcatatatatgaatatatactgtacaattccatttataagaagttcaaaaacaaaactaatctatggtgatagaaatctgaacagtggttgcctatgggagatggtgattaacttggagagaattttctggaacagtgttaacatttgtaacttaatgggggtgatggttacatgggtata

SEQ ID NO: 88630 - DNA, 1026 bp, Homo sapiens
aactactctctgcttttctgtgtgagttcatctactctgagggctttaccttgtgcctctgctcacaaatcagcactgctaacaagaccctctcagagtcctgtcctctactagcattctactgtggcccagataaaatttgagttatttatcatcctttgctgacaaaaccagctcctccctcccctccccaattacctcatttttgagtggtagctttatactaccaggttttcagtcagcacttaggaaaaaggacagagctttgagactccaattagaaagcaggaataactagcaaatcaggaagtgatttgctggtcagagccagaggaattcagccaaaagaataggatggtggtggtgggaatgttgaggaagggtgactcgtgcagtaaagagaagaacctacagaacttggatggaaactgagtagaaggactttaaacttttctgttcagaaatggaaaattccccgtgctatgcaaatttgactgcggtcccttggaacttggactgtggctgtaattctgaaataaaggcattgccctattttaacattaaagaggtcaaggagacagtggctttattacttttctattggtgtataacagaatactccaaaacctagcacctcagaaacaatgaacaatttttgagggtcagagccagagcagcttaggtgggtggttctggcacagggtctctcatgaggtcacatggggaggctgcagtcgtctgaaggaagatcagcctccaagatggctgacgcatagccgacaagttggtgctggctgtcggcaagaatcctcagttccctgccacatggatctctccacagggctgtgtgtctgcatgacctggctcccgccgattgagtgatccatgacagagcagggcaaaagctgcaaggtgtattatgacaaagccaaacaccctcatttcacaatatcttattgtcacaatatcttactggttacacgggtcaacacttttcattgttggaggggactgcacaagggcatg

SEQ ID NO: 88631 - DNA, 1229 bp, Homo sapiens
tttatgcccagcctcattccacactatataaagtacttctgtgaaatagaaggggttttctttttttacctttagaaaatatttgcttaagaataattttgtaagcatatgatctgtttctgagcttttaaatgatttgatctaatattaacacagaactctaagaataattggaaaacataatgatatagttcatatagccttagttcactaacttactttgtttatagatatggatattctgaaatattttatacgattgacaagctttaggaatgaaccatcaaagtgccaggaagtattgatgactgctttcttctttctattgtcttccaggcaccattcaggaagattacctaagagagctgctgacaaccatgggggatcggtttacagatgaggaagtggatgagctgtacagagaagcacctattgacaaaaaggggaatttcaattacatcgagttcacacgcatcctgaaacatggagccaaagacaaagatgactgaaagaactttagctaaaatcttccagttacattgtcttactctcttttacttctcagacacttcccccaccctcatagaacctgttgcatgcaacttagtttcacagctttgcctcttctttttgatgtatttattccagacctttctgccacttagcacttgtataatcagactggaaatggggatgagggtgtaaattgtattgaaaaagatcgcgaataaaaatcaacaaatgtgaaagcccagaaaaatatattcgtatttctggttttgctggatttttacatttttatataataaaaatgttattttgaaataaagattatgctgactcaaatgcaatgtaatggcaagttaaacaaatgattgataggtgggggtagtccttttttcaggttttcaacttcatatgattcaggttttatggtaaaattgatttttcacatatatgggacagtgttcttcagaacttttaagtaccctttaacattattatgcagtaaaaactagttatgccattgtttttcacgcttctagtcagatgtttattaaatgataaatatagaatgtatctgggaaaacattaaacattgcgttcatctaagattctgagaagaggcaaaattccgaagattagttattgtacatttactatatgtggagcgttgtgcctacacaatttttcttgaatcttcccaacaaccttgtgggatttttatt

SEQ ID NO: 88632 - DNA, 1183 bp, Homo sapiens
gaggccgaggcaggtggattacatgaggtcaggagtttgagaccagcctgaccaacatggtgaaaccctgtctgtgctaataatacaaaaattagccaggcctggtggctggtgcctgtaatcccagctactcgggaggctgaggcaggagaatcgcttgaacccggaaggtggaggttgcagtgagccgagatcacactgctgcactctagcctgggctaaagagagagactccatcaaaaaaaaaaaaagaaaagaaaagaaaaagaggaaaaggaaaactaggcaggtggtggctgaaagcagccccttctgtgcacagatccagcctaagagaccacctgccagggcacaggccagttcaaaggccaagcatgatcctaggacaggaggactgatgagtccatcctaagctgtatctgtaggaagagcaaatgtaccactggaggcatcagactagagaaagaggtaggggacctaaagggtattggtatttgtttattgcctgtctttcatctctctcataatctctctcctacagtataatctccacaagattacagaataggcacctaataaatattcatttaaaaataaaagatgttagcatctctatagcagtgatgttcacacattgttttggaaagcagtcactgtaagaaacacatttttttttcacataggacccaatacttctatcagtctctctatctatctctctatctatctatctaaattaaaacgggtttcatgaaacaaatcctactcttgctaggtatgatgctttctgttattttaatcttctatttatttattttaaaaattctgaccctgacctactcaactcatttagcaacctcacaaggcaggagggaggccccactggtcggtgtgatgggatcacctgagctggaaatggaggttccagctgaatcggaaattcgttctgatttcacgctctgcaggaaggcttcgtattttaacaggatttcctcatggatttgccttcagggaatgaatgtgctcatcagcaaacatgagtatctgccttgttaatacttctatcaattaattgatagtatatagcaattaatcaatcaattgatattctattttatataccactctcttgtgaatttgattaatgtgagtcagaatctgagaaactattcacctctggatg

SEQ ID NO: 88633 - DNA, 1048 bp, Homo sapiens
agttaggatgggtggtgttataactgtgattctgaagatttaaaataatccaacaaggtcacatgctcagtaatagaagaactaggcttcttgctggcaggtcagctctcttcctgtggtttcacaataacatttgaatacaacaattctcttctgcagggctccagcctctgtgatgtccaacatgcttatgagcaggttccaacatgctgcagctctatttccaagcctactcatccttccaacttacacctcatatggtgcacatggaaaagacataaatttggctaactttgtgcaatgcaggaggggctatgtacacttcccactctcgaaactatcctcttgactctcatggctagagaaagccatctgatcccaagagttatctagatccagtatctggagggtaattcaaatcagaaccaataaacaacaaaaggaggtaatcaggaacgaatgcacaccacggaatgagcatgatgtacagctgaccacacagtttatataaacatgcggcacactgcaaaaaatatagagtgagtttcttggaccagcttccaatttgtcttcactaaaacgtaatgaaagtatgggacttcgaatacattaagttagtcactcttaacgcctggagcttttcaaaaccatccatactcagacttcactccagttggatgcccacgccattctaaaggtctgataagtgactattcctgctgtttaaaacaggcattggccgggcacggtggttcatgtctgtaatctcagtgctttgggaggccagggcaggaagatcacttgagtccaggagttgagcccagcctgggcaacatagtgagaacccacctcttcaaaacacagaaaaattagctacttgagaggctgaggcaggagggtagcttgagcctgggaggtagaggctgcagtgagccgtgattgtgccactgcactctagcctgtatcaaaaaacaaaaattaaactaaaaaaaggaaaaaaataaagcaggcattagtaccaaatatttgcataaggctcttttcctaa

SEQ ID NO: 88634 - DNA, 1014 bp, Homo sapiens
tagtgcgtgattgttgagtcctcagatttaattgttgttagttgcttggtgataatatcatggaggtgagaaaagaagaggcagctgggtaatcagctttgcaggcaaaacaggataaattccaggggccctgcctccaagtagccacactggacctgtgtgttcactcagaacagctccaaaacccctagtacttctgtgtcacccatttccctacagttcccagagaggcaatcccattcaaaagcatgcaacccctcccaaatccttctttgtgacttacaaaaaaattcccagattttcttttaagtattcatccctgatgataaacaatctatagttttcccaaaaagaatgcccccattctctgcagtcacttgagggttattaacatgttcctttacaaatcctatagaccaagtggattagctatagccacttcacagttgaggtcactgaggtctagagagaagagggaacatgcccagcatgcaaggcgcgatccactgatgggctaacagattcactgagtgctgtttattaattgatgcaattcttacaatagcaacattatcctcattttatacatgtggaaagagaggcacagagaagttgagtcactgcatttggacccgcaggtaataggtggcagtgtggccacacaccagagcccttgcctggattaccattctgggtgtggagccgggagtattcctggaggctgaaggaaaggatccagactcagtctgcggaaaggctctgagtcctggctgctccaacatgacccttctctcctgctcacatattcctgaaggaaaacatgggactctgtgatgtttaatacaataaagaatggggcttttgactgcaaacctctctaaggaatgatcatccagtaaagggtatgcaaaacagaattattaaataaagaggtagaatgactttaacctaccaatcccttccccaagactgaaagtggagaaaaagagacaggggctgcttgtttaattgtat

SEQ ID NO: 88635 - DNA, 1084 bp, Homo sapiens
cagctgagcatggtggtgcgtgtccatagtcccagctccttgggaagctgaggcaggaggattgtctctacagaaaaaaaaattagttggatgtggtggcatgtgcctgtagtctcagctactcgggggcgctaaggtgggaggatcacctgagcccaggagttggaggcagcagtgagccatggttgcactgctatgctccagcctagacaacagagtgaggctctgtctctcacggaaaaaaaaaaaggtaagtatatgaaaatatgctgtacacctcaaatatattcaattaaaaggaataagaaagtaagaggtagcaattttttccattttccatagttataacattgagaataaatttagttctgttaattgaaaaataaaaattttaaaaaataagtcattcgttttttaaaagttcattagcaattgtctctgtgacagtcagtttatttcccttgcacctttgtggctgaggtttcgtgtagagacaggggcctaaggaggaccctgagtgggtcccctgaaatgtggacacaaagcaaccaccagtccacattcctcggtccacaaggatgtcacgtgagacttttgctaagtgtcttgctaaaataagtcatttctgactatgatattttcctgctcgtccagtggagtgctatggcatggaaacaaggttgtctggcacgagctcagatttcggggaactcatgagagtgcctagcaatcattactttctttaataaatacgcacaaagccccttcaatcatctgttccggagttttgctgaagctcaacattaaatgtaaccagcacacagacccgtaagtcacctttcctgttgtgttggaaaatctggaactcatttacccatctccggtcttttgctgtctctccattccccccggtttctccggttcagatggtcctgtgatcacatctgcaagttctttcaggactctggggtgccatctatctaagccaacagccattcctgctctcattttaagcagttagatgctctctttgcctgtgtcttgggttgaagatcattctgcttgagagagaaaacaaaagctt

SEQ ID NO: 88636 - DNA, 1057 bp, Homo sapiens
cttcagagcagagaaagcaaaccctaaactgtgctcaccttgctctagcaaaaagaaaccaaacaggttcaacctgtaactgcctatagacctttcccatttcctcaccccagagagttttgagatcattccacaaagataccagcttttcatatttgggcctaaatgaaatgctcaggtcccaggacctcctacgcttataaattggctccaagacacaacacatctactgtttgcttctgtcacacccacatacattttgaggttgtggaggcagatttttgtggataaggaaggaatacattccataaacacaaactggaaaaccattgattagatggaacagggaagaaagtctaggaaagaaggcagggccacaagctggacatgagtcaacaaagcaacagaaacaggcacacacacagtgtttgaggatgttcaatgaaagcattgtctgtaagacaattctatttctttctctggccctctctagtgaagacacaagtcgagtattgttgcagacagaaccacaatgatagcagagagtcgggaaaacaaactgtgaggacagagtgaataaaaactaagatgtttatacaagtgcaatagtaatcaataaatatatgagtgcttgcatttaaagaaatagcaaggtagtgagaagggaataattgtggggattaattcccaccatttgctggcagaagcataaggtccaatgatcaaattcaaaggtttaagtcaagcattctgagcttaaggggaagggaaaagtctcccccagtctgggataagctctaccttcaagctgttcggataaaatagcggctaacatttgttgcattatgccattgtcatgcaccctcccaaagccttagatgtattagcttattgactcctcacagaaacactatgaaacaggtgtgattggatgcacatttgacaaattatgagactgagataaataaagtttaagtagcttagccaaggtcttgctgctattgtcaggacaagatttttaatcgaggaacccagctgttacccaggaggctggagc

SEQ ID NO: 88637 - DNA, 1061 bp, Homo sapiens
ataccacctcccagatgtgcaaagaatttagagtgcattttccctatgcgtgctcatttagaagcacatctgctcctcttcacctcccaggtagcaggggaaaggctagatttaatcttgttacaatatttccatttcttctcattgatacaggcttgtttcagtgtaaacatttggtccatttgaagttcaacttcccactagtgctaatgaaaatctttacctggttgagtaaatgttttcaggtaaaatactctatctctcaaatttagtctcctcttcctcttccttgacctggtagaaagggcaggacttactatatccttgtgatgcctgtaggataaaagggttcctgagtggtatgttgtctcaggcctcctctggtctcagaggcaatgccccatgcctgcctgattactgtttgctctgctgctgttggggggtgaaatttgctgctgggatcattcgtggcttggtcagtgcccagtgggctgtcttcagtaaagtcactccctctgagcctatgccacaacccccaccaaaactctcccccgttggagccacacaagctcctgctgtcaagccctctcgctcttgccctctggggacccaaaaggcccctggtcctcaagtcagccacctctgtgtcttcctccatccaaaagacctgcaggagcttctgagcctggtgacacttgctggggaccaagaccatcctactccgccccagccacgctgcatgacctcatctcagcccaaaaacagacattgggaacatctgaccatccatcccgttcccccgctctttttggctacctgcagtgaccccagcagcaggggcgggagttgcctgccctcttccagcctggaagagcatctgtcctacgctcctccttccgggagtgactcccgcccgcatctcggggtgggaagggttcaggaaacacagaccagcttatcttaaggaagcctggtcgggaatctttcaaaaacacatctgttacaagggggaaagacacctccaggacaacagtgatttgcctcagcggggcaaaggccag

SEQ ID NO: 88638 - DNA, 1284 bp, Homo sapiens
gagatccagaatgaaaggcaagaaaggtaaggcggccgcgggctgcgcgcaccagaagacgcgagtccggggaaacgtgctggccgggccgcgccgcgcggagtcacttggtggacttttccgcccaggggctctcatgctggagtggcggccgtgctctttgttgaggctgcgtctgaaacggcagcggctgttttcctgctagacacaacacgaggggctgttgtggggcgagcctctccacgctgctggcacgttgtcaagaaacacgctcagcgccttgtttgtgcgcctgcaagtttcattgtctccgccgacaccccacgctcggcccagccgccgcgtggcttctcgctctttctcgcgtgctggggatatggggtccgagtagggaggacccagcccctcgtttttcccgatccggacccaggcggccggggccgcgggaccgccgcggctttgtctgaaagttccactcctaggctccccccgcccccgcccccgccgcccccctactcccagccgggccctagcactgttctttagggatgtggtgtttttacgatcgaaggaatgcgattctggaccccctcatcgccctcgggtgtaaacagctttggaaagctagacttttacaaatccccagtctctaaaagttttcccacgatgaattttggggcaggaggaagagttagcacccagggccagcagcttcaagcggcatgcagtcaaaatgcgtccaaatgtgacaagcaggcttggttgtaagtgcaaagagcaaggctgtcattgtttccacgaagtgttctggaagctttacaactaaaacttgccgtcagtttggtttaaaaacaaaatacaccggagggggacggggggtggagaaaccacacaaaacaccccgaaaggtcagagtgtgaagtcccttttgaagttaacaaaaattgagtccctggctgggaggtcccccgagtgttccgctgtgggctggaggtggcgtttctgtcgtgatttatgtggagtggttcaaaacagaagttaatcactcgggaagcggacgggaggggcggcgctactgcgcatgcccgggagccgcctggagtttggaactccacattctttcagacccggcccgctgcggggcgttcctggggggtagcctcaaggccagcggggttccttcggctgcgtttctgtgggaggccctgaaacgcgcggagcttccctctgcctccaggctttcccagcgagagtgaaattaaacttgaaactcggatcaactgg

SEQ ID NO: 88639 - DNA, 1431 bp, Homo sapiens
cgagacgccccgtgaaagccgtgccgacccttgggaggactgacaggtctagagacacgcgctgtctgttgtggtgggcctcccgggaataagtgaggggctctgtgtttcgaggatggttctagcgcagagccgggtgtctgccggggtgggctccccgcattgttcgggctccggcgggggcggctctgattcctttccatggcccgcctcccaccccgggaatccccagtgctccttttccacggcttttctggcgtccccccgactctcccgcggcactttggcctaccttcccccagcgccgtggtcctccctggcgaccccctctgcgctcctggggtcctcctgcgccccccctcctccaccggcgcgctgcccacagccgcgtgccctctccccggagctggggaccaaggctgggccccgccggccgcatcggtgggaacttccgcggtccccatcccagggcgcacagggtccagctcctcggcgccgactcctggaaacaatgaaaggtgacgggctgaaggggaaactttgcgactggttcagggctctttgggggagccgaggctgccgaggttacccgggtttctttccccttttaggtttccctggcgagtcgtctggggtgggcaggcctctgagaaggtgggattcacggcctcatttctagtttcttgggtcctggagttcctttgcttgtgctaactcgtgcagtgtgcgggccggcctgtttcacttgaggccgaggaactctcaagaacaaaagctacttgcttttcctccttgggcccctccctctccccgtgctcctccgccgtcctcctctaaaactacctgggaggggggagccttccccgtcggctctggaaagactcctgaggaagtcgggccctccttactgtcttgtcttataaaagtctgcaaatcttttcaagttttcttaaaacaagtgcactttcagctccattcctgagcccggggtaagcttggtttgtgataatagtgtgtcctcccagaaagctgagagtgacgccaaaagatctcctaaaatgacttaaaaacaatgagaaggatcgataaggaaaatccactaagtctttttgctcccagtttttaactgttgaattcctgctttgggattgctctttggctggggtagccaaccataccttggatttggtggcttgagtgttcaatgcctgttgcttctcccaaggagatactgattttttttttcttttgttcctggagaccgggtctggctatgttgcccaggctggtctcgaactcctgggctcaagaaatcctctcgccttggcctcccaaagttctgggattacaggcaagagacattgctcccagctcaaaggagaacttctggtcaggaaacttgttgagttaaatttgctttttcctaattgt

SEQ ID NO: 88640 - DNA, 1031 bp, Homo sapiens
agctattcagaaaagaaagtgcagggctgggcgcggtggttcacgcctgtaatcccagcactttgggaggcctaggcgagcagatcatctgaggtcgggagttcgagaccagcctgaccaacatggagaaaccccgtctctcctaaaaacacaaaattagccgggcgtggtggcttttgcctgtaatcccagctattcgggaggctgaggcaagagaatcgcttgaaccctggaggcggaggctgcggtgagccgaggttgcggcattgcactccagcctgggtgacaagagcgaaactctgtctcaaaaaaaaaaaaaaaaaaaaaagaacgtgcaggaacaaggtcgctgcttagggcggtgggatcctcaggccatgttgtggctttctccacaacatttccttgtatgtggatagcgtgaaagaagcttgtgatcctgcccccaccctccccaccgccacattttttaaagtgtaagcaaagcaagacgtttggaaacaagtcttaaccgggaaacttttcaaaagcgctgttacaataggaaatgagtaaggaggaaaaaagtctttgtttttccaagctgagccacaactaggagggagagttttaatgaaaacagtcctgacagcagcaaacgtggttttactgcagtgaaatatcagctggcgtagccaaggcactgaagtcttaacttcctgttacttcagcttttgtgcacatattggaaatatttgttaagagttccagaggtctggcattcatttatttaaatgaactgagaacagagtaaagtcgcgctgcagtttggtgttgcttaactgaaacctgcttttgtgtgtcactaacctattctgaaagatcaggcttcttgtcaaactaggcaagcagatcaaagggcagccttcaggggctttttttgtttcaaactctttgtgattaccaacttacagttgggaattcactgttcaatgagcaaattttcacactttttctagattaaaaaaaggaaggagataatagccttgaga

SEQ ID NO: 88641 - DNA, 2506 bp, Homo sapiens
ttaacactttttttaaaagttcgatttctttaattattaaagccaatgtgagacaggaactcagctataatttctttaagctattttattaatagttcttcacccaaatttcaatataggttttgaaagtctcatcttgccaatagtgaaagtagtttcagttttaaatgggcacttttaaaaacctttttaaaaacttaaatcatcaggggaggggaatttcaaatacatggcagttaaaacttaggattcttgtgcagtttatttgtagctgtttgttaagctgtgagctaaagtgaatttgcaagatcatccacctctttgttagaactttactttgtctttggagagttctgccttttgtaggaataccctgcagcaccttctgccccctgcagtccaaaactaaaaatgtgtcaccaagtcagagtcattaaaagggtgggaaaaattcctttaaaaaacacggtgtttagcttaagaggaatattccgtgtttatttcctgtcaaggggaactggctcaattaaggtcaagtcatattttcaaccaaaattacatactacagaggaaagaaagcatacaaagctaaaaatgcttacctttacatttttgttattttaattacttcccctaatatagaagtactgatttttttcaagcatgccattgtttgtaattcatttctgtttttaagattctagattgtctacaagcaaaagaatgtatttctttagtcattcggagtagcctgctgtagtttttgaaaggtggaattaatagcgtttgttatttaattttttttaagttcagaatgatgtttaaatatctgtaaaggccagttctggagctttattgaaccccgtccatctgtgatttaaatattctctatggcttgtgaattcttaaaatttctggcaggattaaagtacttacagccaaaagagcttcctctggggcttgcatattcagtttcctttgtcatgtaatcatttaagactgaactctgcttattgatatgtagtattctattctaggttgagctcaaactggtagctgaaatttaggagacatttttaattcatttagtattaggcatcttttgaccttactaaagtaccagtagtagaaaaatatttttgtgtgatgaaactgaaaacatcagtggtcgtatttaataaaaggtgactagtactgcccatttaaagtaggtgtctaactttgaataaatgtggatagcaatgaataagaaatgaccatgcatggtgttagcagaaaattttaacatgtgttttacctttagaatactaactgggttcagcgtagtatgtaattttccttccttatatccatgaaaaaaaatgtacgagtgctccctttcatttcaaaccttcagtagaggaaggaggaagagtagcatttaaaatgtacattaggactggttaggttgcttttcctagttagcactgatcttagaaagaaggttggtaggcatattccaactgccacagcacccttcctgtttcaaatgtggcaggttattcattttgggtgcagtttgtctcctccaatgattagacgaaagagttttctgaccatcattcaaaaggaatgtgagaagttaatgaatcctagaggaaagcggctgagaaaaggcatctggcatttggttgagagcctcctatgtggtgctagtcaaactacttttacttggaccctgaattcaggacagaaaacactgctccttctcctcgctctcagttgttgggaaagcatggttacattgaatggtcagcgttaagtgagctttgcaatagttgctgtgcttataaagcaactgacaactggcccttgtcctttcctaggtattgttgcagcatctggcagtgagactgaggatgaggacagcatggacattcccttggacctttcttcatccgctggctcaggcaagagaaggagaaggggcaacctacccaaggagtctgtgcagattcttcgggattggctgtatgagcaccgttacaatgcctatccttcagagcaagaaaaagcgttgctgtcccagcaaacacacctgtctacgctacaggtaaagaaagagagcgtgaggtttatggatgcatttttagtttcaaagtcattttatggcattcctgtgtgtcaagtcattaagctccttgccactcaaagacagaaggaatatctttttattgtaaacttgatagtgttaaaagctaataactagctatttagagaacacagaaacacttgacagtcatctatcagatagcatttcctttaatgcctaaaagaaccttcctttatgcaacagacattaaaaggaggttaaaccttactctattgtccaggaaactggtttgatatttaaacaaggacgacttcagtgaggtaattcatgttatgtctgttgacacagtcatttgaactgggaaaaatcagttactgggaggagtggcccttttcataaggagaggttttcctg

SEQ ID NO: 88642 - DNA, 1114 bp, Homo sapiens
gtgtgggacaaaacacagatatacagcagatagcggccaaaaacttcacagacacctctctcatgtacccagaggacacttgtaaatctggaccaagtacgaatacacagagtggtcttttcaacactcctccccctactccaccggacctcaaccaggacttcagtggatttcagcttctagtggatgttgcactcaaacgggctgcagagatggagcttcaggcaaaacttacagcttaacccattttcaagcaaaacagttctcagaaatgtcatgattgccggggtgaaggcaagagatgaattgcattattttatatattttttattaatatttgcacatgggattgctaaaacagcttcctgttactgagatgtcttcaatggaatacagtcattccaagaactataaacttaaagctactgtagaaacaaagggttttcttttttaaatgtttcttggtagattattcataatgtgagatggttcccaatatcatgtgattttttttttcctccccttccctttttttgttattttttcagactgtgcaatacttagagaacctatagcatcttctcattcccatgtggaacaggatgcccacatactgtctaattaataaattttccattttttttcaaacaagtatgaatctagttggttgatgccttttttttcatgacataataaagtattttctttaaaaattgttgtaattcagagtatttctgttgagggaggtgcttcttaaaaataagtaggaatatagcaccccagtgagcaggaagctgggggggtagggtgcagtgttagggggtgtcaccagctctttgaaaacctgtggacaacaagccagtttgcataaacaggatgtgtgatatttactcttgataggaggcatagcaggcccttagagctttacttaaactgcatggcaaattgaaatgaatcattttagtgtttagctagccactaaatcccttgctgatctgtcctgcgtagtttaaaacgtggccatgttataaagaaaagtcttgaagcatccggttattgctgagttttcagaagaaaacaacgcaagcaatctcttgccctttttccacgttac

SEQ ID NO: 88643 - DNA, 1035 bp, Homo sapiens
ctttccattatagtgttattttctggtatcatctgtaaacccagtattgaagtgaaagtgttggattaatttgagaaggaaaagatgtacttatcaaacaccttatattaaattattatctattatattattattgtatttgttgaataccacatatacatatttagtcctcacaaccctaatgggacgtgttattcccattgtgtagctgaggaaactgacactcttcaaagttcagcttgtctgtggttaccagctgtaatggggcccccagtcatggggtgattctgtttgctcacactctttccacaccctatccccgaaatgaaacaacttggaactgtctccatttttattatactgttcaataaaaatttgggggttgctttggcagataatcatatgcaagctctattttccaaatatctcaacttatttttctgctctctcgaattcctccctcccctcccccattccatttccttgtgaccacatctgcttcttggagagacttgcaggatctgacacatcctcttggtttcctaagtcttatgactagccaatgcctgaaataatgaactcctccaaggcaagaaatctgttttgaagcttctctgcgtaagtattaacacttaatctattattcgatgcatttcatttccctttgtaggtatcggttttctgagcctgcagccttaggctagtacctttttttttttttttaagttagtttctgttttttatttgagctctgttagaatctttagatctatccagtggctatagtttactctgtgctgcgcctttctgctttctctctgcaaaaattatggctttttagctatatttccccaaacagaggtgaggtactgctcttatacaaatacttgaagttataaatcccacctgcattaaaaggaaagtgaagatttatgacaatgccttcccattcttctctttcaaccccaaaacctccaccatttttgaaacaaggcaagttctttagggctggaggtcttcaatggtatacaccat

SEQ ID NO: 88644 - DNA, 1054 bp, Homo sapiens
aggctggtctcgaactcctggcctcaagtgatctgcccacctctgcttcccaaagtgctgggattacagatgtgagccactgtgcctggccaaatgtgcttaatattaaagccaacacttgcccagctgctctgaaaggacagctcagttttaaaagcactatgtcctgactgcacgttacacatttttattccttgaagtaacaaggctcttttctctcagtttccaaatgctccttgacttctcaactaagtgtacattgatacaatcacagtcattttcctaatcaatgccaggttttccatccttggaggtccttgaggctccctgaggtcttctcaccttcttcttccgatgaagaacatcacccttggtcttagcagggctggcctggctccacccaccaggccatgatgccccctctcttcctgcctctgtctcctccacccctttctgttcaccctccctcttctgccctgtaccaccctggtgttctgctctccaccatctgccctggcatcaggggatgcttcctcttcacatcaattcctattacttcgactaaaacaaacccttagaccagactgttattttctttttctttttttgggatggagtctcactctgtctcccaggctggagtgcagtggtgcgatctcagcttactgtaacctctacctcccaggttcaagcgattcttctgcctcggcctcccgaatagctggtattacaagcataggccaccaggcataggccaccatgcttggctaatttttgtatgtttagtagagatggggtttcatcatgttggcaaggctggtctcaaactcctagcatcaagtgatccatcggtcttggcctcccaaagtactgggattgcaggcatgagccaagccaccgtgcctggctgactgtccttttctctggacagaaatgtcatcccgaaagtttcaaatcaccctattgatggttttgcccaaagaaaccaatcatttcatcattctgagatgccctctactgaactttttatttgcattttcttctatggcaaacc

SEQ ID NO: 88645 - DNA, 1022 bp, Homo sapiens
ggatctcagtatgaggcagggcgacggcatcaggacagggggcgaagctcggtgaagaaggagatgggcaaacgggtacgggaagtggggggctgaggggggcccggggggcggctcctgcgaggtggacaactacaccgcgacagtggaagtcaccgagctcgggagcggacgggctcggagggggagaggcagccggcagaggagcggccgggggaggaggggacagatgcttggcggcggcggccgggctgcggggcgctcagagccgggtctgcgcctcggggatgtagatctcgatgctctcggcgctctcggtggccgagttctggcggacggacgcggcgcgcttggcggccatcaggcgcttgcgggcctcctggcgctgcgagctctccagcgagcgctcccggatcagcggcgcggggcccttcgccggcttctttggcactggaggaggggcccttctctcctgatcaaagcagaaggttcaggacattacacagcttctcaggacaagcttgggaaaaactgggataggtcagtagttagaacacacagttttttacctaggggtggttagttctgatctgcacactgcatatctacttttttcttcattattctggcttgggcattcaaaagatgcagaaaaaaaaaaatcccggtaagcttaaggcccagggtaaggctgggttgcagaactaggtctctccaagggaaggaagtgggtattttaaaggccccctgcggaaagcctgcggctcccagcacattgagtgcggttctctctggagactccagactcctcctggtgccagagatgggccaggaagcagcggctgcagcagcatcttagaacccctgcatcccctctaaggatgcaagtcaccgggtgcaagcttggttcagagcttaaaaacatctccgctctgtccccggcccgcccaccgtccccttcccaccaaacctaaataaacagaggaggaagaagagatatcagattgtgttctttagctttg

SEQ ID NO: 88646 - DNA, 1078 bp, Homo sapiens
cctgggctgaagcaatcctcttgcctcagcctcccaaagtgctgggattacaggtatgagccactgcatcctgctgaatttgttttctttttcccttttctctcactcctatgaaatgaagccctacagataaaatatatgttctccactcctatcccattccttttcatccccagaggaaaccattgcagtagagaatgactatttcagtcccatcactgaattcataaggtctcttttctggtcctggaaaggtgatcgctaagggtcattttgagtgttagactggggcaatctcaccagcacagtagcacccatagtcaacatcagcagattttctctgaaagttagaatgggggttttaaagctctatgggtgttgagttgatctctttcacattctggtcatgctttttttttttttacagattgttcaacccagatgtggttaacagtttttgccacccatctcccttagggcacattcaaatgcatcttacagaataattttctctgctgtgtcagccaggcaagccgtttaaccatgactcataccatctatttgtgtaatacttaatcagataataagccttgtattgctgggcagttctttttacataagtaaatctagcctccccagacaccgtataggcacctgatggtgaggcttatagactcctccctttcctttctttccccagctactctgttaatctgtccctcagtggaagtacaaaacaaaacagaaaatgcagttgaatgggattcttcctatttaagaagtaagcactctttataaactcccccacttataattcttcaaacctctcaccccacaacagatatttaagaagacccacaatagagagtacaggcctgggttagtgaatcacataaagtcaggaggaacttttgggaggcctttgtgaacatgtgtttacttaaattatcatcacttagtatttcaaaactcacaaacaggcatctaattagatcctcgcaggaccctgtgaggcagagcagataacttcatttgaaaaaacttgtactcaaactacaaagtttcttccccacggaca

SEQ ID NO: 88647 - DNA, 1047 bp, Homo sapiens
cctaggaacagatctgtttccaggcccagttctgcccccaattaaccacatcacttcacctcttcatgctttcgtgccctcctgagctgggagacaccaccctcaagaagcacatccacaaaaggatggtgtctaatggccttctggcaccagcgctgtgcaaagcggcatgaatggagcattctcaaggttaaacatatggcacattacagccgatttccttttcattactgccacttcctctgcggtcactaatttcaggttgtctggagcttacaaaaagagacatgcaagtatgtgtgtctgtgtgtgtggtggagtgggagggaccttttgagggttcattgcaagagttagatgagaataaaacagaaaggagctaggctagaatgcagccattgctccccacttagaaacacacacgggctggaggcagatgaattgcagaactcacagatacagctttgtctgccacccactgtttcacaggccgcagagacacagcagaggcaatcccaggcggataaaccctgggtgatggcaccgatagaccatcacaatgactgtgcacagtttccgtaaccaaacctgaaaccaggcaaaccccatttcaggtgtcattaccagccccgcattcgctgccaagggtcccaagccttctaggggactgaaggccaagtttcactagcttggatgctattaccaggcaaaattaaagtggaagaattaatctgcctccggcacatgctctaggtttatcagtttgtttcagataaagcctgaaaattccacgtatttgttgtctacaattcagaaggcaaagacagatttagaagtacaatcaccggtatttcatcttagggccattgaaacctgagcctatgttctttccccacagtggtagactgcattcctagttggaggcattcagctccatctggtcgtttcatccccggttagataataccagacgtatctatgtaacatacaagccactgtcaaatagcactgagccatctccctgagacagctgtttcacacaagggc

SEQ ID NO: 88648 - DNA, 1050 bp, Homo sapiens
caaaaaaagaaaaggttaagtcagagaattggtgaaacaaaggccctctgcaactctaggcccagttatcagaacagagtggtgcttgccaaggagtcagggacagatctgcatggcgggctttaaggaggacagtgccaggcaacgcaaagtatcattatcttgtcaaatgttattcatgtgtatctgttctatcagacacttctgttttctgtgaccttggacaagatactgccagagaactgttgtgagggcaaataaaacagcacctgtcaaagtctctaggccatcgtcaggggtattgtgagggcaagatgaatattctttcatgcactgatattttcccttcttcctggagagggttgctactgctttatggtccaattctccctgatctggattggccgcatttgaaattggtgactctgtcctgggcgcagggtttgccacggcactgactagaattttggaatcccagtagtttgaagctcctatttcgtgtctctcaaagtatgaaaaaatagagaaagccttcaagtgtttgtggaatggaactgtgtcttaagaatgagacaggacacacaaggttcatctggactagccacctgtcccacacggaagtgctttccatcacttctgtggcaggtgcccatctctctcttccacatccttgtcctgatcagaagagctcatcatctgtcacgggaacacctttccagcttttggcaacaagaactgttagttacttgctatggtctgaatgtctgtgctcctctaaaactcatatgttgaaacctaattaccaatgtataaatagtaagacagggggcctataggaggtgagttggtcacaggggcagagtcctcatgaatagggttactacgcttatcaaggaggcccaggaagcttgtctgctgcctccatcgtgaggctgcagcaagaaggcgccatctttgaaacagagagcagcccttgccagacaccaaacctgccagtatcttaatcttgaacttcccagcctccagaactgtgagcaataaatttctatt

SEQ ID NO: 88649 - DNA, 1078 bp, Homo sapiens
acttaaagaagtactagtccctcattgttttcaatcagagcaaactgccacagccagaatctgttccacatataaaacagaatgacctactttcctgtgcctctgtttttatctacacagaactgtactacccgcattcctaacagccatctcctggctatggatcttgcaaaggatccaccttcttagaaaaattacttggcagtagattaatagaagtttgcagtttgcagtgtagtcactcagaaagaaaagttaagtaaaattaaaatggtttgggattaaaagcggcgcctttgaactcaggcagccctgtccaacctgctagtttctatcaattaagttccttaagcaagtgctttcttctactcagagctttcaaagaatgttctgctctacaaaatgatttatgtctttcataagcaaagttccttttgggtgaagagtgcagtcaagttgttattgtttttctgcaattttgataggaacacaaaatgaggtccctagattaatttctttattttttgaaagaattgatcagttcctcgttgatgatatcaacccaaaagctgaacccagtggcttgctgtttcccaacccacagttttcaatcttgaagcttccttggctcttcatgcccctgcaggcacagtgtgtaataattacaacttctgaaaaatgctggccaatattctggcccaagaagcagaaaaccatgaaagcaaagactggatcaaccagtatggaacacaatactctgtctgttctgaatagccagaagaaagtcacttgttagcattcacttctgctgttgctttatgttccttctatgaaacaagtttatatttctaactagaggagtttctaccctctcccacttcctacaacttttctgtacagcaagttacaaatcaaaacatatatgggtaaactgaagaggttccattcttgtccccctgtctgatagagttgcagttaaacaaaagaaattgtgcacaaaaactaagcacagtcattatctttatgacatccatgctttggaactacaagacactcaactgatgagactcaagtcatg

SEQ ID NO: 88650 - DNA, 1060 bp, Homo sapiens
aaacagctaatgtttgatgaagatgatgggtttctgcactggcttgagaggagcagtctcctttcaaaacgacatacgcattcattatccctggcttcctgctgccacggcatttaaactagtgatcttcagacagcattcctctgtccacggtcctcaccgcgaggcagccccagagaatggacaatgtgcatttgcgatccatggcattttgagaatgtcatggtggcctgcaaatgtaacagggatatttgtgatgctccatttcaactcctgttattgaagcagatagggctacctggtgcattttagtttttactaatgagtttttaacttctttttgttttgatttggaacactgaaaaccacactaaatttagaagtctactccttaatagatcaatcagttaggtgggccttgctgggttagtttttgttcctaaattataattgattcaaaaggaaatgagtcccttggcctcttacaaggtcttttaatcatttctttgcactatctctttctcagctcaattttctttctttttctcactttttgttaggttgctgtcttttatcagtctgtttatttgaaaaaggaagagataagttgttaactggccattcagtgtgaaaacaacagcctcacctttatcaccagataattaaaaaaaaaatacccctcagctgtcattaagtaatcccatctgcccgatattgctttttaagatcctatctaaatgaattacaaccagcaaaatcataaaagaattaagttagagacagaaggtattggtaatcccttcttcctgtttgacaatggatttcttttggagaggttgaaaacaatcattaacatcaatttcaatgcttatttactttacagtggttaactataaagtgacctttgaagaagggtatgttttggaaagctaagtactaaaattggcctgccaaccgttttggggatgagttttaaatattttactcagtttactgaggaactgaccattctacaaacttcaataattcaaataaagttcaactttaaaaaataatgata

SEQ ID NO: 88651 - DNA, 1052 bp, Homo sapiens
gtggactccgtatactgttaaatgtgaccaagattatgaaagtattttcttttctttttttttttttttcatggtgagaagatttttttatttgaaatatagtctgagcaacatgagtgtagccaagaggagtaggggctggcctgcctggggcagcagcctctcaaatggcacgagagcagtacaaatattccaatgtctgtgtgccccaaccccacctgtcaggaaaggcagaacagcagaacaaagacccacccacagcgccttctcaaggggtctggttcttggtgcctgcctgcctttgccttacctcctgctctgcccaggttccaaacagaggtgtgcagcagaggcttctcccacctcacccacagagacatgataagccagtgtgacaattagttctcaggactattttgagggaaaagaatcagagaagacagggaggagggccaaggtgatcaagggcctcaccaaaccagactaggcagagctctcccagagggactgtgtcagcacccctcatttccctccttctcaggatctaaaggcaggaaggagagctggtgtctgcaggaaaacagggctctgaggagcgccctggctgaaggcagcaagcgggaacctcccagaagagcacagccgctgtggggttcaagcctagttgacagcattggggttgggccacataagcagcctggggttggaaggacacagacaggagatggggtaccaagaagcagcaaaaagccgtaaataacagaagcaaattcagagctgtgagggtcccggccgaccccacatttcctggggctgggggatacccagcactggcagctcagggcagacgctactgcagggtacaaccggccacactcaccccgggggcagagccttttattttccacggtccgcacggcaggtggaagacgcttcggcaccacccctgaccatgcacactgcaaagtctccggtcacacctgaggggatggtgcgtggctgtcctggtcctgagaggcctgtggttgactgtgatcattgtggccaccgtc

SEQ ID NO: 88652 - DNA, 1038 bp, Homo sapiens
gggaggctggttcttgccctcaacatatttataacagagacgagaagagaaacgagagttagcagtaatggtgatgggaaaggaggatccaggaaaggctccctggaattggccaggtttgcaatgagaaaataaaaaggcttttaatattttgatgttaactatttactgcttatccattaaaataacatggtacttcattattaacatttaactgtgctaaaaaaaaattgcctataagatctcatttcatcaatacaacaacctgtgcatatttttctgtttttctcaggtgagaagcaggaggtcagagaaggtgagtaacttgccaaaggacacacagctaaaacggcagcactagggttcgaggtgtttaactcctaagatcaaaattatattaatcaaaattttatgatttatgtcactttgaaacctaaagtgttaagaaaattgtccacaatagcacacacacatatcagacacagatttctaaatattataggttctaaggaagtgagaatagatgttctactaaaagagcataattctttcctttttaattgttaattcacctgtataactggaaagtttagatctaagaacttcagattgaagagatgctactattcatggtcttgaaaacagtggtttgtaggttctaattctgaaaagtactaaccaagatgaagcatcaccctgcagcatgttcattttatttaataaattcttatattgtgctcctgtgtgcaggcactgttctaagtgctttttaaatgtcagctcatttgatccacacagcggaggggtggtattattattattcccattttacaaatgaggacactaaagttatgtagctcactcagagttacagctaagaaggggctgagtttcaatgaggcagttcctagggccatatcttgaccactgtttaatgctccttgtctttctaggctgtgctttgtggcacctgcagaactgagcaattatagtcccggacacctttgtgctcatcacatttgatacacttgtcattta

SEQ ID NO: 88653 - DNA, 1212 bp, Homo sapiens
atagtgatacgtactcatgaggttacctgaatattaaattaattaaaacatgtaaagcacatagaacaatgcctgggatataactaggcaaatacttagtaaattgaagatgaacaggagtaacaatatggagatccttgagttgggatcagtcttttctacccatattcaaagaccactcttaacattgactttctgaaattgttaggttccatagattgaccaggaaatgaaaatgtgactgtgttctctatatggaaaagtactatttataattactaaactttttttttttttgtaggagtttttcatcagtatgtctgaaaccattaaatataatgacgatgatcataaaactctgtttctgaaaacactaaatgaacaacgcctggaaggagaattttgtgatattgctattgtggttgaggatgtgaaattcagagcacacagatgtgttcttgctgcctgcagcacttactttaaaaagcttttcaagaagcttgaggttgatagttcttcggtcatagaaatagattttcttcgttctgatatatttgaagaggtcctgaactacatgtacacagcaaagatttccgtgaaaaaagaagatgttaacttaatgatgtcatcgggtcagattcttggtatccgatttttggataaactgtgttctcagaagcgtgatgtgtccagtcccgatgaaaacaatggtcagtccaaaagtaagtattgccttaaaataaatcgccccattggagatgctgctgacacccaggatgatgatgtagaggaaatcggggatcaggatgacagtccttctgatgacacagtagaaggcacacccccgagtcaggaggacggcaagtcgcccaccacaacgctcagggttcaggaagcgatcctgaaagagctggggagtgaggaagttcggaaggtcaattgctacggccaggaagtagaatccatggagaccccagaatcaaaagacttggggtcccagacccctcaagccttaacatttaatgatgggatgagtgaagtgaaagatgaacagacaccaggctggacaacagccgccagtgacatgaagtttgagtatttgctttatggtcaccatcgggagcagattgcctgccaggcgtgtgggaagacgttttctgatgaaggcagattgaggaagcatgagaaactccacacggcggacaggccatt

SEQ ID NO: 88654 - DNA, 1051 bp, Homo sapiens
tctcagttttcagctatacctgcacgttcataaccaacaatataaaccgtggtctcatgtaacacataaacaattcatgcctttcatagtttattattattaaagtctaaacaaaattgcaatttcttaggtaaccttatatttacaataaatgaagattaccctcaaatgctagaagctgtctaggtccgtccggtgtgtcagattttcctcagattagatgtgccaataaccaagtttattcagtaaacaacttgtacttgtttcatctggttttattactctcacccataaacagtaatgactctctgaccctctggaaatatgtaatgcttccaatcttgctttgtgtatctcatttaatttgttataaggtagtactgattttagcatattaatgcgatttcttccttgttgtttgctttggtctgtgttcaatccagagagcttaaattgtcattattttgggaagaaaacctgtatttttgttagtttacaatattatgaaatttcacttcaggagaaactgctgggcttcctgtggctttgttttcttagttactttttccgtgccgtgtattttttaattgatttttcttcttttacttgaaaagaaagtgttttattttcaaatctggtccatatttacattctagttcagagccaagccttaaactgtacagaatttccactgtaattaaaactatttagtgttagttataaatagccttcaaaaagagagattctccattacacgatcacctgcatcacagcccatggtgaatgtatgtttctgcatagcgaaataaaaatggcaaatgcactgaaagctctaagtttgtatgtttaataatttcagtattgtatgtgtttagtccagaagtaatatttgcatgacatcaaaggccttattcagctgcacggtagagatatcctgtctttacaagattgaaaaaaaaaaaccccacagagtatacagtatgcagtgtctgtaccctttgagggattgaagatgggaacaaagcagatatatttaaatatttggttgcct

SEQ ID NO: 88655 - DNA, 1344 bp, Homo sapiens
agagggcatgtttttcttccttaattatgctgaaaaaatcctttcctggcgttctccagtttttctgcactaacacagaaaaagcattaatatccagggaaagttcagtatattcaaagtactccttaaattattaacatccttgggcttatcaaatgttaattctctaatgtttagggtattataaatgtaaaaaaaacatatcttactagtctaatagcctggacttatgaagttcccttgtttatcagcaccaccctttaaattctctaagttgttccctaaactttcattcaaagtggcgatcacttagcatttagttttgctctgttttgttttgtttgggttggctatttagtttgtgtttttgtaacttaatccagtatctgatatctttagagccagtaaattatttccaaaagaggtagtagaaataggataagccaaacttaaccaattacaataaaattcatgagagcataactgaatattgtaaggactattatatttaaatcaatcaatgtgaaatttgtctcttgaaactcagtagtttgaatggaactgaagtgtaatggtacaagaatatggtggtagtcgtacttttcacttattctgcataaaagggtcctttttaagtcattcaaatggatatagacctatttcttattagctaggtttgggattgtcatgaacatagtgataatgagttcttgattacttttgataaacagctttcaaaggtttagaacatgatcaacaataagtgtaattgaattcttatttttactgcaaggacttaagcactgcatatagaccactgtttaaagaatttttctctcaccaaagcctaagttttaatgttccattctgtgtcagcttcctgaacagatatttccccataaagtggtcttacagaaaaggttaaccaatacaatgctaaaaaagatgcagttttcaaaaactacttttgttgaaacagagataaagcaacatgatgtctaacagtagacagtcaagttagcactacagtaatttttggttcccacacaatgggagccctgaagtaacaccagctgaatcctcagagtctttggttgtacatttaaaaagagcttccttgggaggctgaggtggtgaatcttttgaggtcaggagtttgagatcagcctgaccaacatgttgaaatcccacttctattaaaaatacaaaaaaattagccaagtgtggtggtgcctgcttgtagtcccagctacccaggaggctgaggcaggaggatcacttaaacccaggaggcggaggtcacaccactgcacttcagcatgggcgacagagagaaacaccatc

SEQ ID NO: 88656 - DNA, 1031 bp, Homo sapiens
gtgtggtgaagggcatctatagtcccagctacttgggaggccaaggcaggagaatcacttgaacctgggaggcggaggctacagtgagacaagatcaccccactgcactccagcctgggtgacacagcaagacactgtcttaaaaacaaaaaacaaaaaacgtaatataaatcaattaagataatcagttataaataaaaatcaaataaaactcttgttatatcaataaaagcctggtgtaatatctcagagtaaaattgtcctgaaatgctatcaacttcaggttaccatttagtcaaacaatctcaatgggcctcaagcaaaagtagaaagcatatgcggaaaaagtgtcaatgcatgaagagaataccctgatttctctcagctataaatctaggtttatggtcagaatcagctgatttttcacgatagtctccctgtggcttcccgccctaagaaccatctgatgctattactcactcctcagccactttaaccattttattttgcagttttctgttggagcactgagcatctcagctcaggttaaacataggtaggaagagagattttctacccagaagactgtcaaatgcaattccacaccctgtagagaaggaaggcgggtaaacagaatacgagtctgaccacaaacctgactactgacctcttcagggacaagtggttcgatcatgggggcatcctcctgcctggcggccagtcgcacgggggaggtggaaagcctcttctcccattcattcgttacggcagtgtctgttgaggtttctaagaaggttcttttcagctcgctaatgttggtttgatgtttcatcaggtcatcttgagttttttctagctcctatattcagaacataaagtatccaacagtcaatgttttacatttgtgttcctttcagctcttttgtttgctttaaaagtaatgtcaatcttattagtagtcaaaataaaacaaaattttgatcaaggctcatggcactaccacaaacactctggtgaaaatgtgattttcc

SEQ ID NO: 88657 - DNA, 1097 bp, Homo sapiens
aaaacaacagtgtgtgataagtcattgtttgtctacagcgttcagatctttcagcatgctctgtagctggttaccatgttgttggtgcagtgtgtaggttggcatttgttcccttgacaactgtgtcctttacttttccctttcttctccacttttttcagaatagtctgattaaacgaataaagggtgaaaatgtgtatgtcaaacatagtaatcttatgttagaggttggtattggtatataccagtgcatgtctgtgtgtgttgtttttcttttagtgtaatacctgtgggctcgtattgtgatgcatgaactgtgtgctcatccattaataagtggggatgacttctcagcttctgatttgttattcgctcctagatatagatcccttttcctgtgtgtatatttattttaattctctcaggatacatgtgaattgtactctttatagtttgccttctaaaattcttttggtatccatgtttgtgtgaactagatttttttttctgtttcctttccatgggaaaatcacattttcaccagagtgtttgtggtagtgccatgagccttgatcaaaattttgttttattttgactactaataagattgacattacttttaaagcaaacaaaagagctgaaaggaacacaaatgtaaaacattgactgttggatactttatgttctgaatataggagctagaaaaaactcaagatgacctgatgaaacatcaaaccaacattagcgagctgaaaagaaccttcttagaaacctcaacagacactgccgtaacgaatgaatgggagaagaggctttccacctcccccgtgcgactggccgccaggcaggaggatgcccccatgatcgaaccacttgtccctgaagaggtcagtagtcaggtttgtggtcagactcgtattctgtttacccgccttccttctctacagggtgtggaattgcatttgacagtcttctgggtagaaaatctctcttcctacctatgtttaacctgagctgagatgctcagtgctccaacagaaaactgcaaaataaaatggttaaagtggctgaggagtgagtaatagcatcagatggtt

SEQ ID NO: 88658 - DNA, 1033 bp, Homo sapiens
tttcaccatgttcaccaggctagtcttgaactcctgacctcaagtgatctgcccgcctcagcctcccaaagtgctgggattacaggagtgagccaccacgcccagccaattttcttgaatgtatatagttaaaaacaaatttgggaggggagaagacaaatatggggcaactaagaaagtttttttttttttttaaaagaagtcagctactattaacaacagcatgatttcttttaaaggttttagatgggacaatttttgaaatttgaaaaaatacagttatcccaaagccacctcattctcctgatttttctaatttcaaggagtggtctaatccctggactgctttctgagtatcagtaattagtaagcaggccaagccacatgtgcatgtagcagcaaagctgtgtctctcactatggctcttggactcaggactggggctttatgcccttgtgctagaagaggagacccagaatgaaattctaggtgagaaaaggatcacactgagtcaggtgccttaagaaaatcatttagtctatctaggtctccctcttcttatttgccaatgggacaagactgcttactcttcatattctacactgaccactgttgtgctggccacctatagatgggacagagtttcatcagtatcacggggcaaacaggaaatttaaacacagtgctaatgtgctggtgacacacccattcttcagtgcatagggggttcacagctcttcattttatttttaagcttcaaagcctacctatgttataggtactcccttgcatgctttaaatgttacataatacattttaaaactactgtagaagtttaaggtattattattaaaatatttttcatttatagcacacattaagattccaatgaaatttactggatgtactaccctgtggctacatgtaactaactcttataaaatcaaggtgtagctttgttatagttggcaaagaaaattaccaacttgtaatagatttatatatgattgcttaaaagaatctgcataatagt

SEQ ID NO: 88659 - DNA, 1011 bp, Homo sapiens
tttttctaaaaaaaaaaaaaatgtattatcagtctaggcaagtggttctcaaaatatgtcctaagatgtgcagagtcaatatcgcctgggaacttgttagaaatataaatcctcaagtccacccccagctcttctgaatgagaaacatgaggctggaatcctccaggtaattctgatgtaggccagagtttaagaaccactggtctagacaacaaaatacatatttaactccaactgttaaagttagaactgatctccattacaacagctcatatgtggagttcttaaacacagagccaccccacaaggcattttcggtatgccactaccagccactctcagccaaaataccaacctcagtggcagtggtctccccgtcggctgcggtgtccgtgcgctcactgtcagtctgttgaccacagaagtgatcaggttccaggaggaaggcagggacagaaagtaaaccatctggttaaacacgctctggcacaggtcagacaggtcattttctttctctgtgatttctctgtgtcacactaccttctcacaagaacacaagttcaagcaaagcaacagaagggccagagctaggtgtcatcaacagagccaactcataggaatacctgaggcacactcagcctgcaggagctggggagccacactgacctgtctggttctatgtctcagggaaaccgatttgtcatccccacacccttcctccaacttttaactaaaaacctcaagcaacatctccttaaaatgtttaatgcaaataaaattgatgtttatatatattttattctagtaatatttcatatttgaaaggtaaatgaaaatgtcaatttacagaaaaagctactgtaacagtcactggactttcagcctctcatttataccattatgataatttatatccatctagggccatcaggctgtctgcattacctgtcaattataaaaggcacatgccagtgactcacaggcatatattttttatgggaaaaacataac

SEQ ID NO: 88660 - DNA, 1070 bp, Homo sapiens
gctgtgggaatagacgggagggaacaaatgcaagagagaggtttcagaggcagaagcagcaggtcgtagagacaggatagaggaagtaattaaaagagggaaaagtccaggataatcaaaggttttcagtttgcatgattgaagccaatggagatgacattcggcaggagggaaaagggggaaaatttcagaaaaacaactgaaatccctttgaaacagattttcagggagtaactcttgcataggaaggagttgaacagagttatcaactgtatatattttattcaaggccttagacatggaataaattactcaaagagcaaggcaagttagagaaagaaaaggcccaaaactagaactctggataataccactatttgagaaagggccaaggagctgaagaaatgacagccagagaaataaaagaagaaacaggctgatggatgaccaggagatgagtttcagaggaaagtggttagctagcagtatcatatgttacagaaagggcacgcaggatgtggactaacaaaagtgtgttgaacttaacagtcaggccccatgatgacatttcagagttcagaagggcaacaggagcacctgccaggtgtgttgaggtcaggagtaggtagcagaggcagcaggtcgtggcttctgcttcctaaagtttagcagtgaggagtgagatggggttgtggtgctggcataagcaggctcagagagagctggtttttcactcctcttctctctgcttttacaatcctatttacagcctgagaaaagtgagtgagaagaaattggagacacacagactctgaagaagttgaaagaaattgatataaaacacagagaaatagatattaataaactattaatacctattcaggtagtctaggagcctgcatcatccttgcctacagaggttggcagagactcttcccagcttcttgcagcagagtgcaagctgactcttccatataacccctggcattggcgtaatatgtgcatattagttgcaggatgaataaatggatgatgatttagtcacaagccacactatgtctgtcttggct

SEQ ID NO: 88661 - DNA, 1239 bp, Homo sapiens
atgttagaagaatatgtctttaagtttcttttagactgtgctttattaataaaaccctattatgaacgtcgacttgcttctaaatgcctttaaatactgtcttttgtaaccaaatatttttcccttctatctagaacaagtatgtatgaagtaaatatcaaaatatatagacgctagaaaatttatcctagagaggctgttctacagggagaaattatttgcccacgatttttaccaagcgacctccttttcctgtatcctcatgctgccttcgttgtgttgtgcttttggttcctggaaggtactacctctgcttgcagttgcgagatgacatcgtgtccggaaggctgccctgctcctttgttaccctggccttgctgggctcctacactgtccagtcagagctcggagactatgacccagatgaatgtgggagcgattacattagtgagttccgctttgcaccaaaccacactaaagaactggaagacaaagtgatcgagctgcacaagagccacaggttagaggcagaaaggtgttcatttaagttgtgccttgatgggagagtgtcccgcacacaacccacctcttcccagtactgatttcagtccattaacggcgagacgtgagcatagtgtgggtccatgcacagtaaaattctgagatgggcaagctctcactcagagcatccaggtgttcgtttgtagtgctttcttgcaaagccctttttcttgttattcttttctcatgtatctgctggtgcctccataggacttcttatgagatagcatggaactaagtgggaaatattgcagcctaccagggaagggaaaagcatcattgtaacatatttttcttctcatcagaggaatgacgccagcagaagcagagatgcatttcttggaaaatgccaaaaaattatcaatgtatggggtagatttacatcatgctaaggtatgcatctttttaaaccctaaactttcaatttaatattatgtaacttgatgttgttattactgtaagctggtgatttttacttcagttaatgtaaatgaaacctctgagaattcaaatctctgcttgtcttttaagccctactccacgatacaacaaatgtagctttctgatatttactgaggggtttgctctttgtgtctcaaacttgcattactcctgggcacagccttctgaaagcccgtgataggcaaagcctctgattgccttttgatgcagttagaa

SEQ ID NO: 88662 - DNA, 1037 bp, Homo sapiens
gggagccctttcagtgctacaggcccacagtgaacagccctggagtaaggaatcctctcatcagcaccttcagagaacttgatgaggcactgctttcaggcgactcatttgtgtgccagggagacctttgaaagaacattctttatagtctccatccattgctggtgaagagataaaagtggatgcattacagtaaaaacagaataattaaacacttggcctcacatttgtattgaaggatgaaaaaaaatgccaacagtctgtcagactctccaagaatgccagaagagtcctccatttcctccctctgtaagaattgtgataaattctattgtgaacacttagttaattaattgtggggcaacaaagtcaatgatatagaactgtggggaaaaccaaattccattaatttggctttgggctacagaaatggcctagaaaatgttgagatcgaaaggagtgggtaactgatcaagtttagcatattctatatgagggagagttgaaagctattaattggtgttcgtttctgtttagtgcagtataccataaaacagccaaggggctttaggggtcagattgaattagatcccatttcccaagatatcatttgtagacttgtgacttaggacacatttaggttaaatgaagctgatacattcattcattcattcattcattcattcatttaaatacttaatgacccccagtctgctgataatggttacttggtaggattttataagtattaaatagaaacaataatagaatacctggaatttttctatgtattttatttcttttctgtagcgatagaattggctttttatcatatttctttattgatttgatcaaacattattcatgctgtgtgagtcttcagtactcacctcctggcactcctttaaaaggcaagatacaaatatttacaggcagcttgtcttcctggatccctaaaagttcctactccccctcctttgttttctttcttgttctcaccacacgttcttacagtgactagttttggggacctgcat

SEQ ID NO: 88663 - DNA, 1029 bp, Homo sapiens
caccaaggacctccattttgcttacctcctgctgtgtggccctgtccttggcacagaggttggggtttcatggaagacagtttttccatggacgggggttgtgggggatggtttcaggaagaaactgttccacttcacatcatcagattctcagaaggaatgcacaacctagatccctcacgtgtgcggttcacattctcacattctcactcaagaatgtgaatcaaatgccacttctgatctgacaggaggcggagatcaggtggtaatgctgactcacccaccgctcaccaccactgtccttggcccagtggtggggaatccttgttgcagaataaagaaaatacaaagagctagagaagatacagatggaaacatctgctaaccttgagctaggtaactgtgggaggagtactctatttctctaggcaaggttccccagagtgaacagatgacgatgctgcctacctccaggttgaaatgagatctgtgtttgaagacatctagaaccagtctaatgagagtatacacatagtacatgttttctcatttcagtagtatatgctgttgtcctctttgcttgtttttagggacatgtcttagtaattgtaagatccaaagatgaccctcaggatgagtgtagaattttgtgacattccaccacaaaacccgtaatccaaaagatggccctctatgagaatgcagaattttttgagtatgaaactccagataacagtagaggtttgcaaagaatgagacacagtggttatacaacagaattacctgatgagtttattaaaaaggaatttttggggaccaatccacggattatcatctaatagatctgcagttggatccagacctccttatgtcccgacaagtactttggtgaaatctgatccaggtggtcccaggaccacattttgagacacactgtcttaacgacttttgtcttaatgactttccagcttcttcactattgtcaaatgagcgtttaacctggaaagaagatataatataaataaatag

SEQ ID NO: 88664 - DNA, 1103 bp, Homo sapiens
tgattggttaaattgcatactttggaattgtaagcttctattagcaccaattcttttgtaatttgcagtacagagaaaaagctgacaacttaatttttagattgctgacattttgatacattgttcttataaccctgccttacaaactaaaaacagagagagagagagagagagagagaaagcagaaaggtctatattagacctagaaaacaaatgtaatatttaacctgccttgagtatatatttttctctccagttatattgggtgggtgcttgatgaggatagggagttatttctcttcaggtttctttcccaaaccaagtaaaggtctagacacttaaagcattcagtaaatacttacgaaattgtataaaaaatggggccatttgtaacttacgctttactaccaaaaaaaaaaaaaaaaaaaaaaatcttggagaaagcttaaaaagcactgctgctttatttaaaaatgagaattaccagactcatgtatgtagtcattatttttaatggcgtggtcctcttcataacaaggttgttacctctgtctgtagctcaaattggtagatcctagaggttttgccatatcagggaagagaattctgcaggtaccaagagaaaagaagaatggtttctttgagggaagaactgcagggagtcggtttcctttcctgccagctctaattggtgtcatggaggacatcagtgtggagggtgtcctctgaagaggggagggatcaaatggtagggtgacaaaagctgaaaaggattagtgctgggagatgatattgatctcctagcattcaactaaagagaggaaaactattttctgttttagctctctcttctttggtcatttttgtacatgcctgtgtttacatcctcaaatagcgagtttctttgtatttgattcaagccccaaatttcatcatttctaaaagaaagttattttttcacatttaacatctctgaaattgggatatgtcttacatggctctcagccatgttgcagagaaaaagctggcaacttaattcattgtttgtgaatatgcatcaaaaattggacattggatgttagtggattggagaaaatcctgga

SEQ ID NO: 88665 - DNA, 1573 bp, Homo sapiens
ttaatttgtaaaccgcttttagctgaaggattcaggagctgtaggtcaaatgtcagtgtctcaatgaaatatttgcgtttaatttttaagacatttcttctgcatgaatgcgatttaggttaaaagcaattttttatcagttcatgtacactgcttggactttggacaactttgtgttgaaataaaagatcaggattttttttaacttgatcggatgcaattttatttataattgttttttaaaaactggttggtcaaatgtattaaagggccacctaggtagaagagaggcaactatccatgtactgagagatgtgatgctgttatcttgtgaatcttttctggacttatatagtatattagattaagtgtggcaggaacttgctgtaaaagtattttcttccgtgttgtatgatgtgcattcatcttttaagttagtgctttccctaaaattcacaaattagaattcatgtccactccagtaaaatagaactccaagagtagactgaagaataaatgtttcctttctgtgagaatttgagtatatataatgaagagagagactttttttttttttttttttttttttgagatggagtccttctgtgtcacccaggctggagtgcaatggcacggtctccgctcactgcaacctccgactcctgggttcaagcaattcttttgcctcaacctcccgagtagctgggattataggcgaccaccaccacaccctgctagcttttttttttttttttttgagacggagtctcgctctgtcgcccaggctggagtgcagtggtgcgatctcggctcactgcaagctccgcctcccgggttcacgccattctcctgcctcagcctcccgagtagctgggactacaggcgcccgccaccacgcccggctaatttttttgtatttttggtagagaaggggtttcactgtgttagccaggatggtctcgatctcctgacctcgtgatccacccgtctcggcctcccaaagtgctgggattacaggcgtgagccaccgcgcccggcggagagagggttcttgagtaatctaccctggccgtctttaattcccatagtctcccctaagtaccccatcagttttccgtgaaatatagactcaccattgaaacctatgaatcaaatttatctttagcaccacttcagttagagagatccttaatcgtgcaatcgctgcatctatttctttcaaacggctagctagctgctgatttgttgggaattcatcaggcactcagcccgggagggttctgctgttatttgatttgccttggctgtggggaattctgtgctcagaagcaaggactggagcagtgaagtcattgtcctgcctggtgttgtgacatcactatggctcaaaggaaacaagggtggggcaggcaaaaccagaccatctgaagcatcttgctggctttaaaactttgcctgatcaatcaatgagactcctttctcaagttgaactgcattgcgaggtattgtttggagaattgaaaggtgtaaatgaatataagactgcatgggaaaatgtgtctccaagagtaag

SEQ ID NO: 88666 - DNA, 1043 bp, Homo sapiens
acttctttaccatcaaaatgagaacttggtatgaaaatatacagagtttaaggaccaattttacatgaaagctgcggacaggcattgaaaaatcctacttaacataatttgtttaatttgtccgatctttattttaggcaataaatggctggagaacctgaagccacaggtcctctatactagcttcatttcttttcaaaaaatcacctccgtcatcaaagaaaatcaaccactccgaagtgctattcttctttatccctgttagttttgcttttataaatcatttatgataatggagttacagtttaatttagtaattagtttgcaaaggaaaaacattcagcttgcatatggaaaggatgaggaaaacatcaaagaaaatttgtttttcataatcattttagtgtaacagatgtaaatacctacttaagaatggaactggatttctgggatagttctaactgccttcatgcttatctcacccctgatacaaccagtttcttggactttctgggggaaatttatgtgaggtcaatgattcgtacttgttcaaaggttactctgctgcgtaattcagctgtcagcagaagtttgtcttgcctggcccaagattttgtggaaatctgaaggaaaaaaacaacaacacacactacaaggttttattacacagtgaactgacagatccctgcaggctatgtcagcagaagcatggggcaagagttcttgctgctggtctgaactttgcacttccagcaggttgggttgcaaagccagccctgggatagcacagggggaggcaacttagcagcattggagggaggtaggggtggttttatcctacagcaatgactgatcacctaagtttgatggtgttatctctgaagccttatctccttctctagttacagtccattaagagtctcaagacttagagcctatttttaactgcaggtcctgcttaaccataattgaacatgtgatttgttcagttcagaagcccttccccctcccaacgtcttcaaatgcctgcatattcctatata

SEQ ID NO: 88667 - DNA, 1029 bp, Homo sapiens
ttggttttcttatttgtttttttgcatgtatacgttgctagctgtatggcataatgcctactggtttggtcagtaagggattgctttcttaacaacaacaacaacacatctggtgtgcccgtcacactgtcatggcttactttctggggtgcacagagtcgcagcatcatcaccaccttccttccaccaccatcccgattgctttgtctccaccaggcactcaattatggactttccaggagtctcatctaattttcctacaacctgatgatacaggaacctttttcattgtctaatattgtggatgaacagactgcagcacagctaaacctgccagaggccactgagcagtagaagaaggggtctgtttttcatccaggagtctgattctggagtcatatccattgaaatattttcaccagacacatttccttttagccagtttaacatacttttggactcttcctggcccttcaaaggtagaattttggtgcatcccagataatgttttgccatgcacatctgaatttgtcttttatctggcagttacgtaaagttctttcatgagtcaaaactgacagttccgtggtggcaaggttggggaacaggggggattatattaaagaaatatatgatatttctgtctctagataagtgaagaactttgcacctgatggtataaacatattttaatggaatggatggtaacctaggagtaaaagtcaaactgtgtagaatctaacttttttctaaatccagacaaacccttgtacctgcaaattttatttagattttcagctcttgttattgagtgttggggcttcaaaatctaattgtgagtccttctctaataggtaattcctgctttattagtcagggtaatatggcctttctcaaaagcagagggacatgaaaagcagagaattatcttggtcagctcgtcttgcttgcctctttcaaggaactcgactgtcaagtgtagacactcatagagcctcgccgtggaagggctcagccagaatgaggctg

SEQ ID NO: 88668 - DNA, 1090 bp, Homo sapiens
gctagcccagagagcggagtctcagaagctagaccttgctcgccctggggaaacgcgggggaggggggggccttccgggaaggtgcgaacctcgcagatgaggccagagcctccgcctccatctcagcgtttcagcccctgctttcctgctttcaagtggacagtggctctgacctccgcattccggcttgtggcgtggggggcgctagcggcagtgtgtgtgtgtgtgtgtgtgtgtgtgtgtgtgtggtgtgtaaggatgagcgagtgcgatcctccgggaggcagaggcgcaggagccagttcccccagcccggcggagccgcagggaccgcctcccctcgccgccagctgcgcgcagctgcaccccggcaactccgcgctgccggctcctctcctccagctccagctcccggtacccccacgaccaacgcggaatcccaggattaaaatcatctggccaaagggtgcgggtgggggatcgaggcgttcccgaggcgaatgaggctgtttttcaaaatccgggaggcgcccctcgcccggcgttgcatcttcccgtggctcggctgtaaggacctgcggtggaggcttggcggaggcgggcccgcgctccagagagagcgtcacgtcacccgagaaggcgacgctgggggctgctgagcctcccaactccctttggcgcgtcctgctcagaagccggggagctcctggccggcggctggcggggaagcgcggcgcgggaggtggggtggcctggctggtgctgcgggagggcgccccgggcgcgtcaggggctgcgtgccgcggctggagggcgcgccgggagctgcggcgggctcggggcacccgagtggcgctggaagttgagccggggtccgcagggctcggtgaccgccctggcgccgccgctgcggattcgggagcagcaaccacgcggcgcgttcggccgccccctcggcccgccggccgcgtctttcgctttccctctgcagaagtgaagccgccgcctgggctcgctcgggctggcgacctttgcgccagaaaagcctgaggtgctggaggcgaaatcctcccgggagcgaagggcggc

SEQ ID NO: 88669 - DNA, 1093 bp, Homo sapiens
gcattggtcactttataggcattgtattatttaatctttacaacagctctatgcaattgagctcattattttaggggctaatatttagtcaacacttaagaagtcccaggcatttaatccttgcaacaatctcatgaagagggaacaattgtcctgttcccttagctgatgagaaatttgaagtttaaaaggccatgcaacttgactgaaggtcacacagatgtgagctgtggaggcctgactaaaactgagttcagtctaacaccggcatctgagctcttcaccccccaaccccgatctcacagaccaagttcatgtcaccatcagtgacagaaaagaggagccaagtggggttgggcagaggccagttacctggggatgggtatggcaggggctggagaaatcagatgtagccacagagcctgggactggagaaggacaaaagaaattagctcaacaagctcaatggccatgtgtatgtgtgcattcatgcatgcattgtgcgcgcgtgtgtgtgtgcatgcatgcattgtgcatgtgtgtgcatgtctgtgtgtgcatacatatgtgtgtgtgtgtgtgcatgtgtgtccatgtctgcctgtgtgcacacgtgcactgcttgtttggaggttatgactgtggaggtggtgatgtgcgtggtgctggggtggagagggctccacagtttctgtcctaattttggaaataggtattctgtttccatggtggctagtgcctcagagaagagtctggtggttttctttcctagagaattaaagtgcttggggacaaaaaccaaaacccgactctacgtcccaaaattgcacaggaaatttttaacatggcaatttattttgaaattttaatagtctctgcctggaattataaaacatttctgtgcatatcattaattttcccaaatggaactaggaggcctgcatggcagcccctgtcactgcctgcccaaggtccccactccaggcactcctaatgaacacgtaggcatggcacaggacatgcttggcctaggggtgttctctgccctgagcctgctctgcctgagtgagggctgggccacagactcaaggca

SEQ ID NO: 88670 - DNA, 1032 bp, Homo sapiens
ccttaataaggggtcagaaagctattatggcagagtgttagtttttttaattgtaattttcccatatgagaaaaagatctttctcttggagattccaggggacttctcaaattccctgatgaaatctgacacatgatacctttaagggagttcctctgagggaggaaagaaggccagaaggaagagctcagttacataagcagttacctaaaactaaatattccaccccaagaagctgtccagatgttgctgagaggagagaagaaggctgtgcaagggatctgcctgcacatagctgtaggaacaggcataggtgggagacaactttgtgaagggatttattgtcagagtattgcaatatctctgctgcttccccagtggtgaactctctattaattatctgaagtaaataaaccgcctgcctgccattatatgacctttgattttcatccagtgaaataaattcctttgtctttatacagtagtaactttcctgactgttttagtgactttgggccacacattgacagattccccagcttagagagacttgaaactcctgtgacagctcccttgaaaaatcttccaattcctgaaggactgagggaaagaatcttgacagggaggtccttaaccactactttgagtccctacatttaggttttactaatggttggaactccattgttcatttcaaaccctcatattaccatggagtgtgtggaggagatgggtggggagcgaggagaagaaggcatattctcagatggttttatcaccacatattagttattgcaatgttttataaccacctattagttgttgcaacaacgtttcccttccctagtgtctacctggctccagcctctgtacacggccttgtttcagttagtggataaaggccctggggtggggggcacacacggagtgggatctgggagtagggcagctgcagcgtgagatgtcactgcagccaagctgacaccctctgactgtcttcctctgctttgcagcaggaggaggtggctgagc

SEQ ID NO: 88671 - DNA, 1606 bp, Homo sapiens
tggctcattccattgtttttggagggaaattgtgtataattccaattttaaaaaatttattgtaactgagtttttggccttatatatagtctatcccggggaatgttccatgtgcatttgaaaggaatgtgtagtttgctattgcgtggagtgttctgtatatgaggctgagatagttatagtgttgttccatgttctctattttctcatgtatcttctgtctatatgttctatttaccattgaaagtgagatattgaggtctccaggtattactgtgaaactgtctacttccccctcaatcctgtcagtgtctttttttttttttttttttttttgtagtcagctatttaattaggttcttaagacatttagaacaccaatttgtgaggataaattccattcgtcagagcaaacacagatcgcaggtagccctggagctgaggaatagctttgatttttggtaaaatttgtgagtccacagctttctgatcaatcttgcgctgctccgtaatctcatatttctctttttctgtgtcgaagatctcaccttcctggtgtctgggcttccgcagcttcttcttcttgaagtaagcatcagtaagatgttttgggatttttacattgctgatatcgattttggttgaggtggcaatgacaaatttctggtgtgttcttcgtagaggaactcgattgaggaccagaggtccagtcacaagtaataagccactagccagctgcttcaggaaaaccaccctcttgcccctgtggcgtccagtgaggatgatcagaatggtcccgggggtaatgctggctcgcagttttctcacgtgctgactgaagggttttttgccgtggctcaacagctttcgaggcacatcttcagtaggatactatctaggcattttgcgaagtttaaccacccgggtaccgccgttcttgtcaccaccaactggttttgtaacagctgcaagaaccttctccttctttttcttttcaaccttggatttagcggctgagtacttcctcttctacatggcctttctggaatacatggcagatcgggaatacctgccaattcctctgacaaggacagggttgcggctgcaatggggcttccccttcttgggctttttagctttgaggttaccctttttcaccttgccaccagcatcaaccttcttggcttcgggtttcttctctttagtatctggcttctcaactttttcacctgccatcttgcaagatgggaaagagcagtgtcttttttagactcttttctgtgtgacatatatgtttacaattgttatatcttcttgatgaaaggaccctttaccaatattagtgttcttctctgtcactttcagcagctattttactcaaaccctgtattatgtattagcatagccatcccagctgtcatttagttaacatttgtatgaaatatcttttctctaccctttcacttttaacctatttgtttatttgcatctaatgtgaatttcttgtagataacgtaattaaactacggtttttaaaatccattctgctaatatttgccttttgattgtaatgcttaatttatttactttcatagtaattacagat

SEQ ID NO: 88672 - DNA, 1036 bp, Homo sapiens
tggggaaaacaagcaaataagttggtataatttggtgattaaatgcatgctgagaactaggaacacatgacttggttttctttttttcttttttctttttcttttttttttttttgacagagttttttgcttttgttgcccaggctggagttcagtggtgtgatcttggctcactgcaacctcaacttcctgggttcaagcaattctcctacctcagcctcctgaataactgggattgcaggcacccaccaccatgcccggctaactttttttgtatttttagtagagatggggtttcatcatgttggccaggctggcctcgaactgctgacctcaggtgatccacccacctcggctttccagcatgcagggattacagccgtgagccatcgtgcccggccatgacttggttttctgtctgggagtgttaggtattgaatttgggaattgtggtggatgagcagattgtggatggggagacaatgagtttgacatgtgaaatttcaacctttaggttcttgtgggataattaagtgtatatgctcagcagacaggtggctatacaagttggaagcctaggagggagatcaaggctgaaagttctaagctatttattcatgggagacttcagcatttgggggatggttaaaactgggcttggatgagatctggcaggagacagtaaagtctctatagagacagcagtggaacaaggatggaaacttgagtaatgccagctagggaaggacagggcttgggagcctgtgacggagaccaacaggatgagagcattccagaagcaaaggcagcaggctcagaatgatcagacagccacatcaaaagtagctaaatgaacaatatggtaaagaaaatcatccaccagattaagtagtgtggatatcagtgatggtctttgctattgtgggtttaatagagttgtagaggtgggagccactttgctgcaggttgaagagtgatgatgagataagaaaatacaggcagaaagtagatatgattccttctaaaagcttagcta

SEQ ID NO: 88673 - DNA, 1051 bp, Homo sapiens
tttaagctctgactcttgaaataaaaagtgaaattgaacaaatgtttattgaacctctctatgccatatgtgatattggatgctggggctacaaaaatggttaatagctggtccttaagtgagaaatgtattcatgattaatttcagctgcatccagagttccactccttgaggacagaaactgtctcttatctctgtatccttagcattttagcctactggcccagaattgacactcagtatgtgaatggttcaatgaatgaatgattgaaaaaaaaagcataagatactctgggaaagcagagaagatgtaactaacgtttagggctcgggttggtgagagaagggttaacaaaaacttcttggaggagtcgatagctcaattaaatctaaagagtgagcatgagttagtaggggggattttaagagttggaagagtgtttttggccaaagaaccagcgtaaggaagaggcgttgcagcatgtaaccacagatgctggtattgctgataccctgaaatatgagatgagggtgggagagtagagaccatttaatgtgcactttgagtaaaatgattagggtcagactgtactcagtgacatacccaatttcttcatctggattatgaggggctccattagttgacctcaagggtcttttctcatgcttagattctatttttccctattattaagttggaagtgagggtaatgagataatcctagatttttaactaaaacacatttttagacctgtgctaattttatgataacacctttctcccctctcattgaactgtacttatttaattgatctctcaggtacttttgctgtctgtacagtagcatgaaattgttacctaattttagttcattcaattactcaaagtggagcttggtttatttcaactaagctacctaagtccagataatatattagtaagatgcttgtgtttaaggttttctttgaaaaatgtagcctgtccaataagctgaactgatttttgtttttcagatgattgtgaattggcaacttaattaataggaatttt

SEQ ID NO: 88674 - DNA, 1054 bp, Homo sapiens
tggttgtattttctctgtgggaactctactgttgttatcgagaaagcaaccataaacattacatgaaccaatagggttgattgtgttctgataaaactttatttagagaaacaggtagtagcctggatttggcctgtgggccataatagtatctgactcctgttttagacagctttctactccgcctactcatgaggcttgtgtagcaagcctatcctagcaaaatacagagaattagttttccagaatacagaaagctgaaaggaacctggggttgcacctgttacaatctctcatttttaagtgaaaacactgagtctcagagtagtaacttttcaaggtcacaaggaatcagtgaagagtccagacaattcagtctttaacagattctgatggatatgagtcacattacttcaaatatagtgtcatgttgacatttggagaaactgtcttagctcatgtgttttaaaggaataaaagagaaagagaaagagagagaaacggatataggaattcatgtggtagtgttctgaaaacttaaccaggggtcagccaagaaaggatgagagttatacatttggcaagtagattgattaatgaaacaaaaaacagcactgtatattgaacactttgtctaagtctgttttaaaattatatatgtatgatgaatgaataataaataattttaactgagaaaatagagacctctagattctctgatattcagttcattcatccatttattttcttttttttttttttttagcaaacattaatcaaatatcttctcttgaagccaccatgaaagagcaaagctaatcaagacagagttcctgtgcttgaggagcttatattggagcccaggagaactgggaaccatttcttgtttagtactgtatcctctaaagaggaaacagggtttgcttcatggaggacatgatacttgagttggacatgtggatatggtgtgatgtgtgtatattggtctatagatgaaggtagacggtagggagagggagtcaataattcagtcaataattcaggttggatgtat

SEQ ID NO: 88675 - DNA, 2003 bp, Homo sapiens
tgccttccttgcattcccctgtggctgtgtgatctgcacaggagaccgtcagtcactagtcttgtgtgtcaagatggaggcaaaacatatttgtttatgtaaatgtttatgcatgcaatatgtttatgcatatttgcttatcctcattctaaggttggagataaagcttctagcacatctctgaccaatataatcataacaacattagacaaaaatgtttgagctaaaagtcaaaatcataacattagacaaaaatgtttgagctaaaagtcaatcagtgcaaacaagtgatctgatctgtttgtatgttatccattcagtaggccatagtatactaaaaatagaaattcaagaaaggctagctaaaattataggtagcaaattaatagcatatcttataggaaagttagaaatgtaaaagccagatattactctctctcctacaaatattccttggtagtattgtttgacaaaatgctggactggagagatattttcctttacccagggttttatagtctgctttgattgcatataacctgtccagcaatcagtttataggacatttgagccccaaggacccatagaaaacatctaaccttatttttcaaatgaagaaggtgagatgttaatcaactcaagtctccaatgttctaacatttctataccatttttttaaatgggaagatctcatcatgctttttcacattgtattcttaccattccttccatataatatgtggcattagagtatagcatcactctatccacagagcgagagatagcttatatgtatgcaaaaacagatttttggggaatgcttagcatccatagattcaggattgtactctttctcaggccttggtatagatgacatatttagagtagtaatataatcagtctgccctttgaaaaggagtattttaatgaaaatgagtgttctattttaaaattaaaaattagaacataattaattttcactgacaggttattctcaaatagtaaagtgtaggtagcttcaaaaatataccctcagtgtacatttaaagttcagtgaggattccaagaaggaaaaaggggtatcttcaaaatggcatttgtgatgatctccaactcagttttcttttctggttccttccttctgtctattggacttttccttttggagaaggcaacttaaactcccatgccttactgggtgcctactctcacgtgtctctgggtctgtgtgcgtggtattaattgctaacatctactgagtgcttcctataaagcaagcactattccaaatgctttacatgtattaaagcccctagggtttactcctatgaggtaggtgtttttttgcttctaattttacagatttagaaactgagatacagggtaactaatcggcccaagtgaagtatggtaatgtcagcctaaaacccaatgctgctgctgttgctttttaaaaattgtggtaaaatatacattccacaatacagctcatgcctcttagccatcacactctgttccctttctatacatcctacttcctttgcctgaagagcctcttccccaatcttcacctggtaagtactatagtccttggagattgggtcatatgttactgtgttagtctgtttcctgtttctataaaagaatgtcaaagactggatactgtataaagaaaataagtttgtttagctcatgattctagaggctgggaagtccaagtgcttggtgctgtgtatggccagggcctttgtgctgtgtcacaagatggtggaggacatcacatggtgagagggaaagagtgtgccagctcaggtctctcttcttcttataaagccacagtcccatcgtggaggcccaccctgattaccttacctaatcctaattacccttctaaggctctacctccaaatatcaccaacacatgaatttggggattaacttttcatcacataaaatttaagggacatatttaaaacatagcacttgacattatctagaaagcc

SEQ ID NO: 88676 - DNA, 1044 bp, Homo sapiens
aaatgatacaccaaagaaacacagagaaatgttaatctacgtcaggttccacatagccagctcctaatattttccctttgtcagatttttatctcttgtaaagaaaaaaaaaaaatcccaagaggtgaaagagaaaggaaatgcttttgtttttcaactgtgaaactggagtttccatgacctcattgtgaggccatcgctcttcttggaggtattaataatttgtctcttgttaaagtgcagcatcttaatttagggctcagtgacttaggatgatttagaagggatcagaaaacataattttaaagactggaaaatgatggccatgaggaatatacatggaaattgatattattggagctggagtatagaaaggcaaaattctctgtgctaattgcatcaacaagaagaaaatattgtcccacttgtgggcacatacaaactggttctctacgggggtgtccacccctagagtgaactgccagccctggcaacagcagttgctccctgctagcagcgtcatagatcacaaaataaaatagtgctgtctctttgtaattgtgtaagccataacatttgctgtataattttcttttctgatttaacttgattttctgtccttgaaatttcctagggttataaacataattggtgattgctaagacaagaagccaatttttctattataagaaatagcaaagtaccttccgtttttgaagccttgcttacaaaacttaaaaaaaaaaattccaggcatctgggaaattcaaattcataaaataatgtttaattagaaagtaaaggaagctacacttgtagaacagagtaatttgattatattttaactattaaataattttcaaggtggtcattattatatgcacttaattgacattagattatattaagaatttaattttagctccctttacaaattggccaatgcccattcacccttggtagactaataaggtttctactgagccgtgttttttattaatcctcattgctactctcagataaaagacacgaataggaccaatg

SEQ ID NO: 88677 - DNA, 1058 bp, Homo sapiens
tatttatctccaacagaggacttacactggaaaaaaaaagactcaacaataattattgctacaggctttagcagtcagacacaagatgttacaagctaatactagatttgatttgctaatgttttgctgaggatttctgtgtctatgtttgtaaacgatgttggtccataggtttttgttctggtaatgtctttgtacagatggttttggtatcattataatcctggcttcttacaatgaattgagaagagttccttttacctcttttctgtgcaagtttggtttcttccttaatgtttgatagcatattagtgaagccatctgggcttggagttttctttgtgggaaggttttaaattatgaattcaatttctttaataaatatgggtcgatctcatttcttcttctgtcagttctaataaattatctttcaaggcatttgtccatttcatataagctgttgaatttcttggcatggaattcttcaaaatattcccttattttctgtttgtgatctgtaggatttttaggtacacggctctttttttcctttccaacactgcctatttttggctcaagctgagctataaatttattaattttacttatcttttccaaactctgctttttaaaaatttttttctattgtttgcctgcttacagtttcattgatttttgctcatcttaattatttatttgcttctatttacttttgacttaatttaatgctcttcttttaatagcttccgtaagatggaagcttagataattgattttgtatctctcttctattttaatataaccatttattgctataaaattccctctgaggattgctttagctgcatcccatatatattggtttgttgtcgttttcttactattgagttcaaaatattttctaatttctcttgggatttcttctttgacttttcaggatatttaaaagtgtgttgcttaatttccaatctttggggattttctgggtattaaaaaaatcaatttctaatttaattccattgtggtcaaagaacatactttgcatgaattaagtcctt

SEQ ID NO: 88678 - DNA, 1047 bp, Homo sapiens
tagcttgtgtggttcctgacaagaagtttgcagttattcttatctttgttcttctgtatgtaatatgtctgttttttgctactctgctgctgtcaatattttctctttatctctgtttttcagcaattacatcattatatgcctgtctgtggttttgtgttatctttcttcgagttcactgagtttcttgaatctgtgatctatagttttcaacaaacttggaaaattttcagccactatttctttaaatcagttccccgtcccaatccccatcctagcactccagtaccacatatgttggactactccatgtcatcccataggtcactcagactctattcaatgtttccaaacttttgttccctgtgtgtttcagtttgagtattttccatattttgtctccaaatttattggtctcttgttctgcagttgattaatgtgctaataattctatctagtatatttttcatttcagatattttgttcatttccagaaagttttattttcttatctcccatttctctcctcttatttttctttttaagtccttaaatagttgagcatatttatgatttctctttttatgtccttatgtgctaattccgccacccttgactctgtcatttctgagtctgtttttgagcctcattttcttgcttctttgcatatatgtagttttttagttaatgctggactgttattttgttgttgttgttcagtgcaaggttttattgcctttcttttaaagttttgttaagggaggtctagagtagactttacttaggctgatttagtttcactaaagtgagagacttctggggttttgagtaaaaccccaggttctcaacaaagactttctattctgattggtccaaagtcaaatgcctcccagccctttaggagctctgggaattgattaacttatggaagatccttttctggggggtcaggggctgctctatgaagttgacgctgcacatgagtgacttaatatttagcaacaaatgcaaggagacccccatatggattaattgagctctttgtct

SEQ ID NO: 88679 - DNA, 1050 bp, Homo sapiens
aaattcatttttgttttgttgcaaagtgtacataagcagtaattgcaggctttgggataatgtgttctatgatatttgttccttttagtcatggacataaatgatcttctcttacaagactgatttttgtgttttctgtagcatcagataaatatttattaaaatatgatatatgggctcaaataaggatagaaatagcacaagaccctgtaatcagtaacttgaagttatcctttcatttgtgaaccaaatactcagtgctgtcttgattaaatctgtcaataatctgggcaataaagcaattctacaggaaaaagctgaccggtgcattggcatccccagggtaggatgtcagagcttttgggtgcttccaaagtgttgttacgttagatgaagaaaaaagacttgactcttggatggcagtttccacaattcatccccaccttcccctgggatcaaacatgctcgtcacaggcagcatttaagccacatctgataaccttctatagttgagctctcttgctccacatagactgatatttgtcaagccagaggctacttgtaaggtgagaaagcctggctgctggaagctgttaaaaaatcgatatcagacttctttagaatctttaattattcaattaaaaaatgcctccagcccttgggcagctgagtgaaggggagagggaagaggtgtgggaggtggggggtggggagccatattgccccagtgtttgaaaccttgaattcagaaaaacataaagagaatgaagacttgtgaaagtcagtcagttttgtttttatttgaccatactctgttcttagagattctttttcatcagcccaaatctgtaaccttcaggttcaataattatgaaactcttctccatattttggaactaaaatgtcttcattcagagtgagcaactttaaatctttttttgttttgttttatttttatttttatttttgagacagggttttgctctgtcacccagcctggagtgcagtggtatgatcatggctcactgcagccttgttctcctgggctca

SEQ ID NO: 88680 - DNA, 1066 bp, Homo sapiens
ttcttttatcatctgtaaggaatactccccatttgagtccctgcatagttcacataaatgaaataacacagattccagattacctcagcaagagtagtagaacactttttcatatcattataacttttaaaaaagaaacagtggcttagggctttgaatattgatttaactgttcattcattcaagaggaccaggtgtgtcactcaaaatttaactctttcctcactccttcctggcactataactcagtggtaaagatagctccatcactctgggttccttctttccacctccaatgcatctttctacctccaacaagtccttctttggcccaggggtcccttagatcagcacagttgcttcctcctctttgcttccttagtttgtaagcacctgggacttggattggcatctgtgcatacttgcaggaattgatgcgttgactgtggtcctgggcccctggtatgttgtaacccttattgtatgataaacgactaagccaaccagcaggtttgagaattccaaggaagtgggtgcagttgagaaactgagaaagggattaccgtgcctgtgatgtataaatgagtttccatgtagatatgagcactagactgagatggacattttcaggctttacttagttttccagtggctaataccatacggtgatagtgcatgaaattagttgagttggtcaatatctgcatttgaaaaaatgaaatagaaaaggaaataggtcagagtatatcacacataatgagactgtttcatgaaacttttgttacatgtatgaggtatgtgtgtgtactgggtagagatctaaattgtgtttcttcatatgggttgacattaaacattttttggaaaacactccctgaggagatgtctgtttgaaattaggagaagttctattgggaggaacaattgggagggaggtttatgtctttaaatgggagaagaaacgtcagttgaacaaaacagtattttgacgtggagtgaccagcgtagtgatttccagagttattcatttgtacaagctaaactgcaactagacattagtcctatt

SEQ ID NO: 88681 - DNA, 1094 bp, Homo sapiens
aagctccacctcctgggttcacgccattctcctgcctcagccttccgagtagcttggactacaggcacccaccaccacacccagctaatttttttgtattttttttagtagagacggggttttaccatgttggccaggatggtcttgatctcctgacctcatgatccacctgcctcggcctcacaaagtgctgggattacaggtatgagccaccacgcccggccaggcatttctttatagcaatgccaggatggtgtgccagactgtatcagagacaagtgatacaaagatgaccaagatacagtacttgcccaggaagaagaattcctgtggccacctctgtcttatatcaagagataagtgtgaaacagagtatccacaacagtgtttgggaagacagtgtgagtggctcccaactctaccaacaaaggcttcaaaggagtaatgacatttgaattgagtcttaaaggataaatgtattacttggcctgacaacacagaagaaaaggtcatttttgtcaaagaaatcaaccttgaaaaaatgccgcagttcatgacttgtaccagtgaaggtagcaaggtctgtgtgttggtgatgaatttgcaggggatcaggctgaagaaacaagacttgggagagaggatgtgagacctttttatgacatgcatagagttggcacctcagcctttgcatggtagggagctagctgaaggctacctccatgacagatgtacactttgaaaagacaggccgggtgcggtggctcacgtctgtaatcccagcattttgggaggctgaggtgggcaaatcacttgaagtcaggagttagagatcagcctggccaacacagtgaaacctggtctctactaaaaaaaataaaataattagccaggcatggtggcgcacacctgtaatcccaactattcgggaggctgaggcagaagaattgcttgaacacgggaggcggaagttgcagtgagctgagatggcaccaccgcactccagcctgggcgacagatcaagactccatctcaaaataaaggaagatacagctaatctatatttctttcaccagagatcaccaccactaaca

SEQ ID NO: 88682 - DNA, 1092 bp, Homo sapiens
acacactgtgttaataagacaaacatggttcctctatattctagtggggaaaatagacccccccaaaacaaagtaagcaaatgagtgcatgaagtgtttattattgatgaatgagaagcagggaaccccgagagctgagacagcgaataactggaggaatgctacattagagtggcctggaaagggatcccccaagaggtggcatttacattgcaagctgaatgatgagaggcatcttgctgcagaaattgcttggggagaaagaaggttgcaggaagaaagagcagaaagagtaaatttcctaagggaagaaagaacttggctttttagagaaactgaggaaagattagcatgcccagtgctaatgccgtgggagagtgatgtaaggtaagactagcaaagaagttttgaggacagaaggtgctgaaccttgaagtcacagaacagaattcacatttacttataactgcaaggggaagctacgtgtccccactttgctcccagtaactctctccattgctgtgcaatgagacgtacaatactggctttggctacttcgtggggtgcatataaggatcaaatgatgtaatgcgtatgacagtaactcgttatgtataaacctctccataaaataacagataataaaggcccatagagtatttcatagtaagaagtatgtcttttaaaaatatttttttggaatatacttaacaactaaacttgtggttacacagagcaagctgtgcataaacaaatgcaactttttaaaaatatctgttatgtttacaatgttttgtgggagttctgctaccagttaggatgtagactagtttgtgacagactaccgttcccactgtagcagctagaaaaaaaaaggaataaatataaaaatctatattttaaaaactatgttggagagctgtggatacaaagaagtctgaaggagccaagttccagggaagaagaactcttgtgacataagcagagccaagtggtcattacctccctgggcatgtctgctccctgagtttctgcagttctgggccaaaggtcatacctgtctaggtggagggactctaccgggatgaggag

SEQ ID NO: 88683 - DNA, 2304 bp, Homo sapiens
ttaaagtagtcacattgggtagttgccaaggcggctcatataggcccagttaacctttgcatttgtgctaacagtgtcctagaatagcactgtcctttagaactttctatagtgatggaaatagtctacttctgtccagtatggtagctccagatacatatgactaccaacactttaaatgtggctagtgtgagaagttgaatttttaatttttcttaatcttaatagatttaaatatgaacagtcacatgtagcttgtagcttatgtattgaataacatagttctagaatcttctgccatatataatgatataacttatggtaagtgcattttgagttctgagctatttggactttcaacctagtgtaaacctgtgtctttctggatggtgggattgtctacagctgtaactgagtaaaggtgacttccacaatgtgaggcaaggacattagctacaggtgtcctgaccaagatgcctactgtagtaaaaggttgccttgctggtttaaattctttgggcctgacatttttgtatttttcatctgaccatccgtatcagatgttcttattcagacatcacccagcagcatcatggtttatgatcagcaactgtggtccttatgtctagtggcacttagagttctttatgctatgatactgcagcagtaccaagggatgattttatgggaaattgggatagactccacaacaacaaccaaataaatgaaggacaagtaacgtgtcttgtgggttttgaaaaggctattatacttcttaacaatctttttgaaagtcttcagggactttctacttgagaagcagtactcaaatgctttgttttagttagattcacattaaccagcataatttttttttttttttttttgagacagcgtctcgctctgtcgcccaggctggagtgcagtggcgcaatctcggctcactgcaagctccgcctcccgggttcacgccattctcccccctcagcctcccgagtaactgggactataggcgccagccaccacgcctggctaattttgtttttctatttgtagtagagacagggtttcaccctgttagccaggatggtctcgatttcctgacctcgtgatccgcctgcctcggcctcccaaagtgctgggattacaggcgtgagccactgcgcccggccataatttttttagattaagagttagtgcaagtttctaagtcagcctcccccttcacttgcattttatttggtgtttgaagaaaggaaagaggaaagcaaatatgaattgtactatttgtactaaatcttcgagatttattgacaaatttgtttcagggtggtatattagaaaaaggaaaactttgtttcctaggctgaaggtctaattgattaatacctttgacttatgatgatcattcctgttcatttgacttatgatgtgcatttgacttgtcatgatcattcatgttcattcgaaattcatctttctaatggattttctttcaaaataaatgaagagcaactctccttctttccacttttaagcattcagatatggcaagctcagatgttctgctgggttctagctggagcactgggatacccttctgttctggtggcttctttcttcctttcttgtatcccccgaagtggatcccaaagatacacagtacctagtagactccagctggtgggagactagaaaaactgcaagtgggtgatttgctattactgtaaataaaaggagggcctgagcctgggaattcttctgaaaacaaaaattccctgggttatttttcagttgtgtccgggatcatcttgagagggtcctaaaatctttgcatccatgctgcctttctcacttctatttccagatgcttcagactttgaattttgcttttctctaggaaactgcatttctaggcttttcccaaatcctccatttactcagtgcattactagagaatgcataactgttctcttcagatttcctaagactttggacttctagtaatgtaaaaacagcaaggtaaagggtattttttgtgcaccttcttctttcatttagaccacgaagggaaagatatagtgctcagttcctcaaaatgaaatttcttttgcttcactgagacaggcaaatggaataaactggtgtctaactcctggaaagaccaaaagagggcctaacagggtgcatttgtggtgaggagtgaggaatggcccagggttcttccttccgtctgccttcctctctttcctcccagtcctgctgctgaagtctcagttctagagagaattgagaatggggact

SEQ ID NO: 88684 - DNA, 1054 bp, Homo sapiens
atgttttttatgtgtatcaatttggaggaatttgttaactttggtcttctcagctgagctcactcagaaaaatcccagaggtttgatgacgtggcttaactaccgtcttaacccagaagttccttttacccacaggataaattcaaaaccttcatcttgatgttgaaggctctccactatgccttagttctcaggactcactcatgcaaactctttaccttcagatgaattcattcacttggtcttaagtaacagaacttgtacttttgttttgtcaaaaatttttgtcattccccctcccgtcacccccactgcgaatccccattcattgtctctgagcaggagctctgcagggaggatatgatagaccctccacagaagacagtgagagaccccatcagatgaggcaattgttttccagtggctggttgatggaaggcagcagttagcacaacagccactcagatggaggtggcacattcaaaggttctgctggggcagtttttcctcaacccctgtccatttcgagaaacaaggagctgatgacatttacatgcatgacacattcctaggaaatccctgttgtttagggagataatgctgttagccccacataaattaactttgctgttgtgtttttagatttttgtttatggtattgttttgttgcacagtgatcatgtaagaggaataaaataatatgagtgacttttatcattgattaacttactaataactctgtaggttatggcataaataggctgagggttacccacaatatctgacccactgactgtaaatcagctcttactttcccattcaagaccaggcattgggatgcaaatgagtgagagtgtctctgctttagacgtcatctcaaattcatctcacttattaatgaaaacaaagtcagtcattcacaaagtctggtaactgttcgaataaggagtgacctgcagtagatcttacacagttgtgctattcccttgtgactggggactcgtgccctgaggacttgcccaggatcctttatcttccaccacagcttgtggca

SEQ ID NO: 88685 - DNA, 1005 bp, Homo sapiens
gtagatttagaatctcttgttactgatcagtctgcagaaagagttatagtaatcagatcttaaaaatggttaagaggcatgtataattttagagtggttaagagcacgaacttgagtcagtgccgttacttacgaggttgatcttgggaaagttgtataactgctataaatctctactttctcatttgcatgtcggaggataacgttgacgtcataggatggttatgaacatttaacacagcattcaagtgccaggcaaatatatatatgcttggtaacttattgattcatgtcatcattgttactgtttcatatgtttatgatcatatagaggtacttattctggtaatatatcattgctttctagttttttgagaaagttgaggaatcaggtctggaatctgaaggaatttttcgactttcaggatgtactgctaaagtcaaggtaccgaacattttgtctcttcctaggtagagttctaagctagctagacccagttcacacaagcatcggggatccagatatttgttgttgtttattagatattatcacttggtccttcctagtattccttggtacctgtggtaaaatgtttgttccagagttttttcatgatccagaattttaaaaatcaaaacggaaacattaaaaaaccaaaaacaacaatgaaatagcacatcaattcaccatcaaaaactgctgcttgcctttagtttggaaaaaatgaaatagcacatcaattcaccatcaaaaactgctgcttgcctttagtttgtaaaagttgaaacgtctcactgctgttttggaggttaaacaccttagtttgttgtgctcctctcagccgtggaattcactaagccaatgttatatgagtctttatttccatcattcgttggtttaaacattctttggctctccctttagtgaaagctcttacaggaatttgtagcaatggctataaccactagaatactcactcagcagttccaaaacccagttccact

SEQ ID NO: 88686 - DNA, 1119 bp, Homo sapiens
catctaaaaccagctgttcagtgtgaatcttattcttttgctttcttacttccatgaggtggcaaactctacagtacaataaagcaaagaactgttagaaaagaaaagcttttctcataaaaatccagcaaaacatcccactgtgtctgcgggtaggcatacaccatggagagctcattcctgtggttggatcactccctgtcttgcagatgtgaaaacctgagcagttttaaaagctggatccctgagcaaacagtctcaggggcaggggaaaaccaatgtggtaatgtttatcaaaaagacatttgtagaggcaaaacagcatctcttcattaattcattttggtacatgctttgggaaattctatttgtatcagtatcagagtttttatatagaagtgtgacgagaggtttttctaagtggaaactgagaatagataggctgcgtctattggatcctccagaaagcagatgctgagatgggtgaggagcggaggagagtcacggcggttctgcttctgcaggatgaaaggggcaggaaccaggattggctggggtgaggctctaaccacggtgcaggtcagacaattcctaaccatggaggagccgtgtgctgggcagaatgggcaaggccctggtacccatgcctcaccccgtcgtgggctggggcttcctgcagaaaatatggctgagccacatccagaaggggcccacagctgggagagtcggctacctgggcttttgcacgtgagggcaaggtcttccgtgaagcgaggtcggagcagggcaccagggcatcagggctccgggcatgttgaggggttacggcttccctgagagtggagttggctgaatgctggcacaagttcttgtggaaggcagggaaatgcccaacggctccttaaggtttatgctttctagggtgcatctgctttctgtctccgtttctcgtgtgtttcgttcttacatactcttctaaaaaaatgtatcctacaagtaaggatgaaaaccattacttattttggttaaatctttggttatatctgcagagtcagagaaccaaaatgaaagaaagaaatttcctaaacagaaacagattccatctcttgaaacctctgt

SEQ ID NO: 88687 - DNA, 1033 bp, Homo sapiens
ggtttcctaagtaaaatgaaaatggattatttgccaaattaaacttaacttaaaagagcttcttaatttctctgaagttaatggaaacacagtggtcccaagcctacatctgcatctcttgtttttttcttccccagagttgtttttttttttttttaattgcgttggaagattagagacagtcctcagcctgcagtttatgcactaacattatgtcttgtctgcccctaaatgctttgcactgagacttgctcttaaagtttctattattcaggcaagctcacagcaatgtgtatttgctcttttcagtaacatcctggacctgcgtcattataaatttgatacaagttatccacaaatctacacatggatttttcttcaacaatatgatcctccctctctccccatattgcttggttgtatacacttgtcatctactcctgaactctagcacgcacagctccagtaacctactagcttgtcacaagtgtttccactgctatacagctcagttaacttcaccagcagctgactgccttccagccattgaatagaaatagattttccttcaacttgagaactccccagagattccagaacataatgctttcctccaagaactccccaccaagacaccattttgaagaaaatacagagggacaaaggaaagcctagattctctggtgtattctaaattttcagcacagctggtcgtggattatccagctgtggatggaatccctgagtataaatgccaaccctctggcgccatcttgtgtcattactgaggaagaaaatactcaacaatctccaaagatccaactacagtcatcaccttccctaagtgtccatggaagatctagaataagtgtcatagatcataaaagtaagagcaaatatgtagaaagataactatgtacaggtactgatttaaacactctacatgtattaactcatttaatcctcataacagcctgtgaggtagatacaatgactattcctattttacagataataaagtagatgcaacagg

SEQ ID NO: 88688 - DNA, 1051 bp, Homo sapiens
ttgaaatgaaattgagataaggatgagttgaaaagagatggtaattttgaggccagtaaacataatgctgaaaacaaagatggttcttagtgctgcctcttatcagacatttcagtgtggtaaggaccttcctcctacacagcgaaaatatctatgtcaattataatatatgtcggtcatattagatgtatccttgaggcaaggacagagatcagctatgacataaaaatgtccttttctaatataattcaataatttttcaaaaactgaaaatttattagcttgttttttcgctttgtctacagagtgttcttttatcaaaaaaaaattcatctgttatcaaatatctgagtcaaaatgtcatctaccctttcatacaactgaggatgcagcaattatcaaataattcaatacatttctaacaaaaggtccccccagaacatcacgggactggtgaggatgttacacacatgcactgtctctctctctctctctgtctctctaattttttattctaaattgtgactggagctaggattgcagctggtgtgggttagaggtcaagaactctagctgaagaattggttcccttcgttcagatcctggctctgccacttaagctgaacaaagctgctcagccgcactccacctcggtctcttcatctgtaaaataataatagtacctacctcacagggtttggaataatgatgagtgaatatatataaagtactaagagtaacgcctggctcacagcaaaccctcaaatgaatgttaactattattactatttagtgctgtttttctcattgcaaatactgtacagtggaattcaaacttggaaaaccaaagagcacttcttttggggatttcagtcgtcttggtgaatttagtatttatactttgatagcacagcaaacttatattaagctttctcaattctttattttttttaatgcttagaagacctgcacacaaacatttgcttttggccagctgtcaatttcaaagttgaaaagcaatagaaaaatagcacccaaaaattcaattttt

SEQ ID NO: 88689 - DNA, 1027 bp, Homo sapiens
ttttaaagcatattcttctatgagcacaggtcctcctagtgaagcttagtttgacaaagggtgtcatatgctttcctaacctgatttgtagttaacattcacagagcctacattttctcattacggttatgatgctcagtatctttccaagtgccaggcacgggcttccttttctgatcaaacataccattttttatatttcacaactatagacagtcacttctgcagtcccaatttaaaaatgcagaactgctttatccaagaatgctgaaaaatactgttctatccaggtttcctaaactataaaagcagattttgcttttgtttgttaatcataggcatggccgagcattgtggattagcctgaggcttaaaatcagatgcatgtctggtaagatgaccactgtctcactatcaagagcctgcagagccattttccagacctgtgattgcccagaacacatagtccccacgtttctaatttggagcaaatctaaaaggtgctgagggattggacagctctgactttcctcgagactatggatatagtccttctcagattagctggaaatggggacagagttctcatttatcccagatatatacattggcttttttggaatctatagattgagattttgatgaatttatattggttttaatgagacccaaatgactctctcttaacaattcaagcagtagacaaagttgctcacaaatacagaaaacatctttttgtctacttcgcaagtctcaaaacgtgataatatttaagcccatttgtagaagaaatcttgtatatactattattacaccttgatatctatacaaaacatcacttgtattaaaatatatagataactttctggcatttagaattttgttccattcatttaatttgttcatctgagaatttttttttttgcctgaaaacccattaaaagaaaacgtgccttctgtataagtttatgtttattcctacattttattcatttttaatgtatgggtaattggtggcacatgactt

SEQ ID NO: 88690 - DNA, 1048 bp, Homo sapiens
ggctcaccgcaacctctgcctcctaggtttaagcgattttcctgcctcagcctcctgagttgctgggattacaggcatgcgcctagctaatttttttgtgtttttagtagagacagggtttctccatgttgctcaggctggtctcgaattcctgacctcaggtgatccgcctgcctcggcctcctaaaatgccaggattacaggtgtgagccaccatgcccagccatcatctgaatcctttaaaaggttacttttcaaaactattttctgtttctcctagttagctctccttttaaacataatgctgcaattttatctactccaagagcttatacaaatggactgtgttccttaaatacacaaaaactcaccaagatatttgcttttaggtcttgttccatgtcaacaatggtgctggcaggataacagctgcatatgagcccaaaaccgccactgtgctctgtgatggaaaatggcacactcttcaagctaacaaaagcaaacaccgtatcactctgattgttgacgggaacgcagttggcgctgaaagtccacacacccagtctacctcagtggacaccaacaatcccatttatgttggtggctatcctggtatgtacgggtacctgctcttccactcaaaaggggcactgtccctggaggaagtcttggttcaggtggatgtagaatagggattgagaaaggtacatggtttgggtgacaaatcctttaccattttagaaaggctatttcaaatatctaagaattcttggataacttaaaataatctacatacacaagttaatcattgggtaagactgtgagaacattgggtctgatataaaggcagccgtatgactctaccgaagtaaatttcatgactgtcagacttgggagtcattttagggctagggaatcgttttaggaaacaaacttgtgactcatctctctggtcaattttggattagaattatgtattttagatgttccaaggaattgttgcaaataataaacacctgttgtatgactttttttaagttataactat

SEQ ID NO: 88691 - DNA, 1140 bp, Homo sapiens
atctttgttttaaactgtcaactaaattcctcccatttcgggaagggactgttatcatctttgatttaaagttaaactatccactaaattcctcccatttccagaagggactgttatcatctttgttttaaactatcaactaaattcctcccatagctaggttgaattagcaaagacagcttatgaggttagaagcaagatagagtcagttatgtcagattcctcttgctgtcatttttctatgtcagatttctttcactgttacagtttttgcaaaggcagtttcatacctgcctcctttcttctgccaggctcatccacttttcgtcaccaactgtctaaaaatttgaaccttcctttagcattgcattcaggttgttatagctctcagaaacagatgttgcatctgttaaagtttatacatctgttaaaagttttttcagattcctcaaaaattatgcatgttttcactttgctgtaggtcaagacagactatgttaaaagaaaaggcttcataactgtcgacggccgagagtctcccatggtgactgtggtgggagatggaaccatgctggatgtggagggtttgttctacctaggaggcctgccctcccagtaccaggccaggaaaattggaaatgtaagcagcattttccatactgacattttaccttcgttgtgttcgtgtttattttgtagaagagcatacctcacggcatctttatgtttaaattaccttgtttgaacctggggcttgtgaagaggtttactttgcaggcatgtccacagatcgtgtgccagggccgcccctcagaacccgatcagtctttccagcctgttagttaatgaacatctccctttccgcagccacgtggccacagcacaattcagggaagcccagcaaatgcatattcgcacattagtaaactcagcattttttgatttccacaatatttcactaaaataatagaaaacacttccactgcattattagcaaagatactcaaatggtagctctaacttagacattcatgtgaagtattgtggcaattaaagttttaaaacaaaaagattacattttaatgtgttttgctgagaccagtctgatgaagtggaaggaaaatgtgtccaaacccttcc

SEQ ID NO: 88692 - DNA, 1048 bp, Homo sapiens
gagcttctataaggactcattatcaatttacatttagccaggaaagcatgaaaataagtacttcatgtaaagccattgtgcacatatttgttgctttaaaaaaaaaaaaagattcaattcattaggaaaagccagttctggccaaatattttgaatggcagccattgctatttttcatgttctccccttttgctttctctgtttccctggtttaaagtgtgcactctaataatttagaagatggcagaagcattcaagagcaggaccttctgagcagggcgaggctttgagttcggggcagttttcatggtagcatctgcctgtgctgaagcagaaaacagcatctgggacccccatgacttgggcactcttaggacagcccgcagatggttgcgtggggttcaggggcccttcccgcctggctcctcttgtctgcatcctgccctgtcagtgtggacctaggttcacactctgaggccctgcaaaacatgtcacctgtgggcacctccagttttccagtgcctggtccgcagctcgtctcggcagctgcatccttagggccattcccaaaacctcgggtcacggcgggggcctagggggacagcaaggcctttgccccttaagcctgatgaaaatttgtaggagagacttcagtgtccttatgaatttcagtgaagccgagtgggattaaggtgacagacagaagctctaagtgctttcttcagggagataaagcgctggcgagtgcatcatttaaaccgaagatggagtgagcgccaacaggcactggtggttgttgctgttctaatgggattgcttcgtagatggcccttcatggcggaacacgcgtgtgtcagtggggttcgggctgcgggtggcggctgagtgtccctgtgtgtctcttacaggaacagtgtgtggtggatgcagctctggagtacgttcccggcgctcaccagtttggtctcacacaaaacagccatttcatcttgccttttaatcagtcggctgtcagaaagaagtaggtatcattctaacatccttatgc

SEQ ID NO: 88693 - DNA, 1064 bp, Homo sapiens
caggcacctttacagcaaggccccattttaactccctctgtcctaggccctcctttgctgactggacctgactgatagtaaaggaagccgctcctactggaaaagcccggggctctggcaagagcttgctgtcctctgcatcgggagccagcttaggcctttctgacagccagcaggtgtccaggtcgacttgctcatggccaactgcactgttgaaatccaaaagtctaggtagaaacaagagagtgttttcaaaattaggatatcacaaaccagtccatgaacccaagtcatctgataactgtacaatgaaaatcaattaaaaaccatgtatatatttctcttagagtaaccaaagtgccaatccttcactgtgactcagagtccaaacatgctatcttaatatttcttgtctgaagcttctgcttgcaatggcacccagcctagcatatccccatgtcagaccctggccattcctgagcaccccccaggtcagctccgatgccatcgcctcctcctgcagccttgactgggctgcctcagggacacgtttttgtctctagttcccaagcgctgcacagtgacctccacgaaacactgatttcttgtttacgtgcttccccttgccaggaggttgtgggctacgcttgtcacatgcactttcactctgcagctcctgtgctgtgtcctgtgcctgcgcacgtccccctggcactttcccgggcacagctgggaactccacagaaacgtttctgctctaccgagtccacaaacccatgactttcaggagcatgaggatgcctcatgaatgaatgaatgaatgaatgaatgaatgaacagacaactgggggaataaacataaacctgtgcaaaaatctaaaccagagctctgacattatgattgtattcaaacccaacgctatgttttattcttgcaaatttcagggactcctaagaggtaatttcacagataaggacactgtgaccatgaaagatccaagtctttgtccaaggtcactagacaagtcagtgacccagccaggagggagcttcaatttcctgat

SEQ ID NO: 88694 - DNA, 1012 bp, Homo sapiens
tgagcagttcattcctccttgctcaccctctgcctctggacagggtgctgatgggacacaagctgtgctctgctctgtgggaccagcatctgcccaggaacacctggaagtgccctgggcatcaggaaattgaagctccctcctggctgggtcactgacttgtctagtgaccttggacaaagacttggatctttcatggtcacagtgtccttatctgtgaaattacctcttaggagtccctgaaatttgcaagaataaaacatagcgttgggtttgaatacaatcataatgtcagagctctggtttagatttttgcacaggtttatgtttattcccccagttgtctgttcattcattcattcattcattcattcattcatgaggcatcctcatgctcctgaaagtcatgggtttgtggactcggtagagcagaaacgtttctgtggagttcccagctgtgcccgggaaagtgccagggggacgtgcgcaggcacaggacacagcacaggagctgcagagtgaaagtgcatgtgacaagcgtagcccacaacctcctggcaaggggaagcacgtaaacaagaaatcagtgtttcgtggaggtcactgtgcagcgcttgggaactagagacaaaaacgtgtccctgaggcagcccagtcaaggctgcaggaggaggcgatggcatcggagctgacctggggggtgctcaggaatggccagggtctgacatggggatatgctaggctgggtgccattgcaagcagaagcttcagacaagaaatattaagatagcatgtttggactctgagtcacagtgaaggattggcactttggttactctaagagaaatatatacatggtttttaattgattttcattgtacagttatcagatgacttgggttcatggactggtttgtgatatcctaattttgaaaacactctcttgtttctacctagacttttggatttcaacagtgcagttggccatgagcaagtcgacctggacacctgc

SEQ ID NO: 88695 - DNA, 1049 bp, Homo sapiens
actggggcccagcataaattgtctttacattggattgattctgtggcaaatagtagtacactattagtaaatagtattatatcaatagtaaatagcattatatcaacattcctgtatatttccctccaaaatatagactgaatgctttaaaagcacactgggcattttcatcataggtaaagaggttaaaaaaaaaagaaaaagaaaatctctccaaaaagcaatctcattcaatggatatttaataacattccattcgtttctgaaaaatcttcagttgtgagttttaattttcaagattcacctttttggtcacagacagtgtcttgttaaaatgaacctttagggaacttttattattcagtgagaacttgtgggaattatggactaaaatggaattattatttcattatgtttaaagcttttcatttattttctccattggtcttttagaattatcactgtccaattggatgagaacaatcctgtggaaatgaagttgggcacattagtagaaagcaggacgataaatgtgtccaatctgtacgtcgggggaattccagagggagaggggacgtcactgctcacaatgagaagatcgttccatggctgtatcaaaaacctgatcttcaatttggagtaagtgtacctgctctctgcatgttcttgcactttctgacctttcatggtgagtgctaacactaatctgaaatctcattgtactgtttgagattgaaaactttgcaaattcccaaataatgagtgaaccccattgttctatcatgtaagtctccccagatggattttattggattagaatgttagacagatctggtcatcatactttaaaaaccatcgctgaacattagctctctgtggctgtccataaagagccgggattttaatatatttttgacatgcatttgaaggaacatagggattttgtgatgtaagtctcttgctgtcctgagagcattgctttgaaggagctgtttactatggggctactagcagcttcaggttatcaatggcttccccaaaaacaatta

SEQ ID NO: 88696 - DNA, 1743 bp, Homo sapiens
agaagaacaccaagtagaaactagccttctagtctttatagatatcaattcaacatttgttattaaatttcgagctcaaataatatgtcttgttctgggttcactgtgaccaccgtgacattgtttgaattccatccatgggaatttcatgttcttgtttgcatctcatgggctggtgatttctgtctttcagtcttttggttttattttttagaacgggccccttgtcagtctcaatgaaaaagatacgaggagattccacttctcttactgaattgtggattttggtaacaacagatgacatttcatttatattagtgtagtgttctagaaagccttcgtgggcatttttggtttcgtagccgatagacctctggctgtggggccagatccagttttctcagtttgactttagaaggtttcagccatccctgacttgaagggaaagggaaacctgggataaagctataacctggggaactgtgttctcttttttacagaaagactttttatccatcgagctgtttcgtggcagagtgaaggttatgactgacctgggttcaggacccattacccttttgacagacagacgttataacaatggaacctggtacaaaattgccttccagcgaaaccggaagcaaggtagggacacagatggactcaccagatgtcggtcaccctcataagaatagaaatcttttcaaaatcagcattctttttttccacagtagtttcctgggtattgaatgatagtctacttggaagccagtgttgtctttggaatactaaccaacaggattcacattttgctggaggagggttatacttgtatttgcctgtgatttccaagtgtgttatttaacagtaaatgctggattggaatcaagaatcaaatccattctgttttcttccacatgcatactgctcttatttagcaatgtgtattgactttgatagagaggattttcacttgtccttcaatagccaagaacattagctgatcaaattcgcagaatctaaaagaatatgcatttgtaaatgagctttgttgccagaagtttgcattttaccttaacatggaaagggattttccttttcttatctcttgcctgtgctctccttttaggagtgctagcagttatcgatgcctataacaccagtaataaagaaaccaagcagggcgagactccgggagcatcttctgacctcaaccgcctagacaaggacccgatttatgtgggtggattaccaaggtcaagagttgtaaggtatattaaactgcagaattttcatgtcgctgatttccaactttattagcttgctagggctgagaatggactgtatcacaaaccaggtggcttaaacaacactaatttattctttcccagttctagaggctgcaagtccaaaagcaaggtgttggcagggcttgcttccttttgagggctgtgagagagaatctgttccatgctcctagcttctggtcgcctcagggattccttggcctgggtcctgtgtccacatttcccctttttataaggacaactgtcatgttgcataaggacttcccctaatgacctcatcctaacttgattacctctgcaaagaccttttccaaatgaaggccacattcacacataaggaggatcaagactaccacatcttttgggaggacacggttcaacctgtaacatctgcttctatttattcagagtactctatgccatgtgatttgagaag

SEQ ID NO: 88697 - DNA, 1002 bp, Homo sapiens
tcaaaaaaaaaaaaaagttaggaccagaggtttggtgattgtagccttaagattgaaaaagaatatagggtttggagtcttgagtttctcaggcttctggcccaggtcccccaccaaaattttcttccctgactttggataataagtctcttcacctcactgaggtttggtttctttttccagaaaagaaaaatgatcatcgttcttgtcttacccacctctataaatcacagtgatgaacacacaacatgatgcgtgtgaaaatgctttataaactggaaacactttaccagtcttcaccactggtctcctacagtgatgtggctttgctttgtagataaatgtcacaggatttttttttgacaataaacgtgtgaaaaagcatggctttgtaattggcagctatgataaaaaatgctgttgcctcgtgaggtaatgacacaccctgctctggaacttcagtggaaagagcatctgaattcaggctctctgatccgccactttttccttattctgtgtttccagcaaggaactcttccagcaatttagtaattctaacatgaaaaacaccccgacccctagactctatcccctccactgaccccagatcattaacctcactgttagaaagaaaaatggttaacagaaattaaacatttctagtatgaaaaagtccccctactttacctgtgaccatatcctctattttcatcagtcatttccagaggtattttgaaatcattgacgtcaagctacagcactgaatgaattgaatgatttccggctcttctttttttgttgggatgaggaagtcagctttttaggtggtcacatgttttgttccccttgaaatacctggcctgcctccggatttccacacaccctggacctttgggtcaaagatgctgccctcctgccaactcgagactggctttttgacggagggctggccacccagctgagtagtagaaccacattgactcatcagctcaaccaaactag

SEQ ID NO: 88698 - DNA, 1013 bp, Homo sapiens
tctagctctagttagtggtcaattaatactaatcagtgtttagcaaaaaagcccaccatatttattttattatatcagttctcctctcaccaaatataattgtgttttttggatctggttcaatgctctgaagtgggagtctaggtctcaggtccagctgggccctcactaccaatcacattctctggctctctgttttctcactcgtacaacacgattctctccatcaaccctagtcactgagatgatctttaagatcctgcccagttgttactcattctaggattccacttcataactgaaaggaaatccagtgattacaaactggcttttttctaatgtggctctctcaaaatttggatctgttagattgaagctcccagagagaagttttgtgcacttggagaatgtattttgcttggtcagcttatatattggttatgtttgtttgcttgtttgcattagaaatctcctgctgtgaaggttactcattttaaaggctgcttgggggaggccttcctgaatggaaaatccataggcctatggaactatattgaaagggaaggcaagtgccgtgggtgcttcggaaggtaagatgtcgtcacggtttagcacatagtatgttattctgttaacatctgagaagtgctgaaagaatgtattaatacatgcacgtcaaggaatagagtttgtgatatcgctggtaggtgtttagctgccaattacaaagccatgctttttcatacgtttattgtcaaaaaaaaatcctgtgacattggtataatgtagattataccaatctacattatattattatattatattgtcagatgatataatgtagattagttactgagagaagcacaggtatcatttttaaccctttaaaaagaagtgctctttttcctatgtcttttatgctttgatcatggatcataaaccctaaacgtttcagacaatttctcaaacaaccttctgtctcagagagccacaaccaaatctttataaatcac

SEQ ID NO: 88699 - DNA, 1016 bp, Homo sapiens
ggcagccaacctggtaaaattcctcaggagagaggtgtaaggtgtggcatggtagacattgcatgtggctggcagcacattgcacttaagtcaaggacagaaaataaggatgcaagtggggggtgcattttcttaaaattcaggcacaaagcaaaattcttctttttaaaatccttcagaggtaatcacttttgagcagctttaagtgtatgttttcacttttctataatattatggtttgttgggatttttttaatttacaaaatgggataatatttacggagtagacatatcttcagatacagtttagctcatctcagatgttttaagcagggacacaacatgatgaaatttctgtttcggaagagacactcttgaagatttcgggcagtaggcaagactggaagccaggaggccagcaggggggtgctgttgcagggcccttggggagaagcagatggtgggtgtgaaggaaacgggattgtatgtgcgctgactggaaattctgaaaatttcttttgcaattctttgtaacccttagatttggaaacattggttcactgagtgtaaaggaaatgagctcaaatcaaaagtcaccaacaaaaacaagtaaatcccctgggacagctaatgttctggatgtaaacaattcaacactcatgtttgttggaggtcttggaggacaaatcaaggtaacattacgaaagttcttctgaacaggactgattgactgattttacctatatataaaagtcatgggccgggcgtggtggctcacgcctgtaatcccagaactttgggaggccaaggtgggcagatcacctgaggtccggagttcaagaccagcctgaccaacatggagaaactcttgtctctactaaaaatacaaaattagccgggtgtggtggcacatgcctgtaatcccagctactcagggggctgaggcaggagaatcacttgaaccctgggaggtggaggttgcagtgagctgagatcgcgccattgcactccagcct

SEQ ID NO: 88700 - DNA, 2044 bp, Homo sapiens
cagacatgaaaggaggtggaggacatgtttcatgaagctgagaaaggagtgatggaaaaggacccaaataaagaagttcagcttattaagatgtaagacacagctcacacagcgattggccattacttttgtgatctcattgtttattgaaatcatattccagagaagtattaacaaaaattatttcatttgtccctaaaaggggatagtagagcatatgatatgcagctttaatattgccattagaaacaagaagctcttagttcattgaccactgcccaaaagaaaaaaaagcaaacagacaagcctcagtttgtgttcagcatcagtaatatgacaataatatatttctgtgcgaaattacatttgttgtcgttttattcttttctctgtgtgtaagcaccagaagtgcatgcttttatatacatttattttaggtataagagacaagggagccaaaaccaaagagctggccacgtctgcaagccagagcgcggtgagcacgctgagggacgtggcggggctgagccaggagctgctgaacacatctgccagcctgtccagggtcaacaccacattacgagagacacaccagcttctgcaggactccaccatggccagtatgtcagcgcccttccttccagtcatgatcgtctgcgtcatgcagacgtggagctagctaagcacacagtggtgcgtttttcacaacattcctgaaaagtagaagtatgctaacatctggattagcctttattaagagaaggaccttgggaaatgcatgctacttgtgcagttttcatctttgtaccacaatgtcatggctttgattgttagggtgttgttttaccaagtgcattgttaatggacaattaattatcttgtttttccctctccccaactttcttgccaccccttgccttcttgtatttgttagctctgttggctggaagaaaagtcaaagacgtggaaattcaagccaaccttttgtttgatcggttgaagcctttgaagatgttagaggagaatctgagcagaaacctatcagaaattaaactgttgatcagccaggcccgcaaacaagcagcttctgtgagtttggggccccgtggctttcgtaactgggctctcagtcatgtggggtcccagggaattcatgcagacatggccctcagtcacactgcgccccttagggcttccaaagacccagatcccaataatctgggcttcctcatagccctgtcttggtatatttaaagccaataactagcttcattttctttgagttctgcttttgttcaacatgcttcaaaatgttgttagcaaagagatttccatgtctttatggagatttatcattatagactaaatttaaaactattagcctggacagtgcggaacatgtcaaatctacgtgttaacatcactcttaagtttatgggttgcatgtggtgttagttcttcgttttaccaacttagttttaataatccaagtattccttaaaatgtttgtgtagtatgggcctcatccttgaggtgtctgagaaaacagtttgtatgcaacgaaggctgcacaaatccaggtcactaaatgcctgaggcactggacacctggagcagttcacacatgagaagatgttttacccatggcacatggcactggctgtgccctaagggaaaaagtttccttttgagagaatgtgcagtcgtcatgtgattggggacttcgagaggatgaatgcagcctctgggcttgcatttgtccacctgaggctttctagggaagagaaaggagcacagggctctgtcttttccaaaacctcaagtgtccttgctattggaaaaggaatgttggtttccatgagctctggcttgcatctgtttcagttacaattgctaaataaatacaggctgggcctggtagctcacacccgtaactcccacaatttgggaggttgaggtgggaggattgcttgaggccgggagtttgagatgagcttaggaaacataataagatcctgtctctactaaaaaaaataataataat

SEQ ID NO: 88701 - DNA, 1875 bp, Homo sapiens
aaaactggtaggcatttatgatttttgtgagtgaattggcaagtttgatttagtttatcataacgtatctaaatatgctgctttgatagtggccttgaaaacatcagaaatgtgtccctgaatgccaccagtgcagcctatgtccattacaacatccagagcctgattgaagaatcggaggaactggccagagatgctcacaggactgtgactgagacgagcctggtaggaaacgacgtggcttctttttctgggctctgtgggagatttttctgtaccgggtttgagcagagattcagtggccccaatttctgcctattaacattcttttctggtggaatctgtttctggcttctgtcatcatatgatctgtgttttaattttttaaggtcataaatacttctttatacagactagaaaccagtgtggagatgagaacaatctcacatttccttgcgctaaaaatgatgatgctacttgatacctactggagacatttttctataaccatggtgaaaatctttattgaatggctggtttccttccttatctacttaaaaatgtctttgttttctcttgcctcagccattttaaattgtccctacctggtacctggctgactttcttgctgggaatgtgtctgggggctactctgatggagtcacttcctctgtccccagcaggactccaccctgccctgctctcaccacgcttaagtggttctgttttccagctctcagaatcccttgtttctaacgggaaagcggccgtgcagcgcagctccagatttctaaaagaaggcaacaacctcagcaggaagcttccaggtcagtatgtggctcggacggtgtagacaggcagagtgagcgtgagcgtctcgctgagcagcctctaagaatgttctccttgcatgcagcaacttgaagcttagcatttctgtgtcccatttatattccaatttcctatcatataaattttcctatcgtataaacttcctatcatataaacttcatataatttggcatttttattctagtgatatctgttcctttattgtgcagtcatctctatctttaacctgtccataatcctccactcattgccttagcttggagccttcactgttcttcctagtgtctgttgggttatctttgattgcgtgtgctcctctagtttttccttgaggagatgtattatgcttgatatttcttttacctttctcatggaactaatatcatattagactcatggtaggttctcatttaataatcattaaattaaatcctaattgatttagccatttttcaaaaaatacctatgcagtttagtttgtcctaaagtttcaagaaagaatgacttggcatatgtaagagcaatccatccaataaacatgaaccaaagtggcagcaggaatctgttatgtaagagaaactacgtaggcctacaattttttataacaaataatgtgctttccaccttaatatattctaatagatcaaaaataccaagatttctggaggagtaaatagtgggccaggcacacagctcataccctttacaggtgacttacttccgagtctaacactggatccttccacagctgtctgaactaaaggcttggatatgtacataatttttttttctcattgagtgacacagtttaaaatttatgttgtcatctcacagtatcgaaaatgtataatgtgttgatgggctgtaatttcagtctgtacaactagaggtacttcataggtagtgaaattgggagcttgctggcaattaaaatttcacgttttaaccatgtgctcaaaatccaaatgtgattgtatgttatgaacagaaattttaaaagtaaaagctgtgatcaaacttgag

SEQ ID NO: 88702 - DNA, 1032 bp, Homo sapiens
aacgtaagcaattaaaagtgagccctggcctggctgggtggctcacgcttgtaatcccagcactttgggaggccgaggcaggcagatcatgaggtcaagagatcgagaccatcctggccaacatggtgaaaccccggtctctactaaaaatacaaaaattagctgggcgtggtggcatgcgcctgtagtcccagctactcgggaggctgaggcagcagaatcgcttgaacttgggagatggaggttgtagtgagccgagatcatgccaccgcactccagcctggcaacagaatgagactccatctcaaaaaatgaaaataactttaaaataaaataaaagtgagtcccatgcactaacttctgcacgtagcattaggcaccaaaggtcagaagcagggttgcttttatgaagcacccttaaaatgccgtttctgctgcaggataaaaagctgcatgttcaagaagaacaaaatctgacctcagagctcattgtccaaggaagaggattgatagatgctgctgctgcacaaacagatgctgtacaagatgctctagaggtaaattacatctcagcacagccacagtacagtttttaaagaatcttcacacatcttttctatatgcacacatatctgttattaagtagatgtgcatatatttacaatattaatttctccatgtagcacttagaggatcaccaggataagctacttttatggtctgccaaaatcaggcaccacatagatgacctggtcatgcacatgtcccaaaggaacgcagtcgacctggtctacagagctgaggaccatgccgctgagttccagagactagcagatgttctgtacaggtaggaacacgcctttgtgggaactcaagagcttgcagtctattgatcggagaaatagatggatgtttctattcacagtgatgggtcactcttcctttgtgtaaaaatgagcactcctgttttatttacctggcaagttggatttccttgtgtctgctaacatagtttaccattggcctacatat

SEQ ID NO: 88703 - DNA, 1225 bp, Homo sapiens
ttgagaggctgcagatgagcatcacaggtagtgtgggcagtgtctagtttgaagtatctgtgcttatctagtaagaagtcaccattgctttattaaacatatgaatagatgtatatctcttgcatcgggtttccggaaccagaggggctggaatagtttggggatcctgagatgtgcaaactttagtctttgactgagagttttagctttaaaaaaatgcatatttctttttttattttctgcattatgcctaaaacttagatcctaattctcaagccctgttatggtaaagttagtatggtagctctccatccatttgcccagaataggagctgacaggatttgggacttcagttaggtaccaagtatatccatcacattagaataatttaatcacttctcagttgggtgtgctgtggcttttagcatactattttcagttttctggctaccagaaacatatgatcgctcttctttttatattatagtgtaagggcttaaaaagtacagaatccaataaaaatcagactttatagggcaaaaggtaaggaaattattagaacaaagtatacttaataaaaaaagtaggatcaagcattggtggtttatttatgcagtaaatatttattgagaacatttatttttcatgtgcagatgtctctgccaggtacaaggaaatgctgaggttgacaccatgtccttgcctttagggagtttattggtgcatgagaagactttgaaatagaccagtaatcccaagttcatgaatgtttagttaggggatgtgcagagtacactgggatatgccaggtggcctggcctgacatggaggtccaactcagcttaggtaaacagagcagtcctcagcagagaagtttctaagttcttcacttggtactagccacttttgagaggcttattaaataattgatgaattttctccatagaaattatggaaaagacaactttaaatcagactttggatgaagatttcctactacccaattctactcttcagaacatgcaacagaatggtacatctttgctagaaatcatgcagataagagacttcacacagttgcaccaaaatgccacccttgaactcaagtaagtttctaattactgtgtgcaatgcaaccaagtagagagagaaacttgcacgctatctccaaaggagaaggaggcatcgtggaagaaaagtgctcactggaaatgaaatatccta

SEQ ID NO: 88704 - DNA, 1034 bp, Homo sapiens
ctttaggtgcatccgttctccagttctgccttacttccttgcctttgcttccctggcttgccttcctcgcctttcattacagtcaataaagttcttttcgtcagcgtgtgttcacccctcttccccctgctgtttttcatgcttgctcatagttgtttcaactctcttaccaccttatcacttagtaagcaaagacccttttgcttactgggcgccactcttggcctcagctgtttctttctgtgtgacctctgggaagttacttatctgatctgagtcttggcgtcatcattgaataggggcctagcacttcctgccgtgccacccatggcacagttggagtgagaatgagatcagatgtggtgcacggggtcttggagtgtactctgaccgcatgtgtcattttcacaaaacaacttgcgcaactccatgaaaaaatgggcagaccacatcgcattaactttaactctcctttttaaaaatttgtcttgtagcctgtgatgatgagtgtgtaggtgtgctgctgaatgacttggatgagattggtgatgccgttctttctctgaacctcactggcattatccctgtcccatatggaattttgtcaaacctggaaaatacaactaaatatctccaggtaggtactggaaatacagagatgaacagacacttgtatcattaagggatatagtcattgggaatggtgggagtcattccatgtgtcctccccacattgtgagagcccaacttccatcagcccctgcgggcaggtgtccagtctttccttgactgtgaccagtgacaggcacttacttacttatctcacacgctagcttgtttcacggtgggacagctctcatcatttcagtgctctctggaggactcctcatcaatgctgccctctgtggccctcattctgccttttgggataaggccaagtccacttgctcttctgtaagacaactttgggtatttgcaaacagctgccctattagaaaagcagaaaataggccaggcacggtggctcacacctg

SEQ ID NO: 88705 - DNA, 1293 bp, Homo sapiens
tttctgtgctgtttgaatattttacttctgcaatcataaaaaggttataaacatccccaaagtccgcattaataaattaaagtttgtgctatcaggaagagattgtcaggttgtgaacattcttgtgtgctctgaatctcagatgccctaaaacacacgctttattttctacatattttgtttccactgaagtctatccctttactattttaaggaggaaaaagagtcggaagtggtatggggctgataactgacgctggaaacttcatcttgctaacgaaaaggaaccagacttggctctaactggttttgttttttattgttgtctccagtagtttgcatgcacccagctcagcctctagatggcacattggtaatttaaaacgtgaaggcagagggtagaggatgttgagaaaaaggagtaaaacaaaagcagaaatccatgaatgaggagatcaaatcccagtcgatgattaaactttgagaggctctgtcattttgcttatggcagcctaccacataactccctgcctgcctttaggtgcatccgttctccagttctgccttatttccttgcctttgcctccctggctttccttcctcgcctttcgttacagtcaataaagttcttttcgtcagcgtgtgttcagccatcttccctctgctgtttttcatgcttgctcatagttgtttcagctctcttaccaccttatcacttagtaagcaaagaccctttttccttgggacactctcttgttgggtggccaattagtgataatccctaaggtcagtcttcttccacttaacattcacatgattgtccctggacagggtcttatgaatgtcttttggatacaagatgtgtgtgcacttactgattacttttattttccttctttttgccaggtagattgtaagctctaaaaagctatgtgtaatcacataactttgagaccagtatggtgtatcctaagagtaatgaataagtaccttaaggaaagatggaaattgtatatctgaaaattcaaaaagaaattcttttcctccagttttagtcccacttgtgtcttggaaggggaccacgatttccgttgtgacgcctgtctcctgggctatgaaggaaaacactgtgaaaggtacatgggtggattgtcatgtggaaatccctgggcactctgtttcttttataaggtattgggcatatttactatagtaatctgggagccattatcaattatcagtttggatgtgcttgattgaaataagacctcattactgttccagaacaagttt

SEQ ID NO: 88706 - DNA, 1004 bp, Homo sapiens
tagtggatgaatgcagccttaggatgaatgaaagccacagagcgggaaatgttttcaggattttaagaatatggaggaaaatgctcccctttcctgaagaatatttttaaaagctagctgatataaaacgtggcagtgcttagctattaccagataagaatgatttctaacaatttcccattttttcccccttcctttaaatgtgggctcccagaactgtggcgataacacagcaggtgaccattgtgatgtgtgtacttctggctactacgggaaggtgactggctcagcaagtgactgtgctctgtgtgcctgtcctcacagccctcctgccaggtgagtccccacaggggcagctggcatgctgggctgcccagggctgcttccagttcagcctcattttcaagggtctctgagtggtctgttgttaatgaatattctccattggttgcaaaaggctaattttaagaaaaggtgttcattctcaaaagcattggaagagaatcttttcaaaagcaaagtatctgttttggtattggatgtttggatggaagcaattaaagaaaggacttttaggttttgttttttaagactcattttagcccacagcatatgtatccaatctgcatggagataaattgctattaattttattgataatgatacaaaagaacccaattaccatttaagggaatggggttagagtttatataagggaatggggttagagtttatataagctggtgcctaagtgctgaaataccacatggtgataaaattgggactagtttctaccttgtacttatgatgcttgtacagaattacctgaatgcaaaagggaaccagaaattttaagtgggaattagaatatcaaagaatcctctttggatcaaatgaaaattataactcatcaataatattttattattgcttagaatatttggcaaggtattgaacatacaaagatcaaatgttaactcttggtatactgcaatgaagtattc

SEQ ID NO: 88707 - DNA, 1042 bp, Homo sapiens
acttgggaggctgaggcaggagaatctcttgaacccaggaggcggaggttgcagtgagccgagattgtgccactgtactccagcttgtgcgacagagagaccgagcaagaagaccctgggatcaaaattccagtgagattagcaagatctccaaaaacagtttgaatttcaaattctcaagaaatgtatattagttttatgtcaatttagtgggcactgcatcttaaattctttatcttggcgtactattttcaacctgcatagagatagtggtacaggagactttggacttgctcagatttgggaagtgtttattcttccagcagatgtttactggatgtttgctgtgtggctggcactgccttaggtaatgcatatctattgataatggaactgacactgcgcctgtccatggaggtttcaggaggtctttgtcagttacactcagtggcatgcacagaacatggctcatttctggagaaatttataaaagaatttattctttataagttttatgcctgtcagaatttggcctctgagcttaattgaatgtgtttctcattctacagaatttttggaaatattttaactctgtttctgaaaaacctgtcacgcgagaggattttatgtctgtcctcagcgatattgagtacatcctcatcaaggcatcgtatggtcaaggattacagcagagcaggtacttggagcttctagaattttgaccgttattttcatatttgaaagcaaactgaaagaatttgactcacttcacttccattacctactatttttattaatccatgtagttcagttccttaccaaaacattgttaaatattaatatcattatggaatgtgcgaattataacttaaagtatccacctagcatgctaatgtcgatataaaatataaggacataatgttggaatcttagctgaagataaaatgcaaaaaaaacaattgctgtttctgcacatgaaaactgaaatgcccatgtcttcgtagtgatgtataaagaatgctgtcacctactcatctcatac

SEQ ID NO: 88708 - DNA, 1591 bp, Homo sapiens
aataatatttatcacctggccggtggctctcacacccagggatcatcagaatcacctggagactcgaggcggcttccagagttgtctcgggacattctcatcagggactctgtattttccaaacacttccaagatgattctgttaatcatctgtgtttgagaatcactgattggatctttgagaaaactgacactcagaaagctccgggcctggctagaggaaactaatgtttgtgcatctataattatgtttaaaattatgtttgtgctctattttgtctctgtttgttcagaaatcacatctcttttttaggcaaaaacgagtcctttatttgctcccctgtaggaaaatgtctttggtcctcagtgcaacgaatgtcgagagggcaccttcgctctccgcgcagacaaccccctgggctgcagcccgtgcttctgctccgggctgtcccacctctgctcagagctggaggactacgtgaggaccccagtaagtcacacacagcgaaagtgttctgcttctaaccccactcccctgggaggtgggtgggggtgggaaacacagccaagtgttcacattaaattttgctcttatggcatccaaaattctaggaagctaatttgggttagaacaggaatcagagctcagcttctgctggccgaggaagtaaatggagcttgaactaaaggctgtccatgttgttccttagctaatctatgaaaagctttcattggagagaagatagaactgcaaaatctcagccgtcttctgcatatcattgaacgtttccccagcgtagcaacagtttggccctaaatggcagtagtttaaagcactttcagttcattttcttccagatgtttagtttaaaggaaaagtctttactgtttctgttttaataatgaagctgtttcatctgtgaaacaatgatggaatctaaagaatgaaactggagtggaaagttcgcattttgaagtgcactttcccctcctttcgtggtttaggtaacgctgggctccgatcagcctcttctgcgtgtggtttctcagagtaacttgaggggcacgaccgagggggtttactaccaggcccccgacttcctgctggatgccgccaccgtccggcagcacatccgtgcagagccgttttactggcggctgccgcagcagttccaaggagaccaggtgaggtgcacgcccagccgagagccagtcggtgcttcctaggatatacagaaattgtttaaaatcaccatagtctgggccggcctgtcatttaaagaagtagttattaatttcctcttttaagtgggatcagagaagtttaatgctcataaaagtctcctcaaatatatggttccttaaaatttttcattaattttaaaagttttttaagttcacgttatattaatttggttcttcctaaagcagtcattcaacagacatatacagtcatgtgtcacttaacaatggagagacattctaggggaatgtgtcattaggtgcgaaagttattattataatctcatgagaccatggtcgtatatgtggtttgtcattgactgaaatatcattacgtggtatgggaccc

SEQ ID NO: 88709 - DNA, 1082 bp, Homo sapiens
acctctgtatcccaaagtgccataattgcaggcgtgaaccactgtgcctggcctgatttctacagtaatttcgttagacttgttttgacctagtagatttaatttcagttcacaattctggccccgtgcgcatgtgccactaagatgcacagatttccggcaacacaatgcctgtctcctgttggcacatggcaacgtgaatccatgcagcaatagcaagagagagatggttcatttgtagaacttccccacatgtagtgttttcctgtaattcaaatatgtgtgcatttggaagcatcaaatctgcctttttaattgagttggttttcccttctctcaggcctgcaattgcagtctcgtggggtcgactcatcatcggtgcgatgtggtcaccggccattgccagtgcaagtcaaaatttggtggccgggcctgcgatcagtgttccttgggttacagagactttcccgactgtgttccctgtgactgtgacctgagggggacgtcgggggacgcctgcaacctggagcagggtctctgcggctgtgtggaggaaaccggggcctgcccttgcaaggtatttaccatccatcctcctctttcatcctgtctctggctcctcatcatgactcctgggctttgactacttacctaagcagccaggttttggatgcttttcctagtgagttcacactcccttccgcatctgagttcaaagtctcttatgctcctctagagtgacggatgatttttgaaattgaatttttactgttactagtgtcagttgatggaactgatttgaaaactgccctgaagttttaatcatatatcccagaggctgagtggctgcgtatcttgagtatgcaggtgaggtgggtttctcagggcttcgggatttgtgatgtgatccctgtgaggttattgggctcccgtatgtgctggccacattgaaggaaatcggggtttattattttcccaagaggtaagacttcaatgtcattataagttttgtgtgtttccgttagttttcccaatgtgctttgctattaggaggtcagagccacctcctctggtccttttcc

SEQ ID NO: 88710 - DNA, 1100 bp, Homo sapiens
agttttggtcatggctctgccgcctactaattgtgggagcttagattcattacttaactttgcttggcctcagtttcctcatctgtaaaatggggatgctaatgagaatctgcattgagaagttagtgtaagtgttctatataaagtcctcagcatggcattgggcctgcagtaagtgcttagtaaatattggctccctctgtgatcacctagtgagggctttttcactcttttctctatttcccctgtcctgtccccatttccccgcttccctcagcatctcctgagatggagggccggctacctccatgagacatggaggggtcttgggaattgtgaggcgtcttttaggagtgagaagagtggcttggactcttaataaaagggaaataacagcatcagctcttagccctttaatgacatcacccagatctgtaacccagcattcatctttatttcagcctgtgactgcccacacactcagaatacctgcgacccagaaactggagagtgtgtctgcccccctcacacacagggtgtgaagtgtgaagaatgtgaggatgggcactggggctacgatgcggaggtggggtgccaggtgagcactgtcatccacgctcttgcttaactgagagttgctttgctgtagcaagtttcaggcctgttcttctatatattttctggactttaatctgttgaatagctttgtgaatttaaaaaaaaaaaaaaaactcaatgtgggccaggcacagtggctcacacctgtaatcactgcactttgggagactgaggcaggaggatcgtttgaagccaggaattcaagaccagcctgggcaacaaagcaagaccctgtctttgcaaaaaataacgattaaaaaaaaatttagcctggtgtggtggcacacgcctgtggtctcagctacttgggagactgaggcaggaggatcacttgagcctagggattcaaggctgtagtgagctgtgatggcaacactgcacttcagcctgaacaacagagaaagactctatcttaaaaatcaaaaacaaaaacaatacaccttaatgcagatgataggaatcaaagtggaagacaggacacc

SEQ ID NO: 88711 - DNA, 1020 bp, Homo sapiens
agatatttttcattaaattatgaaatataatattaatatgtacttatttagattacgttttaactgagctttaaaatattgaatatgtacctgattggaatcagggcaaatggctaagttgattttgaaatctccattgcatgtttttcatgggaatttgtagctcatttaaaatatgtcgaggaagtcatgaaattggtgaagcgaattcgctaattattgtcttaatagcttcaatgtgtttttcctgtgatggatccttccactaaccctgtttcagtttactcttcagaaaaatgctaaacttctaaagttattgccaataatattatttttagttttgtgatttgaaacattgaaagtttacattttttttttcctttggggatgacggatcttatgataaccatcctcagaagtgagggttaatatgtctttgtgtgcatgtgtttagcctgtgaatgccatgtgaaaggctcccattctgccgtgtgccatcttgagaccgggctctgtgactgcaaaccaaacgtgactggacagcagtgtgaccagtgcttggtaagatgcatgtgactaattgacaccttagccttggtacagaggcgattgaatccatgactcagaaggagctaagtccccaagtgtattagtttgttctcacactgctatagagatactacccaagactggggaatttatcaacaaaggaggtttgattgactcacagtttcgcatggttggggaggcctcaggaaacttacaatcatggtggaaggggaagcaggcaccttctttacaaggcagcaggagagagtaactgtcaacacttataaaatcatcagatctcatgagaattcactatcaccagaacagcatggggagctgcccctatgatcaaatcacctctctcctttgacacatggggattacaattcgatttgagatttgggtggggacacagagtcaaaccatgtcataaagtgtggctgacaagtgccgtgcctgtctagagagtgg

SEQ ID NO: 88712 - DNA, 1046 bp, Homo sapiens
ttcacagtaaatctcagggaacagagtccgtctgatttattagccattcagggagtccctggatagtgcggtaaggccttaagtaactgcatttgtctgatcccactttcaatctttgatacagatgtgcagatggttactatggaaacccaacagtgcctggcgaatcttgtgttccctgtgactgcagcggcaacgtggacccctcggaggctggtcactgtgactcagtcaccggggagtgcctgaagtgcctggggaacacagatggcgcccactgtgaaaggtgtgctgacgggttctatggggacgctgtgacagccaagaactgccgcggtgagtgcgtgagcgtgaagtcaggtcagctgtttattgccataggaagtcttcaaccgtatagtcacatgtgtcacacagggccccgcctaggaggtcacactctcttgaggggttacttgcattaatgctgggtctctgatcaaatacagacccacgacccagttcttccctagctaccctatcctgagcttggttagtcataacccataggggtcagtggcctggaaagatgcagcctgccacccgagcggccagtgtgacttgacagagttccggctctgctccccgtgactgaaatgaaagtggggaagctcagagcctgtcacattcgtaagggagatgcttcagaggctgcacgaggcagatgggattccaagatgaagggtgggaaatggtaagactgtaaccccagaaactgcgtaaagcaccgtgtggtgcatcttagccctctgtgccagaactgcccgacccctatggcactctgctgaattcgatccttgaaattatggatcgtggagaaaactagattctcctgcacagcagatgacctggccggagggatgattcagccctcagattttgaaggagtgaaagaacaaaagtggcaattataaattattttgagtatttcatataaacgccagtcatactatggtactacgacatggggacacaagagggcaccagctgtacagaaaacatacttt

SEQ ID NO: 88713 - DNA, 1029 bp, Homo sapiens
caggaggccttcctcatatagctcagaggttggtgactggttttagcattttgtcttttttttttccgcttggacttcaagttgcttatagataaatctgaaaatcctttaagacaacctgagctgattcttctggtgcatgttcctaggcgtgtgcgcacaacaccaccggcgtccactgtgagcagtgcttgcccggcttctacggggagccttcccgagggacacctggggactgccagccctgcgcctgccctctcaccatagcctccaacaagtaagcctcggacctcatcagcggttcctgccagcatggccaggattcccacccagatgcgtactaatgacttcagagcaagactgtgtgtgtaatacgtgtgtgaattttgcccagtgacaattgatttggattaaagacagaggggtgggttattttcttgtaaaccaacgtttggcttatgaaagcaggcaagaagaggtgtgtgccagcaaggacctatacacgccgttttccctcttgattcctcttggtcatcagttgtttcacaagtatatgttgtctacttaccagtgggctaggaggtggagggatacagagaggaataaaacattgtccctcgacttagggagtttttgatctaatgaccaaaatatgtacgcatgaggctaaacaagagcagtctaaatccattcattgattcaacagatatttatggagtgcctactgtgtcctgagttttacagcaggtgttctgaatagcaaactgttctcacctggccgtgggccccaggggactcagtgtggtcgtgactgtagtgaggcctgtccaccagatggtggggaggagggagagcagtgtccagcctacctaggtgggtgcaggaagctcttctctcagatttgcaggagaaggagtttcacaggcagcatagacgggcgttctaggcagatggagctgggcgtgccatggcatggcagcaggaacaggcatcgcccatttgaggaactgcagcaggccatggaacaga

SEQ ID NO: 88714 - DNA, 1926 bp, Homo sapiens
tgactttgtaccaaacattgaaggcatttccagggaataatgatggctcccagataatatattgttgtgaaagacctttagttatttacaaaaatcacatcacccttttattggatttaagtctttttttttttttttgagacagagtctccctctatcacccaggctggagtgcagtggcgtgatctcagctcactgcaagctctgcctcccaggatcaagcgattctcctgcctcagcctcctgagtagctgggactacaggcacatgccaccacgcccggctaattttgtatttttaatagtttcaccatattagccaggatggtctcgatctcttgacctcgtgatccacccaccttggcctcccaaagtgctgggattacaggcgtgagccactgcgcccggccggatttaaatcttttaggagcccatcttcattgagatgtgagatgtatttgcgagcgtgtgagtcacataacaatctgtctatttgtaggttggagtccgtctctctggacatagccagctctaatgccatcgacctggtggtggccgctgatgtggagcactgtgaatgtccgcaaggctacacagggacctcctgtgaggtgacgcttctctcttcctgtctttttcctttcgttccttcctaaggggaaaacagtgcactgaaggggatgtcatggcaaacatttgatttttagctttagcagcccaatgtttggctcagtcttttttgggcaatagaaatattagaagtcacattgtttaaaaaaatcagattcctccaccaggaatgggctggagcaccggacaatattctgacttagtgctgccctcttgccttagtcaacaagaaacttgcaatactcatgccattgactgtgtttctaaggaggatggaacttgatcatatctgaacatttacaaatcaccagcatgtgacctgggtagctttagacaagccagccctattttgagaccttttatggcccctcgctattttactttggtgggctccaccttacatgtgaaatatatgaaaatgcgcttggaatcctcaatgaaagtaatctgttgctaaaaatattttgaaatcacttggacaaacatattgatattaataccataacaagaataggccgtaagactcattgcacaaccattacgtttttgtgtgtgtgtttctacctttaaaaagaaataaggaactggattatggtgatggttgcacagctcggtaaggtttttactaaaagtcattgaattgtacacttaaaatgggtgaattgtgtagcatgtaaatgatacctcagttaagatgtttaagaaaaaagacatttctgtactctggcaactgagcagtttctgtttgtaacgtagtggaaagaggatgactttcccttctcttgcagtcgtgcctctctggctattaccgcgtggatggaatactctttggaggaatttgtcaaccctgtgaatgccacggccatgcagctgagtgtaatgttcacggcgtttgcattgtgagtctctcactgtagttcaggtgccctctcctcctcaattcagagccatttgctgtgtacaagtgatttttttttaagtgcttcctccacggaataaccctagcctcatagaccccaaagaaaatttacagatttaagctcatgtcatgaaatgtttcccgtttttttttttgttttttttttgaaaaaagttactttggtaatagtggaaaagggatatacaacttcattatagttctttttattagattaatataaagtaattgtttttatttgctgagactataaagcaatagaaaggtaaaaaaatgttgtctacttattaaatacaaagcataggatctttagatgacagtgctaatatttatttatttatttatttgagacagggtctt

SEQ ID NO: 88715 - DNA, 1105 bp, Homo sapiens
acggtaaatcacttttgtgaacagcaacttgatgaaaagctggagctatgtttacatactttttctacttctgtactttagttaaagattagaggtgtcagatgggttgctttgataaaagctgtgggcaactgcacgactttctttcttttccaagatcccagcgaagtacacaggctttcagtttattaccagaacccctctaaaaataatacaatgaaacaccttttctctgataattctgggccaagagctgtacacaccattacacgtttgccacaagaagctaggcacgaatgaaaaaccacgttgctgaatacaaaatttgattttatttttattttatcattaaattgaatgacaaatatattttctcttgtttttaaatgttagggaaacggactcactttaagcacacaggctgagggtctgtcattgcagccttatgaagagtacctaaacgtggttagacttgtgcctgaaaacttccaagattttcacagcaaaaggcagattgatcgtgaccagctgatgactgtccttgccaatgtgacacatcttttgatcagagccaactacaattctgcaaaaatggctctttacaggtatgtattgaaaatggaggaaaaacttacggtgaaggtacttccattttatgtttgtttattcatatatatttaaagctcaacgtattttacattcattatattaaggacacagctacaggatctggctgtcttaagaattattaagtttataaatgtaattttattgaaaacgtaagaacagttatccacatcaagtgtatccagtagaagacagacttgacattaggatgagaaactttcaaagggggtttctgggaaatgcacgatgagttagcgattgtctggaccatgttgcacctggttctcaccatcctaatgttaatggtcttagcttttactcagtccatttaagtgaacgtatccatcgttggtcatttgattactttcgggaggacaatttctggcaatgccgtgccaagcataaaagttgtatgcagctaggctgggcatggtggctcacacctgtaatcccagcactttgggaggccgaggcaggt

SEQ ID NO: 88716 - DNA, 1025 bp, Homo sapiens
atcagaagaaacacctttagtcctttctctaactagcaaatcagacatattctttgttgtcctatgaggaggatgctgaaatgaaaatgtggagattgtagacatgggtcaaactcctcatcccctaaattacttaaccgaagtaaatatctattgtgtgattaacaaaagtttatagtaatttgccttgtggtctctaacaaagagtacatttttcttctgtgctttcaaacagtgtcctgcatgttggtaatattgattaaccaaaatgtttatgaatatactcccctttcactgcctttaatgtgaatttccttgtctgtcatggtcaaggggatagttgtagcctagttgtttgcagatggatcccagtgaccacttcctcttacttgattgttgctgtgattgtcttcccctttcgtgttcattctcgcttaaacatttcagctgactgcgtttggcggattcctgaaatacacggtgtcctacgatattccggtagagacggtagacagtaacctcatgtcgcatgctgacgtcatcattaaggtgattgtttttgctttgattctgctatagagcttagggcttagtgggctgatagtttatgactgaaagttactaggtgaggacatcccagcaaggagctggtggccaggtggccattcagtagaccctggacttgcgtggggactactgagatggtgagtgtgagaatctgtctttgagcccatttctggagttgcctcaggacagcacccgccactcttctcttcatctccagggtgtacccatcttttcacatttaaaaagaaagggagctgggcttggtggctcatgcttataatgtaagtgctttgggaggctgagacaggaggattgtttgaagccaggagtttgagaccagtctgggcaacatagtgagacccccgtctctcaaaaaatattagccaggcaccgtggcacgtgcctgtaatcccaggtactcgggagggtgaggcaggaggatggcttgagcccaggag

SEQ ID NO: 88717 - DNA, 1059 bp, Homo sapiens
tgcattaatatggtgccagtgaggggttttatttggccttacaatattaataacaatttcttcataattcataggacattccattgtacctatgtgcttattcccacctgtgcagtcttaggcacatgttatatactactggaaataatcttgagcatttatgaataagagaaaattctatagctctcttcagattttgaaatgctggaaagatcagtaaaaaaatgaaaaatttaaaacaaaacaaaacaatttaaatggaatgaccgagttctaagatctccagccttgttcttgagtacaaaatcaaattatatataattcaaaatctctattctggaaatattgactttatgaggcctcacctttactttggacgtttattcacctgtctctgtggatcaccgaacacctatcttgttaatgtcattttattctctctggacagacacattggtttcaaaagctaatcttttaccctaacttacaggaaaacgttgaggggaaggcctgtgatcgctgcaagccaggattctataacttgaaggaaaaaaacccccggggctgctccgagtgcttctgctttggcgtttctgatgtctgcagcagcctctcttggcctgttggtcaggtgggaggcgccatctgcgcggcgggatttaatgagcaggtcgtattgcacaagcttggcacgagctgtgtgaggaggaaatgaggatgacttcccgtgacaccactctcatcgctatgcaatgatactgacgtgggtcaaaggcagccgtctgcctctcaagattctttataggtcatgtgcttactcccacacacatttctctatggaaaaaacaggatgatgtggcactagagaacacgtcttgtttcaatttcttctgtggggaaatggattgggtggggaggtcggctctccctccgcccgcccctgctgctctcaggcctgggagcccagagggccgtggggccatggggattttccagctcaaagacgctaaggagtaggaggccctccagtggcgagggtgggaacagcggcacgtggtg

SEQ ID NO: 88718 - DNA, 1041 bp, Homo sapiens
ttaggagtgcagttgctggatcttatggcaactctataacttaacattttgaagaagtgtcaaaaggttttccaaagtcactctaccattttatattcccagctccctccacgggtttcatctctgttttctttctttaaacaaggaattggcaaactatggcccatgggccaaatccagcacactgtctgttcttatgaataaagttttattggaatggagatatagccatttgcctgtgtattctctatggctgtgttcgaacaataatggctgagctgagcagctgcaaatgagactctgaggccaaaaagcctaaaatagataccctctgaccctttacagaaaacatttgccaacccctgctttaaacctcttttgccttcatgttgggtcattgccattgttgtctttctagggaagcagccaggtcagtgcccatgtaaggaaggttatacaggagaaaaatgtgatcgctgccaacttggctataaggattacccgacctgtgtctcctgtgggtgcaacccagtgggcagtgccagtgatgagccctgcacagggccctgtgtttgtaaggtaagtggggaggtcagagacacccctgagcttcctttgagcttctctggaaaaggagtgttttccattggctccaatgatcagttcttgagcaaagtggtaaggtttaagcagaactccccttgccccttctctccaagccacaccgagttggctgtattatatatgcttggactcacatgggcatctggcttctttttttgtacctctggtaatggtgatatattccagaggcatttctgtgacttcttagaggacaccaaacactgcatacctttatattcccacctcctctgtgggcctcatctctgttttctttctttaaaccaggacttggtaaactatggctcgtgggccaaatctgacacactgcctgttttgtgaataaagttttattggaacagagctgtatccatttgcttatgtattttctatgactatgttcaaccaataaaggctgag

SEQ ID NO: 88719 - DNA, 1079 bp, Homo sapiens
gcccacatcgctttttatatttaacaatgtattgtgaaattctttccatattagcaattagaaatgctgtttttaaaaacagttgcacagaattccattatacaaatgtagtataatttattaaacaaccacctatcggcggttattttgatggttattagtctgttgtccacacaaacaatggtgcagtgattaaccctgtatgtgtccttctcaagtgggcaagtacttctgcgaaatataatcccaggagatggtttgctgggtcaaatgggtatgtgcatttattattttgatattaatagctcttcccaattgtcctccataatactgcccatatcttattaaaattacttattctaggattttaatttaatctaaaatcatagaacttacttagggaggttaagagttttctttgtataaggcatgctatgtaaattaattgagatgttaaaaatattctcctagcatgtaattgtcacaataaagccaaagactgttactatgatgaaagtgttgcaaagcagaagaaaagtttgaatactgctggacagttcagaggaggaggggtttgcataaattgcttgcagaacaccatgggaatcaactgtgaaacctgtattgatggatattatagaccacacaaagtaagagtatttctttgccattgctgatcttcatcatcttccccaggtggaaaagagactttgtcaagtcttaacctctgtattggagacttttgtaatatttcatttatatccttgttatgccagtagtgtttttatatatatatttcctactctatcctgcttttcttgctcaaaataagatgtcagtcattgttatttatcttgaattcaggggtccattagctatgtaatcctgggtcataatactaactacagatgtgaaaattcagctataactaaagcagctgtctcttgcctgtaggagatgttcagccaatcttttttttttaatttttattttttgagacggagtctcgctctgtcgccaggctggagtgcagtggtgcgatctcggctcactgcaacctccacctcccgggttcaagc

SEQ ID NO: 88720 - DNA, 1011 bp, Homo sapiens
tgcttcagcctcctgagtagctgggattacaggcacgtgccaccatgcccagctaattttttgtatttttagtagagatggggtttcaccatgttggccaggctggtcctggcatcttcccttttaaaacacttgcatgaagttacttcttattttcttctaatctttgtaattctttacctcttgaataggactattctgttatcgatgctgaaaaatctgtagatgaacactaagaaaattattaataggagtttctaaacccttaataagttccatgtatatttttaaaaaaagtttttattagctaagtcgtattctggttttgctttattcctcttcatttctgtttgtaaccaggttatttgtatatattggcatctaaaaattaaatgccagtttgctttgatgataatcatatatcctctgttgtgaggttcttgccacatatttgacagataggttctttttaccatgaaattaagaaacataagcagatacattttctaattcagttttggcttccttattgtgtagaaactgcagtgtcaatgtgagcataatacttgcggggagagctgtaacaggtgctgtcctgggtaccatcagcagccctggaggccgggaaccgtgtcctccggcaatacatgtgaaggtcagtatacttagaatctgaaggtcagtacagttttcctcttaatacgtcccaagtttatggtgtcttaacaacttttatagttagcaggtaacttgttttcttagaaatttaagtagtttccaaagctgcagatgaccttaaaattttaactattgtggcctaaatgtatctttatgggtttgctgttttatctatgagtcccccttcccgtatagtctattattctgtattaattttacttttgtttttgtttttttaccatgggatatgccaggttgtatattctgtattgatttggatttaagttttaaataagcaatatattcacaagattcctagatctaacaatatgt

SEQ ID NO: 88721 - DNA, 2200 bp, Homo sapiens
gacattagacaatcagggctatatttttgcatgcttaaaattgacatttgtggtcaggtatggtggctcatgcctataatcccagcattttgggaggcaaggcaggcggatcacctgagttcaggagttcaagaccaacctggtgaatatagtgaaaccctgtctctactaaaaatacaaaaattagctgggcgtggtggtgcacacctatagtcccagctactcgggaggctgaggcaggagaattgcttgaacctgggaggtggaggttacagtgagccaagattgtgccactgcactccagcctggaccaaagagcgagacgccatctcaaaaaataaataaataaataaacaattgacattcatctattttgatgccttcatcttcagattcatacatcactcatcaatggcagaccaagcgctgacgatctttcacccaagttgttggaattcacttctgcacgatatattcgccttcgcttgcaacgcattagaacgctcaatgcagatctcatgacccttagccaccgggaacctaaagaactggatcctattgttaccagacgcgtgagtatgggacggcagtcctgccaaataaaataaaaagattcattttatttaaaggaactattatttttcttctttcctttttggttgttctttccccgacatgttggccttttttcttgccagcagctgtatccttatttcatgtaagattgctatgttgttacagatgctgcctttaggtgatgggccaaaatcatatccttaggtccctcacccaccccgtccccatagtgccataatgtggtgaatgccatggtctttgttcttcacatcgtagtctggttccacatctgatcttcagcaactgagaattttctttcatatcaaattttaaagtttgagacataatttacattcaggaaagcatacagattttaagtatgtagttaagtgtgtaagactggtgtcgcaaaaattttcatatcccttcaataacccaggagtgggattactaagttatagggtagctggatgtttacctttttaagaaaatgctaaacttatataaaaagtagttgtattcagctgggtgttgtggctcacgtgtgtaatcccaacactttgggaggctgaaatgggagggtcactgaagcctgggagtttgggaccagcctgggcaatagagtgagacctcaactctatttaaaaaataaaaataaaagtagttgtgtccgtttttgtagtctgaccagcaatgtgtgagagttctggctgcactacacactgttagatatttagtgctatcagtcatttttatgcccgctgttcctgtgtgcgtgtattggcattttgtgacgttaatttgtgtttctctgctgactaatgttgacaatgtgcttactagtatacgatcagattttttttgtccatttttaaattggacaaaaaataagcctccttgttactgacttataaaagaattttatatattttgtatacgaatccttcatcagatatgtatatattgcaaacatatccgttctacttggtgtttgcttattcaccttcctgtgactttggatgagcagaggttttgtgacgaatcccaatttaccattttttcttttatgattaatgctttctatgacctcaaaaaatattagcttatcccaaatttaccaagatatcatggtaggctttcttttagtagctgtatagttttagcttttacatctataattcattttgtattaatttttgtgattggtgtgagggaggagtcagagttttttttgcttttgttttttttcctatatgtatatgcaattgttctagcaccatttgttgagaatgctttacttgttttggggccgttgttgaaaactattcaaccttattattgtgggtttatttctggactctctactgttctatagatctgtttgtctattcttgtgccaataacaagctttcttggttactgtagctttacagtaggtcttgagaggtcaggtttcttgtatttccttatgaattttagaatcagtttgttaatttctgcaaaaaaaataaagcctgctaagattttcattgggattccattgattctttacaccaatttgtgaagaattttataagacattttaacaatgttgagtcatccaatctgtgcacctgatatataa

SEQ ID NO: 88722 - DNA, 1039 bp, Homo sapiens
ccaatgtataccagttctctcaaggtgcacttttgtttttgaacagttgctactgattctattttttaaaaaaattattgtgtatatttaaggtgtacaacttgatttgatatacatatgcaatgtgaaagaatcatcacaatccagataattaatatatttatcacttcacatagttacccttttgtgtatatgatgagcatacttaagatctacccttttaataaataaatttctagtatacagtacactattgttaccatccattatatctccagaacttattcatcttgcataactgaaacttggtatgcattaaccaccatctccctattcccctctcctcgcacctcatggcagccaccattctactgtctgattctaagttcaactatcttagattctacctttaagttagatcatgcagtagctctcattctgtgcctggcttgtattgattctggattgagacttttcagtgtctttgtttcaggtctttcaagttgcatatgtcatcattaaagctgccaatgcccctcgacctggaaactggattttggagcgttctctggatggcaccacgttcagcccctggcagtattatgcagtcagcgactcagagtgtttgtctcgttacaatataactccaagacgagggccacccacctacagggctgatgatgaagtgatctgcacctcctattattccagattggtgccacttgagcatggagaggtaggtatggtgcccgctgcagcaagatctgtttcctcatcagagtctccctgtctcagactcaaaattgatctctctcaatacaaagatctttaatataactatctagctctatttaaagtggccttgagtcatgtctattataagtaatttcacaaacaatatggtttaccttgttgacttcctctcttcaaggaggctctcagtcttcactctgctgtgatttaataacgcccttggatcctccttcagagcatcttccccacagcaccagggcaagaatgtttgttgaaatattagaga

SEQ ID NO: 88723 - DNA, 1034 bp, Homo sapiens
ttcacagggataactcagcaatattatttatcaaatgcacttaactgttcatctaaatctcttttgtctgggaaaagtttatttccttcatgcaagagagaaaacatgccttcattcactgttcagttaccaccgtggaggcaggtaggttcttttatggagaattttcagaccggagtcatgcctggtattgagccccatagatttcctgagagcctgcggagaacagctgcactttctgtggagaggagaggcttcacttctgtctgcacatgggaagttgacctctgatgctggaaaattaggttatctgtattttttagacatctgtgcctgagatggatttaatatatttaagttaagattgaggcccacatgaacattcctgtctggattccttttcagaaagtggcgtttgatgtgtgcctactttatttatgtgacactgtttatgtgcattccagtgatcattaacaaaggctacttggtggaaaatcgtgatgaaagtggatttaaaaatggctgtatcagctgcaggtttagcaagactacattgactctgagtctagtgagaacccctgcatcatcaatttgtgttcagccaaccttaaatccagagaaaaggcagtttagtcaaccatgcaaaaaaagggcaaaagaaatattgtggactttattgggacaagggtttaatattctatatactggccaggcacagtggctcatgcctgtaatcccagcactttgggaggccgaggcaggtggatcacctgaggttaggagttcgagaccatcctggccaatgtggtgaaacctcgtctctactaaaaatacaaaaattagttgggcatggtggcaggtgcctgtaatcccagctacttgggaggctgaggcaggagaatcgcttgaacccaggaggcagaggttgcagtgagtcgagattgtgccattgcactccagcctgggcaacaagagagaaactttgtctcaaaaagaaaaaaaaaatctacatactaacagacagtccttcagtt

SEQ ID NO: 88724 - DNA, 1063 bp, Homo sapiens
gcaccatcacggctcactgcagcctcgacctcccaggctcaagtgatcctcccacttcagcctctccatggctgggaccaaaggcatgcaccaccatgcctgcatgattttttttgtagtttttgcagagatgaggttttgccgtgttgcccaggctggtctcaaatttctgggctcaagcagtctgcccaccttggcctcccaaagtgctgggattacaggcatgagccaccacccccagcctgcacactttttaaaacaacaatactattagtcaccctcaaatggaaatggtgacacctggaccgtgggtcagcttgcggggtgggctccttttgaaatcgcttttctaattgatggaagtcagaactgcttctgacaggtgtttgaagtatttctttcctatcttcagattaccgatcatgggttactatttacgttttaaatgggctcgtatctctgtgccctctatttgtcagcaatcatctctcttactttggcttttcttcaatgtccactttaagtatctcagcatggttctgaagggagcattcctagattgtctgagacatgaattttaagaattttaaggaaagaaatctgcttgatctaaatttatcactattggcagcctgtccctcctcccctaatcaaaacaaaaagcaaaaagaaaaggagcaaaaaagagaaaagttactggacaaggacatattttgttttgttttaattttgggacatgtttattttgcacatctaatggtagcaccaaatttaaagagaaacaaatcacgttttattctgaaatgttcttctcgtttatgaagctgtttctttttgtctgttgagtatgctgctcctaaaatgagataacagttaaaactgccaactgaaatataatataaatgacatttcaagtaattgctctgagaaatgtatttaaaatgtgtattgcagacatccttccttccctctcagctccctagcatctcagtttttgctagtttttgttgccacttcacgtgctgataattgactaagtgctttcgtgattgacacgctataa

SEQ ID NO: 88725 - DNA, 1964 bp, Homo sapiens
aattgaatgtaaagtacagagaattcccccacacccctctgtacaatagtttttggatcaaattttggctagtcgttgtttttttttttttttttttttgagatagagtctcactctgtcacccaggctggagtgcagtggcgcaatctcagctcactgcaacctccgcctctcgagttcaagtgattctcctgcctcagcctcctgagtagctgggactacaggcacgtgccactatgcctggctaattttttgtatttttagtagagacgaggattcaccctgttagccaggatggtcttgatctcctgaccttgtgatccacctgcccccctcccaaagtgctgggattacaggcgtgagccactgcgcccggccttggctattcttaatcacccttttaagagcaagtgactgatccagtgcagttcaacagtttctaagaccttttcctccgtagtatttacaagacgatcatgagaattgtcaatcatataatttaagaatttttgcttttcctactatttaatggtatgtaatcagaagatatttatctgtgttcttcatatgaaggaagcacaaaaaaatgtcagttaaataaccacttagtaggtctctagtgggatgaacaatatttagaatcatttacaactttataccagtcttgtatcagtcttatagactgagccaggcaagaaatggggctgcccgaacttgctgttcaggaaatgccaccaaggagaaagcattgtgtgaacaatgggtctttcactgtaaagtcctgagtttggggctctggttttgtattttgtgaagtatcatcatgccttgccagagctcagtaagaatgtgaccgaaatcaggtcatgagaaagataagatttcaaacatcccctcggagctgtttgcttgacctccactgacttaattggtttctatggagttggcccctgcctagaaatactacattcctactcattttcaacttagacagctcagtctttcacaaggttgaatcttcataccattcacttttcatctctttttttttggagggggtgttattataaaatatgcatatcataaaatttaccattgtaacctttttttgtattaaaaatggcatattctctattttgcatactttaatttcagaacaaaataaacaaaaaaaaatccacaatacacaacatccaatcctgctgtcagagtagggagggaatgggggcttgacacccttgtttcctgccttcaatacaaagacaggagagaaaaaaacactagacatcagcagggggagccaggtgggacaggggcacttgaggctgcagtgggagccattttaaccatttttaagtgtacagtacagtggcattaagtatattgtgcaaccgtcaccaccatccatccccagaactttttcatcttcccaaacagaaactctgtaccccttaaacaccaactccacgttcctctcttcccccagccctgggtagcctccattcagcttttgtctatgaatttgattactctgggtaatcaagcttacataagtggaatcatattctatttgtccttttgtctggcttatttcacttagcgtacataatgtcctcaaggcttatctatgttgtagcatgtattacaatttccttccttttaaagactgaataatattccattgtatgcatagaccatattttgtttagccattcatccatcaacgggtacctgggctgtttccaccttttagctattgtgaataatgctgctgtgaacattggtgtacatgtgtattcgagtccctgctttctcttcttctggatatatacctggaagaggaatttctgcatcatgttgtaattctatgtttaattttttgagggaccaccatactgttttccatagtacctgcaccattttacattcccactgcatcttttaaaaaaataaacaaaagcctt

SEQ ID NO: 88726 - DNA, 1026 bp, Homo sapiens
gatttcaagtggctcagctgatttggtaaattttcactttcaggcctgtttcctgccattctcaatcttgccagcaatgctcacatcagcaccaatgccacctgtggcgagaaggggccggagatgttctgcaaacttgtggagcatgtgccaggtcggcccgtccgaaacccacagtgccggatctgtgatggcaacagcgcaaaccccagaggcaagtgtcgcgcctttatttctgaaattcccatgggaatgtacactttgtgaaatgaggactgagacttctgttaggaagccataaacattgtgttcaccttcactgctctttgtttccactagcattacggtttagaacttaagaaatttaaagcaacagccgagaggaattcatgttttttattttctttcaacagaacgccatccaatatcacatgccatagatggcaccaataactggtggcaaagtcccagcattcagaatgggagagaatatcactgggtcacaatcactctggacttaagacaggtaggtgagcccagaaccattgaagagtgtctacaggctgctgagctgtggtcttctgatgacctttgggaaagtctggcttctttctgaacacatttacattctaatctcactatttccaccaggtgaaggcaagtggtatacagaaggagtccctggtgccatttcttgtcactttcatcattcccaggtgtcttcagggagatgggtgaaattgcttccatatggttgatgttcttcgaagctgtgtcaacagggcacactcatccatccagggtatcatgtcaggctgtttgctggctgccaacagatgcatggggagggagagggggaaaacacatgtatttcctaacttttagcttactgtcttgctaatgtcattgagtaagttattgtataaggattatataaggctagaagaaaaaaagacaaaacggtgttaaacctcttgactgtgtctcccctgccacatgtagtctgtctgggccaggtaagctgga

SEQ ID NO: 88727 - DNA, 1103 bp, Homo sapiens
tgcattgtattttgtgataaattggagttcccacccagccaaagttgccatccggtcctcttttgaatggctggtccagaatgacatgagccagtgtcaaaaagaagggacatttctgtttcgaagatcaaaaccttagctcccggcatttctttgaatacacagacaaccccaggggggttctagcattaaaacctgggtcattagtagccggagggcagtaacaccgaggaactccccacaggtagtcaggttgcctgagcaaccataaagccggtccccggactctggataacaaacccagccctggcacctctctgggtatgtggtccttcagcctcttagactttgtatcatccaatcaaatggattgcagttgatttgatctgggtaggaaccaaaatctgtgtttcaaaaaaccttttcccattttgtatccagaggcacaagaacctttccagttggtcttcaagcagaccctttgggtttctggttcaaatagttgtttccagaactcttcctgccactgcttgctttctgtccttgctgctgtgtcctgtgatgggctagcactctttccccacccgtcaaaatccacagtttgtctcttcagcccttttatctgaatctccaactctgccatttttacctttgcttttgtacaaactaagtttttccaactctttgcaacttcacccctggcttcatgggcatacttttgttcattctagaagtttggagtggggagaactggagataatgcatccacatatgaatgcttttggaagctcccagtgtttttctttaaaagggagttagctttttttttttttttttttttttttttgagacagagtctgtctcagtgcagtggcatggtctcggctcactgcaacctctgccttccgggttcaagcaattctcttgcctcagcctcctgagtagctgggaatggcctgccaccacacccagctaatttttgtatttttagtagagacagggtttcaccatgttggcggggctggtcttgaactcctgacctcaagtgatctgcctgcctcagcctcccaaagtgctgggattacaggtatgagccaccatgc

SEQ ID NO: 88728 - DNA, 1032 bp, Homo sapiens
atggaacagtatccctctgtccactgtcctcccctcatactaacttctttactggaccttgtgctggatattaacacatcatttagtaaatgtatgtacttgcaaacttttcaccttgcaacttgtccttccaagtagggctttgacagaaaggtattgttagagcagtgtttcctagatcttttggggtttaaaaacttgattgatttcatggcattgtactacttctaaaagtattgtttactatagtattaataagctatttttaagccatagagaattttaaaaaatatattttagaattttaagatttatgatatagagaagttgagtttgagaacaattctattacacgttaaggataagttaatgtattgaccaataagtatgacttattactggaacactatggcaggtacagaaaatatgtatttaaaaaaatttctaatgaagaagttaagtctacaccttgaatacagaaattaattgatagcgactggacagaactgtggaacttagaccttagctgaagtttttcgttacattcttcagaaatatttggatgaactagataaactatcatctcctaagaatgatgtatgtagttacttacaagtttgcaaataattcttttacttgttttatttctaaaatatcaatatgcatccatggacaattgaataaaccaaggcattgcaaaattaacgaggaggaaaaacccttcatagaagtaatttagttaaggtcatgaactttggttctgttggaacacgtctgtcagggagctatttcagcataaaacgccacacgatagctggattcattgtattttcatgtcctttatactgggtgtgacagtgcccagagtaaccatttgataataaatagcacagaatcttcccacttgtgtctttgttttctcaaggctggctcaggagagctttctttgggttaacttgttcctcatcttgcttgggggcaggaggcagacaatggaggcagagagattccaaatcagcttgggtagataac

SEQ ID NO: 88729 - DNA, 1057 bp, Homo sapiens
tgaaaaatattgatcgtagcagttggaaacaagggtatgtgtaacagaagcctcactgcccacctcctacatagcctggactttagtccattctttttttccttcttcttttccagacattaaatatgaagcctacatctgtagttaatctagcatgattgagaattcaaatgcatcaagaatattagaataaatacatatactgatctttagtgtcttgtgccactgctttataattgcactgctttataaactcatataaaatgcttctgggaccatttatttcagggtaatgatccttgaaatgccctaccattttatactaattcattcataaaatcctatggatattcattttcatgtacagtaaattgttatggggaaataacacaaggtctgtctttaagcttcaggtgtttaattctctggctttactagctatggcaaattggggacataacgtgtgttttagtttcactgtctgtaaaatgggaataataatagtgcctacctgaaagggatgttaatgattaaatgaaataatgtgagaaaagttgttagaccagtatctagtacagagttaaccctcaacaagcaagtttatttatgttcatcactgttactattttataaagaactatatatttttaaactatattctccaaaatgcataattgtttagaaatttgaagtctggatttggaatcaaatagtcttgggctcaaatgccagacctgtcactttaattagctatggccatggctaagtttcttaacttctctgaatgtcagctttctatctataaaatggatagcattgatactattaaataatatgtgaaaaatattagcacagtgtagggtgtgtcataggtactcagtgcatgatggttattactgttacacctattgtacttgctcatcatcctggacatcatctctctttcattgctgaaatccatttggtcattgagacttattgattttacctcctgaaaatctgtgtagtctctttcccttttttcttttttttttttttttgagacggagtctcgctc

SEQ ID NO: 88730 - DNA, 1025 bp, Homo sapiens
gaaataaaatttgaacgtaaactataatttcatcagtttgttattatggttcagaaaatacttttaaatttgaaaaatggaaaagcgaattaggaagaaagaataatatagtagtgaagaaggtaagctctggaatcatactgctagggttacaatagctgtgtgaccttgtgtaggttacctaagctctctgtgcttcaatttccttgttggccaacttgataatgctgtcataaggattaaattttttaaagaattcatgtatgagctcagtgtctggcatgtagtgagttttaacttatgtttttaagacaatacatcatattttcttttgttctgacatgggctgacaaacttttccttcagaggggccagatagtaaatattttaggcttttcagccatatacagtctctgtcatatattcttcttctttctatttatttatttatttatttatttatttaatcctttaaaaacataaaaactgtttttggcttgtgagccttagtttgccagcccagttttagcttgagaccataggcaggttaatatgtagcgttaagaaaaggttcacatttccccctttttggtctttttaaaaactaaaacatttaaacacccaaaaaaagtacagagtgtgccataatatccatgtaccattcatccagcttcaaaaaattttacattttgcgtatttcctttagctttccatttttcccccagactacacatggcaactatccagaagttcatatgcatcctctttgtgcatcccctcaaaaccctgtgagttcaccaaaatcagtgacctttcttcttgagcgggaggttaaaaaacagttcccagtcttccatgcagtcaggtggggctgcgtcactgcatgctggccacgggaacctggatgggggtgataacgtccttctctggacaagtagtgacgaagaagacatgcttgtcccttgtccttctccccagttgcccctggggagcaaaagaccccacgatggaattagccagagttc

SEQ ID NO: 88731 - DNA, 1089 bp, Homo sapiens
ggtagctttggctttaaaatgggcaaacctcctgctctcctggttcagaattagtgatttttatcctttcagggatcatgctgtggaacacacagcagcctgtggagtctgctaagcccgattcacaatggagcattgatccctgctgctgtgtggcaccctggcctctgcagcatacacatgcttgggccaggatcaattttcagtgggttttaggtctgacacactggctttagtttatagtaacatcgggggcttgtgtctgcctaaccccatcctttataaagtggggatcagtgccttacagattttgatgccaacataattatttataaaatcatcacattacataagatgtgctgtttttcttttttcacacaagaaatgattttcatttgatgtattgatcagtgtagttactgggaattgagcccaatacatttattcttttatttgagatctgctaaaattgtctcttccttcggaagactgaaaaatgatccaggttgtgaatgagttgttccaattcttttcatgccgagcagggctttacactaaatttgggacctgaggggccagatttaggatctggagggttaagagtgagacacagcggctgcctggccacatgccagatgcaggaggtaaggctggaggttcgtgaccagtttggacatagctgctgctctggtaaaacacaaacatcaacaacgaaaacttgattcctgtggaatatgtgctataatctaggaaacagagattctctggtatgggaaatccttgaagtcttggcattagtgacagcacctggaaatactcattccaattcaaatgagtctgaagtgggccctggaggggctgcatggggaaatttgcaagtggtgtctgtgccgggaatgttaagtattgatggtgatgctgaatttatgaatatggaaagaatgcgtgtactcagaaggaggatgcaaacagattttaaattttattttgacattaccttccagtgcagtgcatggttagcagtaactgtatacagaaagggccacagaggctttggtttctgaaagatgtctgggagctgccctgttc

SEQ ID NO: 88732 - DNA, 1064 bp, Homo sapiens
aagacggtttctactaattttttacattccatttttatgaaacattctcagagttccaaggaaaagagaatcctgttgttctgtgagattacattaagaaccactatattggttatctgattttctttttctttcctttgaagctctacattgatctctggaattaatgtcagtgagcttttgaggtctctaaaatgagaatgggaggcacctggctccttttcaaccccgagaagttgaatgaaattggtgtggggatatctgtggagtcagatttcctttggatttttcatttaaccccttgagccttgagctaaaggcactgattttgttcatgaagggcctgctcccattcttgcgtcccattcttgagccatgctgactggagatgaccggtgacaaccacatccaactgcccacagctgtcttcgggaagctggagaattagaatagtattgtctgctctgaaacagcctggagaattttagagctctctgggagcagggtggggtatgggataagggaagatgtgatgaaagagcagcctttcccagttagaacagatgtaggaagcaagcaaccccagaaacatctggaaaactcttaaagtgcaggctagtccctgtgcaccccataaggtcgactgattagaggcagtggaggcagatgtcagggtcagctctctaggatgcccttcataattcctgttttcttccccagggtatgtttgtgctattattaaatgattacacatgcttgttcattccttcctagtgtatactttctagctaatgtcatttcaagctaaaaataagtctggtccttagttagagttcctgagatttttctgcccagccgtctgtctttctcctgagatttgggtcttctcacatcatagtgaagtttatcctcctggtctgtctttgcatagctgtaaatgatgggagattctggatgatgagacaaagttcccagctcactacccagctatgacctgcatagggggacagcagcataggtagtcctgtggcgaagcgttggcctggaggacaggcctaggtgct

SEQ ID NO: 88733 - DNA, 1097 bp, Homo sapiens
ttttctattctgcagaggcgatagctctgaaatatagaagtgattgcattaaatccttggctggcaattttgtgtgggattgggtattgaaatgcagcaaagcaaataatgaaggcatatgtttacctataattcttttttaccttgggagaaggattaaataggaacagtttggttgttgtcaaattcttaacagttgctttcaagcatgaaacagtccccgggctctcggaggatttacttagcagtttgaatagagaggtctttactgctaatggaactgagatggcaggcttaagcaatggggtgctttatagcctctttagccacttgagaagatgtaacatcaaatagctgaaaccatcctgatctccattggtgtttaggaagttgtgcaaagattggtgaataaataattcagggttgtatgaatgtctggatgccaggaatgttgagagtatctaaaagcttgattcacagaggatttagttctgggagaaactctggagcccctccttgagcttggcaccagggaacatttacagatgatgacattttctaagaaagaaagaactttcacttgggattgactgggctttgtaaagcaacatttcactggggactccagtcccggaaaagtcttatttgtaaaataaagaatattttcagtacagatggttggcagttgctgctgtgtgtgtgtgaatgtgtgtgtgtttaaaatacaggatggtgatgattatttagggtcttaaataaccatttaagttctgtactatttaatggttaagctttaagaaatcacttgttgaagacacaggggagaagtagtcacagtttgtctgttgaagcttctgcttcacgctctcgtcatctgtttcagaccttagtaaagacgtcccgaatgtgttgtccaatgaacaggtgggcagcaggtgttggggacccactggatatatgaatattcacaaatattcggactctcctcctgcgcatagagtagatagcagttccctgttcatttggacataggcgtgaccatatgacttgctttggccaattaaatgtcacttctgagcagaagcaggaaagctcgt

SEQ ID NO: 88734 - DNA, 1079 bp, Homo sapiens
agggttttcaccttctttttcttctcctcttccattaatgtgtgcaaatgatttattcctttcaaaaactgattccaaggctggttttcccatgctaaaacagaaatgactcttatgaatttctcagggcaaatgggtgggaaaatcagatagaaccatagctttctgagggcaaattttctaaacctttatgtaaaatactattggatttattctttcatgggtatgtgtatttgtcttatgtatataggttggttccgtaacactttagagaccaagagttggcaaactgccctgctggtcaaatccagctcgctgctagtttttgtgtggcttgtgagctaagagtggttgttacatgttttaatagttaaaaaaaaagcaaaaagaataataaaattttgtgatgtgaaattcaaaatgcagcgtttacaagttttactgacacacagccatgcccatttgtttaaatggtgtcagtggttggtttcaagctacagtgagagtttagtagtggcaacagagactggtccacaaagcgtaagatatttatgccctggccctttatggaaaaatgttgctgatgcccgtcttagaccattttggcatcagcatgtaattgttattttggacccatggtttatattgttgttgttttctatattcatataattattaatatacaaacatttcacattttctctcactttcagaagatgtgttttctaaacattgggctatcaaaatcagtaagaaaaagaaaaaacatgattagagatttcctctatcattgccttaaatttgctatctcttgaaaagcatcgtgatgtgattttctttattttttagtacctaaatctttgtcacagtcctgtaattctaataagtgaataattcatcaagggctgggtgcggtggctcatgcctgtcatgctagcactttgggaggctgaggtgagaggattgcttgagttcagcagttcgagaccaccctggacaacgtgggaagaccccatctttataaatgaagaataataattcatcaagatgaatttaaaagttatgacagtgagagacta

SEQ ID NO: 88735 - DNA, 1025 bp, Homo sapiens
actttccttcaatcatacatcactctcgactctcctgtctgccccttatttttcttctcatagctgtcgaatcgatttcattaaagatagctgaagccttgtagcccttctggattttctattaaaattcacctaatggtagaggtaaaataaaatgtgcatcttcaccccttcactgtagcactccccacagctgtactctggtttacaagactctcccattctcttgagagcaaattacttgaggttaaggacttagggcttatctgtctttttacctttggaaaatagtgaatgtttaataatgtttgcatctttctgtgagagccttcgctccagcacatcaatgatcttgggcaccaagcaccaagagtcacctagatttgtacatcagaagccaaaatggaatcaaaccatacactgaatgttcagggaatctgtcttatctttatcaaggctactcgtcatggttgaactggtagtgttctgatttcccatgtgagcacgtgtgcccatgtcaatacatttatatatccatagtggacatgtggtccatgattgtcaggaggcatggttttctcacaactgtgggcgtgattaattacttgctagaaagtccacccacatattccacttgtattgttacagggctatttaccagacacttcaggggctttagagaggcactggataatgcccatgaccacaggcggttcatcatctggagcagtgtgagagtggctgacatgatgatctgaatcagcaatggctgataatccgaatcatttgggaagtttaaaaaaaattgtgcttgtataggtgtataaatatgtgcaagtgtgtttaatgtttatatgtggtcctatctcataattagtaaagtcaaatgaggcaggattgtagaattacaaagctttcaggatggttcagatgagtaactagttttgggaactaatgagttagaattcttttttttttctttttttatttttattttttaattttattattattatactttaagt

SEQ ID NO: 88736 - DNA, 1054 bp, Homo sapiens
catcaggagtatcctcaaggctaagagccccagtgtcttcccttaggctagagattgggccatatgcaagttaatctttgtaatcttatgaaagctcatggttctgaaatgaaaagtaaaactgaagttgaaattgcacagtggcatggtggactttgtcttcaggagatgaagtcggtttagagagctgaattttcaagatggctgacaactggctgcactatggtatcaggaaattttactgcttttaggtgaatatcactctaagctttatcaggcacctttttgccttactcaacataaattaacatgtttgtggtaagttaaggccatgttgaaaaacataaatgtttttctgcagatttgctaaagagtagtggcttacttatgctcctaactacccctggctgctgtgctgcaacttggcatgactgtattttatattttattatgtcttcccttttggcaactcagttttctcattgttgcttgggtgtctgctttagcagtctttctttcctgtgaatttctgaaggtgtagataccagataacataatttttgtgcatatggttgagtacaggctgtgagtcaactgaataaatgcatggatttgacgacatctgttttggctgctcagaggttttgttttggtatatgtactctctagtacttaattttctgtgtaactgaaagataccttaactctaaattgatggtaccccatcccctcctctcttcattacactgcctaccaatcaataaaaaatctgatagacaattttaaatattaaatcacctgaatattttttatttgaaatataaaatcactgaagattttttttcctcaacgatttaaaaatattctttgcctttagttcagctttctcctctgggcctggctgtagactctatggaagtaattctgcctaataaaaaggtttagagatgttgtctaaaacactttagaaaagaaccgtctctctggcagttaactctcatggggataaagtagctttcaaactccaacaataatggttagttttgacgtatct

SEQ ID NO: 88737 - DNA, 1026 bp, Homo sapiens
ggataatgctcaaagagacaaattaccttttaataatagattgacagttatttttaagaaatgaaaaccaattttgaattgatatttgtaggcccacactgtgcctcaatgtatgaaacctcacctaaaccaggaagcctaatgacgatgcgccctttcctcttaactgtttgcagcctgcagttggcactgttcgtgatgcatggtctggttgtgccctgtgctggcatggagtcacccttagaaaatggagagagatatgttaggtgaaagggtcaaagttagaaagaagaggggaaggcatgttaggtgggtgaggaaagtgaaaggtgaggaaagtgaagtcaaatgagactttttgctataggaagaaatatggttcaccctttcttgacctggggttttgagaaaatctgcaggtaatatcagtaatcactgattatgatcagtgtggaattttgggaagcaggagcaagttaaagggaaacgtgtgctgtaaattatagactgaaagtttggtatcagtcccaaagtattattcagatggtttgtgagcatttagagtacctaaagagcaaatcatggatttcataaacatgggagagactagaagcattctgcagcaataagtggaaaacatccttggccaggggcaaatggttgatgaatctaacagggtgataagtaataggaataaatctaaatccttcctgtatggttcaaaaaagccaagagtactggcttggaattagagtaatacaatttagcagcaatatgtatgaagaagagattgaggatttggcttcaatgcaaatgaatctacaatatcatccatcttgtataaattatccctgtgatgttagtgcctcaccatcccctgcaaaaaaaaaaaaaaaaaaatcctaaaataatcttaggttgcatcaggaaagcaaaatgcccatattgaaggaggtgatagccttactctaccagtgctgtttaggcttctcataattctcacatttatttctagttcctgctttt

SEQ ID NO: 88738 - DNA, 1108 bp, Homo sapiens
atatatacatatatggggtaaatatatatatatgtatatgtatatatggggtaaatgagatgttttgatacaggcatgcaatgcagaataaccacatctcggagaatggagtttccatcccctcaagcatttatccattttaaaatgtacaattcagttattattgatgatagtcaccctgttgtgctatgaaatagtaggtcttattcattctttcatgattagtatttaaagagtaaactttaagtagtgtccaggggataggtggactctagaatagttgtagagtttgaatgtacacaaaccctaatgcaaatgagttatttcagagtcgggatacatttcaaaaaactccaactgactgtccctgacagtgtaaaactttcagaattcctcagaaaagtaaacctttgtctcaaaattatgctttgaagtttgaagataaaaggagagctgtctaaggcccaatgctcaaatagatggactaaaaacattttagaaaaattctggagaggttatcagaatttgaaatgaatgtgataacagatcccctatagttcaagtcctcagtagtgcgtaacaggatttaaagcagcttagctcagactaacgcatacaagaaattaaagccttttacagggttttgaaatgtgtttcattttctcaggaaagagaaaagcagattccttacttttatgtacctggtcacttaggaatattttgtactgtatggttctggtccgttcttagagcaatacagagaaacacagtagaacttattcaaatctgtgattgccagctgttgcctgggcagtgtttcccattgccttttggtgccagaatgagctagcattgttttggtgaggattggaagcctgtgccctgacatggagaacagtacatgcacatccccagccaaggccggtgaatgaaggtgtcatggtctgtgagaggttcagccatagcacctggtgctagagtaactcaacatccatatgcaagtgcagggcaaaattgtgaactaaaatggcctaaatttagcaaatgttttaaaaattggaaaatatctttatagacactcatttataatggaggtctgagttggtgt

SEQ ID NO: 88739 - DNA, 1083 bp, Homo sapiens
tactttgtatgtattttaatagatatattagtacagtagttcatatatatttttagcatggttttatcattcagtgttatggttataacttgaatccatgtgatatataactgttacttactttcaatcttttcagtattttataacataacttactaaaccatttgacttgtttctcatttattattattacaaaaatcactgctttgtgaacatttttgtatatgtctcctggtgcatatatgcgagaattttactagggaatatacctgcacgtgggaccattgggtcatatgttctgtgcatcttcagctttactaaatgctattaataattttccaaggtggctctaccagtttacacttccacaaggagtatgtgagaattctcatcacttgaaatccttcctcatttcttttggaagagtaaaaacgtttatttaatagatgggactgagctctgtctaattgattaaaacttttaagaaaaaaaatgataaagttattcttttaatcaagacagtgtagctaaaattgtttaagattccagatttttaaagaaaaattgagtatatgtgtggactattaaaatcttttctctcaatagaaggttaaaaccaagtctagaaaaatctactttttaattgtttattacttaaacatttatttcctcccaccctcctttagtcccaggtgctgttcccactgaatccatacaaggaagtacctttgaagagaagatatttcttcagtggagagaaccaactcaaacatatggtgtaatcactttatatgaggtaatatatatgtttgttagtaatttttaattagaaatactcatgatcatgataatgtaggctatctagtatttaaaaatgcatacttacataatatattttaagaagtttaatgctttcagtagttataatggttgttatatagaagaaaattgtaaaaataagtttttgaattatatataatttgaggatttagctttacaatgagttggacctttccagattatatgttattatatgttaagacacagcattacatttaaaaattacctttattaaaaacaata

SEQ ID NO: 88740 - DNA, 1051 bp, Homo sapiens
aaagaatgtcaattatcacttcgtataataacagtgttagtgttcatgcacataaattacaagtaagtttacctatttaaaagcaagaaaagtgctcagttttgcaatttaaaactttcgaatatgccacattttaaaattatgtcattacaaccagtagaagttagtaatcaccactaaagtgcatgttcttgaatagttgatgaactactcatagtgaaattctttaaaatatcatttgaaagggtaggatttaaaggcacctatgttatatttattttcaaacacttcagactcatccaacatgctttgaatatctgttatgtagctagtatcatgaaaacttctagaactgcactgtctcatatggcagctactaatcacacatggcaatttaaattcaaattttcagttcctcagtctcactaaccacatttcaaatgctcagtaaccagatgtggctagtggctacatttccatcatttcagaaagttctattggaagacattgctctaaagaaaagaaattaatatgacccataatgatcactctatttgtagcatcaggaatgactggaatctgtctaggattccagtcattggagcagatgtcctcacccacattgatgaaaacacttcagtgccctcgttcccaataggtaatgatcctaagtcaaattatggccactagattaaagatgaggccttatccttgtcagtatcttatctgtttgagctagttgtatattttcttattttgttctaaacccattgtaatgtagttttacaaaatgacattttgaaagcaaacaacttcaaagtattagcttaaccccgaactcatcctgtatattctaatctactggcttaagttcccctgtctataaaagtaataactcagcagctttggcggagttccttcatcccttcagtggattcaggatttcaagagtctgagtaggagcttatcataaagtgtctgacagtgcatacatcagaagggtttattggataaagatgcaatctgagtccatctgctccagatattttat

SEQ ID NO: 88741 - DNA, 1041 bp, Homo sapiens
aagatggtatagactgaccactgattgtcaaaactagtccaaaataaaaccattcatccatacttacttctgccacataacttgcagatgccctgcagcaaaaataaattagctctaaattttctgttgagcacagtcttccgatggggcctctgtgtgaatgttcttcagtcattttgctgagggctaagagatgagggtaagacccttgggctataggagtagctaaaaactgaaatattcccaaggaaagattctacattagattcatggataattaaggcaaaacacaaatctcattcattctggacctaaataaccttttcctgctagagaactttttttaaaaagttgcagtgtttactgtctgaggaaggcttataaaggttatgcttcttgcatccagaatgtgcagaaattctacagctataaatgtctcagcagcaaatgggctgtgtggcatgctacagccacagcctgctaggtaatttacgttgctcagggactgtagtttttcaatagattgaactgttagttttcaggaggatttaatgaaatattgaaccagatgccactggtctgccatagatgtgggactatgagaaatgaggaaatgtcactctgtaaacagcttggacctctgtgagtaggggaaaaaattgtgtccttagtgaaagagaatcacaaccaagagaaaacatggcagtttgggggtaaatgtgtttgtttctatgtccatgtcctgtgttcatttaaaatgggaggctgggtctaggacggagatccagaaaaattgtctgaatctggagaaagctaaatagaggctgagatttttccgagtctttcttgttgtccagtggtaatcctctgaatggccctatacagatgctcctggacttttgataggattatggtccagtcaacccatcataagtaagaaatgcagttattgcacctaccctacccaacttcataggttagcctagcctcccttaaatgtgctcagaacacttaggttagcctaagtgttggggaaaatca

SEQ ID NO: 88742 - DNA, 1035 bp, Homo sapiens
gaggttcaaattggaccactcagtgagtagcaccaatggccacaggtggtgaatatttcaagatttgttgggaactgaccaagataaccttgatttggccaatatcaacctcatgttggagttactagttcagaagaagaaacaactggaagcagaatcacatgcagcccaactacagaatcttatacaattcctcaaggttgcaagaagaaataggagagagcaactgggacacttccagaaggagctaagtgttttggaagaggatattaaaagagtggaagaaatgagtggcttacactctcctgtcagtgaggatagcacagtgcctcaacttgaagctcctcctgcatcacacagtagtattatggattccacagaatatagccaatatccaggtttcagtggcagttcttagacaaagaaacagccttgatataacagcacattaacatcaaaattaaaatggcccactgctcattttgaagacctggagcactgttacttttctacaaggttgtctcgtatctcagatgacagttgaactgcaagccaattggatgaacttcagaaatgcttgtccaaggttactcaatataaatcaatatgaactttagccacattatcatgccctagtgatctctataatgattccaggatagtctctggtattgaatttgaccaggattgtgactattttgcaattgctgaggttacaatgaagattaaagtctatgaatatggcacagtcatccaggatgcagtggatattcattaccgtgtgaatgaaatgacctcaattccaaaatcagctgtatcagttggagtagttaccataagaacctgttagctagcagtgattatgaaggcattgttatcctatgggatggattcacaggacagaggtcaaaggtctaacaggagcgtgagaagaggtgttgaagtgtttcatttgatggatcctaaactcctggctttgggttctgatgatgtaaaagtgaagctgtgatctaccggtctagacaactcagtggc

SEQ ID NO: 88743 - DNA, 1070 bp, Homo sapiens
cgcgacagccgtctgggaaagaccgtgagcctcacagcatggcccagggaagagtccctgagtgtgcctggaccaagatgggtcactagagtggtagtattgtctaattcctaggctaggagagtgtttccattaagagcctttttatttttatttatttatttatttttgagacagagtcttgctctgtcacccaggctggagtgcagtggtacgatcatggctcactgcagcctcgacctgccaggctcacacaatcttcctgccgcagcctcctgagtagctgggactgcaggtgcacaccaccaagcccttttttgatttttagtagagacaaagtcttgctatgttgtccaggctggtctcaaactcctagtctcaagcacttggcctcccaaagtgctcagattacaggcgtaagccactgctcctgaccagtaagtgcccttttaaagtaaatgggattcacttgaactttctataaaagatccgtagtggaagtccttagggatttgagatgatgaactattatgtaaaattataaatgagcaaaatgttgttttttgtattgttaatcaaatcagaaactggtttaaaagatttacaaaattcacaagggtatgaaaaacagaggttgtatttactgattggtctgtttaatggaaattgtctaatggaattgtctcatattttcaaatgggattttgttttcatggaatttaattagtctgattataatttacaagttcttttaaaaagtacaggagcagctttttaaagtttgagaaacagaaaaaagtaattgactaaagaaatttacaactaacatgcctggtccactattttcctcatagcagtgcctgtatcacaagcatacttatccaccatgaatctgtgtgtgcttttgcaagttgacattattgcttcctgagtgaagctgtagaaaccatttctatctagcaatgccgaattcttgatcttggttccttctgtttgactctcattagttttagcataaacaggtaaatgtgcttttttaaaagtatatttcaaaaaacaactccataaaa

SEQ ID NO: 88744 - DNA, 1035 bp, Homo sapiens
ctgggggtctgcccttgaatgttaggcggcatgacaagtcaaatgcagtccaccagggtcttcacctggaaattgactacttgtactttattctggaaacttagggcagagatttttgttagaaaacccagaatgagcatctcatactggacttaaatgcttaactgtgtattttattttgctatactgtatttgtacacagtcttctaagccatgaccgatctgcccgtgtttcacttaagagagaattaaggaaaatcatccagaattcccactccaaaagcccaagctctgcagccctgcagtgtggttttgctccatctggagagaacctcacacagactcccctgccaaaatgatgtaacatgatgactcagggatgtgagcgtgagaggaaccaacatttagttcttatacccacatatgctgtgtgttgtgtgattaggtttatttaatgaacttaatgcaagctgagaggcttgacaaaacgtccccttttgtggactgaagtagctatctttcagagaaagcatgcagatttagttggtgttaggttgtttatgttgaataaaaatctatttaaagacctggctgaagtgcattcagcctttcactgtctgcacttacaataaaaaagaaagattttattatgcatgacagagatccagattcttagagattgcctctttccctctggtctgtggaatctgccagaagccatctgttaatggatcttggaactggctgtagaaggcagagtaggttcctttgagaactgataggtccaaattattctctatccttgggtgccagatacgttgttccaaataagcattagtttgaatttgtaaagaaaacagctttgtacagtagtcattctacaaatagttttaagcagcattttgtatttatataagacaccatcctgctcgaccttcccctgggcacaaagctcacacctggtttacccttttcagagaggaggtgagtcacggaggtagccataataagtgttagaaaagagtgcctcctgct

SEQ ID NO: 88745 - DNA, 2136 bp, Homo sapiens
acttgcacatggggagcagttgtggacagaagaatgttactttaatggtagctagtttggaacctttttgcctctattttcaaattatttacgtgatatcaaaactgtctccactaaaatgattgctcaaatgtttgtcttcatgtctttattttgtatgatagtattcaaagaaagcccaatatgttcataaccagatttgcacaatctgaaggcaggtcccctgcagacagttccagagcttcttggtggcacaatgtgactattactgcgggtgggcatactccttccggctgtactgctgattccacgggatgtgagcccccactaatgcctactagaaatgaatccaggcccctttctcaaatcacaattggaatgagagactcaaccagctgtgttataactgcactcagcactaagagctttctgttagctattaacctgttaacagcccgcaggtgctagcgacctgtctgtggaagaagggataagatctggtctggtggtctggcggtggcttaaaagtagccccattgaggtgctctgagaatgccgttttgttttgaatgctacagctgcggtgtactcagcttactaactcctcttggcaggtcaccctcagctctgattgtttgtccaccatgtgtgtgtttgctttcatctgcgttaattgctgcttcatctgtggcatcatcggtcacctaatgcttgaatgttagtgccatgtcttcattcttcatccgtgtccctgtctgggccgcagctgcagccaagccgcagtgcctgccttctggaggtgtctgaggtaatatcttcatttggtcacccttcactgtataacacacttctaagattttttgatttgggtttttgttcgttttcttttctgttgtgcatttggtctgcatattttcatttttggcttgattatgaaacattaggtcttgtctaaatacttgaataaacaacaaatagatatttcttcctgtgctagtcccgcagactttttgtgcattgctgcccagcttttaaacgctggaaatggcaacaaagtgtttggcacacaagctgctgtttctaattataagctctataaggtaaagaccatcttcacaaggatttgggatatgcctctctctgttcctagtacctgtgtgaggtactttctgatgagaatattgccccacaaaagtgatgtaaacattattagaatgtgtgacgcctgccttggtgacagccatgcctgatgactgtggcacatgtcttaattaatgcattaatacttccatcttcatctttggcggcagtattctttataaagtatgtccaaatgatttataaagtatgtccaaatgtcctggtgcctccctggagctctgcccactaagtctatgctggtgacattgtacactcctggaatctgactacaatgtccttgactctgagataagagggccctacctgatggaatccccctcggggagaaagtgagatactgtggctccacgaagagcagcgggcactcagaaaccatttttctcttgtatatgaaagcattctccaaatgacccctctccctctcctgattctcccttgactctttactactttttcattctctaaatctgtgcagctgtacagcatgggcaaagagcgtaactaagggaggaagaatgaaatggattggacttacggaatggttgattgcaagttttctacatggaatattccagtgactcttttcctgcaggaaggttttgaacagtgactcatatatctactacaggccagccattttgttgatcacataatactcaaaataagatttttatcttctgaaatattttatttaaaagatgaaaaccttttccttcattattgctatgcagcaggtaaaaaggaagtgttagaatcatgattgtaatttgtattactgttttaaagtaatgcgtggcttctttaggagtgaggcacagcccttgtgctgctgctggtgtaacctgctttgttgtgggcgtgttgtcgtcgtttcactctcatccattgagggcatagaaggcgcctgtgtagctggaaacggtccctcaaggaggcgcagtggattgtgctatgctaataatagatagctctgct

SEQ ID NO: 88746 - DNA, 1090 bp, Homo sapiens
ataccctatattggcgtgtgccctgaaaattagtaattaaataatttaagtggctatattaaatacagcaaataagaggctttgaattctccaagcgttgttgtatcaccaaactgggaaaacagaattgcaggaatttttcaattgcacaaaaaccagatagaaaaatcagaataaggtggcatgctaactgtagtaaacgatgattgagctgacgttcataacttgcaaacctctagaaatccgcaccttatcattacagtgaaaactcaagtttatggggaaaaagagggaaatattaggattctgccttttcatagaaaggtgaaagcatgatcagtgcattgatgtaatctaattttctgaaaaggagagatttgtgtgggatttttatggtgctggcacacggtagatatttaagaaatacttgctgaatggaatcaacatttcatttattattctttggccgtacctgatagtagataatttagtatgtaagggaaataaatcaagcaaaggcacttttgagaggaatagaaaataaaagctttctcaacccaaatattttgggagtgtggaatcgtctctcaaagaaacatgcttttctacccccagccttcagagccaggcccaaacagtggcatttaaggaatgggcttaaatggggagtgctgaactagttcatgtttcctcattgggatttttgtcaactaaatcagtttgctcatttgcgttaggacgattgcctcaggttttgaattttgaggtttctatcctctttctttacattggacttaaagtcagtagaggcagctgacttcttaatggtgagcttcttaatgtttctaagattcctgagtatgctattcatgcaaaaacattttaagctacatcaaaattgccttttactatccctgttctttgattgtttttattaaaactcctattatctgtaatttctctggttttgtgcctccagtttctggattcttaagtcattgaatgtgaatggaagtgcatgtgagttgacttatactgaaaaccagattaaaattacctagaataaaagtttattaaagtatgtaattcc

SEQ ID NO: 88747 - DNA, 1039 bp, Homo sapiens
tttatatttctgctgtcagtatatggcgatgcccatctttgaaatgtggcttcttttaaaattccacagtatgcttcagaagatgcagagcttctcttagttggaaataagttggactgtgaaacggacagagaaatcaccaggcagcagggggaaaaggtgagagggcgtgggaggcacggttgccacacactgtgcttagcgcttgaggtactgtttcttttaataaattacttattttaaaaattacaaagaaattatcaatacagtgataactcagtcacatcctcctaatttgtttgcacttttttgacttcgtgctcctttaaattcattctgaaatggagggagaaaaaaacacatcagtgtatacaacattattatctaacctgacattttatacagagaaacatattttaagccataaagttgcttttataatttactttaacgtactttaaacttccttggtttttgctaaggattgaatcatggagaaacgatgctattcacatttaaatgtcagatatgttacacttttagaaacttaggcaactgatttgactggaaggtcccggcatcaccttcaggatttttattgtcttttgttttgctagttgcttataatgtaagaatttgctacacttgtgaactttatctttgagcgtcagtgggactttctaccccttaatcccagcccttcccttgaagctgagcccagagacctcatgctcgcacgctggtctgtgaggccccacacagaggaaataggtgtgtgtttcttctcagtttgcacagcagatcactgggatgcggttctgtgaagcaagtgccaaggataacttcaatgtggacgagatatttttgaaacttgtcgatgacattctgaaaaaggtaaaaaaaagaatctacattataaaagtatatcatctgaaacctgttgtttcctttattgcttttttattgagaattttgtatttagaaaccaaaatacagtagttgtgctcaggcgcaagaaccaggtatggttgttaactca

SEQ ID NO: 88748 - DNA, 2013 bp, Homo sapiens
gataacataaacagtcacttaacacataggttgtatgttatacgtattttataccatgttcttaaagtaagctagagaaaagaaaatgttattaagaaaatcataaggaagagaaaatatatttactattcattagtggaagtggatcatcataaaggtcttcatctgtgtcatcttcacattgagtaggctgaggaggaggaggaggaggagggattggtcttgctgtctcttccgggtggcagaggcggaggagaaggtgagtggggaggcaggagaggcaggtgaaacttgtattgaaaagcagctgtgtataagtggacctgtgcagttgaaactcatgttcaagggtcagctgtatgtgtaccttgtaaagttaaaacggatttttttttgtttgtttatacgttagatgcctctggatattttaaggaatgagttgtccaatagtatcctgtcgttacaaccagagcctgagataccgccagaactgcctccaccaagaccacatgtccgatgctgttgatttcctactttggagacaaagtggaaatgattcctggaaaggggaaaaaacgttctattctgcactacaatcattttgacaatttcctttcgcactttgtaatccaagtcagagctatacactaacttgtaaatatgcatatatgcaatcctgggtaagttttggttataagttacctatttccctccaaattattatatttcattcattaccccagtgtctagtgtacatacactgggaaacctagtacttctaatatgaagaatgggagaaatgaaaggtataatgtttcttgaaataaataatataattgtccttattaattatattatgaggacagaagatattctgataagagagaacgtggtgctttgcttaccgttttaaagaaaatttgtaaaactaaagactttttgaaaaaaagctatcttaagtgctttttctttatttacaagacatttcccccagtggtagcatctgaagtattggagtgtttctgccacgaagcaaagctccattcatggccgtcatggaaggttatttattaatgttacataatggtagaatattactagttagagggttggatttgacttggtcctaaggccacagaatctctctcatggcttcctaagggatgtacctttatgcttttaagaactacaaagattcaataaagaaagaaatgtttttgaaactatagaaaaagattttaaaacacgctgctgtcctaaacaaatcctgtttaaaggaattttaaagagatgcattttactatatcaaagaacatacgtgtatttgcctaaacactctgtacctttgtaatgataaaacttcccccttctttacggtgaagcttattctgattaagcctagactgtgttctttttttttttttttttttttttttttttttttttttttttttttggtctgatgatgaatttgtgaactctatctttggtatatcttttattaaactgcactgttttgtttagtcaaggtaattaagtaattatgtatttgaataacttggtgtgtcttgagtgttgtggtatgaaaagcattgtggtctttctacactaatgaagtgcaaataaaattttgtatttatgaatgaagttgagttgccatatttatttatccaattataaattgtatatatgacagtattctccatgagctccacagcttaatccttttgagtgtttagacaggaaaagcatagtcctccactggggaaaagagtttgatgttttctcaaagggctgaacatagagctaccatatgatccagcaatttgacttctaggtttatatctaaaagatcgaaagcagagactcaaacaggtacttgtacaccagtgcccacggcagcattgttcacgagagccgaaaggtggaaaccgccccaatgtccatcagcaaaataatggataaacaaaatgtgtgttctacaaacaatgggatattcatccttaaaaagaa

SEQ ID NO: 88749 - DNA, 2683 bp, Homo sapiens
ctcacgccttcatccgatctggtgtttcccggcctgaggtttggttttagcacgcagcaagcacttccgttgaagcgttaatcgagttttattttgactagctcttccgtctcttccaaagatacctcctgatttctaccaccacacgccagttttgcagttgttgaatattatacaggtggactcccaaggtatcccattgctgggcttttacaaaacactcactggctatgttcctatcggctctggtatcggtggcctgtgagctactcactcacagagctcaaccttcctgcaggtaccagtcaggactaacttctggaaagagaagccttaatttaaaaacataaaaaataaattttaaaaaaagctttcctaccaaattcctgattggtaactgtagtaacaaattcaggtcggcttccctgaccttggcttctgacagtctgggattcgtcacagcttcctggatgagtctctagaatgttttaaaatatttttaattttcatgggtacatagagtctctagaatattatgagacgtgtatacaaaaagtccaagcctgggcaaaatagtgagaccctgtctctacaaaaaataaaacaatttagtcaggcttggtgacacaggcctatagtccccactactcaggaggctgaggcaggaggatcgcttgagcccaggagttcaaggctacagtgagctgtgatcacactattgcactcagtctgggttgacacagtaagaccctgtctctaacaaaaagaaaacgaaaaatccatatgtgataatccatgccaaataaagttaatcatgatcattacaaaatgaaagtaatttccgtgctttacaaaatgattcactattaagttactttaaatagtaagctctcttcctatgttttaaaatagatgatctaaatgaattgaaccaattttcaggaatatattcatacctatatcaaggcatacctgattggaccctatataatttttgttcatttatttatttgtccctcgatttgtccagcctgccttattgatcagccgccccggaggggaggggacttgggagtgaggtcctgtggaggaggagggggtgagaatggaaactgtgggttgtctatcttaatgtgattttcctgactcagtgggctggcgaagactgcttggcatttgagacatagctacttcttggtctgtctcccaactagattgtgaagtgcttgaggacaggggacatttcagtctgaatgtgtctgccaagaaaaagagcaggagagaggaaggaaggaagagaaaaagggagggagggagggaagaaggaagggaaggaaggaagaaaattgtatataatagccgtaatgtctgtgtaggtacataaatggatacatagatacatttaaaccacagccttacagttattcaagtattgctacttctttataatctgagacagagaaagagcagtcattactctctcatacaagcttctttttcgtattgtaacctgagaatttagcattaattgctacaaaggaagcaaataaaactcacttgtgaaaacacaaattgccctgctgccttttgctttttttgcctgttgatataaattgaaaaatacaccaggaacaatcaaacttgcagtcgatggcattgactggaagaaggattaggaagtgagagaacaggttaaaatgtggtccacaattctcagcgatggctggagatcaggcttcaccagggaggagggttagctcaaggctcaggctcgtttaaatattttccccttcctctccttcctgtgaatttaaccaggaaaacagcacagtctgtcacctaggtaactggctctcctgctgactggtggagattggaaaccgcaccctttctcactgcaaatttgcattcgcagctgggcttcgggtgacctcgccagaggacagaaagctaatccaatcctgctgctgaatgagggtgcccggtcctacctggtccacctgacaggcatctgcctctgtaaggagtctgtttaagggtcccgcgtgcccattgctttccttcagaaggaggctggaaaatgcttttgatttgaaaatgatgaaaatgaaaatggtccttggattgtcactttgtgcaaaaccctgtatttctaattgggagaacatcgcttctcccaaccatgttcccgaagagcctgcaggttaggctggctgagatgaggacaaagaccttgggtgcccagtttagtcatgttaattaaaataaaaaattgaagtggggaggcgtgaggagaatgtgcctggacaataggaaccccaggccgtggtcgtcagctcagtgtttgttcacagccgctcctttctttgccccattgtgctgtcagctcggtgacttctgagaggggctgggcgccagctgtatgcaaagtgcagaggccctggggcgggtgcctggggagaggggctgcctgcatcacttctgtgttactcgttttctcttctcctcatggaataacagctaattcacacctttatgtaatatcggcgaactcacaccttcatgtgataacggctaactcacaccttcatgtgataataacagctaactcacgcctttagttgtaggtgttattctcaggacttccgtgtctaaaatgacttcaccctgaccataataacct

SEQ ID NO: 88750 - DNA, 1029 bp, Homo sapiens
actactgtactctagcctgggcaacagagcaagactccgtctctaaataaatataaaataaaataaattatgaatttttgtctttttttcatatactcagactaaataaaggcatttttactggtgcattcctcaactgacttttcttctatgtgtttgtaatctgtagtagaaaagataaccctgctcacactgttctttcatttctgagctaaggaaatttgtaatgctgcacattttcacttgttaattaactgtctcatctttgggtggttacattttaatccaggtgttagtgataaagttcccaactttaataaggttaagagagtacactttcccccttataaatgataaatatcttaccaggtcctccagctaatattagagtgtgaaatgtttccttaaattgatggttgaccaaacttcatttagttaggaaaagaattgacttatgaaattttttagtccttcatttgcacaactgccattttctttttataaaatttaagcagaaatttacaaaaagtatctcaattctggaggccacacgtctagttttcatccctccttgaaattttcacctggagttacatgcccttaagtggcacagtccgtggggcttgacagtgaatgctttacttcttctttaggaatttcccaatgcttagaagagagaactccttaaagtaagacttaacttgtttttgtaaataaatgagagatagcaaggtgcagtgacaagaaaattgcacagaggccaggcaacttgcagtgaggattttgaaatattaaacctatcgaaggggcacttaatgatgaacaaaatctttttatatttttttctataattgaatgagagtgtttgtaaatcattgaaaggtgagtttacctatgagatttgtttctctctctctctcttttttccctagagacagggtctcactctattacccaggctggagtgcagtggcacaattagggctcaccgcagcctccaacccctggtctcaagcaatcctcctgcct

SEQ ID NO: 88751 - DNA, 1040 bp, Homo sapiens
tgtcttacacatggtcctacataagacagtaagacaaaggccgacggacacacagctgtcattgcttcccatccactcccaccctctcctccaccagttgggctgggggcagacacctgacccaggctgggtcagttggattttctctctcaggagctttggaacacaggtcctgagaaaaggagctgatgtgctacaggcaacagagctgcagtgtcatatgtggtcatagcttgagctattattgcagtagaccaaagccatgtgcagagaaattacagaaggcgagagaagccacgagtgggccaggctacatcgcttggggagacaagcagacacaaggaactccacagtgcagagaagacagaggtctctgattttccagcatgatgtggctgcacgctgtttcatttctcagaggcctgagggagtaactgttatatccttagtaaaaccatcttttacttaatgttgactcaagtgggcttgtgttctaggtgtaaaaaagtgaaaagtgtatgtcccaaatctaatctagggacagaacctaattttatgtgatgtaatccccaaacttctgggaagaaactgactttttttaatttaaattttttttttcatttttcttttaccatgcaagacttcatcacaagaaatcaacatttttgattttgaaaaattaaggcaatttaatattaaactttaatggggttaagacttgttctgggaaacctgtttctcactcacccagtcaagcaagacaaaggtgacctttaatcaaacatccttttcaggttgtatctggccccttgatgaccatctgataaccaccttttttttttccctgtaaaatgtccctgccaagagaaaactgtattattcttttttttttttctttttttttgagatggagtcttgctctgtcacccaggctggagtgcaatggcacgatctcgcctcactgcaacctctgcctcccaggttcaagtgattctcctgcctcagcctcccaagtagctgggattacaggtacccaccac

SEQ ID NO: 88752 - DNA, 1092 bp, Homo sapiens
caaggggagttggctagcagatcctaaaacccaggcaatcagcccttcctgactgtagattcccgttggcctcgcacgcacacacacatatacacatcttaatggtgatttcaggacacttaaaattccctttcagtttaaaaaacctttaaatgggccgggcgcggtggctcacgcctataatcccagcactttgggaggccaaggtgggtggctcacctggggtcaggagttcgagaccagcctgaccaacatgatgaaaccctgtctctactaaaaattcaaaattagccgggtgtggtggcacttgcctgtaatcccagctactcgggaggctgaggcaggagaatcacttgaacctgggaggtggaggttggaggctgcagtgagctgagatcacgccattgcactccagcctgggtaaaagagcaaaattccatctcaaaaaaaaaaaaaaaagctttcaatggctatggtggctagttgcaatggtccattcaaatagaagaattagtttccactgccttactcccaaagaacacacacatcttacagaaaggtgagatactactcatgtgtagggtcatttcggttcccatcacagaatgcaaagaaaagcactggaaattcaaactgcattgtgtcaaccttattggttccttcggggctgctgagaagtgtacttatgtgttctcagtgcacagaggtttgctaaggaaatgtagagtgtcagcaagaccagggacactgttttcttagttgagcgaggtggctttattcagggacttggacatttgcatatcagcctcacgattgcagggacagcaggagctggcatgaattaggctggtacttgatatgctaattacagttctctataatctttgaaggctgtttggaaagagaatttagaattggagagaatggaaacgcagttaggttaaatgacatgcccaaaggtctcagagctaatcaatgggaaatttgctacgtgtttccaatgtgcgaagaatactacatgcaatacctcctttaatcctctcagcaattctctggtgagtattttattactattattgccatgctgtaagg

SEQ ID NO: 88753 - DNA, 1047 bp, Homo sapiens
cttctagttagttcccgaccaaattaaccattatcaagatgtttatatttcactgaattcacgagctgtctgacagcaacaaaggtcatatgaacattgtgaaatcaggagtgaaaacatggatgtgtcttttttctatttcccccctcatttgagatttgcagcgtacttaacagcaactgatgtggtatattctgtccttaaatttaaaaattataaaagtaaacactcaggttgaatatttggagggaaacattgatacttttgcacagcaaaaataaatacatatatttctcctttattcaagaaatttctcagcaactggaagtgctgctgtgagacttatcctgaaatctgcacacgctgtggttattcgtgcaggagaaacgtgggaatgtgctggttcctacggcaaaggccccggttggggcttctccctcccaagctgtgcggtgacgccagccacacatgcaaggacagcaaattggaagttggtcatcactgaggacttaggagagcttgggtgggtgtgtggggtagatctgaggggctaaggaaggggcacaatgacagggatgggtgctggctgtacccggcatgcagtagatgctcaacaaaggtggagtctcaagacagatggctcagaagtctttggggaaggggaaggagagggagttcaaagatgaacctttggagcccaatatcaatttaaaggagcagaaaagcagtgcagacaaggaggcttctcatctctaagcatctgcctgttcctctgccttctagaagacacttcctgttagaatttcaggctcatgctcctggccttccctcttctccctgcttggatcagagtctcgatcagaacatagctcctgggagaccccactggccttcaagacagacaaacaggaatagggggattgtggcaagtctttccccactcagtaatgtggagaaactgccacgggagataagcagctgaaaatgtttccatctatgacctaataagccaagtcaatttcacacacacacacacacacacacacc

SEQ ID NO: 88754 - DNA, 1811 bp, Homo sapiens
gccaagcgcggctcccgggcgccacccgcccgcaccgtcggccccccgaccccggccgcccggatccctgccgtgaccctcgcggtgacctcggtggccgggtccccggcccgctgctcgcgcatcagccacacggacagcagctccgacctctctgactgcccctccgaacccctgtccgacgagcagcgcctgctccctgccgccagcagcgacgccgaatccggcacgggctccagcgaccgtgaacccccacgaggagcgccgacgccgagccccgcagcccgaggagcgccgccgggcagccccgagcccccagcgctcctcgccgcgcccctcgccgcgggcgcctgtcccgggggccggagcatcccgagcggggtttcggggggtttcgcggggcccggcgtggcggaggatgtccgggggcgctcgccaccggagcgaccagtccccgggacccccaaggagcccagcctgggcgagcagtctcggctcgtgccagcggcggaggaagaagagctgctgcgggagatggaggagctgcgctcggagaacgactatctcaaggtgagccgcgcctcggccgcaggtgtcccggggcgcccccggagggcctggctgcggcggggacccgccaacccctccttcccgggcctgtccagcgccttctccctcctgctctccacggtcctacccccgcattgtcaggcattggcaacttaagcccaaacttctggaaggagaagcaagacctgtgggaccccgccagttcgcaacccacttctcttttctcgcgtctagaactcttgcgtctcttcgctgatacttttacttttgttgacctgttggggcagaggaggctgtaatcgttttggggacatcagcggacgcccccatccccgctcagaacgtgccagcctcacctgtaggaacaggtgatccttcgccagggagctctagccgggccacgtgcgggcgtggcggttcaggataatgccactggagggcccccggctacggacccgcttgccccttctcctgcaattacggaaagagctgggggctctcagggtctcctgggctccgacatcccgggtagagggggccgcgccgttttcggtgagcaagctgaagctcagtagaggtccttggagtgtggcccgggttgaggagcaacggtgttgcgcgggccagtcctttgtaagcatccaggagccggctttctgtgtcaggagaggccacgccagcactttctaaggaatcgcggcgcctgctgcactctctgagtattttccggcagggcctgcgggcagtggcgtcttagtcgccttagcactgggtgcttaatccggctccatcttttctccacggagggggcctggtgctgcagacggggttcccggggtcaggacgatccaggtgacttgagagaaaataaggggagttgtattgacaccaactgttttatttattgtgatcttcaggttagtaaacaactccagtggcatcaatctgtgtatctgttaagtcttaatgagcagccaaccaaacccaggggtgtggccctgcttcttcagtgggttatgtgatttgagctgttttctcagcaaatgatgagctaaccaatacgggcccagtttttggctagtgagattgaggattgggctttaaggtgcatggtggtgaagtctgcagttcacacggaaatcagagcacattaactgctgggtgatctcaagcctaaatttcttatggagctgctccaaccaactgagccttgtggttattttactttgtgcaagaagtaa

SEQ ID NO: 88755 - DNA, 2343 bp, Homo sapiens
attgttagtcaattcctgtttttaagaataaatacaggattagcatgagtggtaaaaatccaggaacaaagggaatagcaggacgagaatggacaattagggtgtctgagtataggagagatttttttttcttgaaccttaatattaattgaataaagtaaatgggaataactgagtgcatgctattctggaggcatctgaaactatcaattatgaaactagtcaagaaaatccctagaatgtttccttaatcttcctccttccaaattgttcctcctttaaatcttgtgtaacccttcagtagagtgaatatctcatacctgcagctacatctgtgggtttgggaagaagctttcatcactgggctgcaagactggaacaaagcgagcgtgcagttgtgtctgatgttagtcgcctttctgacttggtgtttgtaagtgttcactggcgcacctgtgtattcattcagcaatatttattgaggacctaccgtgtgctccatgctgctcgggatgcagagaggagaaagacagacaagcttgctcccctctgaagcttaccttgttagtgtaggtgacagacagtaagtaggaaaaaataccaatactattagatggcactcagaggtgggaagaaaatagagccagcaagagactagagactcgggctgatgagggtggccaggggaggctttgcatgacgtcagattatgtgatggaatgagctctgcagagatctggagcggggagtgttttcagaagtgggaatagcaggcgaggtcttgaggcctgaagaagcaaaggtgcgagcagtctcagaccctgtgctagtcgtgggcagggagggagtgtggccaggaggcctggaaagaaggaagcccctggagggtttgagtagggagtgaggtggtctgatttgcacattaaaaggattactctgctgggtgggggacagactgtaggaggattagagggccagctgagcagtgggcacctgtgtgtctccacttacatctgtgtgtggctcccctcccccagggatggaggcctggaccagggtgatccatccggaaggggcgcagctctggctgagggcttggctgtagaatgggaggggagggggagccaggaatgaaatgactccttgggttcccctgtattcagggtgcattcctgtggacagcaaagagtggaggtgtgggaaagtcagaataggtgaatgggaaaaaacagacccaatgtgtatttaaaataatggaaaatgtctcatttgtggatagcgtcgcttagtcaatgctgagatgcgtcttgtggaacagaatttttgggacatttgcaggtatgttttagttccagggcaattagcacttgttatcctactgaagtttatgttctttgaaggcagggtccgtatgattcatcttagtacctagattatgccttagagataaaggcttaggtcaatgtttggtttgaattgaaaggttcaattatctgcagagttgattttatttgatcatgtagggagatgttgggagtgggataagttctgagaggccacaatgaataatccagttttttagcttctggttacataagatttgaacagatactcaattatattatctcatatgcaaatttccagaggttctggtgcctgtcacccaggcgtggccatgaggtgatgggtaagcgtgtaggtattcaatatttagtattgaggagcgggtatgaaggagagacatgccatccttttttgatgtacttggctcataaatcttctctgtctgatttgcataggatgagttagatgaactccgtgctgagatggaagagatgagagacagttatttagaggaagatgtttaccagctgcaggaacttcggcgagaactggaccgcgctaataaaaactgccgaatcctgcagtaccgtcttcggaaagccgagcagaaaagcctgaaagtggctgagacgggtcaggtggatggtgagcttattcgaagcctggagcaggacttgaaggtgagtgagggggtggtgcgtgcacctcgcaaggctgctgtggaccggctggccacatgcacgttgccctggtgttttttccctgcttgtgtctgtctctacagattgcagcataaacagtcttggtttgctttatggcttatagagtgtgtgtagttatatgactttgacaccccaaggtttacatttgtcataatatgaactttaaaaaaatgatgattatttgtgataacgaagaattaatacctgccaatgggtctgacaattggatagaaattctgcagaaactctgaaagatctgaaatattttttttaaaaa

SEQ ID NO: 88756 - DNA, 2021 bp, Homo sapiens
ttagcagatgggttcagtattactttagtgaatataaatgtttatttgtttattattattcgaatttctcgcttaaagcacgtgagcttgggcagaattggcatggttggtgatcatctgtgagggaggagggttatccaaagtgggctttaaaaacaatttatttattttaaagccatttaaatttagcagtttgggggggttggataccaactttagtgacactaaggttagcacgttctgataatgcaccaccatcagaccagccagagtggccttttagcccagatgttgatttcatttttaaatgaatctcctcctccttttaacaataagtcagttgtgtattgccagggtctttgctatgtggtgtaatatattacttaatgattttgcctctgatgttgtctgatagtacccttagcacacaaaaagcctcatatcctgataatgatctctgtgggtcgatgcaggtagccaaagatgtatctgtcagattgcaccacgaacttaagacggtggaggaaaagcgcgctaaagctgaggatgaaaacgaaactctccgacagcagatgattgaagtggaaatatccaaacaggccctccagaatgagctggagagactgaaagaggtaatccaaaactgtgggggtcctgcccccttggatttaataaggaggagcttggaactccaagtgcccccttctcattgtggtcgaaagctggggttggcaaatcgtggcctgtttgtttggctcataagttagattgtttttacatttttttcctagcgtggtaaacaaacaagcaaacaagcaaaactcacaggaaagaaagcccccaaaagcaaagaagactatggattcaatactgtgtgatgcttgcaaagcctaaaatattttctatctggccctttgcagaaaacgcttattgggccctggtctaaagctagtttttgtaattaccactcagatgagctgaccattaattcctttgatgtgtccaagtggagcctattattgctagaatacagagttaagaagtagcttttttctccagagtcttctccagtgagctggaaagtatgttatggttgtctgttaaagctgtgtaaacagacaatgtatgtaacaccacctgtgtagctaaaatgagttaaatatagacatttttaaattgtagggagtgatttttctagcaaagtagtctggaaaatgaatatatatttttttcatttgcatacagcaatgcaaatcctgttttgttattgacttccattataagattaaagctgagtgttttcttggaaaatgtcctgcatgtgttgaaattaaaagcctttggcgaaggctttaagctcacagtgaattctggtgtgttacctgcacctgccagcagccttgcttagcggctcatttttcctttggaacagtttcctgattcacacagttcttccctatccatgccccctcccatctgctgcacctggttccggcctgcatgggctctgggtagggttgtgcatgtgcagtgcaggccctgctctcaaggcgcctccagttcagtcaggcccacagataacaaaacaaacaaatcacagcaaagtagcaggcgtgcccctctctgcttctgcccccacccctcttctcacagctgcctcggcctccctgctcttcccatgcatgccctcgctggaatgttctttctccaggcactcacctgtggctcattcccttatctctttcgggtccttgctgagattcactcagcccctcccctcaacactcgtgaaagttgtccccatctccaccctggccagccctgttcaccttcccatctgacatacgtgttctgggacattatttgtctattgtcaccgctcatctgacaatgctgtgtgttttctttctctgtcttttatccgtcccctcctttactagtgccccttcgtatcacaagctctgtggggcagggacaggggctttgtctggctcactgtggggccctcatgcctggaacag

SEQ ID NO: 88757 - DNA, 1003 bp, Homo sapiens
ggctgaggcgggaggattgcttgtgcccaggactttgaggccagcttgggcaacacagcaagaccctgtttcttaaagaaaaaaagagaaaataatgtatatagcttttgactcccccaaaacttaactaataatagcctactgtagactggaagccttcctgataacataaaacagccaatcaacacatattttgcatgttgtatgtattatgtactgtattcttataataaagctagagaaaataaaatgttgttaaaatcataaggaagagaaaatatatttactattcattaagtggaagtggatcaccgtaaaggtcttcatgctcatagtcttcacgttgagtagatggaggaggaagaggagggtttggtcttgctgtctcaggggtggcataggtggaagaagatttgagtataagtggactttcacagttcaaaagtatgttgttcaagagtcaactgtagaactatattttataaaattttatatgtgtatacatttgtgtataactaaacataaatatatattttaagtaggtgaagattctgttgcatacatttaaatggatttgtgtaggatttggcatctctttgaaggaagaaatgattattgttactcttgacattcaaaagcaaggccagagtgagacaagtatcttcagagaacctgatgctggctcagggtggatgtgaggagagaacggagagggatcagccctccctttgtgggttagaattactgagaggaattgttccattggaatgaaataagtattttacttccagagttgcattcagggtggtgggaccgcatatttacaccaaacttctaaatgaatcatagaaccgacaggagtcccaggagcgttagatgctggtagattaaactggaagcagagaacgatggtatctcatgatacaaggttcaaaggtggtggaggaaatatttattggaaaatgccagctgctatctttgtgaatgggttctttttgcaaaa

SEQ ID NO: 88758 - DNA, 1027 bp, Homo sapiens
attgaaaagagtccgagggaaccaactaagagacgacttcttgcggctgcctttcctcaagctcagaaaatgacatagattccctgggtttggttgagacttcttttgtgcatagtaaatcatcagattttgtaatgattcctgtgtgcttgagacgaatgtgttttggggtgcagactttgatttaaatctgttagattgaagacttcaattgtaacccacagcaaaaagggcatcatcactcaatatacaactatacaaaggttttacaaatacacaaaggtttaacaaagtaatgcttaactttgtcatttggggtacactctgttattttccattcagctaaaaaaattttttaatggtggttataagattgatttatagttcattagtgtgttgttgcaatttggaaaaatgtattgactcatttgttcgctgtattcaaattttctatatcctttatagcttttggtcccattataattgcgcattttaattttattcttgtaatttgtcaaactttgcgttatgtattttggtgccattttctttttttttttttctttttttttttttttttgagatggagtctctctctgtcgcccaggctggagtgcagtggcacgatctcggctcactgcaagctctgcctcccgggttcacgccattctcctgcctcagcctccggagcagctgggactacaggcacccgccaccacgcccggctaattttttttgcatatttagtagagacagggtttcaccatgttagccaggatggtctcaatctccagacctcgtgatctgcccgcctcggcctcccaaagtgctgggattacaggcgtgagccaccgcgcctggtcttgataccgtatttttaagtgaaaacagatttaggactcttccttgtgatgagttattccctttatcagttggtaatgacctctttattctaatgtattgctttttgctgtaaattcttttttatctgctttcatcatctataccaaatttcttttgggtagta

SEQ ID NO: 88759 - DNA, 2073 bp, Homo sapiens
agaatgttgggggtgggggcagttaggtgtgtgtttgttccttgcatcgtagatatgctttcgtgtgaccttcagcagtgttcctgggacaaggggagcaggaaatggggagggcattcatcaggcagttggcatttgaacgtagacactgttcatctttgggtgcggatgtgctctggttgcccaggcaaagccgtgttcattgatcagacatctatctgtgtactgtttagcactcaacagttgcgggtagaccgttgccagttgttttcgcatcacacgtggctcatctctcctggcaggggggaggaaggtgagagctgaggacgcagtgcctgggagccagggcgcagggcagccctcgggactgtcagaccacctcgggggctgaggtgagacgaggccggggagtgtttgatcttctgtgtttattcatgggcattagtaaagctttttttcataaatgagagaaacaaaatcactgctgaaaaatcctccatgtattgtttctgtaaactataggaaacattaaaatttgaagatgatatggtttttcacaagtgcctgtctgtatctgtgtcggcctcattttttgtttgtttgtttgtttgtttttgagagggagtctctgtcgctcaggctggagtgaagtggcgtgatcttgcctcactgcaacctttgcctcctgggttcaagcgattctcctgccttggccttcccggtagctgagattacagatgcctgccaccacacctggctaatttttgtatttttagtagagatggggtttcaccatgttggccaggctggtcttgaactcctgacttcaagtgatccacccacctcggcctctcaaagtgctgggattacaggcgtgagccactgtgcttggccgttagtatcctgttaatgattgagaacctcaagcattggcactgaggaggctacaggagcgtcctcgcaggtgggagtgggccggccagctggctgggtcagtggtggggcttggccaggccgtttttacttttcaatcttgaagtaacactcagagtttcttgtttgtttccaagggttctcatgtgtaggaatcttggtttgggtttggatatgtcgtttttatcttcccttgagaaagagccataaacattattttgaacttatttgtaaacgaggttactcacagggtcacctaagtaataaggcccagttgtcatctaaccctcgtggaaacattacaggtgagggttgctagaggaatcacttgagtaatctgcttggagcagggtttctctgctgtcgttttagactgggtcctgcttcgttgtggggactatcctgtggactgcaggatgcttaacggtgttcctagcctctgcccactagatgctggtagcaccccccctccccaatttgtggcaatcaagaactcttttcctcctccaactccgttgaagctttggagggaagagtcatcgcttgaccctgagtactttgtgttgaaggatttcaactgtcttgaaggatttgtttgacaagattgtgggttggctgcacaaggtttgttctagcaccttaggaaaactctcttgtctcccttcttactgtctcaggtcacaccctgctccggagccatccccgtgaagtctccagcttggctcattatgtattttctgaagggtaccctgcattttctagctgattgatgagatgggtagaaggtgatacccatgttcacctttgctctcaaccttttgcaaaacacccttttaagtgactctagatgtttgggcccttctctgtgggaagattagagggcggcagtgccaggagcaggttttgacaagtggtttcttgtgccgtcacttttactgaggtggtgaaagattgtacagtgcgtgcctgggatcaagccctttagctggtgatgccaggccctggctgcacggtagcatccctgcggagcttttaagaatcctgctgcccaagctacaccctggcccctacatcagaccctgggggtggtgacccaggcatctgtggtttttagaacttccctggtggtttcaggtcagc

SEQ ID NO: 88760 - DNA, 1035 bp, Homo sapiens
gagtgtttcccgatgctcaaagcaactcagtgtcagggcacacctccccttgagaaactcagagctcagggagagtaggtggcgtgcccccggtcatacaacttgtgaatggcagacaggaccttgtgccagtaggagccattgactgtaggggacagaacaaatgctttatatatattttttttaaccaaaatatcttttccttttctgaaaagaaatggggaaattcagcagtatttgtgtgaaatgtataaatttgcctactatcatatattaaggctgtgtgtgtaggaaataaagaagacaaataattaagtccttctcctcactttttaatcctgtgtcacataagcagccggggtatagctgcttccatggacaaatcgtatttcacctgctctgccattgattgaaaggtacaccattaggagaaagtaaaacatgctgccaattacatgatgacatgccatagatcataacatgcagcctgatttcagagatgttaaaatgtgacatcatgcatcttaaaatcagtgaaatacggtatgtgtagatgctccttgacttatcatggggttacatccgataaacccattgtaagttgaaactatattaagtcaaaaatgcatttaatacacttagcctactgaatgtcatagctcagcctcgcctgccttaaacatactcagaatacttacattagcctacagttgggcaaaatcttctaacacaaagcctgttttataataaagtgttgagtgtctcatgtatttattgcaatactgtgctgaaagtgaaaaacagaatgattgtacaggtatttgaagtcgggtttctaccagtaatgttgaaaagttatacctggaaccatcatacattgggggccttctatatccatgtattttttttttttttttttttgagatggagtctcgctctgtcgcccaggctggagtgcagtggctggatcttggctcactgcaagctctgcctcccgggttcatgccattctcctgcctcagcctcccgagtagc

SEQ ID NO: 88761 - DNA, 2116 bp, Homo sapiens
ctgcccgccttggcctcccaaagtgctgggattacaggcgtgagccaccgcgcccagccaaggagattgtaaagaggaaaagaggaaatgagagtaacatttcttttctggctgtaattgaaacaattgctttgtccttgtaaaagatgttaatgtctcctgcagcccatcctgctgagtgaatttggaggcaggcatcatagtaattggttagtcaagaaatagtcgtatattgctctttttactcacttatctgtaagttgtttttaaagcaggttgttttccctttaatcaaaatccagtctttagagctctcttactcctatgtgtttagagaagcaggaaccctctgaagcatccggaaatccttgagaaacaagacaatggccaaacatcagttttatttgtatgttacagccctgtgaggcaggtggattattttatcaccctcatgggacagataccatgcggcccaaggaaatgaaataactcaattttttattttagcttattaattaactaattttttgaggcagagtctcgctctgtcacccaggctggagtacaatggcacaatcccagctcattgcaacctccacctcctgggttcaagcgattttcctgcctcagcctcccaagtagctggaattacaggtacccgccatcacacctggctaatttttgtatttttagtagagacaggatttcaccatgttggccagactggtctctaactcctgacttaaggtgatctgcctgcctcggcttcccaaagtgctgggattacaggggtgagccaccgcacccggctgaaataactcaattttagattactccttttatgaagctgtgggactctaggcttcctgagggcaggggctgtgtggtattccttgtggaatccacagccatagcccaaggcagcacctgggatgtcctagttgcccttacatttgttgagttgagttgaaaagtgaacaccagatcagatcttttgcctcttaggtcttctcaccacagactctgtgttctttccacaaagcaaccctaaattgtccccttttacataggacagtaccagagcccagaatggtgaagggacatggccaggattttcttgagtccccatcaaatgttcttactgtacagcttcatgcatgcaggtacttggggatggggaacactttgaagtgggatgggtggaaggagtttgaagattgtctgcatgaagttagatgtctggactgcaggaccctggttcattacagtgtgttaattactcaggaataattatgtctggctgcctggctgtccttttccctgccgtccatgtggaattaatgagaacactttggtttcagtcattcatcaatgttctttgttcagcttctgctttcctaactgcaaataaattgcttataatagcaagtaccttttattctattgttaacacttgagagtgtttaaaggatgggtttcaattggattccttaatagaaggaactggctgcttttccagggcaaaaattacctgaatggcaatagcaaactgtgcaactaagtaaaagattatgggatgggaaacataaaaaggatataacagctaaatggaaaactgtgactgagcaccaactcatgcacacccaaaccaggaaggacaggaaggaaataagaaaacaaaaatgatttacttttgtgccaagcagcacagactcgcaaatcagttaatgggtacggtaaatgatgatgtgcttgctgttcgggagtttatttctcagtggacttggtggccatccaggaactcatcaaatcaacttaatggagagttaaatggctcttgaaacaagctggcttgaagcagctgggagccagggcctgtgttcgcttgacttagtgtggctccgccgcagggtgggcatcctctggcagaagagcttgtttttcgcaaggaagagtgggtctgaggggaagctgctggaaaacagttgcctgtgtctccaagaaaacgcctgcttccttgatcctattcagacctgccctggtgtcctcaggagctctaatgcagggcaaaaaaaaaaagcactgtgctatggagccaagcctaatgatcttcaga

SEQ ID NO: 88762 - DNA, 1052 bp, Homo sapiens
aatgtaaggatgcgtgagatacctgtctccaacctttccacagactgcttttatctgttccctctcctgctctccctctctccctctctccctctctccctctgtattagtgcgttctcatgctgctaataaagacgcacctgagactgggtaatttataaaggagagaggtttaattgactcacagttccacatggctggggaggccttaggaaacttacaatcatggcagaaggggaggcaagtccttcttcacatggtggcaggaaggagaagtgagagctgagcaaagggggaagccccttataaaaccatcagatctcctgagaactcactcactatcacaagaatagtatggaggaaaccaccctcatgattctgttacttccatctggtcccacccttgacacgtggggatcattacaattcaaggtgaggtttgggtggggacacagccaaaccacatcaccgtcgtttcctttatgctgactatttcaaagcaagtctcagatacctacacacgtgttatttagtacttctgaatttcttatttttgtatggaaaatgtaaagcatataacaaatggaagcagtccatggtttatacagttttcccttaacaaagctcacctttagggaggaagtgtgacaccaataatatgactacaataatactgtggactttgaaaacacatgcaccactcatggacctgtatgcctttgactttcactttgaggttggcaatagaagttattactgttgcttttctacttatcacaattaaaactgtatcaccttattaaaactatttagaaaatttgaatgagttactttaactacttgggaaaattgagtaatttactttaaactgcttttggtggagctgcagatggagaagtcccgtgtggaggagctagagaagatagtctaattgtgattcattgatagtttcctgttccttagtacaggacattgttctagctggctagtaaggctgaacaatttttaaatgacatatccacatgcaaatatataacatacgtaaatgaatt

SEQ ID NO: 88763 - DNA, 4091 bp, Homo sapiens
gtgactccccgaaataaattcagtttatatatatgtaaataaattctgaagactctacatgtgtgtgtatatatacatatatatttttgtattaacgttaatagtaatattaacatgagttcagggtattagccagttctgtctttcgggatgaagtcactggattgaggcaagacttcagtgaaggaagccatgtggtttgtaaaatgaaactgacaggggacctttgtatcttatgttcaggtgatcacagctccttcttgggggtcatcacagtcacctaagagattgagttccttcaaagcagtttcttgtgcacaaggacagatggggtgtcctctgttcactctgctagcacatgatgctgccgtcaaaatggcacacatcatctctacttttagttctgttataaatggagaccctggacttgcctcagatgaccttgtgagatattttatttgtttggcagcattaaaaggtggagccttcgatcagccagcagcattttccattcctgggacatcccttcttatgcagcatctgcaagctcatttcataaaggcatgggagagcaattggagaatgacaggtgtgctgtggcacccccaaatgcagttgccgctgcctcaggccttaccagtaatgacactatatcagggtggggaggacagtagggacaggttaagagttggccagcctggggctgcaagccatgctgtcaccatagcaggaggcaaggtgtatggagaggccaggctggctgcggacggaccacatggatctagggtcctggctcagggtgttcgatgcactctgaaggcagagggtgctgtggttgaaaaaccacaggaggtttttcaagggagaatgatatgggcagttatatctttggaaggtaagtggaggaagagtgaagtgagaagacagagccagtggagaggctgtggccgtggcctaagtgagaagaaagcagagcctgagcttgggcagatccaatggtgggcccgagagagtgacaagagcacagggatggggtttggccacctgtaaatacctgtaagcacagtgcctcccactggccctggccctggaccccagcgaacagggcttagggcatgatcctggatcgtacagacatgggggcctattctttccttggcaactatgggacttcgggcaggttgcttaatggcttgaacttcagtgtctgcaactgtaaaactgagttgttgggacccagctataaacttgtttcgatgtttcagtaaaataaagctttgctctaagagtaactttactactaagactaacataaaactgtattttcagtttgtttctgttaacccatagggaatattaaagttgctgttagctggatggtaatgtcattttattttttatatttgtttttatttttatttatattattttgagacagagtctcattccatcacccaggctggagtgcagtggtgtgatcgcggctcactgcaacctttgcctcctgggttcaagtgatcctcccacctcagcctcccactgagaagctgggattacaggctcatgccaccacactggctaatttttgtatttttagtagagacagggtttcaccatgttggccaggctggtctcgaactcctgacctcaagtgatctgcccgcctcagcctcccagaatgctgggattacagacgtgagtctctgtgcccggccagtaatgtcattttatgtctttccctggtgtgactgcctaagcgaaatatgcctggagagagcccggtcctggagggtgcccctcctccagggtggggccccacctgctgctctctgtgccctgggcaccatgcagaaaaggctgggcagctcgggccagtgcattctgcgcttgtctcctggctggctggaggtgcagaggaaggaaggaagtttctatcttctaatcagatggagggcagggaggaggtgttgaatgctaccagttcttccttggggttaccaacctggaccccaaatgcctatatccagaggacactgccctgcaacggtcttgagaacatttttctaggcatgggaaaagttgtaacaagattatgaacatgctttttgaatgcattgcagttataatcagattatgtgtctgatttaagggagtcttggcttataagagtgctttattttcattacagggaaatgacttgctggtaaaactgaatttatttccgggagtcccaagctggtccccctttggcatagctgggagtgaggcctgcagttgccttctctggatgcgttgataaagttactggcaaggcggcctgagtgctgggtagggtggacagatgcagtgtgcaccgtggccaggccctctcgtgctccaaggaggaggaggatggggtggacagtgccctgggcagcgggcccccagaaggaccagtgggtgtgggcatctgactgcatgtgtgcatgactcatgcacacatcttttccgcacatggactgtgtctggattctgttgagaacaaaatatttatgcaaaaaaggtctgtaaggctcaggctgctgatgactttgcactttcacttggatgtttatgtagaattttcgacatgtttggacatagcttgtgtgtgttctgtcaaaagaaggctccagaaggatatttcaccaggtcctcagttgtctgttttaagttttgcatgcgtagacattaaacatgcctcttttggtgaccacccaggagtgaaacgcgatgcttgatctgtgcttctgaggatgtaagtgatgttgccgctactgttactgctcaaaagtgggccacctaaatccttccagaatagaatggtattgttttgggacaagataactgacattttgtgctatagtttctccctggactgcaatttttgacactcatgtcatcaacactctaaaaacaaacgctttttggttttgagggttttagctccattcccttcaatagtcaaggaaatccgaggtgaattttctcattggtctgagtcacctggtccagtgcaggacggggtaggtgtgaggcagatgtggggggtacagttgaagtgaggttggctgctgttgcagaagagggggacatcacaatacaaaaacaatcttttttgctgttatgaagactagacgaggttagaaatgctctgagttggggcagatggagccgtgggattcgcttgtgaaagttgtttcattgacctgcacacgaggtgttgaagacttagctcagggcagcggtgacgcggaaaagaaacgtttaaggccaagctgctgcagactgcactttcacttgaatgtttgttcagaattttagcatgtttggacatagctggtgtgtgttctgtcaaaagaaggccccagagggatatttgaaaagaggttgttgataaatctataaggctgaaaggtaaagaaggagcgggatggaaaggaccccagagctttgactctaggacatcccgatgacagagatagagatggctgatttggggagaagagggccaggtcagcattgacttgctgagtatgagataaaactaaatataatccagtgttttaagttagaacattaaaaagttttattttgagtaagatgtgtaaatattgtgactttataaaaagtcatctgcctatccaaagtactgagcagtggttttgaaaaatttgttaaagttttctcttttactatttaaacttccatgtactagttgaataggaactgatagttgttaacataacttttaaatcgaattttttttgtgttattgctttctttagcaactgtgcctctcttttttatgtttgatttgaaggaaagttttaagaaggcctggcctggcacttgtcccagaggaatgcatgtggcatagcaagttaaagagtgcaaatgtctgctgtcttagagggctgagtttgtatgctacagacccacagagtatttccaaggttcttggggggtaactatttaaaaatctttcttgttaccatcccaattgttaaacacaatagaatgatattgaaaaatattgtcataaagacagtctagaaatgatgaagaatcaa

SEQ ID NO: 88764 - DNA, 2959 bp, Homo sapiens
caacctttacatcctgagttcaagcaattctggtgtctcagcctcctgcatagctgggatcacaggtgtgcaccaccacgcctggctaatttttgtaattttaatagagacggggtttcaccgtgttgcccaggctggtctcgaactcctggcctcaagcgatctgcccaccttggcttcccaaagtgctgggattacaggcgtgagccaccgcgcctggcctctcctttatttttaagcaagcatctataaaataaccccatgtgtataagtgtataatactctaccaggagcttttgggaatatggaagaagtaaagggttcagttcttgcccttggctttataacatgttagaatgatgagacagcattacaggaaacaagcaaagtaaatccatcaagtgcctggtaatgagataccagtaatgtcagagagaaaagggaaccaagtcgttttgtaagattttgatggaatcttatgatagatgcagagttttaaatttgtatttttgcagccatagccacccaggttcctagtagctttagtatagatgcgtgcagttctgcaaaatgcctgctatctaatgttgcctttttcttcccaattctgttttatattctctcttgttctccatttcttggtccctgtctctctgatgtatgaagtaagtattagtggaaagagggcttagctcttcaatctttttgatgggaagaacatagcttgcaggtggagtacacctgagagtctccagctctgccctgactccctggtcctttttacctggtggcatcagagagcccctgatgtgagcagcctggtgcgtttggtcctgcaggggttatcttgaatcactgataatatctgggagtgcttcggtcacttttttgtgaaagtggctatgttagcgacacagcacatttgagtaacaccgcctgttgcaccaaatgcccccgtgccacggctgctcttgctgccactctgagttaaatggtaacttcttaatgcataggacgactgtggctcagcgccaccaaaggacttgcccaaggtcacacgcgtgacaggacgaggggcaggacctaggccttctcctgccaaggtcgcaggtgctatttgggatgtcgtttgttgcttttgttgttttaaccgggattggtttgaaatgaaaatgaccacatcagcacaaagcaccgtgtttagtccttgattttctcctcaacaggttggagtttaacaagggattgggtggtggcgaggtcgttctttggccccagtcttgcagcgtgtgtgagtgttactctttatgaaatgctgatgaaccaagccagctgtcatttctcccaggagcacttcagggacatctcacacgcttctcctcactctccctgggaccaggtctgtcccagaaaaccttcctgaggccatgcagcttctgagttccaggacatctctcgggtggccccaggagaacctgacctattttgtggcagatcatgactatttttagagtctaaaccacctttaaaagacagactatcatcctctttcagagaatatagtccaatcaagtcaacagaatgttcacagggagtggggcacggaggaggatgtggttttggaggttatacagtaagttatgaagcatgacacagatgtgattcttttcatctattttgttaggtctgtattcagagtaagaattattagccaggcatggtggctcatgcctgtaatccctgcactttgggaggccaaggcaggaagatcactggagcccaggagttcaaaaccagcctggtcaccatagcaaaaccttgtctctataaacaaaaacattacttaggtgtggtggtgcacacctgtaatcccagctactcaggaggctgaggtgggaggatttcttgagtgcaggaatttgaggctacagtgggccaagatcgcaccactgcactccagcctgggagacagagcaagaccctctctaaaaaaataaagaataaccatgcacaagatttaacacgttcatactggggtctctcttgtaggtcagggcctttctggaggtcgtcagaccatgcggtgacttctaacccatgtcacatttccactacagaacagtgtgagatttcagccttagccatgaaaaagaagtgtgtgtgtgtatgtatgtgtgtatatatatgtgtgtgtatatatatgtgtatatatgtatatatgtgtatatatgtatatatgtgtatatatgtatatatgtgtgtatatgtgtatatatgtgtatatatgtatatatgtgtatatatgtgtatatatgtgtatatgtgtgtatatgtgtgtatatatgtatatatgtgtgtatatatatgtgtgtatatatgtgtgtgtatatatgtgtatatatatgtatatatatctcaaaggcaagagatccaaattctcacttaggtggagtttcaggaatgttgaaggagagaggcaaacttgttggagaaaagaaaaatttagagcctttaaaggtgaggaagaaaggaaaaataggagtgtttttatctctttatgcagtgaggtccagaatccagccattgtcagttctgagcatctgggatgtggccaaaccgcagggtgcttcaaaaagcctctgaattcccaaagaagttgcagtgaatcccaaggaatatatttagtgggcaaggtctcctcttagagcccttccctgtgaagttagctggatttctatctcctagtggctgtcgttgtctaaggccccagtccctggtggatgtgacacttgcaaagcaaagggcactgcagacaccctagtgatgagtgaggggagcagcattagcaccgtggaactgtcagccagagagctacaaggtagggtccccaaagactggtaagaggaccccagacacaaggaagatgttgacctgcattctgtcattttcatataagaag

SEQ ID NO: 88765 - DNA, 1012 bp, Homo sapiens
tcctttcccgctgtgcttagatcattttgagactgctttttcccaagggcactctgagacccttctagcaggagagttggagaggttctcacttgtcacaacccaaaaacaatcttatgggaagaaaacttttcaaagagccaaaggccataatgaggctattacaagggagttgcccttccaagcccaggatttttaaagaagcatgtaattggcataaatttccagaaaaaagtgtgatggccacaaatgtcaacgtgttattataatagatttcctgtttctaccagtaatctagaaaatgccagatctgggtctgcggggggtcccagagcttgaagcgggatagaggtggcacccatcagtgagaggtgcacgtcctggcagagggagggtggcgtggtttgcgattcccggtttctccagggggccccaggggctcatgctcatggggccttggtgtcctgagggtgggtctgctccaccacagcacatcggggctatgctgtaaagtaggtcagaagcgactccagctgtatgagaagcgcttagacccctatttgccccctttgggagtcaccaaaatcccaaagccacagcacattccttgtcataccttcttctggaacatgggctcacctcatgtccatctggaacgcgagagcggtcagcaggaggtggacagtccctcagtgagtccaacctgcctccttgtaagtcccttctccgagatgcagtgccgggctatggagggtctcaggctgtgaggaaggagaacgggttcaaatcctggccgtgtggtgggcaagttacttcttctgagcctgttccctcacacaggaaatgagaacaagagtccccacctcatattggtggtattaggattcgggatctcaaatataaaatgttggctgtctaaacttgttagacgcagatgcaagtgccatgtttgctaacgcccctgacattctctagggcagtgccttgaggggtgtgttgtcatctcagcggg

SEQ ID NO: 88766 - DNA, 1033 bp, Homo sapiens
ccagcccagcttgtgtcacactcttatcagcgtctcaatttccatctaaacccaaagctcttgtatggaagaggtttcctaacttcttttccttttatttccctttcctttgcttcacgcttctacatatcctttggttcagtggtctctctcagccttattgctcatttgattttaatatgttgacaaaaagtcttgtcagttccaaagaggagtgtctgtcctttgctaattaggtcctaatagcaggggagagaacacacatcatcggttttctcctggtggtttgactcatcctataaattgtatgtgaaatcacttttgccattggctcttggcatacttaattgcattgtggaaaatctgacccacttacctccctgaaatgatagaaataatgccctcttactgtgggagcgaattttgttgttgaaatttttcctatgaattaacagattgggatttttatttcagactttatatacttggtgaagttagggttctaaattctgttctatatatagaatatatagaaatcacacagttgaaaaagttcatacttcaaacacacattttccatgcagagtgaaaaagcctgttttctaaacattggtttttctcctagagagagaagaaagccaaaatgattaatagtgggtctttttttctactttgaaaaaaaggagggggtgattaggacttgaaaatattaaacaagaagagaatcataattggcagggtaatattgctttttatggttatcacttgttaagcaaattacttcatttgatctttaaaagaatgctttatataaggaaggtactattctcacttttttttttttttgagacagagtttcgttcttgttgcccaggctgaagtgcggtggtgcaatcttggctcactgcaacctctgcctcccgggttcaagtgattctcctgcctcagcctcccaagtagctgggattacaggtgtgcaccacacacccggataattttttgtatttttagtagagacagggtttcaccatgt

SEQ ID NO: 88767 - DNA, 1038 bp, Homo sapiens
agatgtgaggtctgtcccagcagggagcagccacatcaaagaaggaagcaggcagagcttccagcaaacagagctccctgactgggcctctttccttctgtccactcagaaaccattagagtccagcctgattgcacaaatggatctagacagccccaggaggagccatcccgacacaatgctgccacaagtctgaataatgcacacattcacccttatgtacccacaggaggtcttctggatttttatagcttgcagataaagatccaacaacatctggattttctcagatgtgagaagctggtcatagattggtgtcatttagaagacaaaacatgagattgatgtgttttaaaagcacgcagcggatgctgcacacaagaaaggcgtggttaatgagcactccaggcctgcgtttcagcagggtgtgccaaagaatgatgcctcatgaggcctcctccatcatcctccatgtagcgcctgttgtgtgagctgatccaccgagctccccactaggtgaagcatgagttgtcggaggtctgggagaaaggagcagctgtctctgccgtggctgctgcagggacactgtgtaggctctgtgccctggtctgcatcagaggctggggcctggggcgccccagtggggacttgcagacgatagctttagctgttgaaaggctgcagtgaaaacaccagctctggcaactgatcctgcttttcaacattgtctgcaatgttgtgtctcataaatataatatactagcagagatattgacagttgagggtgttaactttcttagcctgtgtgttcattccagacagcaccagagataatcaaactgacttctttggttttcatcacatgaaaccatggctgttttgtttttctgctgaatgcctgctcccagctgtagccctggcccagccgccttcctgggagagggctgggcaggacagagctgagggtgggcaggtgcagctgggacttccctccctctgttctgccctatgcccatccttagtccaagggctgggtat

SEQ ID NO: 88768 - DNA, 1031 bp, Homo sapiens
agtgcttggagatgagaattgctgaagatttgcccaaggggcatcagtagcttttgtggagtaatgctagccagtgatgcttttgatatttcagcacagtttagtagatgatttatggaaccaagcagtggctccagatagcaaggatcctaggcaggtatgggtcagtaagtcggacagggtgttattaggcctccctagtggaagagtctcttggataggaagccttaagcctgggaaggcaattagggtttcagagtttcatttactgtcctcaaatatacattaagccctactttgtcctctgcacaaagatgtatttgatgatccccagtggcacagagctaatcctgcctgggggttaatcctgcagtttaatctcctgttcatttctgtctgacttgagtacccggggtccatcagtcttgtccatcatttccaggtgaggcggagcagaggtttaatggaggtgtgggatgtttgcattacgctaggtcaattccattgtccttaaaaaatgagaacctttctgatttgaaaaaaaaaaaaattaatcttgactatttgggggaatggaaaaaaaatctataaacaaaaacataaagtcatccataattctattccccattgataagacctgttagcgttttagtgtatttgcttccaaacatttccaagacaaaaatatttaatcttgttgagatgatattaagtatatatttttaatcctacatttaaaaggtgaatgttttatgaaaaattttgtcattaaaattttttagtaatcacgatttttaatggctacacaatattatattaacttttagtgcaaatgaaaatttatgtgcctgatttctttcttcccaacattttattttgaaaattttcaaacagatagcaaaaagagttctgtagtgaaaacacctgttatccccaccattcacactgtatgttaacattgtactatacttggtttatcacatgtctgtctacccatctttttattcatttacccatcgtattttttggtg

SEQ ID NO: 88769 - DNA, 1022 bp, Homo sapiens
tctcgctctgtcacccaggctggagtgcagtggcgcgatcttggctcactgcaacctccacctcccaggttcaagcaattctcctgcctcagcctgccgagtagctgggattacaggtgtgcatcagcacgtgggcccagctaatttttgtattttagtagagatggggtttcaccatgttggcctggctggtctcgagctcctgacctcaggtgatccacccgccttggcctcccaaagtgcggggaatacaggcatgagccagcgcgcctggccaggaacagaatattttctaaaagacacagccttatattcagtctgacaggcaaatgtcatgtttctacagacttttcaacttttataaatgcccaagggcccatctgtaggggtttctcaaatgtaggattctgattccatatttcctactatgctccatggtattgctaagtgccagcatggatgtgcacagagttgggattcttgcagtttgggggaaggatactttgtttttggtgcagtcatcattatggttttgtcatggtcatcagttacaatttttctttgcactgtagttataatttacagttttactttattacctttgatttagtttattttgcaatgtttggttcagagtactatgtgatagtatgttttagccaaaacatacctagttttttccaaaaactaggcttcaaggtacatatcacaaaggttaaaatgagccaaccagctcatattgcaaagcaaatgtatgtcatgttcccgagtttgcatgtgcaggagaaagtggcatttgctagggggtgtgctgggcatctgtgtccatcccaggtggcctggtgaccctgaccttccacttgctggccaggctgttgcctttggggccttcccaaactctttgacttggatgctgggaatcctgaaccatgctctggctcatggccccactcttctttagccaaagtgtctcaatgtaattttcctcttctttccctcatttacttataacatttgtcctc

SEQ ID NO: 88770 - DNA, 1215 bp, Homo sapiens
caccccctgccatgctgcgggtttctcatgccccttcatgtgcacagaagtgcccgtctccctgggttcatgctaacactgagtgccctacttttttgagtctataaatgtctaagtgaaaaaaaatcttgttttaattgtcagtaattgtgtttattggccgtttgtttattttattaagatgtgttttctgttgcttgcaagatactactcttttgtctgtcacgtgttagaaaaatcttttttccagtttgtcatttgccttttaatactataagtggtttcttttgatgtattctttttaaaagttaaaaatcttaccaatctatcaatcttttctctggatgtttctgcttttgtttctgtgtttataaagaacacacatcaattcatcttttttttctcgttccttgtatgtttttttgcatctaaaattttaattcatctaagatttatctgtatatagtgtgtgtctcaccttttttgatctcacaatatgtttagttgtttcaccaacacataccaaatagttcatcctttcctcactagttcaaaatatgacctgtattgattattaaaatctcatatattctttatttctgagccttctatttagtttcattaatctgtctatcttataccagcaccgaaccattgtattgaatttttatatctaatagcacaaatactgtcattatttttccttttcaaagtgttcttggcaattttcaccaatttatttttctaaattgaggtcagcaaagtagtttgaggctttgcaggccccaacagtttgtcactagtgctctactccgccctcgcagtggagagcagccatagacagtgataaatgaagctgtattctaattaaagtttgtttacaaaacaggctgtgggttgatttgtcctgagggccatggttcgccaacttctgttcttgatgagtttttgaattactttgtccattcttaccacactcacaaacacatacacacactcttttcgaatgtgtgtgtgtgtgtgtgtgtatttttttttaaggaatttggttaaaatgacatcatgcttacaaaatggtttggaagaaacatggcgtctttattacaaggtcttcccattaggcagcattaagcattattttatgctgatcttcaatgttctatggtttcttttatacaggttctgcaaatttctggtctttctttcttttctttc

SEQ ID NO: 88771 - DNA, 1735 bp, Homo sapiens
tgagccactgcacctggccaggaaacaccaattaattctcacattagcccaaacaaaacatgatttggaacgtgaaccagctccagaaatatgagttatctgtttcccaaacttcctgcctttctcctcttcttcttgccttctctgcactgttaaagttatcccagccactctcctttttcattaaactgaacacttaaggaataccccaaatacaataattaggattttaagaatcttaagattcagagacctcatctaacttctccaactgcatttacacattgatgcttcttgattctaaagcaagaaacaaatttacacaagttgtttcttgattctggtgggaaacagcctccgttcagtgtgtgtgtccccacccatggggacgatgtttgctaatgctggctatcacgtgtgagcccttggtcacagaatgtcacttggatctatttcagagttccctaaaaagaagaagcactcgggaaatgtacaaggagaagaaaacctttaaccaggtaagcagaggttttcattctaatgttacatctcctataagtgaagtcaactcattttgaatgtttttcagtaagtgttagctttgcctttaaaacatccaaagaaacattacctgcccaaacacgtggactcattcctaacctccacagtgtgaacattttctttgcaaacccacagctcctccctcttgtttctccctcacgctgacaagctggtgatttcttcaggaaaaagaactggctttgtgtaaaacagaattaagtgtagtttgggggcctgacagtacttataaatggtaaaaagtgttttgaccttcaaagtcatccacacagtgaaatgaaacagccactgtggtgtcgagtcattcataagacattgttttgaatgttgttgttttttaaatgtgcaagctgaacgatatcttgaatggtcctaattgaaggtaaaatattctcagccttttctagatgcacagtatgtattcttcaaaactttcttagcttttctgtaaagctgttttactggattctgtttttaaattgctgctagcattaggtggtggagagaacaaaggtgttattgggatatcagctcactgcactctgagagcaagtagtaattagagagacacaatgagtcggggtaactaagagctcagcaacctccaccgacctcctgcagccctgtccctgtgaattcccctctgaaggatcccctgggtttctccattctccaaactcactgatccccagggcatcattcaagggggggcaggcccctgcagcagcagaaagctcaactgttcccttccaccctccccaacctcccagtctcattttggaatccattaataacagggaaattaaagtctgccatcccgttgctgggtgcttatactcttctgggctgagagtgttttcagttgactggctcttgcccagggaagatcttttccttaaaaggggaaattctgccccattgtgaaatgaacagcatggagttgcattcgccctgagggtaaaacaggccaggaacaggagctgctgctccttgggcgcgtgtcagaaaccctggtacctgggatgcgttgagccgcccacccagccggtgggattattgaggaaggagtttctgttcagcagaatggtggaatggagcgccctgggaactgcaggcccgcaaccaaaacccaaaggaagctggcgccccggcgcaa

SEQ ID NO: 88772 - DNA, 1252 bp, Homo sapiens
gtgtgtcatatggaaagttggacttgacctactttcataccacattcctggggctatccaatgatctctcgaaaccagaaatgatatgcttcagtttagactcggccttgaacccccgcctccgctagactcttggcagagttttaagaagtctacggttacaagataagatgggcatccagcctcccgctgcctgagctgaagctgtgattccacatcttatgagaaggagtggcttcccctactcagaacaggccgagctcagcttccctcaggccgcccctctcctgtacacaacacccggcaggtgcagcgggccctgctccagctgcctcgacctcacggaagacgtctgactccttcatttaatatacactctcccatggcttccaggacagtctttctttcaaaccctgctttagtcttggtggcaggcctcatagtgcatgtgtggttgttaagtagaaatgacagcatgctgtcatgctgacagcttttttctttaaggaacgagaagacgttttggacattttatcaatcctcaggtaatctacaaattgacccttgttagagtatgtcataggatcttgctgctttaactgacctgggtttaggttcatggagacggaggagaattgttctatgatagatttgtagtggatggtggacagagggtgatggtgtgaggttgaaggtttccagaaatcaaggtgatttgagggctctatggggaccttctgcctgcatgagggggtgcagataagcacgtataacctccagcgtgtttcaggacccttcagagatcttacctccttccccaatttttcacttcaacttgttggggaagacccccaggggttggtcgtattaccctgagccttccttgtcatatcatttttccccttccgtggggtttgtggtgaacaaggagggaccaggcagagtgggactgcctgagtccctggtccacacgcctgtttgagccaaaagcttcccgcaccatgcaggcaactctgcccctcgcctgcacctcctggactggctccaccacatcaaggcctcaccagctgcaagtttccacggatgctggtcacagcaggcggccctgcccccaccttgtccagcccagtctcgagccccaggctcaagaagggtggagagtggggctgagtttccttgcagctggacaatgctgccctctgtgatctctgctgctgtggatttctctgctttagaggtggagatgggatca

SEQ ID NO: 88773 - DNA, 4277 bp, Homo sapiens
ttgagaccagcctggccaacatagcgaaacctcatctctaccaaaaatacaaaaattagctgggcatggtggcacactcctgtagtcccagctactcgggaggcagaggcagggggcaggagaattgcttgaacctaggaggcagcggttacagtgagccaagattgcgccattgcagtccagccagagtgcagactccagagcaagactccatctcaaaaaaaaaaaaaaaaaaaaaaaaaagaatgaatgaacagataaacgagcatgcttttcctctagtattagtattaaacacaacgtatgccttttacagcccatgtattctgtgtaggttctttcaaaaaatacgtcattaccccagcagcgatgatagcatagcccatttgcctcagtagttgtgagtagggcagacagccttacttcaagttagtcacaggattgctttttatgtctacctaacccaaacccaaccaaatccttcatgtgataagttctcagaactcaaagaccatgtgacatttatatgttattctcctaacgtgcaaagaaggaaaaagactctttaccggctcctttacccaatactaattgtgtttcagacaaataagaaaattaatttcagggagctagagcatggtgatttatcatacacaaaccagtttatatataataaatacactttttaggtttatgatttatcatatacagaccattatttcatttgaccctcacaacgacgttgtggttaagtgagcattcctgctttagatacaaagagacaggttcaccggggctctgtgatgagcccaggtcccttagacagtaggaggggcaaagctaggactccgggcagcatgtttgaccccaagtccagcaggcctggttttgtcctcagctaagagatgacagtgggcgtgtcatcctcccgaggacgcacagatagcgccagggcaagctttccctgtggcagtggctgcacacttggtcgtaggtgttgggctgagccttcctggtcatatcgttttccccctttccatggggtttgtggtgagcaaggagggaccaggtagagtggaaggaggaaagttgggaggcgccgagggaggcatttctctttctgccaaatgatgagtgtgcgaccagactgcggcagagaacgagccatgctctctgagtgtaaaagctgcattgtgagcacacgtgacgatccgaaggagttaattctcccccgggggctgacttgttccacagaaggggcgacaggcctggagagcagtttgaagccttttcctccacgagggctgtgggatttgactcccgcagtgctgttgttgacagtttctctgtgtgatgggggaaacctttgctgaagccttttgaaacttttgatggccgatcaaagaggagtgattcgtgaaatcggttatttttcccatctgctgaatgtgaacagtaaaacgtttttgcaaaaccaaaacggggagttcatctggcttcaaaacaaggagaccagccctgcaaagcagcgttgactttccactggacccaaaaagtgccgttttgacctcagccaagcattgcaggctgtgaacagcagagtcagcttttgaggatcctccagaaccctctggaagccctatgaggacacttcttaggttttgatacacttgactctatccaacacttacctccttgccttgggtctctgggtttaatttcctgctgtgttatagcaactaaagggaaaggaacgtaagtaaaggctctgaagttgcacttgcatggcaagaggctgcaaggagctcaggtgtctgggtctgcagtacccagtgtgtacccagagctcggtactgactcagtacgtgcctggacttccaaacaccttcatgctcatacctcatgtttttgtcatgtcattcttgtgggacattagggctggggagaccgggatggggagaagcgaattgccctgtctcaggtaccttaggaaaccaggggaaagctgagctctcatttggggtggcctgacttccccatcctggtcagaccttgtggattgtgggccactttgaaagagggaggtctgcacgttggaggtggtgagtgcagcagggtggaaccctgtctgcctgcaccaggccttggtgaggggtcctgctgtctctcactggtgctggtgagtaaccaggtgggatccagagagcaaggaggggttgcgcattcccgctgggttttgggcctcatttcgttttcccttctttgcccataacttgtatgatggtttccacgtgcacttttttttttccaaactaatttttttttgtttcttttgcttctgtggcaaagcaacaaactgtaggcctttcacaggccccctccacaaagcccctgggcccacctctgctttgtcttggctgtttctctatgtaactcagcggcaccgatgggaagatcggtgtttgatgtttgtgtgcattgggggcgaggtgtgaggggaatcatgaaaaacacgaacatttggtattttcaaataacccttctcccgggctgttctctcctggcaggatgacagtgccgatttgaggtgccagctccagtttgccaaagaggaagccttcctgatgcgcaaaaagatggccaagctaggaagggagaaggacgagctggagcaggagctccagaagtacaagtccctctatggggatgtggacagtcccctgcccacgggggaagcaggcgggccccccagcacccgggaggccgagctgaagctgcggctaaagctggtggaggaggaagccaacatcttgggccggaagatcgtggagctggaggtggagaaccgtggcctcaaggcagagatggaggacatgcggggccagcaggagcgggagggcccgggtcgggaccacgcacccagcattcctacctcacccttcggtgactccctggagtcctccactgagctccgccgccacctgcagtttgtagaagaggaagcggagttgctccggaggtccatctccgagatcgaagaccacaaccggcaactgacccacgagctcagcaagtttaagtttgagcctccccgggagccgggctggctaggagagggtgcaagtcctggtgccgggggtggggcccccctgcaggaggagctgaagtcagccaggctgcagatcagcgagctcagcggcaaggtgctcaaactgcagcacgagaaccacgcgctgctgtccaacatccagcgctgcgacctggcagcccacctggggctgcgtgcccccagtccccgggacagcgatgccgagagtgatgcgggcaagaaggagagtgatggggaggagagccgcctgccccagcccaagcgggaagggcctgttggcggggagagtgactcggaggaaatgtttgagaagacgtcgggcttcgggagcgggaagccatcggaggccagcgagccatgccccacggagctcctgaaggcccgggaggactctgagtacctagtgaccctaaaacacgaggcccagcggctagagcggacggtggagcgcctcatcacggacaccgacagcttcctccatgatgcggggctgcggggtggtgcgcccttaccggggcctggcctccagggcgaagaggagcagggtgagggggaccagcaggagccccagctgctggggaccatcaacgccaagatgaaggctttcaagaaagagctgcaggccttcctggagcaggtgaaccgcattggggatggcctatcccccttgccccacctcacagagtcctctagcttcctctccactgtgacttccgtgtcccgggactcccccatcgggaacctggggaaggagctgggcccagacttgcaggtaagggggctcgtggcttcgcctccctgctccgccttgctcttcctccttctcgctggcattgctgcactcgggctcacgctgctcacggctgcttggttatgatttcaaacctgcattgtactaaagcctccggggcaaccggatcctctctcttggttgggctccgttttttttgttttttttttttttaagttctcttgtattgccttgtttctttttcctttctcctgtcttatttttaactgcgccgcggctcatggtttagaggccctcccagacacgaggctgagcccagtggaagcgatagggctcgacgcatgccggccttgctcctctcttggtatctcaaccaaccagccacccgctgaagaagccgtgaggaggctaagacaa

SEQ ID NO: 88774 - DNA, 1067 bp, Homo sapiens
ctcttagatgcgggtcacccgacccgggacagaaagaggggatccccgaggagctgttgaatgaggaagcacctttaaaagtccaaatgctgtgtcagtgtaaagtatgaataatagagaatgcaatgtcttgccattggggactgtcaagggggaaagcgtgtcacagcccgcctagtcaggggcccagttttcccttcccactgtagctctttcttctttgccatgggctgtttctggaaccacagctccggctacacagggcggcccccttccctttgatggctggttttacaggaagtgcgtctcccttcccgagtgttccgtccttcaaggtgtgtcacacatagctgtgtgcagttagagcctgtgtcagagagctctcctcctggattcttcctaggtccttattgtgtaacctggagcagtgataagttgtcaccatcatgaatgcatcgcatagcttcagaaactgggagtgatttgggagagagaagcatacttagttgaagcaaaccaaatactgaggagcaataaagcttcacaagaagtagattagcagagtgagctggtgccatgtgacagcacaggatctccaaacaatgcagctcagaagggaacagcaggtcttcagatgaagtctctcattctgcggatgagaaaagtgaggcctgagaagtgaagcggcttgccagtaagccctcctcctggttggtggcagaactgggtctagaacagcctccagccagctgcagcccccgctccccagcacatccccggaggggcctgatctgcagtagtgggacggctctgcactgacccctgggtgtgtttctaaagagtcactctaacgactaattgtacagccgctgtcttgccatggaatggcaccttttaaaaacatccatctagtttcttttaattttctatattttaacaagagagctaaaaatctccatagtgaaaggccaggtctagggagcgtcatttcctagaaggggaagcagtatgaatcaggagttttaagcaaacatccctcattctgatgttttttattcacaaagaca

SEQ ID NO: 88775 - DNA, 1713 bp, Homo sapiens
attagcgagatgctcacactgtgcactggactcttccctgacttcactccctggggttcccatcaaatgtgagacaatcacatttgttaagagagagtggtgtgtagaatggtttggaatgtgcgaggcaccttaaaaatagtcctgaatgagaagtagccatgcacggacgctggtcagatttcaggtataaaggagaccaggcctgtgcccagaggattgagtttctgggtcagaaatctcaaagagctcttctcctcagtgcctgcttttatccttcaatcaaggaagcacacaaagcactcacaatcccacgtgcctcagctgtgaaatgccagccacaaggaagttacgtggggttttatgccaagtatttgcactcatgtgttggcctcatgtactgcttttgaaataagtggttgcaaaactggccaggacaaaatggaaccctccagaaaatgaagccatggtcatggtgatggaattgtcctaatagaggagtagcattgctaggcactctagtgatggccatgaaaagccttccttttctgtttgtgtttgagattgtgaagttatcttcttaagtgtgggaagtaatttgtaagccactttctctggaggtagggaagttagcctttgtcaatcagtgtgggatgcagctctattggggaagacatggacgggagttccggaacactgacgtggggagaatggttacaattgtcaagactagtgtctcagcagcctcggaaacaagtgagggtggtggtggtttagataagctgctttaatagggagatcaagatgaatttgatgtataatcagaatcctaggtaagtgaacaaaaaaagggttttttttagaatcaaacctttggggattgggtggtaaagggaaatatttatttttttagaagacatttatgtgtcatgtgaaacttttctccaaatgtatgtggttgtatgcagttgtgtggcagtagagtaattctaggctgaaccttttgccatagcacgttttgtatgttgttttttgtaacattggagtgacgttggcatcccagctaggggcagttgtccgtgggagttttaatattgcattagcaaaaatggacaataaaggaaaatgaaacttctgataatcaggaggatctaaacctgtctgctgttgggcaggcagcagtctccagagacaacactggagccatcgtaggtgagtccgacttccccagtgaactggctcaaggacctccctttctgtgactcttcaaaggtgtggttcaaacagaagagcacgttttaaatccaatgacactgaagtatgagcttcatatattgtttcagataaaaatggcttcttaacatatatattatttattaaaattaaaaccaaactaaatagttcatgcaatgtatagaaactaaactaatagatctttgcttttcttaaacaataagcttgattaggatgtctgtttttacacctaataaagcttttggctagcacctaatgcattaaataagaaggatttttacattttgagtttatagagtaatgtgtagctggaaagtaaagctggcaggagagcagcctaggtgacctggaaacagtcctgcacggaacacctgagagaggagggaagccccaagggcagatgtggccgctgtgtttactgctgtatcccccacgctttagatgatgcctagcactgga

SEQ ID NO: 88776 - DNA, 1031 bp, Homo sapiens
aaataaggtcctggtatatctaagaacttattttggcaaggaatgtgtgctacacataagcccccatgttgactgaggccatgtgatttaaatgggtcacaaactgattaagggagtgagctccttctctgcaccttgcagcttagggaaggcagggccgaatgccaagatgtaaatactttctgccaacttctaccactacatgtatgactctttttaagtgtttcatttaggggtcaagttgcacatcttattatcagaggaaaataattccatattacttgaaagatagattcctaagtaattaaaaaaatgtttgcatggcaccaaaaattgtttgaaaagtgagtttatcactgaagatgctgctagcacagtgtccatggcccacgtgtttctagtatgtgggttaatgatgaaggagtattgcggaagaggcttcggatggtaggagatgtcctccaggcttgttcagaagggaagggaaagtgtcccccaaggtacccagggggcagaagactgagctctgagaattaggaagttcatggagccatggaacagaaggaactggaaagggcagtggagatgtgagggagagaaaagaaggctctccaggagggcctaggcgcggtgctgctgatgctgcctcccgtggtgcgggtccgggtgtctcagcgcctctccacagccaggcggggaagggtctcacgttaccttcacattgcccctgaggccagtgaagcttgcccagcatgagtcagttggctaagacatgtaaaagaaaataaaactacaggactctctaaattgattatgtcaagggcaaagttaagtcctggagactgagtcatgaacatgtttgcagttttgtttcttagattataggtgaactctgttcctcattgttcttgttctgtaaatgactaagagaccagagaccagacctcccttctttttaattactgatctttgttatagattaactgcctcttttattgtcatgtacctaactcagaccagatggtgcaaaa

SEQ ID NO: 88777 - DNA, 1556 bp, Homo sapiens
ctttgttcctagatgtggaagcctgtcctgcccacacagttttaaaaggatcttttctaagcttcagatgagtcactttgccacctctggaatttgtatatgttcttcctgttatgcctcgattcccaggtttataatagaaacagaagcgagatctttgccttctgtttgcttttgtattgattaagtcagagtggccgtttgcactgcaggctccttcctggccttgcttcctggcacacccggggctggcgccactggcgttctgtgtattctgtacatcactgaccctggcttcttggccagctgcttcgaggcattgtgaatacttggtttctttttagctcccaaagaccttttgtctggttttcactctagggaacagtgtatgtaattttaagttctcatcctaggaatgggaaaatacagtgattctctttcctcagagtgaagaaagtcttgaaaaactaattccgccagcttccaactatccgtgacatagataaccattattaagcaaagcctagaaattgttttaaagtttcctgttgatcagtactctggagttcctcctcctttaacttataaaaccatagctattagcaatactaatttaaaagcagtagaattaaaatttctccctaatgtcttctaataagctgagcatccaccctgtggtctttaaatgcagcaagtgccaatgagtgagatggccaaaatgagcattttaggggtaaggactgagaagtataggcgttgataatccataaagtagatggttatcctcagacagtgaaaatcaggctgtacagcaaaagaatttggctgaagctgtgatcgtcacctcctgcctgtttcagggtgaacatccagagaccctctccaggctcggggagcttggagtccaggggggtcaccaggcggatggcccagaccacgacagtgaccgaggctgtggctttccagtgggggagcactccccacactcccgggtgcagattggagatcacagcttgcggctgcagaccgcggacaggggacagccccacaaacaggtgggtacctcgacccgagcctgtcgccctgcccacaccagggagaggaggctcctaagctgcatttgggtcgttttgtttccagtgttggcattcaggtagcagaaaattccaccgcctgactgcggtcacctgttgtcatttgtgatgctgggtttttcctagaaatcacctcatcaaaccttttccatcttaatgtcagcccactctttcatttgagttgccatataaataaggactgtagtaagggcagatcaatgctgcgtgtcgctgctggggccagtgaattgacctcagagggtctgccattggcaacatcattcgtttggcagcataacgtacaaggagcaaaggacacgttttaaaaaaaatcccccaacatggacaaaatatttcaagttctctttggcccacttgaaacataatgctcccaaataaaagtatttgatgacactttgaaaaaaattaatgtataaagagaggtgagacttcagtgttatt

SEQ ID NO: 88778 - DNA, 1704 bp, Homo sapiens
ggatgtgacctaattatcatttagtaaaacaactaagtaaaaaaaaaaaaaagtgtgaagaacttaatataaaattcatagcaagagctgaaggaattgtgtttcatatttaagtcttcacctgctacaggccactgaagagcctcatccagtccagcctcaggactgagtagactccacttccctggacctctgctccttgtcggggcttctgtgctgcgttagggccttcgggggctgcctgagaagtcagcctttctcctgcagacagagagcccttggctccctgggcttccggggctgtggctctcccaggccccagcagtcttcctttctggccatgcaggctgcccacctttgcttgcccaagatgaaaaacttccagaaagagcacccttgccagaggaggcctcacatcagaactgtgatctgcctgactttttttttttttttaattagaaagttatcttgagcctagatggtatttacatttcaattttgtacgtcataccgtgattcattcttcagtttatcctgcaactgggaggcctcccctataaggcgtgctactctttctgtaagaggaaccagaccagagcttaggatctgaagcgttttatctttgccgtgtacttgtggtggcagttgttctgtcactctttaagtagcccctgcgtgaggtaaaaattcacatgtgcagatgggtgcttgatgaaaggactctccttgccccatcctacctcccagagttaaccatggcctgcagtttgccacaggccttccaaagtgcgtaactaagcctgggacctcacaaataagtctcttccctaatggccacctgattttcatcagacttgccctggtttcctaagcctttgggctgataactgtgtttacagcttgttaaatatgtgcctcatttattctttcccggatccacattcattcttgggaagctctcagtggcatttgtggagaccacagcccagagccctcctggacaggatcaccgggcagactcttggccagagggcagaggacttctgtgtgtaaatgactctaattcccatgatattaatagattatattttcagggtctgtcttgagtggcccattctctgtaggggataatggtttttagaaaagaacttttctggatgtaacaatgaaggttacattgaggagaacgacaaatggctcatttataaaaatgctgctggctgtgtgaatgtatcaattctagctaatctcacagtaaagaatttgtccagggactcctgctggtggaggagttgcctgtgttgaatgctaagtgaggtctcaaaaaggagctgtgcgtgccttgtgggggtctgggcagctaccacatcattctggaattctcctgcctctgtcaaggagcctgaataaacgtggatgctatcacctctattttgtgactggcgttttgtgggttaacccatagcagcaggtcaatatgtctgttccagctttagattaatcctatctccaaagttagtggctgtgatgcaagcaaagtagtcggtggtggtttagctcttttgtggagctgtgatttcacctgctgaaatcttagaaatcttaggcaagaacaattttgaaaattagccagcattgcatcacagataccttgatacgttaccttatctacaaacttccatttcactttctattagtaatact

SEQ ID NO: 88779 - DNA, 1895 bp, Homo sapiens
ggcagccctggctttggggttccctgtggcctcctgcagtttccttgctcctgctcctcagggcccacagcacctctgtggcaggttcccacagtgccagcccaggttccggcgtctgaacacagctgccaggtcaccagggcagccttccttctaccctcctcctgatcaaacaggccctcagtctcaggcccaggagaccgatggccagcaacagggaccctttctttgctccccggctaactgcagactccccacccaccctgcacccactgccaacaacacctgggaaacagcccccacactaccttgatagccagatcctctcctcttctgacctaaaaaatacgcttaaaggaggtggtggagcctgactcagtgttcccgcaggtggtggaaaaccagcagctgttcagcgccttcaaggccttgctggaggacttccgtgcggagctgcgggaggatgagcgtgcccgactacggctgcagcagcaatatgccagcgacaaggcggcctgggacgtggagtgggccgtgctcaagtgccgtctggaacaggtaccaccctcccaggtctccctcgatcctgactgtgtgtctctgctgtccaggatatgtggcgggggagcgggcacagagagattcagaaccatgggcttcttgtccaggaaaaaaagagaggagtggctgcttgtgtctcttcttaaagtgcagagtccccattttccctgatgtcccctctcccaagtatgcagtacggcccccaccaagcagcattttcagagcagcatgtattctcccattctgcattaaacaagcttgtatttagctgcatcagaggacggccaggctgaagctgtcatcacactgagctgacataactctagacaggagcaaagcaaaagcagactgtggtttagttgtctttgaaaaaggtaaatgcatgctttcattgagatttttcaaaatatcaaaagaacttggagacctcccactgcatgcccaagaattctaatacatttcagtctccttatttatatcaaaggaaactgaggcccagaagaaacagctcagctcagatcacagagccatgtagtgctagggcaggaagagagcccgggtttcctgcctccacctcacaccacagagggaagccccctctgaagtcttacaccacagccataggagttaagatcagacataacaagaaacatcctttcctaagtgtttcttccttggaaaccattgaatgtcatgtgacttcctacatggtatctgctgctgagagcgtctctcgaggtttcttccagccccttgatcatgaggagggagggaaggtctgtgtatccttggtaatctatttcctagactctattttgaggcaaaccataaagtaagtaaaattttgtagggattggcctggtcatgaaaggaaaagaattgcctggaaaggagacccctgtcacatggtcttgataaaagatgaaaaagacttgatgtgtcaaaaaaaaaaaaaaaaaactccagctctcctggtacccacaagttcccctgcatttccacctggccacagcaagcagtgatgctgagctgatagccctgggtggggcagggacacagccttgcaggcctgggcatcaagtgagagagcagctggcctgattgtggctcctgcctgctgcccgcgggggatttgacctagatgctctgtttatcttagtccccggcctgcagcatcagcagcggaggagaaatgactaaggacagtctctgatgagctgtctttaaccctattaaaaaaaatatgtttatagggggagttaagtgtttccaaagcccgaactatagctaaggaagggaggtgtaatcttcgatgcaagccagtttcaaaacat

SEQ ID NO: 88780 - DNA, 1189 bp, Homo sapiens
gtcatttttccctgtctttaagtcttctctttggttttcacaggtttgagtacataagatgtagaatcttgtttggttttgatatttaacctcctgggtatttgacaaatatttattgaaaactattaggttctgtcactgtcccatccctaggttccatataggagctaaggatatagggacggacatggtacctgcccacaagcagttacacagaagtacaggcaagagatagtggtgacttagactaggaaagtggagcagggaagctggccatgggaagctcagtttactcaccgcttaacattctttgtgactgtgtcaaacgctcttaattaggactttaaaaataaaatttgtttatactgtgggattggtcaaatcttggtttaaacatgtttccagggatcacatgtaaatgtgctgagacttcatccttgaatgcaagacttgtcagagagggaattcctaagtctcttctccttgacagctggaagagaagactgagaacaagttgggagaactaggctcctccgctgagagcaagggggccttgaagaaggagagagaggtgcaccagaagctcctggcagacagtcacagcctggtcatggacctgcgctggcagatccatcacagcgagaagaactggaaccgggagaaggtggaacttctcgaccgcctggacagagatcggcaggagtgggagcggcagaagaaggaattcttgtggaggatagagcaggtaaggaggcaccccggggccctggagcataggcacagagtgtagactgctcagtggacccagaaagcaaaagcactaggctgcttcatggtccttgcagcatcaggatgcatgggcttccaaaggaagagagagaaattctagaattgcttgtgttggagaccaaggctcatgcctctccatgacacagatcttttctttgcaaagttcataggtaactctcctatgtgtacatgtggtagtggcagagcagggtgggtggggcttgtgggagcggggggataactttttaaaggaatttaaagactaaactggaaagaggaggttatttcaggtcttattcaattgaaaacaaactataacttttaagtttgccactaaagatgtggtcacagtgactgctccaacttgaatggaattgttgtcattagaaaagaaattgct

SEQ ID NO: 88781 - DNA, 1123 bp, Homo sapiens
tgtcaagagaggtagctggtagctcatcatcttcagctaaacaaacaattcagaaactcagatgaatttggggaggaggggggtagtcatttttctgccaatataaccattctctgcattgcatcagacttagaacagtttgcatagttgcagtagttcctgagggatacacaaattaaattgatgaagatttggaattcttccctggctggatttttacatagtatatattttgtttatttcagccagtcacacacttataaatttatgaggtctcaaggaaatgtattaatcagtaagaaattgagctcaggaaaaataacctcattactctattttaaatacccatagagccttttgacaaatgtgctctattatccatagacatggtgcctgtgttacgcaggtacaatgacaaaggtgagtgtatgcatgtgttggatagggcgggaggcagaatgaactaaatggtaagaaagaccaagaggctttggcttggaaaccactaagaagaataaaatacaccgcaggtgagctatgatccccactgcattccagcctgggcgacagaccgagaccccgtctccaaaaaacaaaagaaggaaagtacactgcagatagaaaagctgaaactcttcgtaggtttgaccacttacacaaatgagtcaccttactaatctttgatattccccaaatcctatcaagaggaatgctggccatttcctttctggcttggaaatgcagcacttgtgaagagtctcctgtattaaatctcctgtgtatgtcgttgctctatggttaggtggaaattttagggatagaagtggcatatattctttgaaaatggccactaatttattatatccaacttagttgaccggtgtcacagtaactccaggcaacttgtcaccagggagcttcattcttggcccgtgctctagggccactcactttttacatccctcctgtaccccagtgaggccatcatgatccctgccatgccccctttagggtgcccttcgcctgttagccatggtggcttgttggacttgtcacaggcttcatttctttgggaagtcacaccttggatataaattaagcaagtcttttaggtttttatttt

SEQ ID NO: 88782 - DNA, 3929 bp, Homo sapiens
taatagtggtcaggagctgacctccaattccaggttatcagtattgaaacagttcggccaaactgacagcctcagaacccagtcctcaaggtggacatctttgagcatcatagatctgaaacacgtgagtttcgggcatgcatctgttcatgaaatctgtgtgatggatcccacagtctttgtacaatgatgtcattgctgtttttagaagaggattggttacaaatgaactgatgcttcagacatgcaatggtggctttcaaaaataaatctggccttttccccaaaatattaaacatttttaaagaagacttcttaaatctcagtgccccatccggaaattgaggtaaagcaattataggcattcaccagacttcctgaaaagaggatgttggttcaagtgtgtatgggtgtatatagattttgttcatttatcagttattgggttgcttgttcatttaacttttagctacatactccgtagataaatgagagatgtaactgaacattcttcacaatgtatactctcaacatttgactacttggtaagccatataatataaccttgactgtgataacctaatacagatggtgaaagcagtaacactaaatccattttccactttcagaacacatgcttcatacttgtccgctgtcattaaattcctacataatttctgcaccacatgaggcatgttatgtgatgtatgactgtgggaatgtggctaaggtcatataacacattttatctctcttatcagcgtctcttgtctcaatccaagtttgattgcggggtgggggtaggagacttttatggagtcacactacatttctccttagaattgttgagttcccagttaacatgcagatgatgtaaaacttgctgttatatttgctgtacttgtcaagcaaaaagggtcatccattcattctccttccagtaactttcttaaatcagctgccattcttttaaaaactccattcttttaaaacctgttacaaagtggccttttttctttctaccagtctggggaaggtgacactctcgagggtttattgtttcctgtattaaaatacaaatctttaaaatgttcgacttgcattaaaagttgttttactgcaagattgcaagtaggtgctgatgctggctgaaatgactcctataggaaaccctccctctctgaggactcgttctattacaacaccccagaggcatcttagcagcagatatctccaccacaaccactccagttcaattttaggaaacctaacacttagcagcttgagtacaagttgctcctggctgcctgggtttatttttgaaatcctactttactgagttagaaggtgcttgttcatagccctcctctttagtcattcttttcccccttcactcacaccctcagtgcacatttgcagcttcagatgggattcttgcattttaatttcttgcccaaaatagcttagagatgatcatgtgttgaaactaaattgtgccgacatgcattaaatgaacatataaaaagccttccctttttttttttttttttttttaaagaaagcagttagcatctttaagacaactgcaaagaactgtgtcatcatcagggaggtggaggaggagagagcagaggggcaaagctaaaacgtagagtttttaggttttgctgggtccctaatttgactgtgaactgcctcagatgctaacgtgtcagctttggctgaatcagactccatctttctcaaaggtaaagataaatctctgttctgccaccttagaaatcactaacaatgagcaaacgtccttttgtctttactgtctcatatggctttcttcctgactatacagaaaccatatttacgtccaacttgtggatgaatgctccaattaggacacagagatgcagtttgtagtgatgcttaaaaaaaaatgaattgatctgcattcaaggaggttttagaatttcctggaacggtctcagcacttgaggacttcaaatcattatttggccactccttcaggtcaaatccaaatgtcactttcatcgttcagatactttgcttattcaaaagagcagtcaatccagtagtgtgagcttgtcatccaataaaggcaccattaaagattcataggcggaaatagcttcaggtctcagttgtgctttctgtggctgttttagaaagggaagcaatgaggagggatcagaagaatggagtggaagctggtgagggctcctctggggagggaggccgtgcgccctgcaagccatttgcctgcctgcctcagcagttccttgtgatttcatatgggctcccttcctgagccacctccacgaaatctccatctagtgccgcaaaacagcccagaaaggcataatgcccttatgtgggctgggctcccactagacggcatgactccggtgagcccacgtgcacaacccatcttacagataaggaaactgagctcaggagagtcgggaacttgcacctgcctgcaaaccagcaagccacacgttaatggttccaactcaggtcttctaactccaggtggccctgtgcttgcccactaccgcttcttgagttcaaccaagtcagggaaaaaagtatgactctaacgtaatgtggctttttttttttcttcactcagtcataccagatctttacttgcgttatagctaagtttgtatcctctcaaataaagtgtaagttatgtttaacaccaaatggttacaaactcaagtttgctcacttgaattactgataggacctgttccacatgccctggggctagttaggaaaatcagattcacactcagaagtttgctatcactgatagtattccactgagtatgtcttcacttctgaaggaagttccaaagagagttttaaacatgttctttaacagtattagattaaaaaatagtaataaatgtaaaatttcccatgagcacaacactcagagttatgtacaataacacatatattggtgtcagaaagagttcaccatactcgtacgtggttaatgcagattttctgggccagataaaattgtgggttttgtaaagcatctgtaatgttgtgttacattttgaaattaagatcagaactttaagaacatttgcttctcacaatatttttcaaactgacctatgtgtaattgcaaattgtggagaaacgatgttcttagggagaccatcagacagaaaagtgaggctaattattttcatttttaaaattctcaagttgcagaaagagaacagtccccggagaggtggcagtttcctctgtgatcaaaaagacggcaacgttcgcccctttccccaccagggaagcctccgcatgccccgtccagtggccatgtggccttgtgcagatgctgactccatcccgtttgaagaccggccgctgtccaagctgaaggagtcggacaggtgctcggccagtgagaatctctacctggatgccttgtccctggatgacgagccagaagagccaccagcccacaggcccgagagggagttcaggaaccgcctccctgaggtcagccaggttttgtccatcctagttaaccactgtggaatgagggagccgtcatgaaacctaagaggcatctgccagattcctctcctggcaggctctagcacttttgcatacagcaacctccgaattgagtaaaaatgaaatcttcacaacaccaagggttttgcttcaccctaaattagcatgctctgctgtcagtttaactttgcccccttgtttcaggtttagaaatactggactagagtcctatacaaaaggaaggtctcacaaataagtgtgtcccataaaacacacaagaggaagtaaataattctgggaagtgtatatgctcaactttttcttttttcttttgatttttttggagatggaggtctcactctcttgcccag

SEQ ID NO: 88783 - DNA, 1102 bp, Homo sapiens
aacaattccagagccacgcagagtccaataaatgcccgcagggtaagtctgtgagtgcagcacatgagcagctgacagtgttctcctggtgtgggtggcagcgggtgccttcactgacacttctcatgcagggcaggacatgggtgttgtggtgtgtcagaggctccctggcaggtactgacaccctcttttctgcttttcccagggcggtgtccgtgtcctccatgtctgagttccagcgtctaatggacatctcccccttcctgcctgagaagggcctgccgtccaccagcagcaaggaggatgtcaccccacccctgtctccagacgacctcaagtacatcgaggagttcaacaagagctgggactacacacccaacaggggccacaatggtggggggccggacctttgggccgacaggaccgaggtggggcgggcagggcacgaggacagcacagagcctttccccgactcctcctggtacctaaccacaagtgtcaccatgaccacggacaccatgaccagcccagagcactgccagaagcagccactgcggagccacgtcctcaccgagcagtcggggttgcgcgtgttacacagcccgcctgccgtgcgcagggtcgacagcatcacggcggcaggtggtgagggtccctttcccacaagcagagccagagggagcccgggagacaccaagggaggccctccagaacccatgctcagcaggtggccttgcacctcccccaggcactcccgggactatgtggagggggcacggcgcccccttgatagtcccctctgtacctccctggggtttgcctccccactgcacagcctggagatgtccaagaacttgagtgatgacatgaaggaggtggccttctctgtcaggaatgccatctgctccggccctggcgagctgcaagtcaaggacatggcctgccagaccaatgggtcccggacgatggggacccagactgttcagaccatcagtgtgggcttgcagactgaagccctgcgtggcagcggtgtcaccagcagcccccacaagtgtctcactccaaaggctgggggcggtgctacacccgtgtcgtctccttc

SEQ ID NO: 88784 - DNA, 2060 bp, Homo sapiens
catggaggtaatgaatgctgagtgccccacacccttccccaccagctcttccctttagctgtggggcaggttgggacttgggattgtgctctgtcatttgatctcaggaatcgtccatgattggttattgggagctggggaggtgttaggtttatgggagaatagaataggcagaaaaagccctgagcaacttttttgaagaaaatgttattttattgtccttgggaaatcatatagtacatggtttgatttgggttctgtcaccagtcttaagtgattgatccttatttatcagggcattttatttggggtcagtttgccttctttctgtgtgaattcgtgcacatgtacaaactatgggatagttgtgtcaggcttgctgcatactgcagaccttcatatgtgacagcatgaggtgagctggagagggtctggaccacatgagcacgagcacttctcatcaggagccacaagatctcgattcctgggctggcttccttacaaaacagccatctggcagctcacaaatcacttaccctctttgtggccatgagcccccctagcagtaaaaccaagtgaaacatatagacaaaatcaaaatcctaccctaatacaatatgattatcattattgcccttgatattactcacaaatcaatccactgtgaattgggttctgatgcacatccacatgtggtgtttttgtacaccactttacaaaacgcttcccatttccacttcaacaatgagcaaaatgaaagcctgatgttgatgctggtggtgatggctatggtgatgccactttgtggttcgtgcagcacagagaggacgtgtctgtccagcgagtgattccaactcgccaggagtccggatgaacaggcttcacactgggaacacctggccccatgagcactctccgagccaggctgctcccgcagatggcgggggtcagaggaggaggaggacggcagcttgctcctggtctgcccgctgcttcctcgccaggacccaagcagccctggcttcatgggcagggagaggaggaaggtgtattgcctgtttcacctggcccacgtttcccacaagagggtaaatgatggctgtcttcccagcctggcccaccaatgaatgtttaactcagaatgcaggcttgaaatctgaataggtcagacctgtggaactgccaatggcttacagaagtggcaattccatatggttcacacctaatacaaatattgatactacatggcctacatgttccaagatctgagtctttgtgataaagttgtttgcatgctctgaggacaaactgctggttgaatgttctcaggtgacaaatggtgtcttctttgggctactgttaccccatccttctggggtcctcaggtaagtcctcctgccgtggaacggtctgtttatatgtgagtgccctgccttcttagggctctgaatctcagttgaaattggggctatgtcacaaagcattaaccggctgtgtctgtattgtctgtttatattacacaccaaatagaaattattctttaagaaccaaaaaaatgctttgaattacgaatagtgaatcctgcaagcaaaaataggttcttgatggaatcccagcattatggcatgaaaacggttttatcagtacaaagtggcgcccaaccccttttgtcctccgtaaagtattcatttagattttctcttcacttggtgtgtttgccaccaaaagagatgatgtgaagggagcacagttgcagggcctcagagcgggcatggagcactcatcggcagcatctaaatgccacgggctcttttttccatttctgttggaattttcctcgttctagattccagtgggattgttctgaattgatgtaatatattcaggccattgcaaccccttcccattgctccatgaattatgcagtagttctcggtatgcgttcccaaatccccaggactacttctgattccaagcccacccagtgcgctgttgcggaatctttccccgaatgttcactcaggcatccacacccaggagtgatgcaggtgacaagaaat

SEQ ID NO: 88785 - DNA, 1153 bp, Homo sapiens
gttttagataccagtcatgcaatttccatatctctgtttgccaaagtgctgtttgaaatgttaaatgctaaagggtgactcggaagcatagaaactagagggaggtctgtgactcctccatggagtttccttcttctctctgggcagatggcagagggcaggcctgtgtgcctagtgcctggccacttccccacacctgccttggagtgaatgtgctagatctgagagcccgcaagtctctcctggtggctacccctgagcgagagggatggtcctctacctccgggcttgctgactttaaacctttattgttctcctgtttaaaaaacactttccaaccttcttgcttttcttttctttctctgtctgttctgtccagaaccaaactgtcttgctaactgccccctggggactctagccctgcccgcctcacgctgtaagtgcttccttccttgtttcccaactgtctggagaggtcgtgttgtgtaactcgcagttggcacctgacgctcatcacctgagggagttctgcccggtggcggtaccctcgctcaccccaagttccaggaggttcgcctaaacccaggaacagattgataaggccagagactcatctgctctgctagagggttgaccactcaatgcaaagaagggtttttaggttatagagattctgctgagatttctccgcttttgtacatttgcagccaatatgctttcagagaattgagtagatactggccaggaggggacatcctaggcacaggggtcttgcctgagggggtctttgggcccagccacccaggactggtcaacattttggttatacgtgcactggcatgtgctgaaatgaggtgtgaccctaatgtgataaggcttttgtttttcatttttcaacaaccataccacaaggaatgaacccaaatatatcttgtccttccaagtgagcaccgtgggtgacagagtaaatgctcaataaatatttgttgaatgaataaacaacaaaatcatccccactccaaatatcttgagaccttccctcagaattgctttcagagtctgagtcaaagcacatgagaaaagatatactttttgatcaaggatatagtcatccacccacctcatccactggccttgactcgaagccagtagt

SEQ ID NO: 88786 - DNA, 1797 bp, Homo sapiens
ctagttttctcaaggtcaaagaatgttttttaaaaacacaaagctgctgaatgttcaacctgtgaaactgagatgtttctagaatgaaacagtaaatgtgcctgtaataacttaatttttttcatagctcagaaaactatttttgtctccatcttttttacacacagtatattaaacgaaaaggtaaataaggtataaatagatttaaaaaataaaagttttaaaaaatgtacattttaagagattctgaacaccctcgctgtcaatacctgactgcctctgttaaatttgcactgttacattttggttcagtttatttccatgttgaattagagtggattaagttaattttattttgtcagtgttactgttttttacgaattttttaatgcttcagactgtctgattcagtgaactttttgtagtgaaaaagccatgaagccagtagacaagacagatattctgtatgctggaggggatacaggatgattttgaaaaggtacaaagtcctcagtgggcttagaaaattcactgtatgatccttatattatcctacttggcttgcacgtcttcgggtgcatgtatataccgctactgtgtcctcgccatcacctaaatgtgactcagtctgttccactgtaatatgttgtgaatttccttgtactgtacttttattgttggtcttcttgcatcgatgatccaacagcaacaccatttttaaattattgtgaaaagattaactggcaatgtacagagtttactcaaagttttcttaagggaaaacactacaaaaagtcacaaggataccaaatggaaacacatgatgatgcctctgggtctgtatgagaccgtgatgaagtagaaataaagcccttctgagatggcagcatgtctcggtctctcatttcacacaccctccatcttttcctaaggactcagatggaaagttttccatagctaggggaatgagggagagaggagatcatgtaaagaggcaacagctgctaatatatcttgctgggaatgcactctttgggtacgtgatcatgttgcagttttactgttccccgtaagagagtcctaggatagagagacagctttattgttgaaaagccaaaactgtggtgtgggcagggatgtgaggaaactggttacctacaagtcagagtgtgcccggcctctctgcccgctctgctcattaggagagagggagtggccaataactctagaagaggcctttccatctctgatcctgagatgagcccgcctctcagtgtttggtggagtagaaagaagtgatgctactgaagagcccaaaaagaatgatttcaggctgaagcttctggctttagtatttcatttagtgcttcattaacccaacaattttcttcttatatagatgagctgctaatgtaataggctatcctagcattaccacagcttcatccttaaactgaaatattttcaaaaaataaaaaccaacaagtgttggcaaggatgtggagaaattggaacccttgagcactgttggtgggaaagtaaaatggcccagctgctgtggaagacagtatgacttcctcaaaaagttaaacataaaattaccataggatccagggattccacttctgggtatacacccaaaaggaccaaaagtagggactcaaacaggtgtttgcacacctatgttcatagcagcattattcataatagccaaaaggtggaaacacttcagttgtccattgacagatgaatggatcaacaaaatgtggtatatacatataaagggatactattcag

SEQ ID NO: 88787 - DNA, 1035 bp, Homo sapiens
gccaccgtgcctggccaataaaaacttccaataaatgcaaaatataaatatttcactttatcactctagatatacctgcaaacaaacaatcagcaggtcagtaaatattcattgcctattctgtgcagattgcaaatgctgagaggtacattggtattccttcaattggaagcaaccagccaccaacaagaagggaagttgtggctgtcacgactgagagcctcaaaccgtgccatcaggactttgctcagtctcctaactctgtctactctgtatggctttatactcagacaagcatcacaaaaattggcaacaatggtccctagctgctgctattagtttagcaactcctagagaaaggggatctcttaccaggagctccagtgaaagcccaggaccgatgattctcatttggtagggattaagtctcatgtctggctctgagccaatcgtggtgacgggaagacccagcaaaggaaaagcagggtacgattagaatagagggcgtcagaaaggcagtaaaggcgtataccactgtgggacaccccaaaattgcaaggaaaaagctctgagcaccacagaacttgccaactggttggaagagataacattcccaggcacaataacaataaaatgaaaaatggtgtggtagaaattctaagtacagtagggcttgagttaggcttggcagtacgggaagcattccaatgtgcaggaggagaagcaagtgggaggtgggaggagcagaggtgtgaggggcagtaatagacacaggtcgcattgggcagtgatgcagaaaccaggctgggagcagaactttcatcaaaaaagccacatctggcagcaccagtgccttgaaaagccgtctgggaacttcttctcacatcttattttctaaaagttggacatgtgtattcttaagtctagggtggaagcactccaactgttaaaggccaggcaagacagtaggatgaaatcattttccacaccactgtccagatgaatgccaaggctgctatgtgggtcacacatggt

SEQ ID NO: 88788 - DNA, 1133 bp, Homo sapiens
caccattacgcccagctaatttttgtgtttttagtagagacagggtttcaccatgttggccaggctggtcttgaactcctgacctcaggtgatccaccgcctcggcctcccaaagtgctgggattacaggcatgagccaccacgcccagccaagacttatttgaaaaacagcaacaataatacttcccagggctattgtaaggattaaggtttgttgtttacctattgtgtgcaagataccattctaagaattgcaaacaccagagataaacagaaaagacaagctccctgccttgtgaagcttagttatgagaaacacatagcaaacagggctaagtgggatagagaactaagaggcttccctgggtaggtgccgtttgatctgaggcctatgaacaaaaatctgtctaccaggtagagggaagagctggtggaaagttgagatgggttggggggcatgaacttggtgtgttccaggaagtggacgaaggccactgtggtcacagcaaggtgggcaagggcaccagagaggggcaggaggaggggtcagggagcttaaaagaggcctagtggtccacagtaaagggtttagattttgttctaggtgagggggaaaaaaaagccattggaagataaaaagcaaggagttacaaaatgtgatttgcatttttagattactgtgttaaggattagaagtggatgagattggaaggcttccagatgcaaggctgtggtgttgacccagggaagcaccaacgatggcttgaacaggttttctgctgctgttatcagcctcaccaccaccaggccagccgcatgctgcttggcaggaaccacgatctagcaggccctgctgccaaactccagaatctaccccagctgttcagctagaaactgaaggaagcccttggttattcttctgctgcctctcagtccaggccagtcttcctgcaaatggccttgggccaagaagaaccttccaaaccccattctcttcagggcacaggattgcacagcaagcttcacaggcctttctaccttgtctttttaaggtgcaaacgccttctccaacttttaggttggggcttccaaactattatcagtcatttataatttggtaaaaatgagttcct

SEQ ID NO: 88789 - DNA, 1050 bp, Homo sapiens
cttttaaacttaacttcctcataaagcaacctttttcgattacctactccaccctgactcattctgattacctactccatcctgacttattctgattacctgctacctgctctgctctgactcattcttcaccctgcataaccatttttttcccgccaaagcagtcaccatcactctctttaaattagccaatcagaactaggttagcctgtgcggtctatccctagccaataggggaacaatacagcagcaggggccacgtgcatcagggatgagaaccccttcccctccctagtccaagtgtgcattcaccattgctccatctgtaagggcgcacccttccacagaagtaacttgccttgctgagaactaaaagaaaattttatatttgagtgctatttcttttgtggcactgaaactttatatataacgttagtcttatttacgtatgcatatatttatttttagcagacattcattcactgccaaacacctactataagtcaggcagcatgtgttggagacaaagaggtagtaagacagatgggacttcaggcttcccaaagcttggatcaatttgggtaaattaatggggactaggcatttaggaaacaacccctattgtattttatgggaagaactgagttggtagtgttataaataaaatttcggtgccacaaaagaaattgcactcgaatataacatcttctttttaattctcagcaaggcaagttacttctgtagatgggtgcacgcttacagacggagcaatggtgagtgcacacttggacaaaggagggaaaggggttcttatccctgatgtacatggcccctgctgctgtgtcattcccctattggctagggttagactgcacaggctaaactaattccaagtggctaatttaaagacagtgatggggtgagtgctttggtgggaaaaatggttatgacagagcaggtaatcggaatgagtcagggtggagcaggtaatggaaaaaggttgctttacgaggaagttaagtttaaaagtagaaggcaaagaattaaaca

SEQ ID NO: 88790 - DNA, 1354 bp, Homo sapiens
caaaacaaaaccaacacaatcaaagcccccttgtgcacctctgactgtatccctccctgccttccaattatcctgaaattgatatttatcactcccatcttttgtacgtgtgtctcacatcctgtaccttagtcttttcttgttaattaaagcagatgttccatgtaaacttatttattaatatttcttcaactgaaatatcatttggacctagggtaaagttaaatatactattgtgttatattactccgtttactttcttctatgtttgcctttgaattgtccaactctttgctagttccatgcttggtttaacccagccagtgttctgccgtctgtggttagtagaactcagaaattggaggaatccagaacagtagttgaaatacttgggggcgggggacagggtaggagtggagggtaggagcaagagggcaaagagaaatgaaatgcagctgagagaataatcagattccttccaaagcaactgaacattgtcagtccgcatagcatcataaatagctttctgaaactacttttttttttttttttgagacggagccttgctctgctgctcaggctggagtgcggtggcgcgatctcggctcactgcaacctctgcctcccaggttcaggcgattctcctgcctaagcctcccgagtagctgggactaccagcgtgcgccaccacgcccagctaatttttgtgttcttagtagagatggggttttaccatgttggccaggatggtctcgatctcttgacctcgtgatctccttgccttagcctcccaaagtgctgggattacaggcatgaaccaccacacccggccagaaactactttttacggctggagtttcagaactaatttagtaaaggattgaaaaggaaggaggatacagttgactcatttgtacagagtatatgactcatttgtacagaatgaaaacatgtttatgaaggttcacactaagtgaaagctggcatccaagttgattcagacaaaagtgaaagtcaagaagttaatagtacattaattctccaaatgcatgccagcagagcgtggcaggaaggtacacaagtcagcagatctgggttgtcctggttctcctattgactcgtgtgtgtgatgttaggtgggtgaatcttggctttgaatctccatttgtaaaataactctcctgaaatagagatggatagggtagaataccatatttcttaagatcttttataagttgattccattgttgtaaattatgaatcctaaagtatttctttatgaaaaattttttaaggctatgatttactaaactttcttaaaattttaaattttagggaagacatgtaaggaatt

SEQ ID NO: 88791 - DNA, 1011 bp, Homo sapiens
agaaatgctatggatgacccattttattcaaagttactctattcatataatattcatttttcctaatagttttgagcagtaatacaaatttcaagtttattcgtatcctgttaatacaaataactacatttgtgtggtgatgtattacagcatatcatttataaagtgccatacacaaaccacatactatttgattctgatgagaatcacataaccattaagctgtgttatataatggaaaatatttttgacttagaactaagacacctgatttttctctgaacttcctcattggcaatgaaagttttgaaccaggtagacctcttctaattattaagttatgatttctgagcggtagtgctaggactgaattcatttctaaatcagtgcattttctacttgactgactataacagagattttgttgtacttcattcttaccactttctaaacttaatttggttataactcttaggctagacaatcatctttctgagagaataggaatgtcctcaatttatctaatagaatcctaaatgcaaattttagatttagtttattgatattttattttatttgcattgtatagtactataacactggtttttccctatgaaaaatattataaagcaagtttagtgagttactatcctgagtaaacataggtggttatttcttcgataaattatgtatttcttgggaagttacttaacatttttttaaattaaaatagccaactttataatgatttaggtatatgtttctaattataatgttattattttgaaaaaatcatatttttagtaatggtaagcctgttggaaatcttgctgagtggcacgttagcagagcaaaataaaaataaataagaaactgaaagtgaaaacatttaaaaaataagacaggcatggtggtgcatgcctgtagacccaggtactcaggatgttgatgtgggaggattgcttgagcttaagaccagcctgggcaagatggtgagaccctatctcttaa

SEQ ID NO: 88792 - DNA, 1031 bp, Homo sapiens
tgataatggttatctctggggataaaaggaagagaaaaagatttgggatggagtatttcacctgtatctgtagcttatttctacaaatgatgatgatgatgatagtatctgaagtaaaatgtggcaaaatattactctcagttaagtcctgatagttggctacactaggattattttctgtattaatatccaaattattaaatttttcataatctaaagttttaaaatttgtcttctgaagttaaatgcaaaaatgtttaaagaattttttaaaacctggatatttatggtaaccatttcttctaaatgagtaattcagaaaccaacatctaaggacacaaaatcaaatatttaaaatgttttaaatatgacatcatacaactttaacttgtattacctgaaatactcacatagtaattgtcatttatttgaaccattggtgcgttcacacaggcccctaaacattccacttctataagagtgaaaagtttgtcaggtgtagtctccccaacctttattcctaaaaatacaaataaacactctaaggaccaggttatattttaatagtcatttggtttaaaaaaaaaaaaaagaatttttatagaggtatattaaaagtttaagactattaagttttttaaaaagaggccaggcgcggtggctcacgcctgtaatcccagcactttgggaggctggggtgggcagatcacgaggtcaggagatctagaccatcctggctaacatggtgaaaccccgtctctactaaaaatacaaaaaattagccaggtgtggtggcgggcacctgtagtgccacctactcgggaggctgaggcaggagagtggcgtgaacccaggaggcggagcttgcagtgagccgagattgcgccactgcactccagcctgggcaacagagcaagactccatctccaaaaaaaaaaaaaaaaaagttttttaaaaagaaaaaaatcctaggccaggtggagtggctccgtcctataatcccagcaccttgggaggccgtggtgcgagga

SEQ ID NO: 88793 - DNA, 1021 bp, Homo sapiens
ttaatctctaataatatgcatagattggggaattgttaaccttttaaaataaatagtgggttttttgtttgtttgtttttgttttgtttcactatgttgctcagactggtcttggtcttgaactcctgacctcaaacagtcctcctgcttcaccctccctagtagctgggattacaggtcttagccaccttaccttgctatatagtctcttattgtaacaatagcaaagagttacaatagaactctatagcttctcagatttcagattgttactcctacataggagttttgtcagcattctgacttctaatagagaacaaaaaccatttgtggctctcttttctgcctagaaatagctatattgactctcaaaagaaaaatagtaacttaaaaattacagtgctttgtagttcacacagtgctttttacatctgattctcttttgaacctcacagctcagtagcagaacaaggattgtcagctaatctgatgatactgagccatggattgaatccaggttaaaagtatctggagtaatgttagattcctttgaaactcacttatgaaagagaagcattagcaaacctaaaggaagagaaaggagagacatgcacttctattttctcccaccaaattcatattgtacacaactttctattctgtttacccgttctgaaacagagtagaggtaaacattaaaaacattccttatacagctttaataattagtagtaatgggccaggtgcagtaggtcactcctgtaatctctgctctttgggaggctgaggctggcagatcacctgaggtcaggagtttgagaccagcctgactaacatggtgaaaccccctctctactaaagaatacaaaaaattagctgggcgtggtggcgcacccctgtaatcccagctacttgggaggctgaggcaggagaattgcttgaacccaggaggtggaggttgcagtgagccaaaattgagccactgcactccagcctgggagacagagtgatactgcctcca

SEQ ID NO: 88794 - DNA, 1142 bp, Homo sapiens
tagcctcataggttcctctttaacatgtaaaaccccttggaattttttctggatcgttcaggcataaacttgtcataatcataagctcttaggagaatgtttgacctattatgcttgtagaataggaaagagaaggctgaacaaattggaaataaaataatgtatacagtggtgattacagtacaatagaagtatatcagtgagtagtttgataaagtgactaaatggctgaggatgttcagtaaagaaaataaactactctagggattttaaatgggaaggatttaatgtagggaattaggtgttgtaaaattactgatcaaacctaacaggttcttggttgggtcttcagaaatgacttccaaaccaacacaaaactacaagggcatcgattaggagctcccattatggattcctactgaaaagagaaacgttttgtcactgcttccactttcactgcttctggatacccaaaactggagatgttacttgtctcgagaatacaggaagaaatttattaaagtaattctcttttcttttagagaaccagaagctaaaataaggtgaaaacttactttagcttaggatagcctctttgagaaaataaggtatcttatgaaaacagagagaaaacaaattggactaattgtggtgcgtaacctattgtatatatattcaaataacccttatatatctattctttacagatccaggatgagaagactgataaaagaagaagctagctgaacagctgtaaaatgcccaaatctgggttcacaaaaccaattcagagtgaaaattctgacagtgacagcaatatggtagagaaaccatatggaagaaaggtatatgattatactaaagatttgttgactttttgaactgggaaaaagactcccaattaagtatttttagtgatttctcgtaagataaaaaccaatatggatgccagataaatccaaaccatttatgccctttagaaataaattggattcctggggaagtgattgtttatcattccttaaggtgaacacacaactactaagtaaaacacaattactaagattgtgcaattaagaaatattgagagagggaaaaatttttattattagtcattgtcaatgacctgtaattctgtcttt

SEQ ID NO: 88795 - DNA, 1058 bp, Homo sapiens
ttattagtaagcaaatagtttactagtttttttcgctttttttttttttaaggtgatacagagtgtcgctctttcacccaggctggagtgcagtggcacagtctcggctcactgcaacctctgcctcctgggttcaagcagttctcctgtctcagcctcctcaatagctgggattacaggcgtgtgccaccacacccagctaatttttgtatttttagtagagatggggtttcaccatgtaggccaagctggtctcaaactcctgacctcaattgatccacccacctcagcctcccagtgctgggattacaggcgtgagcaaccgcgcccagccttttttggcattttaaaaagataatgtgttatgagaaaattcagagaacacagtatgatgtgttcacaaagtctacagaggcagctgtagaatatgttgaaattttattaacaaaatctctgccagccagccttagttctattttcctaagactttagatgccatttaagggtttaccatattataatgtgactcagtcaaatttgaggagaggagcttcttttaaaaacaaaacagatagatataatttttctgggaactatattaaaatagataaaattagtgctttgcttagtaagaataatcacctttggtgattttttcatggcagttattcatgatagatttacttctgcccccttcctgatatttcattataaaaatttcaaacatacagtacaggcttttaaaattatttttggtatttttctcttatttccttgcaacccaagcaaagtattaacttaaaaagattggttttaaaatacaagtgtcacttgttttgcctcgctacaaggaacatatgtgggagagagaatggctctgcttagcactcagtgttttgcatcaatctcaatctcataaacagtggtagtctcatacagcctagtctcagtacagcataaaaggaagtagttgaggaaggggacagggaaatgttaatagaagctttaattttccagttcctgagttaaagctttatagactattcagatgcccccaa

SEQ ID NO: 88796 - DNA, 1021 bp, Homo sapiens
aaagatgcagacattcaattggagattcacgtagatattttagaaccagagagtaatggcaaatttttttttcagaattgaagtatgtacattgcaaacaggattgacttaattatgttcatctatatttgagttgtgattccattgtttgattcttatagtgactactttgtgggaagatgttgtattctttaatttttgagacactaataggtttatgaaccaagttccctaagaaaaacaattttgtctcttctccttaataagtacttaacacttaattgggatgtgaagatgttgagctttctatttattctggcaagacctaaaaagaaagcattaattttcagcattataaaactggaacatctttgtatatctgaagatcctctaaaccttgaaagaatgttggagcgttgaaaagtccatttctctgtttgctttgaatagtctttaagtgaatctcttgtatattttcttaaaaaatccctaggctgtctgaatggaacttaagtttatagtagactatgctaaatgaacacatttgtcagtatacttacatttaaacttcaaagttcttgtctattattagggcaagtaaatacattttgcaggtactgaatcttgagaagtagctaactttttaagtattatttaatcaccttcctgacaagagaagtagctaactctttataagatatataatatattatcatttttttacttatgatgggtcagaggaaacaaattctttacaggacaaatcccagatagtcttgttgactgcttttaacttgaaaacgcatactttgggacatactagtctaacacagttttaacacacagtgtagttgtctctatcctagctgccttacaccggctgctgttttcttactttgctgtctcatgcagaatatgaactcagacatatgactatggtaactgaaagaaaatagagtttatattggatgctagcatctgattcgaattttgttttaaatatttggaatatatccaattt

SEQ ID NO: 88797 - DNA, 1050 bp, Homo sapiens
tttgtatagggtttcccaagaaatagatggacaggtaatagccagacctctgcatttggttgcacagagcacctgccttaactcccagagaagtcttacagaaaagacaaacatctgtatctcttgcttatagaattcagttcagtctgaatttgctgacacttaatggggaacgcaggctgcgttgctaatgggtttcccagatagttaaatctgaaagctaacttgatgatgggtcagatctctttgaaaaggtccttgaaaatttttggatctttgcaagatctgttaacccatagccacacagaatctttaatttgcgcattcttggctttgactaatgtcatttcatgttcagctatcctatgactggaataaaatgatttggtactttttttcgatagttgttctgtgtgataagacttgtcttaaatatttagctcgttggaagtttgtataaatcattgctggaattaaggaagtaatttgaaggagcattgctatataggcttatcagcaattacaaataaaattatagtgaataaaagaggtttcaaagatgtaatactaaagaatgtctgcactgttatcaaggaattaaattttactagaacaagtcattaaggtaaaattttactagtaataaatttcccaagtattactaattttctgaaaacagtggaattaagaatatatttttttcaaagcagtcaggaagaaaattgtttatataatataaaacccattgtgcttttgtctggctactactagttcatatattgtacacatttctcatatatatgtacagcatctatcaaaaaattcatcttaaacttgcttttgagtacttggatttgtttcaaattcttacatatttgttaataattccagagaaagaaggtccagaaaagaagaagacaaaaaaggaagctggaaataagaaatccacaccagttagcattctttttggttatccactctctgagcgaaaacagatggcacttcttatgcagatgacagcaagagacaacagtccaggtgatacctacc

SEQ ID NO: 88798 - DNA, 6022 bp, Homo sapiens
gaaaaatgtttcatagttcatcacatcattcattaaggaaacattttagagtacgtatttgatactttatcattttaaaccaattttatgaattgacaaaacattttttttaattggctaatgatatttgataaccctgaagggaagatctctgtgtatttgggtcattaacggatcatccaagtcaaggtttaggttgttagggtgagaaggcattccttgtgtttcaggagattagcatattaccaataaaaacatttaaataagtatacagaatatttagcctagaacttctgctaactttcttctttcttacagattccacaccaaatcatccatcacaaacaacgcctgcccaaaagaaaactcccagttcttcatctcgacagaaagataaagttaataaaagaaatgaacgtggtgaaactcctttacacatggctgctattcgaggagatgtgaaacaagttaaagaattaataagtttaggggcaaatgtgaatgtgaaagattttgcaggtaagactagtaattcaatacctactattcaggcactaaaatttaaacagatcctggttacaatttaatctacattcttttattcattttgctgaaatgaaagagttctaaaaatactctttattacaaaacttttggagttcgtacataaaacccctgatttctactacaattccatgtcaataattactcatatttttatatactaaacttatactttagttgacatattacttgctgtatagttctttatccaagttaggttttgccctagatgaatttgagttatatgttttcaaagtagttgattcattcataagtattttaagaacatttattaacttgaaccatgaggactgtaagagtgtggtgttattactttcattttcattattcaagtagcataccagtacattcttgctgtaaataattcaacagtaaaagtatgtagggaacaattcaaaaattttctttaatttcacatactgcacaaccctaccctccctcccacacaggttctttctcttccatagaactatggttaacgcttaggaggttactcattcagttcatttttattatatatgtataaagcaaatacttacttatatattggctttttaaagtgaaatcattccatctgtatcaatctgtagttctgcaacctgccttaatgtcttacagatatttctatatattcttacagtatatataggtaggcctactccattaatttttaatagctgcataatattttctggtatagcattccgtaggcaacactgtagtaaatacctatatagaaacatctttgtgtatatttatggaagtatttcagtagaagtgaaattgctaaatcaatggagatacatgttttagatttttgaaataatggaaattgccccccccaaaattctgtatcaattcatactaccatcaagagtatataaaagagccattttcctcatatcttcagtaaaactggatattatcaacttttaattattaacaatctgaagaatgaaaaaaatcttaatttggattttcatgatcagtagtgatggtaaacatttcttatgtttattataaacttatgtgtattttatgaattgttagatccactcctttgctcattttcttttggtttagtcctgtttttaatctacaagagcctttatttagtctagattttctctatcaaatatgtaaagattttcacagtctgtggcttaggttgaatacactctcattacagtgtttattgtactacagttttcatcttttatgtatcatatcaattgagctttatgggttcttggtttggtattttatttaagaaggccttgtctttctctgtatcataaaactattcctatattttctgtttttcaaatttggtttctgttttgtttttacatgtagccctattataatacacctggaatttatgtctttatttgctgtgagtggggaatggtgtgatatacagtatctaccttaaagagtgagacttaaaatgcatggcatttattctagaggaaaacttgacattatttatcagaaacctaaaaaatatttctttcatctgacaattccactctcaaggatttattttaaatagttaatcatggatgtacatgaagatttagttgtaaggatacttgttacagcattgtttctaattaaaaactagcaacaatctgtatccttagtaataggaactcgttgaaggaaattatggtatatttgattagtacaatactatgttgtagaaaagtataatgacatagggaattattttcactttagtaagtagaggaagcaggttgttattcatctaagttttataaatatgtgggagagctagtagatattatgttggattcttcaaattattatttctgggtggtgagattatggacagtgtttattttctttgtatttttaagttatctaatatttcttttgtgaacatgtaactttttaattacaaaagtaattaagtttattttagttaaaataagtattaagtccagaaaatattgtatcaacagaataaagcccttaagacatcaggatttttgtttactgaaagactctaatcaagcttactaatattttgcctctttaaaattctttttcatagtttaaatgattattaaaaattatatcaagcttatatttattggaaagcttaaatatttaatacttttgtcaaataatttagcacagtggaaatactgttgacccttgaactgtgtaggtctacttatatgtggatttttttcagtaaatatatttgaaattttttttgagatttggaacaatttggaaaaactcatagatgaactgcatagcctagaaatagtgaaaataggaaaaaattaaatacattataagtgcataaaagatacctacatactagtctgttctatcacttactaccataaaatatacacaaatctgttctaaaaagttaaaacatatgcatacagacataggctatacatagcaccattcagaatcaggagaaatgtaaacaaacataaagatgcagtattaaatcatagctgcataaaatttactgtagtacatattatactcctgtaataattgcatagctacctcctgttaccattgtggtgagctcaaatattgggactatctgcttaaaacaccatgtgactgacacaaatcatctccacataagcagttcgtctctccagtaagttgcatgccacagtgaaatgtgtgattcttgcatatttttcatcgtgtttagtagaatactgtaagccttgaataataccaggggacccattttaagtgctcctagtgatactagaagtgctcctaagaaacagaagagttacgacattaaaagaaaaaattgaattgcttgataatgtactataaattgaggtctgcagctgtggttacctgccatttgaagatgaacgaatccagcataaggaccagtggaaaaaaggaaaggaaatttgtgaagccattgatggagctatgctagtgggtttgaaaacgttgcacttttttgtaaaacattcttttatctcatgcagcttttatgcgaatgcaagattgctataaaaaaggcgtacctatagattagattgaagaaaacatgaagtcattatacaacaattttaaggaagatcagggatctaaagctggggaatttaacgccagcaaaggatggtttaataattttagaacaaggtttcgtttaaaaaaatgtcaagataacaggagaagtggcttcagtccactgataggcagcaaataaattcccagataccattaagaaaatcagtgaggaaaaaagaaaatctgcctgaacagttttttaatgtggacaaaagtaccctattctgggaaaaagaaaaatccacaaaggacatttattagtaaggaagagaagcaagcaccaagatttagggcaggaagggattagctaactctcctgttttatgtaaatacagttgggtttatgatcaggactgccccctgaaccctgaagggaaaaggtaaacccagctgccagtcttttggttgtataacaagaaggcctggacaatgagaactcttttctggattgatgtcatcaatttcttcctgaagtcaggaagtactttgccaggaaggaggctgtcttttagtgtcctctggcctcccagaaccaattgatttcgacaccaaaggcattaaagtggtgtacaaacatggtgtttctaaaccagcctctaattagagggtcataaggaactttaaagctcattacacacggtactccagggaaaggattgtcaacgctgtagaagagaactccgatagaatgtcatgaaagtctggaaggattacaccattgaagatgctgtcattgttaaagaaaaagctgtgaaagctctctcctcctggagaaaactgtgtccagatgttgtcatgacgtcacaggatttaccacagaaccagtcaaggaaatcatgaaagagattgtggatatgtcaaaaaaggtagcgggtgaaaagtttcaaaatatggatcttggagaaattgaggagctagtagataccacatcagaggtattaataggtgacttgatggagttgaatgcttccaaaacagtttcaagtgatgaggaagaagacagaagaagccatgccagaaaacagattgaccttagagggttccaataatttaaggctgcttttactttttttttttttttttaaacaccaatccttgtatgatccaggcactgaaactaaagcaaacagtggaagaaggagggtggcactgtattaaaacatttttagagaaatgaaaaagcaaaaaagtgagacacaaatttacaatgtatttttgtgaagttacaccaaatatgcctgcctctcccacctttacttttacctcttctccctctgccacctctgagacagcaagaccaaccccttctcccttctcttcagcctactcaccgtgaagatgatgatgacctttttgatgatccacttctacttaatgaataatagatttttcttacgattttgttaaataacaatttttctctagctttattgtaagagtacagtatataatacatacacaaagtatgtgttagtcaaactgttcatgttactggtaaggcttccagttaacagtaggctattagtaaagttttggggagtcaaaagttatatgtggatttttgactgcatgggggttaacacccctaaccttcaccttgttcaagggtcaactgtaatattatcttgaatgaaccttcagtaaattgatattgttcttatttatttttagtagcttcttcatcactcctttttttttgcacgatgtgcagttttagaatttatatgtcacacattggtatgtatatgaaaagcatatattttgaagtagcgcaagtgaatcatgttaaattaataatctaactttaggttggacaccactgcatgaagcttgcaatgttggatattacgatgttgctaagatacttatagcagctggagcagatgttaacacacaaggattagatgatgacactccactccatgattctgctagtagtgggcacagagatgtaagtatgatagaaaaaaatcaataatacacatttgcaaaatataaattcaacccaaagtaatttcattcacttcttagtcatatgatctgtgtcatattccactcattgcttgaacaactcatctatattttgttttcccttttttctactaagtattagttcatagtcagatttagcattttcttttcataaaacccttttaatttgacagttgattaaataatttggcaaaatttttatttcaaggcattctttataagacaattggatgtgttaaagcagtctttatatatagtaaaaattgtacagtgttgaattgcctatcttttgaagggcattttactttagttgagacaaaaatagaatttggagtaaagatagata

SEQ ID NO: 88799 - DNA, 3013 bp, Homo sapiens
tcaccataaactattgcacagccatggaaaagcatgtcagtgctgtgcctggagttgtagggttacttgaagacatttttataaggtattgttgagttcaaaaaatcaagaatagttatatctcatttttgtaaaatgaacagtgtttttaaaatctgtatgtatgtttacgtacatgtttgtgtaaaattttattagcatggagcgaaatctggaaggatgtataccaggccattaaggagacgtgtcttaggtagctagtggcagaggagatgatgatttggatggatggaaaggtcaaagtacagtcggacacaatcattgataatttttttacacatatatttacaagactcaacaaaatcttctcctgccctgcatccccgtttatttaatcatttatgcccttcccttcacaactaagcttcttaaggtacattgtagactgactcctccatggaacctagttttactaagattgcacatgctgtcactgccagacccctcagtggtatttcagtccttatcctttgaaattctccatagaatttgacactgttgaccatattcttcctaaaattctcttgccttggttcttgggacaaagttctccttggctttcgtccagctccccagactcttccttctcaatttcctcctagattcttgtcttcgtaacttcctcatttcctttccataaacacccctgtgttggttttctcaagatttttactttctggaccctcttctcatgctgcatactctctcaagtaaatttcacccacacttagagtttttactaccatttatgtaatgattttaaaatacatctatctcagacatttctcttaagcttcaaacttacatatttggctgttctctgaatatttccacctggatttcctcagcaaaatctcaaaaatcagcatacccccaccattacactcctcttcgtgttctatcttaattagtgtaacatcattcatctgcacatataagtcatacactcgagagtcatctaaactcctcttcttccttttccttctttcaattattcaacagctgtttttgagcactcattataggttaggcattgcttaggtactgaggatacagctgattaagaaaatggagaaaacataaaacataattgactcctgtcaatttcagctttcaaaatttttgtaagtccatcttccagctaaactgagagtcctttgaacgtttttgtccagtctaaactggaataaagatcataatagctgaaattgcattaacttcggtgagaaagagagtaatattttaaggctgggtgcagtggctcacgcctgtaatcccagcactttgggaggccgagacgggtgaatcacctgagtccaggagttcaagaccatcccaggcaacatggtgaaaccccatctttacagaaaatacaaaaattagcagggcatggtggcacgcaccaggagtcccagctattcgggatggggctgaggtaggaggttcacttgagcctgggaggtcgaggctgccatgagctgtgtttgcaccactgtactccaacctggacaacagagtgagaccctgtctcaaaggaaagaaaataagattttaaaggtaaaaattgtttatatgatatgttaactgttatgctattctaaatattacatatttggctgccctctggatattaagaaatctcaaaaatcgctactaattcttttaattgctgtcgcttctgaaaattgtagctatgaaaagcagctttgttataaacttgcttttagaaagaagtgctgcaacaaattttcccacggaagaagggaggtattttatttcaacttacatgtttaattagtgcagaacacaccttctagaacctttttgattttcactgatcttgattgtttcatgtgttcatcagctatgtattgatttttcagaatatttattttccacatggtgaatgtgcctgaattattgcttggtcaaagtccctcaaggaatgatacaaaaatcatcagtaagtatcatataaagattttggagttgctgaaaaagactgatgaaaatacccaaaatttattacttaatttacatgaggtccttgttagatttaactgtaccaaacttcatccaatctaaattcagaacatactaatatataatcatgtaactgcccatagatgtttgtatatatgaagccagatagcattatctaataatatagcacatcatctatgtgacagatacactttaagtgttgaaagttaaagaataaccaagattattaatttcagaacttaataaatttggagtaactaagagggtatcatgtacgtagcattctaaatgtggtttattcattagtcattgtgctttatgccagtgctactcagagtagcctttccattaactgtttgttaccagccctcaagataaggagcttgtgccagaatgtctgtcagtacattgcttccttaatcagaaaggaaaaaatattatggaaaaaaatgtccactaaaataagtagtgtgctttgtgatgtaattgatttccatgtttggtaccagctctttattttatgatggtttagtaataaacaatttgcaggtttgcctgtctttatggaccacactttgagtagcagttttatgtcatgtgtatcagacatttatgatattgttgcaggaatacatgtcctgattaatacagcttatttgtgtataaatgtttggcacttttaaatttgcataattctttagtcttttttcccctaacttctgcctttttccattagtctaagtccatgttaccttcctctatagaaattctgtccagcaatagtgtttgcttcaaatgattgcttcttgctacggtgcgagaactcagtcatattcagaaaaccagatcttgctcataaaccataatcgtggaaatggagaagtgggtaacttgtcacataacacccctcccgcatacttactgacactcattaattgccaaagtagag

SEQ ID NO: 88800 - DNA, 1035 bp, Homo sapiens
gtactattataaatatattgtcataatttgtacaacttatttcctcagttttatatttcaggaactatgaaaatacaactgttggtacttacttacaatggagttctaatagttaataagagatccaaaaaaaattatttaagtcaaaatgtaccagaattttttatcaaatggattatgtgatgttaacagttcaccataagtagggagaagcattagcttaggaagttttaaagtaaatttttttaacctagaagcataaagactacaagaagaggttacatcgggtgtttttagtatgtccaaatatatatatcaacaaatttgatgatcgggaatctagacttgatagagcattttatagagtagtttgcatatgagtatacctataataaaagatttttcatttaacatgtagttaaaatgtaaatagtattttatttttgtcctttttaaatgacgtcttagtagcttccagtgtatttattagataatagttcaagtctcgtacaaaaaaattgcaatccattagtaaaccaagaaccttgttttatttaagcaggactattagctacctccttgattaagcctatttctgaggttgttgaatagcagcaagcatcaagtttggtgttcagcacctttgtcacatatccctgtgatgtgagtgcttagaaaaattaaataggcacttaggtatctgttatgtgcagagggctgagcatacagcatggtaggcaatgaggtattctttaatgaacacttcaagtgttttgcatgctttagttttcctcctctgctttctaacgtatgtggtgtgctttacacacagatttctgaatcttagttttttaaactttttaaatgtatatatcaccaacttgcttctacctctgtcttaagcaaacagaacacatacagatgtaaattaattatatcagcctagctccaaagcccaagagttttaaattccaggtagttttttttttttttcaaaagaaaaatacatgtcaatgttacctagaggaaaaaagg

SEQ ID NO: 88801 - DNA, 3761 bp, Homo sapiens
aaatgcggagaaaggggaacccttgtacactgttggtgagaaacagccactttggagaacagtttggaggttctccaaaaaactacaaatagagctaccatatgattcagcaatccaactgctgggtatacacccaaaagaaaggaaatcagtatatcaaagagatacacgcttctatgttgactgcaggactatgtttttatactatatattgtgattttaacatatactgtgcttttagaagtgtcaaaaggagcctcaccataaagcatattctctagaaaagctgttctacaacactatcagagttcttacacattgctattacattatttccatataaatctgaagtgattatgaattgtttgaaatatgtattgtataagctatatctttttctcagaaaaaaaaattatttttctggcagttgtgttttgtttgacccacaccacattttcttttttttattctagattccgaagaggctcaatctgtaaatccttctagtgttgatgaaaatattgactctgaaacagagaaagactctctcatctgtgaaagtaaacagatacttcccagtaaaacacctcttccatctgcccttgatgagtatgagttcaaagatgatgatgatgaagaaattaataagatgattgatgataggcatattcttaggaaagaacaacgaaaagaaaatgaacctgaagcagaaaaaactcatttatttgcaaaacaggagaaagccttctatcctaaatcatttaaaagtaaaaaacaaaagccatctagggtcttatattcaagtactgaaagttctgatgaagaagctcttcagaataaaaagatttctacttcatgttccgtcatccctgaaacatcaaattctgatatgcaaaccaaaaaggaatatgtagtttcaggtgaacacaaacagaaaggcaaagttaaaagaaaattgaaaaatcagaataaaaataaagagaaccaagagctaaagcaagaaaaggaaggaaaagaaaatacaagaataacaaacttgacagtaaatactggactagattgttcagaaaagaccagagaggaggggaactttaggaaatcttttagcccaaaagatgatacttcattacatttatttcatatttccactggtaaatctcccaaacattcttgtggattaagtgaaaaacagtcaacaccactaaaacaagaacatactaaaacatgtttatcaccaggaagttctgaaatgtcattacagcctgatcttgttcggtatgataatacagaatctgaattcttgccagaaagttcaagtgtaaaatcttgtaagcataaggaaaaaagcaaacatcagaaagatttccacttagaatttggtgaaaaatcaaatgccaaaataaaggatgaagatcatagtccaacatttgaaaattcagattgcacactgaaaaaaatggataaagaaggtaaaacattaaaaaaacataaattgaagcataaagagagggaaaaagaaaagcataaaaaagaaattgaaggtgaaaaggaaaaatacaaaactaaggatagtgccaaagaactgcagaggagtgtggaatttgatagagaattttggaaagagaatttttttaaaagtgatgaaactgaagatctctttttaaatatggaacatgaatccttaacattagaaaaaaaatcaaaattggaaaaaaacatcaaagatgataaatcaaccaaggaaaagcatgtgtcaaaagagaggaactttaaagaggaacgagacaagattaaaaaggaaagcgagaaatcttttagggaggaaaaaataaaagatctaaaagaagagagagaaaacatacccacagataaagactcagaatttacttctttgggtatgagtgccattgaggaatctatagggcttcatttagtggaaaaggaaatagacattgaaaaacaagaaaagcatataaaggaaagtaaagaaaaacctgagaagcgatctcaaattaaagaaaaggacattgagaagatggaaagaaaaacctttgaaaaagaaaagaagataaaacatgagcataagtcagaaaaagacaaattagatcttagtgaatgtgttgataaaataaaagaaaaggacaagctatattcgcatcacacagaaaaatgccataaagaaggtgagaagagcaaaaatactgctgctattaaaaaaactgacgacagagagaaaagtagagaaaagatggataggaaacatgacaaagaaaagcctgaaaaagagaggcatctagcagaaagcaaagaaaagcacttgatggagaaaaaaaataaacaatcagataatagtgaatacagtaaatcagaaaaaggcaaaaataaagaaaaagacagggagctagataaaaaggaaaaatctagagataaagaaagtataaatataactaactccaaacacatacaggaagaaaaaaaatcaagtatagtagacggtaataaagcacaacatgaaaaacccttatcccttaaagaaaaaacaaaagatgaacctttgaaaactccagatggaaaagaaaaagataaaaaagataaagatatagatagatacaaagaacgagacaaacataaagataaaattcaaataaatagcttactcaaactaaaatctgaagcagataagcctaaacctaagtcatcaccagcatcaaaagatacccgacctaaagaaaagaggttagtgaatgatgatttaatgcagacaagttttgaacgaatgctaagccttaaagacctagaaatagaacagtggcacaaaaaacataaggaaaaaattaagcaaaaagaaaaggaacggttgagaaaccgaaactgtttagaacttaaaataaaagataaagaaaaaacaaagcatacaccaactgaatccaaaaataaagaacttactaggtcaaagagttcagaagtgactgatgcatataccaaggagaaacaacctaaagatgctgtaagtaacagatcacaatctgttgacaccaaaaatgtaatgactttagggaagtcatcttttgtttcagataatagcttaaacaggtctcctagatcagaaaatgaaaagccgggtctcagctccagatctgtatccatgatttctgttgctagttcagaagattcctgccatactacagtgacaaccccaaggcctccagttgagtatgactctgactttatgttagagagttcagaatcccaaatgtccttttcccagtcaccttttttgtcaattgccaaatctcctgctcttcatgaaagggaattggacagcctggctgacttgccggagcggattaaaccaccatatgcaaacagactttcaacatcccatcttaggtcatcttctgtagaagatgttaaactaattataagcgaggggagacctaccatagaagttcgaagatgtagcatgccttctgtcatttgtgaacataccaaacaattccaaacaatatcagaagagagcaatcaaggtagcttattaactgtgccaggagatactagtccttctcccaaacctgaggtattctcaaatgtgcctgaaagagacctttcaaatgtatctaacatacattccagttttgcaacttctccaactggagcttcaaacagcaagtatgtttcagctgatagaaatctcatcaagaatactgccccagtgaacactgtaatggacagtccagtgcatttagagccatctagtcagg

SEQ ID NO: 88802 - DNA, 1907 bp, Homo sapiens
gagatgcctgttgatagactagagacattaagcaccagagactttatctgcccaaattctaacatacctgatcaagaatcctctcttcagagtttttgtaattctgaaaataaggtattgaaagaaaatgctgattttttatccctgcgccagactgaactgccaggaaactcttgtgctcaggatccggcatcctttatgcctccacagcagccttgctctttccccagccaatcactttcagatgctgaatcgatttctaaacatatgtctttgtcatatgttgctaatcaagagccaggtattttacaacaaaaaaatgcagttcagattattagttctgctttagatactgataatgaatctacaaaagatacagaaaatacttttgtcctaggagatgttcaaaaaacagatgcctttgtcccagtgtactctgacagcactattcaagaagcatcaccaaactttgagaaagcttatactttacctgtgttaccatcagaaaaggactttaatggaagtgatgcctctacccagctaaatacacattatgcatttagcaaactaacttacaagtcttccagtggccatgaagttgagaatagcacaactgatactcaggtcatttcacatgaaaaagaaaacaaactggagagtttggttttaactcatttgagtaggtgtgattctgatttatgtgaaatgaatgcagggatgccaaaaggaaacctaaatgaacaagatccaaaacattgtcctgaaagtgaaaagtgtttgctttccatagaagatgaggaatctcaacaaagcattttatcaagtctggaaaaccattcacagcagtcaactcaaccagaaatgcataaatatggtcagttagttaaagtagaattagaagaaaatgccgaagatgataaaactgaaaaccaaatccctcaaagaatgactagaaacaaagcaaatacaatggcaaatcaaagcaaacagattcttgctagctgtacactattatcagaaaaagacagtgaatcctcatctcctagaggaagaataagattaactgaagatgacgatcctcaaattcaccatccacggaaaaggaaagtgtcacgtgtacctcagcctgtgcaagtgagtccctctttactacaagcaaaagagaaaactcagcaatctctggcagccattgtagattctctaaaactagatgagattcagccatacagttcagagagagcaaatccatattttgaatacttgcacataaggaaaaaaatagaagaaaaacgcaaattactgtgtagtgtgattcctcaagcacctcagtactatgacgaatatgtaacatttaacggatcatatctcctggatggaaaccccttaagcaagatttgtattcccacagtaagtaacatcatcacttgctatacacctgtaacactgcccaatagaagtataatgctagccacatacgtaatttgaagttttctagtagatagataatttcagcaaaataatctgtcagtgagtcgagatataaagctagtaacgttcttgtttctttcattccccaactttattttcccttaaagagtaagaaattttagccgaaataatatgtagtgacataggcttcaaatacaggtataactataaagaacaaatttaaattagaactttatacaaactatttcagtaaaaatcatttcaggtgaaccatattatgttgctgccttaaatcaatctgttgactttatatatgtatacatttgttgtataaatttatccaggaatttatacacatttatgttaaacacgtgtttaatgtaacaaacacatttacgtgtttaacaacataaacacatttatgtgtttaacatagacacatttatgtgtttaacata

SEQ ID NO: 88803 - DNA, 1028 bp, Homo sapiens
aaagtttgaaaacaatttctcagaccatttcatctgcttttataaaagaattaaatgtaacactcaggactttagtgtttgatatttatcatgtctgcagacagacctcactatatagataccaattgaactgctttaatctttactagtgtttcctgcatgtttataccagcttttctggttttgtgactcctccttccctccttgtctgtgagctgtcacttactgatgatctaaaatgtgtctcgctggaataacttccatagtccttctaatttgctctttgaaatttgttgtggccttagaatcaaaacatctaaactgtgctcaatgtttccaaacagaagtaacaatcagttctataactagtgctgtattatttaattcacaggacatcagaatttgtttttttatgcactaaaagggtttaattttaaaagaatagcccattattgtaaataaaacctaatattttaaactatatatatctttttaattagattacaccaccaccttcactgtcagatccacttaaagagctttttcgacaacaggaagttgtaaggatgaaactacgtttgcaacacagtattgaaagggtaagaaatgtttaaatttacacttatgctaaaaataactggtttctagcaataaattaaaatggcctataattttttattagtggatttttaaaatttagaaccattttgagaagtgatttggttttatcttgtgtttattagatggaaaaattttaagcctattttaggatagctgctcccatattataatttatgttgagtatatttttaatatgtaagtctctaataacttcttgttatttgttgaatttgtagaactatagcagtagattcctagtggaacatttggctttccaagttttggaatcattgcttggtaccagctgttttaaggcaaaagggcaaaatacttataaaggctatgcttatttgtccacgtaggtcggccttagtatgtgccttccaatggttagtcttggcgtgaaa

SEQ ID NO: 88804 - DNA, 1021 bp, Homo sapiens
gaagaaagaaaggcagctgtggaaaagtaactaaaatctactggacagctaaaggaagatgaaagttattttaacaaggtctgtttgtacagaattctcttggccttgattccctgtcactggtcacaagaatgtttctttcctcctggtttcaggagagcatctttcccatgggagttttatctctggctttcaggtagaaaaggggaggtcagagcactcttgagcctgctgacttcagattgcctttagctcaaaataatgtttatgccaaagtggcatattttggggtagcgttttctgccacccttcaagcccaaatgtctatcaactgatgaataaataaaatgtggtatatccatgcagtagaacatacttttcagccacaaaatgggataaagtactgatgcatgctacaacatggatgaaccttgaaatcattatgccaagtgaaagaagccaatcaccaaagaccacatattgcatattatgtgattccatgtatattaaatgttcaagataggtaattcatagagacaaaagttagattgttggttactaggagcatagaggaagggggtggagggagtaaggaatgactgctgatgggtagcaggtttctttttggagtgatggaaatgttctggtgatggtggaacatcttgataaatacactaaaagccactattttataccaccatacttggaaaaataatttaaaaatagagaaactggtagttttggagagagaaaatgtatttctacttttggaacactgggagttctcaaatttctcaagcctactgtgaagaaaagactactctgaaatttgggttacttagcttgtttgtttgtagagatggggtcttgccactatgcctggcctaacaaattgtttttgaataagataaaatgacttaaaatatgttggccaggtatgtgggttacacctgtaatcccagcgctttgggaggccgagaggggaggatctcttgagcccaggagatggtgaccagcctgg

SEQ ID NO: 88805 - DNA, 1015 bp, Homo sapiens
gattaagccaaggagttcgagcctgcagtgaggtatgattgcgcccgctgcactccagcctggatgacagagtgacaccctgtttctttttttttttttttttttttttttaagcagagtctggctctgtcgcccaggctggagtgcagtggcacgatctcggctcactgcaagctctgcctccctggttcatgccattctcctgcctcagcctcccgagtagctgggactacaggcgcccgccaccacacccggctaattttttgtatttttagtagagacggggtttcaccatgttagccaggatggtctcgatctcctgacctcgtgatccacccgcctcggcctcccaaagtgctaggattacaggcgtgagccaccgcgcccggccgacaccctgtttcttaaaagtaaagtaattaattaaattcattaaaaataaaaacaaattcatagcagagctggaaattgaggtgggaaactgttagacaaaaacattaagaaatttctgataagatttaaaatagatgaaaacatattggtaatcaaatacagcagagttgaggaatgcccagtatcatacaggttaaaaagagaatttaaaaaataaatgcgttttcctagaacagtataaattttcagttataaagggattttgataacttgagtaattcattttccctgccccagattttcttaatgatccagaccacctgactttagattaaattaagcttgctgagatccttttgtggatcataagcctgatgattgggttttcacactgtgtgagacaggcctctctcaaaccttgttgcattgtgcacacattacctgtctgacatgggggaagaaattcagcttgatgagataccaaaatgtgaggtgtattctcttgacagagagaaacttatgctaaaaacatttctgcatttttggtgacttatttaaatatggaactgttatccacccttttacagctggctttagagtagaaggtctcaagtagcatgcg

SEQ ID NO: 88806 - DNA, 1966 bp, Homo sapiens
tgtagtctcagctacttgggaggctgaagcaggagactcgcttgaacccaggaggcggaggttgcagtgagcccagagctcgccactgcactccagcctgggagacagagcaagactctgtctcaaaaaaaaaagaaagaaatggacttgtaattcaaatgctttttatgctcctgatgtgtccattttagttcctaaagaaactggatgagattaatttttaaacaaagcaaagttaacagaataatcaagtaactcttctcttcttttaaatagacctgtcttttaatgaggcaacaacatgaagctgcggctttaaatgctgtccagaggttagaatggcagctcaaactccaggaacttgatcctgccacctataaatctatcagcatttacgaaatccaggagttttatgttccccttgttgatgttaacgacgactttgaattgactcctatatagcagtcagtacttcctgatggtattgtcctaaactggtgatgctcaagcattatactgtggaatactgccttttgacaaaaatactcatgcctttacaattgttagtaaagttcgattatagttggttatgtagtaaacactgtcattttataaaaaatgagaattattttggatcttagatccaaacacagtttctaatagaaaactattatttatattgggaaaggtaactattgcattagagcatgttggcagactggtaggtatttaaaaagttgagaatctgctaacagcgctggaagttgttagcgctctaagtaataagataaccactagtattcaaatctctttcaggttttattaaaaaatatatatcaataaactaaaaggttcaattcctaccaaatagtttctaatgtgggagaaaaacttggcacaaaatttcttcagtttattatctgtaaattgtacagttttctttttgaaagttttaatattgtcttcctttttaataacttattttatacatattgtgcagatgtaaatcttgtaattaatggtcaaactgtataaagggattggtagtcaaaacatgtacaaagaaatacctgtaaaactgttttgtctcatgttttattggaccaaagttgtggtttgtatggagtgtagtagtagtgtgtacaggtagaaaacttttaaatacagcatgcaggtgtttcagttagcttgttttcatcaccataactgcaaagatgtggcttagttgtattgcatgcttcctataatttaactctccataattgatgcctgcagtagtgtaaggcatttcatactagtctcctctagtagacctgtgacttactgtgttggacatattatttagacttagtcatacaaagaaacttagctcttttttcatctcacagtaaagcctatttccccaggaaaaaaataaatgcctttgaatgaaaattctgaaattgtaaatgtctattttaatattcacctatgaaagaatctgtgaatatatgtaaatacgtttaataaattttattggtcatgttaaatcattgtaaaacttttttacattgcttaatgttttaagcttaatagcctttgcacttttaaaataaaaaccaagtatgcaaatcaaagatatttggtagtcaaaataagtaaaagaaatataggaatattccagtcaatctctgaaatgtttatgaaaaacaggttaatatgttgtatttttttccttgtatcaagatgcaaaacataatttgcaaaattttataattgaaataaaacttggtatgctgttttataataaattagcaatatactttaaaaaaaatccagtttctcctataacatgatgtaaattaaatattcaggaatatttcaggtctgaaatctgctgctgaacttgttagacatttttgaaaggaaaattaggttagcgtacaatttatcataaatatatgaggtaaaatttgcaaaactttcc

SEQ ID NO: 88807 - DNA, 1054 bp, Homo sapiens
actgagggtttagatatactcactctactttcacagtcaccatttctggatagtctgaggaactgtagagttctaggtccttgaagatggctatgaagccattattatacaaaattattgtttatttttgaatgtttatataatctttcattgagaatgatctttaaatgatcactcaaaagttttttgaaggccaggcatggtggtattgtctgtagtcccagataactgggaggctgaggtgggaggatcacttgaacccaggaattgaaggctgcagtgagctatgatcacaccactgtacttcagcctgggcaacagagcaagactctaaaaaagaaagaaaaagtatattgacacaaacaatgagtcttagtttatgttttgtttctcatttttatatttgtttttaccctagcacttgcctttgaattaaagttgtgtttgtttgtttagtttcctgggagttactgatcatcttctttgaagaaacatgaagttacactatgttgctgtgcttactctagccatcctgatgttcctgacatggcttccagaatcactgagctgtaacaaagcactctgtgctagtgatgtgagcaaatgcctcattcaggtaggactaagagtacttttattaatatcaaaatatattgtagagcagaaacattatgtttatatacagatatagagtgcatatatcatatagagtaagacctgagtattgggtcagggcctgaggtactgaatcatgacacacaggtctggatttttaccctcatagcaatcaatatatataggcaaggttagattcaagaagttcaatactgagtataatatcctgttgtataaacatgtcattacaaggtgatgagcactctattcagatgatttaatctgtgtaatctaattaacatagcaaagaggttcaatgaatgtatttagaaaaaaaattagctggtcaaataatagataaattgttaccctaagtatgatgtattagttgtccattgctatgtaacaaattaccccaaaacatagcaacttagtgcaa

SEQ ID NO: 88808 - DNA, 3469 bp, Homo sapiens
tttttttgtttttcttctttcttgccctgaaatcttaaatttttgtttttcagaacacatgtgtactgtggtttattttgatgactgcatgtccatacatcagtgtaaaatatcctgtgagtccatgggagcatccaaatatcgctggtttcataatgcctgctgcgagtgcattggtccagaatgtattgactatggtagtaaaactgtcaaatgtatgaactgcatgttttaaagaagacaaatgcaaaccaaagcaacttagtaaaataataggtataaaaagttattctgtaagtctgttggttgtatcttgtatcagaatcccagtaagttaagttgtaaagactttggaataagtttcttttaaaaatatgacatagccagtgatgtgtttaattatataactgttcttactgattttattgccccctagcaataagccctttcctttgaatacatgtacaactttggtcatatgagaagcaggtgcgcagagaattccttgaaagatctgaggtttttaacatgaagtctgacgtggttttcctctagcattccaaaaggtttttgctttgaaagtgttagcagaagcatgttgatgtgaattatgatttcttcatgtgctactgttagcacactgagtttttatagttgcacatcattcctcattgtgccttgttttatccattttataaatagagtagatatttgatataccactctgataactcatataaaaatatcatcataaaaagcttaatttcatcccttttatgttggttttaaaaggtaaatgcttaccatattttataattgagaactcttacatagtagaatccattctataatacatgtgttgacaaagctttagagaaagtttcctattctcttccatttcccctgcccaaagtgctgacataggcagtgatgaagaatctttaccaagattttcagggtgtacctatgaaattgctttaaatgcactgctggtgtaaataattagcaagcaaagcgtttctgtgacttcaggtaccagcttaaagagcactagggatggggaacgaatgccaaatcagactccacctagagcaccaggaaacagcttgtaccctggtagggaaatggtgttgctgaaaggggaggctgagccagtgcgagactgaacttgtgcagccttagccaagacaaagcagtgtttttcagcagacggctgatgggacaggaattgaagaagagaattgactcgtatgaacaggacagggtgaaaatgctgggaattattatgggaaacaaaactatctatgttcatattttgtaatatttcatttgttaagtttatatctggatataatgttctttttaaacaagtataatcatatcgtcggaggttaagattatgaaattttagaatctctattcaagatgatgttcactccaaatacactacagaatttagtcaacattttatataatgtttcaataaatgtttctttcaataaagatactatgtgcccttcatagtaataaaatctcaatcttaaagcatgaatctaaaacataaatatttatattacagactcaattttacaaaattactaattgctctagtgcatatttgaactacaagcaactttttaggaatacctctttatacgtctacatattttagtatataaaaatagataatgctcttggacacattttgtattattcatgatctgaatagtagttagttaaaagatcatttgtaatattatgatcaactgttataaattaaggtcttaataccttttctgctctttcaaataactctaatgaatattcaagatattttagccttttaaaaagttgagatttagctcatggatatattttttggtagggaaacattagggtctccttttcttccttttacctagaatgcctcatttaaaagtgccttgaaaacatttagctccccttcttcatgagcatctgtagagctgaaagtattctggaactttagacagaaagctgaaaggaatctgcagtctcctgctgcagttcaactctgctgtttttcagtcatttcctactgtgagtggagtgatgtttgtgtgtgtgttggcaacatgcctaatgttttcttaatgatgacaacaaatattttaaaactgcatttatcattttttaggtcttcattaaattttaaaatgtaatatctgtttcccaccccctacattaggaggataatttcttaaaccacattgttttaattgatttttcttatcttgatttctttcattagaaactatccctaaatgtaaagatcttttgccttcaaatttggcttattttttctgatttatgagggtttgaaagaaagaattcacctaaaagattccatttccagttttataatgtatttcaggttctgaataacaatatttttccaaattgaaagtaaatattccagaagttgatagcctggttaaaagttagatcctctattaccattctaagcacattcacttctatattgaagttttggtaaaaattcttttttcttttttaataaaaaattaggttattactttttttataaccagatttttaaagcactaggttttaaatcagtgggtatcataaaagccatatataaaagatcctttcttatagtaagacttgtgcttgttagcaggtttttctgttagtttttcccccataacatttaattattactaaaattgtatttacaatagtggtgccaaatcaaatggtaatttaaataaaatctattctgtgtttatgtagggtggtataaaaaagaggtcttcatttagacatgtgatttctaaaattccagaaagcaaaattgataagatgttagaaatttggaccattatttataatcagggtagcattaaaatggagaaaagaaagttttctgaaaaaatgcagtaaatataagccacatttctaaagtttatttttatgaaagcttcttttaagattttgaaatctattctgcattcccaagagtttatgtttattgtattttatatgatctacaacatataaaattgtgtatttttctttggttgtccctattaacaaaaaagtattttaataaaaaattgaaatgagtgagtcatattttttgttaacttcagcatagacataaatttgacattctgtctaaagaagatagtgtttaagtgatcagcgggccgggtgcggtgtcactttgggaggctgaggtgggcaaatcacttgatctcaggagttcaagaccagcctgggcaacatggtgaaacctcgtctttacaaaaataaaaaaattatccgggcatgttgatgagaggtgaagccacctggacttcttgtttcgagtggggacttggagaacttttctgtcttacaagaggattgtaaaatgcaccaatcagtgctctgaagctagcaagagcattgtaaaatgcaccaa

SEQ ID NO: 88809 - DNA, 2025 bp, Homo sapiens
aggagtttgagaccagcctggccaacatggtgaaaccccatctctactaaaaatacaaccattagccaggtatggtggtgggcacctgtaatcccagctactcgggaggctgaggcaggagaatcgcttgaacccgggaggcggagattgccctgagctgataccacgccactgctctccagcctgctgacatagtgagactccgtctcaaaaaataataataataaaggcaagagtccaaagtggatttttccttctgatacttaatatatgtatagttatgtgtcacataatgtttcagtcagggatagactgcatatacagaggtggttgcctaagattataataccataactgtacttttttctgtgtggaggtatgtttatataccaagtattcagtacagtaacatgctgtacaggtttgtagcctaggagtaataggccataccatatagcctaggtgtatagtaggctctaccatccgggtgaaaataatttgttaattttcctactttcttgtcattaatcgtttttaaaaacttttttttttttttttttagacagggtcttgtgctgttgcccaggctggtgccatcataactcactatggcctcgacctcctgggctcaagtaattcttctgcctcagccctcccgagtagctgggactatagacacatgccaccacactcagctaatttttttttttttttgaaatggagtctcgctctgtcaccaggctggattgcagtggcgtgatctcatctcactgcaacctctgcctcccaggttcaagtgattctcctgcctcagcctcccaggtgtctgggactgcaggcgcccaccaccacgcccggctaatttttgtatttttagtagagatggggtttcaccatgttggccaagatggtctcgatctcttgacctagtgatctgcccgtctcggccttccaaagtgatgggattaccaccatgcctggcccacgtttggctaattttttattttctgtagagacagggtcttatgatgttgccaaggctgatcttgaattcctgggctcaagcagttcttccaccttggcctcccaaagtgttaggattataggcactagccactccacccggtcgattaatcttttaatagttgtcgtcagcatgaaaagggcattcatacattcatattcattataatgaatttgagaatttcacattttctaaactgattataccggcatatcttgtctgaagcatgtgagtagggcagaagctaaaataaagattaagtctcacggtatagaagaagggtacagaaaataacccaaataaagagtaaaatcttgattagagtacaagcctaaacaaagttaatagatatgaaaggattaattatacagctactaaattggataataattgctctgtggaatgtacatgagaaattatttttgagcctgtatatgtgagtagtttgcatttaatgggtcccggtcataaacctcaaacatattatcatgagaagaatttcactgttgatatgaaatcttttaaactttatctgctcagtctgaaggattatttctgtcccatttcagcttataaatgtaaaaaaagagaatgtgctcctcatatctaatgagctgctggtagaccacacttcacacatgttaactgttgatggagagattgaacctgtccagctttacacactgggagaggaccctaggaagctggagaggacctaggaagctggtgtctgatttcctctggacttcaccctatgtgcttcttcctttgctttttttgttttgtattctttctctatggtagatcttagctgtgagtacaaactatatgctgagttatgtgaatccttctagcaaatcaccagtcctggggggtacagcccccaacacagtaataaatgacttaaaaaggaaaacactattccctgcctcatccttgcacctctctcagtcttaggtttttttttttcttttaggtgtttcttttgctatttgtttcct

SEQ ID NO: 88810 - DNA, 1148 bp, Homo sapiens
tctggtctcaagtatttcagataagggatactcaacccgtagtatgttagaggacacgactcacgtgatgaaaggatgctcggtctactttagaaaaggattcattccattagccctctatgtagagcctttcaggtgtatctctaatgtttggtttgcctgaattccacttacacacatatgtaatataaaccctgtttcccctcctaatattgtaaggatggtaactgctatctatttgtccccctcttgtggtcaagagatgtcactgcaacatctctttttgagaagaaacccatttctttgctgggagtgcccaggaggaattggccaagaagtgaaaagctagattagctggtgccaggtggcaccgttttttggttctgtttttagaaagcatatggacagtttgacattaaacaaacatataacttatactgtctctgtttctttggcagctgaaggctatgcagcctttcaggaagatagctctggagatgaggcagaaagtccttctaaaatgaagaggtccaagggaatccatgttttcaagaagcccagcttttctaaaaagaaggaaaaggattttaaaataaaagagaaacccaaagaagaaaagcataaagaagaaaagcacaaagaagaaaaacataaagagaagaagtcaaaagacttgacagcagctgatgttgttaaacagtggaaggaaaagaagaaaaagaaaaagccaattcaggagccagaggtgcctcagattgatgttccaaatctcaaacccatttttggaattcctttggctgatgcagtagagaggaccatgatgtatgatggcattcggctgccagccgttttccgtgaatgtatagattacgtagagaagtatggcatgaagtgtgaaggcatctacagagtatcaggtactgggaatgtgcacttcacttgatggtttttaataataacttcagtttcatttttcgaaggaagaaaaattattgtgaggaaaatttggcctggatcctaagccttattcatttccttgatcctaccagttgcacaaaaatccacccctctccccagcctttctttggtgttctggcatttgtttttttaatatttccttccattaggaggatttcacgttagttgtt

SEQ ID NO: 88811 - DNA, 1081 bp, Homo sapiens
attgaatttgagtttataactccttagtattatataaatatatttaaacaaatatttgatttttatgaataattggctaggcatggtagctcacgcctgtaatcccggcactttgggaagccgaggtgggcagatcacgaggtcaggagattgagaccatcctggccaacatggcgaatccctgtctgtactaaaatacaaaaaattagccaggagtggtggcgcacgcctgtagtcccagctgcttgggaggctgaggcaggagaatagcttgaacccgggaggcaggggttgcagtgagcaaagatcgcgccactgcactccagcctggcaacagagcaagattctgtctcaaaaaaaaaaaaaataaataaataataataataatatactgaattgagttttaaacatttaaacattaataacataagttgcttctctcacatggtcttaatagccatgaattagttttgttttaggtaaaagtttttctgaaaattttccacagctttgttcaaaggattctttttgtctctgacctacttttaatgtctgcattttttttggaaattcagagtcatagaactcttctctgtgtgtaaaagcattcagacagagctgctgcccatccttgcaacagctaggggctgaactcctgctctgctgagttttgggtttattctctaacctgtggcaatgtgctgtagtcagcccgacttatgctactgtcatggacagtgctaataataatactgccttttgctggagatgttagttctcacttatgcattttaagaccttttgctggaagtgttagttcttgcttatctaattttaaacgaatatgaaagacaatttaagtgattttgtacattttaatttactcatctacattttcttgtattttttggattaaagtgtacctgtatgctctttctttctgtggaacacttcatttgtagtgtccaatttttaaaaagaaaacattttgataacagtttcagagtaatgacaaaccaaacacacattctaattgtctacttgtacaatttgttgggtaggtactatagggggaagaatt

SEQ ID NO: 88812 - DNA, 1051 bp, Homo sapiens
gggtgtgagccactgcgcccagccaagtgtagtcttacatgttagtgtttacagaggaactgtacgacctttgtgcagataaatatttcataacaagaggttcgttattggtcaggttgctgttctcatctccttagcaagggtggggataatggtaaagaaaacttgtgtgtttgattttcttttctcagtatcttctctcttctgaatttgaatgttttaaggaattaaatcaaaggtggatgagctaaaagcagcctatgaccgggaggagtctacaaacttggaagactatgagcctaacactgtagccagtttgctgaagcagtatttgcgagaccttccagagaatttgcttaccaaagagcttatgcccagatttgaagaggcttgtgggaggaccacggagactgagaaagtgcaggaattccagcgtttactcaaagaactgccagaatgtaactatcttctgatttcttggctcattgtgcacatggaccatgtcattgcaaaggaactggaaacaaaaatgaatatacagaacatttctatagtgctcagcccaactgtgcaggtacatggtcttctctacacatataccctctggtactgacattggggaactggggtaattttctattgctgagtcacatgtaaagcagtgaacttgaggagataggtaatggattagcttgaatacgggtcttttcctttcataatttggacagtgtcaatgtataagataacatacttgccctttagcttgtagtgatgtaatttgaatgcggtacagtctttgatgtgggtttataaacaagacctgatgacaaggatccttcattaggggaggaggagcccatggcatctacagttatagagttcgtgtgtagaattttagagatcccagttatttaatcaatagcattattgcttcgttagatcacagacacacatcaaactcaggcacaaagggacctgtcattaattgtttggtcaaagatttagcctgaggatttcattcataaggatggatcctagagagacatgttat

SEQ ID NO: 88813 - DNA, 1082 bp, Homo sapiens
cctgtaatcccagcttaccggggaggctgaggcaggaaaatcgcttgaacccgtgaggtggaggttgcagtgagctgagattgtgccactgcactctagcctgggctacagagcgaggctccatctcaaaaaagcaccaccaccgccaccaacaacaaaaaacacacaaaaaataagatgtttaaatcagttaatactgtgatagaaaaaataaacaaatggatggcatcaacttctctatccttttcttgactttttttcccttcagatctttctggtgcttgaatacatgatttaactcatattttaccattttcttcttaaattggctattaactagcaaagactgtgttgtcattactgggtagaattttctttatgtgtccaggattaaaggatatattatgtaatagacacaaataagtgaaatagaatgatagttttaatggttttcttgtaaatctttttttcttagatcagcaatcgagtcctgtatgtgtttttcacacatgtgcaagaactctttggaaatgtggtactaaagcaagtgatgaaacctctgcgatggtctaacatggccacgatgcccacgctgccagagacccaggcgggcatcaaggaggagatcaggagacaggtgtgtgcaccctgcctgccacagcctgcctctgcattggctgttgtggagtccagtggtgatgggctcttgtttcctgaacactttctgtgtgtctggagctatgttaggcacactgaagtcagaaattcccatctggtactgtttcatgccaaataagtcagaataccatggtggaaagagcatagtttttggaatcaaaacacctggctttaaattcttgctctgatctagttaactgattttaggcaaattcttaaccaccttaagcactggtgttcttgctttaaaatggatcctcttataggattgatgtgaagattaccccaaatgagataatatatgaaacatgccaggcacgttgtaaatagtctaaagatgtttgccttttcttgacaaggttgctgtcatcagccatattttatagataagaatattaaaattc

SEQ ID NO: 88814 - DNA, 1092 bp, Homo sapiens
agaatattataatgtcacttgaagtgaacttctctggtgggacatttattcactaaaatgtttctagtcctatattattgatattgcagcctggtgtcagtcacatgtttcagtgtaatctagaaagtttttttttttttttttttttgagacaggatcttgctctgtcacccaggctggagtgcagtggcacgataatggctcactgtagcctcgacctcctgggctcaagggatcctcctacctcagcctcctgagtagctgggactacaggtgtgcgccaccatgctcggctcattttttattgtttgtagaaatagggtcttgttatgctgcccagactggtctcaaacttctgggctcaagcagtcctcccaccccccaaagtgctaggattataggcataagccaccatgcctggcctagaaagttttgttttaattaaaaatgattttactaaaaaatttgtcatttcctgcttggttatacctgtaaacagggctttctatggatgaaaaacaggctggatggtgacacacctttggggactgctggggaatttaaggcatttagaattagtcagctctttggaaatgtagtgatgagggtcacctggaaggccttgaagatcaggagagattctatttatgtaataataataagagtggcctgcaatacctgatgagtttagggtatgccagtcagacttttgagttccctcttgtttagtgtgtgttgcttggttctgggactgtgagtgtaccagccacagcaatggtaaaatcccagatctctggatcaccttaaaatccacattgcagatcaactgcagcatctaaacagcacatccaaggaacattagttagcccttgcctgaattggggaacatgatagtaggtctctgttgtggttgtgttaaagagacaaagacaacctgaatacttctgtttctttgaggttagagatttgtattaatgtggaggatagctttgtcacacggggcacattcatgggacttttacacgtgcgctccaggatatgtaatgtagcagaagccctctgcgtatttttcttccttctttttcctagctc

SEQ ID NO: 88815 - DNA, 1042 bp, Homo sapiens
tctggagtccgtgagactgaaaggacccgtgcatcttactgtaacccgggggccaggccggctctctcgctgtacattctgtaaaggtgtcttctcttctcagactcttcctctgtcacacgtctgactccttcacgtcaggctcaggttccatgggaggacgaagcagtggacgcattgtgggctttagggacagatgagttttccagatagtgtcagcttatttgaagattaattttctttgttaacttaaaataactattttaacccttgagtggcttctttttaaaccaaaaaccgtctttctttgcttttttatcacagcagaatcaggatctctttctcattcaaggggggaaccaccccaggtcagcgctgcgcctgctgtggccgccgcgagccacgccctctgggatctctggtaccgtcactcttgcttgtgccttccacaccttctcggtgcagatccctatgggggagctgcctcacgttctctgactggtcagagcagcgcctggtgggtgttccctggcccactctcctctctccttctgcagttctaaaccacagtctataagcccgagtcaccaggacggcctgtctggccacagacaggggctgcctgtggagcctgcccaccggcccccggcagtgcagtccagcggggaggaggctgcccgttcctgccagttcctcactgcggggaccagcaaaggccttctcactgggttggtcaaaggtagtcaccttggcctggtgcatccacagaggatgttgttcaaaccagaaatcttttaaacgactgaccttccttaaaaacagaatgactccgattgcttgcttgggctagaatgtacacgtctccttgcctgaataagccatatatatgctcttaaacaaaagtttgaaattatccatatcatctcagtgaacctactggtggactcccaattgacaagattgagcaatagaaaaaaattcctttcctttgaatgatagctgtgattcaccccaccccattttcttgtttctggtccatccg

SEQ ID NO: 88816 - DNA, 1364 bp, Homo sapiens
tgctttctcttcattaggcaagagacagatgccccatagtatttgttttgttggaaattataatctcttcaagattaaaggtggtttatttattttaatcgacccccccgccgcctgccgcccaaaacacctcataaatatagttgcacggatgaatgaagcacagaaagaagtttgtagtagatgtcaaagaataaggataaatgaatatttttttttctcctttttttttttttgtagttggtgtttggaagcatttttctttcactgctacttaatggctaagaagtgtgatgttttcatctatttattaatttaatattccttagctgtcattgaatatcatgagatttagtcttataaaaacaagataaatctcataactctttttattctggcactttttcttcctataacaaatcagtttggattactgtttatgtttcagtgtggcttgtttgtacttgtagaaatacccagtttaactgtttacactcgtacttgacggaactctgaagtgttccgttggactggtttcatctgtcctatgcacatgtcatttccagactatttcttggcctctgccagctgccaccaggaggctgtggagcagaccatcatggctcttcagatggaccgtgacagcgatgtcaagtattttgcaagcatccaccctgccagtaccaaaatctccgaagatgccatgagcacagcgtcctcaacctactagaaggcttgaatctcggtgtctttcctgcttccatgagagccgaggttcagtgggcattcgccacgcatgtgacctgggatagctttcgggggaggagagaccttcctctcctgcggacttcattgcaggtgcaagttgcctacacccaataccagggatttcaagagtcaagagaaagtacagtaaacactattatcttatcttgactttaaggggaaataatttctcagaggattataattgtcaccgaagccttaaatccttctgtcttcctgactgaatgaaacttgaattggcagagcattttccttatggaagggatgagattcccagagacctgcattgctttctcctggttttatttaacaatcgacaaatgaaattcttacagcctgaaggcagacgtgtgcccagatgtgaaagagaccttcagtatcagccctaactcttctctcccaggaaggacttgctgggctctgtggccagctgtccagcccagccctgtgtgtgaatcgtttgtgacgtgtgcaaatgggaaaggaggggtttttacatctcctaaaggacctgatgccaacacaagtaggattgacttaaactcttaagcgcagcatattgctgtacacatttacag

SEQ ID NO: 88817 - DNA, 2189 bp, Homo sapiens
actgtgacaagaatctttgtaattgccattgttttatgttggcagggtttgtgtgactgctcttctgctaaaatagcttagtaagtaagacttgccagtttgattcatgcactaccaaaacatagttaacgtttactgaaattgactccttttaataagccggaggcagctccagcaactagatagcatttctcttttcatactaacgcagaataatgtacagtagcagataaacatttttaatctcatgaaagcatattagttttctactttttctcttgaaggactaatgatttaccacagtagaaatttttttccagctttttgattgcagtgtcaaaaaagtatatatttcattgataacgtacagtgcaaatggagaacagccttgtaagaatattgcaattgtgtttctcactttgtccatttccttattttgcctgtagcacaagtggaagtgctgtccgctgcactacgtgcttccagcctggatgcacatgaagagaccatcagtatagaaaagagaagtgatttgcaagatgaactggatataaatgagctaccaaattgtaaaataaatcaagaagattctgtgcctttaatcagcgatgctgttgaggtaacaaactcagtaaagtgtttaccaaatgagagtagtttgaatcagaagtctttcattggggaatagttgtagctaatcacttttagtttgtatgttctgtttgttgctgattttttagctcttcgttttgcataaagtaattgttttcatcacatcctgtcctcgtgacattagtgtcatatgaaatgcctggaaaagtaaatcccacttctgtctatatgaccatttagtagactcaatgttaatgtagctcactgcagtgaaatagtcttactggaaacaaagccctttatcaagaataattaactcttcccttttctttttggagaggtgctttgtttctgatcggaccatttcactgcagcaagcaacacagtattctgagcagaagatcgggacttgaggccatgttgcggagggccagtgacattatctggactctggagtgtgagggtgggtactgatcctagcatcatcttcactgtgtacttgtagctgttctctatgatccttccctaatttcctgctgcatctccatcaagccagcattatttggtatcagtgctgcttagccattgtttatacaaatggggagaaggaatgcaccaccgattgccagaatcgcatggtcacagatcatagtggcttgaatgagaagctcaggaaagagtacctgcacacactggggatggcaggagggttcttagagctttagtgcatttctgttttgatttctgttggatggcatgtggtatagttagaaatctgtataataccactgctttggattgaagccctgactatttattggagatttgaatagtattaatatatctgcattttagaaggtgtttatgttgttgttgttgttactgtttttggctgttaacatatatataatttgtgaaattagatattaacagccaagaatagaaatagaagaaaaactgcatatgacactccatggtctctaaaacaatggaccaaaagaatcctctcagtactatttcataaataagctaatttgagctgtttggaccatttcaaaattactttcaaatattgtttttaattactctaatttttctggaattggttttcgtacacttgacaacctattcagcaagttagatttaaagtagggtaggttcttaggtatgtttataagcttttaaaaacatgaggaatttatatgtttattacttttggcagtcttgaaaggtaagtaacttagtaagatagcttaaatgaagatgtacagacaggacagctctttaagtagttattttttcctaacagaatatggactccactcttcactatattcacagcgattcagacttgagcaacaatagcagttttagccctgatgaggaaaggagaactaaagtacaagtaagtgaccaaaaaatgtgttcttttgtgggtgtgttcctaattcctcttttagagcccatttctgacctaatttgccccttctttatgatgagtgttctaaaaattgactagtgtgtcatattttccataaggaaatcgaagtagtagagagaggaacatggaagcacaa

SEQ ID NO: 88818 - DNA, 1026 bp, Homo sapiens
ttcccaccaaataaaacaataaaaggaccagagatcaagaagccccagaggatgtacaagtcaggccagaggatactccttcagatctcagtgttagtaattccagtgtcatactggaaaacacgatggaagaccatgctgctgaggcatccgggaagcctctaggtgaaattagtgttccactggacagctctttactttgtactttgtcctcagaatctcaccaggaagcagctagtaatgagaatgataaaaaacctggtaactacaaatctatgttacgaccagaggttggcaccacttcacaagattcagctctcttagatcaggaattgtataactccttccatttctggaggactcctcttcctgaaatagatctagacatagagcttgaacagaactctgggggaaaacccagcccagagggaccagaggaagaatctgagggccctgtgcccagttctccaaacatcaccatggccaccagaaaggaactggaagaaatgatagaaaatctagagccccacattgatgatccagatgttaaaggtatggaagtcaatcaagttatttattctgaaattgattaaaaatattagtgtctatcttaaaaaaatttcatttcagaaaaaattgtcatttaataatgtattatggactgggcacagtgactcatacctataataccagcactttgagaggttgagacaggaggatcacttgagaccaggaggttgagaccagtctgggcaacatagtaagaccccatctctacaaaaaaataaaaaattagccgggcatggtggcacatgcttgtagtcctagcaacttgggaaactgaggtgggagatcgtttgagcttaggaggttgaggctgcactgagctgtaattgtgcctaagttcaaatggtgtcaaaggatcatgcagcagcttgctctgatagttctccagcctgggcaacagagtaagaccctgtctattaaaaaaagaaaaaggtagtataaccatcattatcatgtatt

SEQ ID NO: 88819 - DNA, 1097 bp, Homo sapiens
gaaacatttactatcactttattactctttgaagcatttattgattccaaacatctgacttacacatcagatctttcactcaccctggatcaggctgttaatgcttctttgaaagtgctgataaagcctacttctcagaagcagagttgaaatactcaaatctgcattttaaaagtatgtaaaataagcattcgttatcacattgttctctgaatgcaccatgttctcttaattctccctgtttttgtacttgctgctctctgggaagcttcttgttccatccataccctcgtttaacaaagtgctgtcttagatgcactgagttgtccaggaagtacagagcttttgtcttcatcatcagtagcgctgtaatgagagcactattttaatcctatccttttggctacatattggcatctatcatccagtagcctcccggccatgcagtgtggcgtccagctcctccctttgtctccgctgggcctggcccgttggtgcacatattaatcctgaatgaattattctagggaaatatggatttgacctcaaaaatctgaagtaactaaaccacttttgctggatttttccagtttagcttaatgctaactatatgaaaaaaaattattagcacaaatttggaaatatttcatgaatgctaaaacttcattgagttaattcacagtacttggaaggtatcctggagcgtgtttgcttttatctcaggatacaatacctctttagccagatgttctacaagtcattttctccttgaaatacctgtaattaattttctaggcccatagtctctactaaggaactctgaagatattaattataaacttatgtaggcacaaaaagacacttaagattcctccttaagtaggtagtttctggactgtcctctggtgctcttgatacctacgtctcttaggagacaggataattcccattatacagagtcacaaagggcctcaattttcaaaaaaaaatttgtcttgtacaatagcatttcaaagtctgacaattaggaatatcagaattttagcattgaacagcttgattttgtattgactattatactttaccaggaaaaatta

SEQ ID NO: 88820 - DNA, 2115 bp, Homo sapiens
ctcactacagacttagcctcatgggttcacgcgcttcttccacctcaggccctgccgagtagctgggaccacaggcatgcgccaccacgccctgctaactttggtattttttgtagagactggatttcgccatgttgcccaggctggtctcaaactgctggactcaagcgatctgcccagctcagcctcccagagtgctgggattacaggcatgagccactgcgcccagccagagaaaatagcttgtaagaatttttcagtcctagctaaagttctgaatctgggcttcctttagaaaagcttcattattatcctaaacatacttcggcatttgaaagtagattattaaatatacataatgtgtgcgtatataattctttttcaaaatgattcctttattattgtcctttttatcttcctaggttcgccaagcagcttttcagtctctgggacctttcatatctacttttgctaatccatctagctcaggccagtattttaaagaagaaagcaaaagttcagaagagatgtcagtagaaaacaaaaataggtataattttgaaaccattttctaattttaaaaccttgttttctaattttactgcttttaaacattatttccactattctgcaacaaatgttattttttgatagtttgctatttctcttgaatataaaaattggtgaatatttttatagagctttactttaagcgcatttgtttgttaagtatctctttggttggttacatattgaatgagtagatgcatgtaacacaattagctagatgcctcgcacataggaaactctaaatggtagattatgacttttaaaaaatgtttatttagtacattatttagtcaatcattcattgatatctacaatatacagggtaattgttacacactgtgtagtatttgggtttttttaaatttgtttttaaggagtaaaacttaatttaggaatatgttttattgtccttttctgtcaaataatttagttgcgcatcttggattctttgtcaatggtgattgtaatctgtcagttaaaggagaaagccagtatattagccagtatatcagttttaagtatatcagtctcataaggaaaccaaagttttaaataaagcttaaagagtcggctgtgatttttatttttaaatgtttttgcattgaaaattttctattaaatttaaattttaaaaatttattataatatatatttaggggaaaaactaattcaagcctaacttactagtatgcgggaaatgtacacaaacttttacagttatgcacttgaagtaattttagtacaaatatttgaaacagtccctgctataatgcttgagttaccatagtgtcttttccctcccttgtcatgatgctaatggacattttcttctgtaggtcttgatactgtgctatttgctttcttggtgttttgatttggcagttcttctttcttctctgctgccttgttttacctttttgcccgttctcctactgtcctgctgaatagccaaacaaacctgaggtactgttttttgtaaaggaagaaaatcactcaaacctgtcttcctagcaagcaaagtctgtcagtttttttgaaaacaggtgctgccaggactttgacaaaagtgatgatggtgggtggggaatgttatctatttttcatttttgaaatcagcatacttaaaaaattacctgtttatactgaagactgttacataacttctgttttaaaatctgaaatgggtctagtaagaaactataaatttgcagagaactgtataggacgagctggtaaactttcttctgtttcacaactactcactcggcctttgcagtgtataagcagccgtagacattacataaatggacaagcttggctgtgttccagtaaaacttcactgacctcaacagtgtgcctatcaaggccatgtttgccgcctaccggtgtgtagcattactgcaatagctatttaaaggtagttcaattccttgattcttcttccattgtaatgaggtatgtcttaatgtccaggcaatactacttgtattgctgatcttcagtaatattagagcttattaaattatgttaatgatatggtagggg

SEQ ID NO: 88821 - DNA, 1138 bp, Homo sapiens
ctgacctcaggtgatccacctgccttggcctcccaaagtgctaggattacaggtgtgagccaccacgcccagcctcagtgttttaaatgttggattgtcttaaaaagtaggatctattagtatttatactcaacaattttcaataaatcacatctaatttactgtctattcctaaaagtataaaaaataatgtatcttaaattataaatatataacatataataatatatcttaaattttaagttatttcttatgagtcaaaattatgtttgctttaaaacggacagaaatgtattatttcacaaaagtgataatcaaaaccctacccaacatgaaagatcactgataaattaataaaaagtgctgataatttggtccgtcggatttctggctatgcaaaagcatactggattgtcttatgcaatatttctggctatgcaaaagcactcccaacaatcatagcttaaatgttttacaagagcttgcccctgaacttaattattttgcataagagatggcttcagaaactctttagatatggtgacttatacatcaagtataggcatcttgtgtactatttaaaactaacttgctatagatttaatatgtcatcaacattcttgagggttgcaataaaattaaaggttcaattgaataagtaagaattgatttgcttaacagaaatggaagaggtgaaaacagatcaatggttctgaaacatatccatatttttaataaatatcaaaaagataattcaaatgcccagattacagatatttaaactcctaaattcaaaattatctttctggtttatattcatggaattgtgttaataaaactttggagtaaatgtgtgcatttcaaactttatgtactactttgtaacacacactgtttactcctttatatctgcaatacttaccaacatttcttcagtagcttgctggccaactacactgcaaatatctccaaaattggcagcacagacctgacaacaaaagcatcattgacatttcaaaatattacacataaggttcttctaagataatcttttaaatatcatgtatcagtacattaaccactagaactatgttcttaaacagcagaaaaaaaacgacaaaaaaatacctttcgaacg

SEQ ID NO: 88822 - DNA, 2221 bp, Homo sapiens
ttttagctttcttctattaagtgaagttagataccagtttcattagctttatcttccacattgcaggactaactatattggtgcttgactttttgtgtgcctattcacaagttgttagtgtcttgattgaacatgttctcaagactggtcactttcctgcatactgagtttctgtagcctctgacctttgtgcttttagagccaagtagaactttgtgcttatagagccaagtagaacatatctgtaggaaaaggagaggaggtatcttttagttatttgtggcttctggattgattctgagagtctcttgtgattttttttttgtaccattccagaaacagatttgtactgcttcagacaggcaaggggtacattttagtttcaaagtgttataaggagtatttctgatgtctctgatagttggtgtggatgactacagctcagagtctgatgtgattattataccttcagccctggactttgtctcacaagatgaaatgttgacgcccctggggagattggacaagtatgctgcaagtgagaacatatttaacaggtatgtgcatattctttttgttaaagtggaagtggaagggtggttttattaacttcagtagggaaaatgaaagtatccactttaaaggaggtattattaacaggcacaatctgagtcaccaagttttattcataatcacagcatgagcagttttgtacttgtttattctttgatcctagtaagcatacaacatgctttctttgcaaaaaaaaaaattaccattaattaccattgcttttctgccactggacataattttggtattcatataaattgcttattgggaagtacattattccttcaacacatgatgttgtatacctgctgtatgacgggtgatgctcaagatcattgggtcacacagcagtgaccaagagccagcactcttcctactgcattgtgtttgtccagccatgatcccagaccacctatatcacacttttctgggaaatcaaaaagtcttggttcagattttttgggtatagctatgcaaaactcatactactaaaaatatgtaagggtaacattttgtataatgaatgagtgtgttttttcattgtgataattgaaggacaactgaaatgaatttttggtgactttttaccaaatcagttagataaagattaaaaaaaaatgttgtaaatattcagtctcatcttgttaaaataaaatcaatactgccgtttgccacttaggaaattatagacctaatatatgttttaataatgtaataagaaaaaattttcttaaaaaatatacagattttgtcttttaaaattctagatatcggccaggtgcagtgactcatgcctgtaatcccagcactttgggaggccaaggcaggtggattgcttgagcccgggagtttgagaccagcctgggcaacatggtgaaacagcatctctactaaagatatttaaaaattagccaggtgtggtggtgcatgcctgtagtctcagctactcaggaggctgaggtgggaggattacctgagccagggaagtcaatgctgcagttagccgtgatcacaccattacactccggcctgggcaacaggaatgaggccctgtctcaaaaaattaaaattctggatattagctattgatgccattgaacatacataattttgttttttttgtgtagacaaatggtggcccggagtttgctcgataccttgagggaagtctgcgatgatgaaagagattgtattgctgttttggaaagaattagcagattggccgatgattcaggtatatgtggagaaagtgaatttactctattctagaaaggcttctttgatcaaatttgtgtttctaaaaactaatgaacaagttaatgtgatatgagatagctttaaaatatttcctaagtaattatcaaacccatcagtgacaacaaaagtaaaatttgttactgagacctggacattttacagtgggctcatttagtttaattttagaaatttctcatcaaaacaaatctaaaaacattgttttgcatcatgtatagtaatattttaggattaataaaaatatatagaataattttgaatacattaaaagagatggaggaggctgtaaattattttaggcaactatagaaagcttgctttctgtgtggtttctcacttgcaaaaaaatgttgattaaccatttgtaaaacta

SEQ ID NO: 88823 - DNA, 1582 bp, Homo sapiens
ggtacttaaagatgctgccaatgctcgcaactaaattttttttttttttgagatggagtttcactcttgttgcccaggctggagtgcaaaatggcgcgatctcggctcaccgcaacctctgcctcccgggttcaagtgattctcctgcctcagcctcccaagtaactgggattacaggcgtgtgccaccacgcctggctaattttgtacttttagtagagacggggtttctccatgttgatcaggctggtctcgaactcccgacctcaggtgatccacctgccttggcctcccaaagtgctgggattacaggcgtgagccactgcgcccggctgcaactaactttttaaagattctgtttcctgtgcattttaatttaggataaaacagacattgaaggcacaatagttatttgcatattcataatttggttgaaggctttgttagagtaattgcttatttttctcagttactaaagtttttacaggtgatacctttacccagaatattcaggaacaaaggacttttggacatatggccagttgaaggaccacttcccatctcttgtgaagggagaaagaatgagggggaacactgggccatggtgcctccttagagagcaagatggttggtaaaggactgagacagctgtcacatcctggagaagctggagaaggtagaggacccaaaggtagaggaacggagcttgggctgcccttataacacggttgttatctcgtgagcctgagtttctctgtctatggtaaaactccagagtatggagcccaacctccagagtagttgtaaacaagtcctactacttcagccaagctaggtgtaagttggcccttgggatgggaagaaattgttttctggtcaagctctagaatcttggttgaccttcctaaatgcagaacctggactatgagggaagagacagtaagttctgttgtgcagatgatctaggaaaggacctagctggagtctaggacttgaaagaggggcattgccagacattgctaagagtctcaggtctttcgatttgatttgttttaatcccgtctctgtacagaggcacagagtcggggaaaaggttggtcaaagactgacttgactgataacctttggaggaaaaaaaatcctaatgagggaaaaatggatggtatttgtgtgtgtgtgtgtgtgtgtgtgtgtgtacacataatttcattgaaggagtttcattagaacttaaacttttatcaagtaacttataaaggtaagtaaatgaaatcattatcaggtactcttaaatttaggagaataggctgggtgcagtggctcatgcctgtaatcccagcactttgggaggccgaggtgggcggatcacgaggtcaggagatcgagaccatcctggccaacatggtgaaatgtctactgaaatacaaaaaaaaattaactgggcgtggtggcgtgcacctgtagtcgcagctgctcaggaggctgaggcaggggagttgcttgaacccaggaggtagaggttgcagtgagccaagattgtgctactgcactccagcctggcgacagagcaagactccgtctca

SEQ ID NO: 88824 - DNA, 1004 bp, Homo sapiens
ctggtgtccccttcccccgtcactctaggaaggaagaggctcgcgcgggaggtgtgtttccttagagtcgctcttccaggagcgcccgggggtcagcctgggccccggctagccgtctgggctccccgacccggttttggattgtttgaggatgacatacctgtcattttactttggctggtagcagttttcagatgctcccgatttgattagtggattacgagaaggttagaaggtgtggcctccgcaggaattactaggtttggagagcatatttctttaatgcggatgttcagaaatcacccagccctccttcagtgttaacagtgcagctttcctttgaggtactgaagtttttaaagagttgacgcttttatttttaaaaagacaaagtttctgacatttcctgatggcgacggaattgatatttagaaaggaatttttcgtcttatatgtacttttctaagcctcagaaaataatttgggtcacgatagaaaagacaaaagagttaagcaggtttgtattgaaagaagtgacaaattgcagttaacttaaaatagtttctattcttgctaatcttccaaaatagcgacccatcaaaaaatcaataggttttgagatgcattttaaaaatgcagagtgtgcaaaatatataagcgaagatcatgggatacataagggaccaagaaattgttctgagttgagatgataaccatagtaggattgtggtctgtttagtggaaagcctaccggatgctgagattgactgtctagtacctgtataagtaatttcagagatggctgcagtttgaaattactcttttaaatactctgtagttaatccttagcattgtctaatgtggttcccttactcagagtaaacttaatttttagattcctggttgttttgagtaaagtaagggggatttactatttagatggattatctgaaacgagtaatttatctttaaagtaaatgaaccacatccaaacttttgctaag

SEQ ID NO: 88825 - DNA, 1009 bp, Homo sapiens
gtgaatttctaactcctttgtcattctgagtgtgtcagctgaattcacataagggcattcaccaagggaggaagagaaaggcctttagttttaattattttatagttgagaaaattagacacatactcggggttacggggtctattctgatttttattactcctagaaatttcatacagattataatctgtctatcttgttagtaatatctgactgaattttttggaatagctatgtgtagaacccattttattacacagatttaggaatctcagaggatctgattccttagtctcttaaatcttcagtggcattaaatgccaacacattgtccttggtcaagactacaacgtagaaaggaacaagctaattaactacttagaattccctctcctaagagaccacatcgccaaagtggcaccatgacacagcttggtgttttgttggtcactttaggagaacaccattttggaggccttgggtggagctggagatagagccatggaggtagaatcgtgtcggaaaacctgggtttagccccattttgtacttgggcgtttgagctaatcgcttaagtcacgtaaaacaacaagactaataaagtctgggatacagactttaacacctcaagtgctgccaaaagtatttagaagacaaagcgaatcataggcacccttcaccgagcacctcctagacatcaagaaccatgctaggttccctacattcttcatttaatgccaataaccccacgaggcagttatcaccttcattctacaaatgggccccactcctaccaattaactggctgaatcaggatctgaccccgggcctgccaacgctcccgctggtggattgcccgccttgtcagctcgagttggcaggacgtgggagtaaaaacccggcgccccagccttcaccgtgctgcacgaggaagctggctaggcaggcatgactttgtcagtcaaccatcccgcagccgggccctgggctttgttagcagccacttggc

SEQ ID NO: 88826 - DNA, 1052 bp, Homo sapiens
tagctttgtatgattctaaatcccaatgcacataataacttaactgtgccacaaaccagttatttttgttattgttatatgttacaaattatttgttcaaaactggcatgtagtagggagagcaccactggtctgatagaatggactttttaaaaataaggggtcttgtattaaaaacataatttaataattttattgaataatttgaaccaggtttgaagcatttccgtggaaggaaaacatgcaaattcccacaatgttagggtcctggtcaggttctttggagttacaggtaactgtttgtcatttctgggaatgtatgagatgtgcagaggcaaagtccagtatcagagatggtctcaccttgatggcagtaaaaggctcaaatgcgtttataataataccaacagcagcagcgacaacaatatatttgtttagcactttacagtttacagtgaactgtcctcatgttatttcatttagtcctcaaataactctatgtggttggctttttgtcttcgatctgcaggtgtgaaggacagaggcttagccatgtgaaatgtttttgctcaatgtcataaaggccatgtgggaagtggaccctaagccaggcagtgtgactgctccagggttcccagctccacagtgcaggaggcaaccatttccagttcttttcttcctttactttctcataggatactttttaagcactataaattgggttcaggaaatgtcagtttgtgaaatgtgatcaatccagaaggccaacctgctggactgcaggggactgttagagatcagaggttcccaggtctgctattacagctgttgggtcactgtgcaagcactgctgtcagggtggcacagtggagggcagatgagccctggcagcaggtggacttgggcacgtattcgctgtggcaaatcatgtaatctctggggctcacttttctcattgcaaaatactgacagtttgcgtagataatgcctctaacggggaaccttgcctggcatgtaatattcaagatattaccttagcagcctcttctccc

SEQ ID NO: 88827 - DNA, 1068 bp, Homo sapiens
aaaggggaatttttctttcattatcattttgatgtagaaaatcagtaacatcttctttgccaatatgaaaacatgtttttctttaagcagagtcttgctgtcagccagattggagtgccatggtgagataatagcttaccgcagtcttgaactcctgagtacaagggatcctcctgcctcatcctcctgagtaggtgggactacagacatgcaccaccaagcctggctaatttttaaaatttttgcagcgatggggtctcactaggttgccccggctggtctggaactcctgggctcacacaaccctcctgcctgagcctcctgagtagccgggatcacaggtgcacaccaccatgcctggctaatttttcattaaaaattttttttagagggtcttgctaggttgcccagactggtattgaactacttgcctcaagtgatcctctcccctcagcttctcaaagtgatgggattacagatgtgaaccaccatgcctagcctgaaaacatttccttttgattctagcatttagatcctaaacctaaaaccgttgccctagaattgcgctgcccacttttgctgctgatcttattccctgtccagacctttgaggaccagagttggttgggcctccctcccagatgatgctcagggtactggatgctggagtgcagggactttctctggtgactgtggggaagcccctgccctctcccctccctttttttttcatttgttgattggcaaagctgagatttcccagtgtatgtgaatttggtttggttcatttgtaaaccccttgacaactctgtacatcagaataatggcattcctcttgggagtattttgtaattatttgctcagtgtgtaatatcccattaaatatccaaagtcaattcagcaaatgtttattaataataagatttgccgaaagcaagagaagtcttaagtgggttatgcctacagtttctagaaagccttcagattgtggtggtaaaaaaacttggctttgtaaattttgtgtaattcgtattagaagatgctaatttattttaaaagcacagtact

SEQ ID NO: 88828 - DNA, 1034 bp, Homo sapiens
agataatgaggaagaatagagtctgtgctgttaaaatgtgtgtgctctgagatgtgcctgtccgtgttctgcgactgatgtggtgcgggtggcccctcccatttacctgctgctgtcacaggaggagggagggagctgaagactgagctgcccagagagcccatcaaaggcatctggaatctttcttaatttaaaacattcttaaagaagaatatataaaacaagcatatcgtaaggaatactgtggtaataaaatgaacagccgtgtaagtgtgccacagagaacccttccccaatcgtatcctcttctctccacccagaagtaaccaccctgctgactttggtgataaccacttgttttcgttatgctttacacctacatttgcattttccaagcagtagatttgcccgtttttgaactttgtaagcggaatgagactgtatgtgtcacgtgatgacgtgtcgttcactcagcatgtttgtcagattcacctgatgggggttagctgtggtttctacatattcattgctgtctactgttccgttttatgagtggaacacagtttatctattcattctattggtggatatttgagttatttctggcgtggtgttactatgaacattgctgcttgaacgttcttgcacatgtgtaagcatttctctggactggggtaggtaagagttgaattgctgagtttcagggggtgcacaccctcagtcttactaggtaatgccaacgtctttcacggtggcatggaatatgccaatcgtgtgtgagacttcctgaggctctgcctccttgccaggcttcagaattgtgatccttcagggcatatagtgctatctgacagtcatttcaatgtgcattttcctaattacctataaagttgtcatctttttatatatttattggccatttaagtttcttcttctgtgaagtgcctgttcaaatctttgccatttttttctattggattgtttaccgtaatcttgtttatttttaggatttaaaaaaatatatacttgatgct

SEQ ID NO: 88829 - DNA, 1028 bp, Homo sapiens
ttggtctctgtcttgactctcccgcctccaggcagttgtcacctcctgccaagcatcttccacagtttccctttccatctgtgcttcctgcttccccgtggcacacttaaggctcacctaacccctgacctgggctttccaggcctcctgacctaatgagcttcccacctgagaatccattccggtcctttatagcatgtagcgcgttcctctttatcctaatattcagggccttctagtaatcctaatattgtcttctttatggcagcaagaggacagtgatagggaataacttcaagtagcatgtgtgtgtcccccagttctgcattattagggcgatgttccatgatcgtgagtcattgctgtgttccagagaccccctctctacatggctagaggctaaaggtcattatcaagagtgaatactgccaagtcctagcaaacttggtcaagttactcatctagatgattcagaaaatcaaatcaagaaatggatgttacacagcaactgccagcattgctaacaccaaacaaaagataaccaagccaagtaaatactggaactggaatgaaaggagagaagaattacatacagtggaatggttagcgggagaatcagcgcttgcgcaggaaatggctggtccacggggaaagggaacagccccagctaagcttgctgttttatttttgttgtgtgtaaatgcatgacagcccagttccgagccaggataaaacttacaggctaggaatttgttttcacatactgtgttcctgtggaatcatttctaaaacctgcgtttcctctagactgtcaactttcaggaaaactgaacttaaaaaaaaaaaagtcttttaaacttctcctagacagcatcttacaaaatccaaaccctattaaaataaacactctggcctcaaatttatgctcaaggacaacttgttctggaggctgactacttagagcacattttgtaagagtggaaacctacagactaggctcagagccttttcagatgtttttgtatata

SEQ ID NO: 88830 - DNA, 1034 bp, Homo sapiens
tggatacccaggaaaggagaacagaatatgcaaaggccagactgacatgagcgtggctcattgcaaattgtagaagaaaggctgatgtgttatggtaaataaagtgggtagtgagtagcaggagatgaggctgaaaagccagattatgcagattgtttcaggccatattaaggatttgagtctttatcataagaaaataggaaaccatcaaagggtttaaacaatagagtcatatgagcaattcttaaaagttctcttgactacaatgtggtgattggattagggggagtaagagggaatatggggagaactgtttagattagtgctataattcagaagacagaggatgatattacagaggatggtattgcagagaatgacagtttgggctaaggtagacacagtggagatggagcaaataaatacgaacagatttgagagatatttaggtggtagaatcaataaccaatcagctattgattagatacaggggtggtaagagaaagtaagagagtgaggaatcactccccttcttccggtgtgtgcaggtgaatgaatgatggtactagtcacagagacagaggaccagattctgatgttggggtgcagggaaggaaagatcactaagccagtttgatgtaagatgcctttgagacattcatgaggaaatgttaaataagcaatagagtgttctggtgggaactcaggagcagcagctctgtgctgaaaactgaacctccaagtcttgagcatgaatggtcacgggcatgtaggaggtcacctaatacagacagagaaatgaccagaacctcatactccttcttgggaaactgcaactttcaaatatctcattaagtagaatgagttagcttgggtggaagaaaagtggccagagaggtaagtaggaaaggaggccatggttattactatggatggctcagttgtccccattcggacttcctccagggttgccttactgtattgcggaagccactcctttgcatctaggctcttttttggaatgagaaaaccct

SEQ ID NO: 88831 - DNA, 5924 bp, Homo sapiens
gccgccgccgccgccatcttgcggtcccgcgggggcgcctcctgggcgtccggtcccgcccgcgccgcggtccgcctgggcccgcgtccttggccccagaggccgacggcgtgcttcggcggggcgtgggcggctgggcacccgagggcgtgcgctctgggctgcggcggggagtgggctctggaggtggcgcaagctgcgtctgtcgcccgctcccggctgtcagcggcgcggggaggctagggcacggcgcgggaccccttgggagtgagagccgccccccgacccctgccccggcccggggagagctcgctgcagccggccctcgggttccgcggagggcgtcgcttgtcacctttccgccaggtttagaactcggccgtcaggtgtaggacgcgccggggaggtggagagtccttggaggtgcctggcgagggctgcccggtgctgttggcacggacccaggtgcgtgcgggcaggagcgatgcgtcagccgcaaacggagagttgtaggttcatagtagcggggcttcctgccttctacgacatttcagtgtgccacccgcgtgcttttatttagccctttagttgagctcctctgctgagaaaccttcagtgcgtgtgacttttttgcttttacgtttgcggtttccgacagatcctgagaaggctgataaggtgtcacccagctctggaactttgtaggtttttgtagtactgcctgtgataagttttttagtctgacttggtgatcctggaagaatcccaggggcttttggtcggtttccttgtcaatatgtagtgtactttaggaaagagagttaaaatgtacagatttttattttttttctttgtttttaaggaatactgaaagagtgtgaacatctaatagaaagtaggttccttcctatctttagttaagtgtaaagtgagtcccgttttggaagtctatgtcttgtatttcaattgttgaatgagaacaatttttgtgaggtgtatagcaattctagtgctaaaagaaaaaattaaatcctttattgttgtgtaaggctgagtccaagagaaagccaactacattgttttccataggaaaaacttcaggtttaggaatttaaaatatattctggaattatgagattaatattgcataactacattgcaagctttttagtgcgtttacaaatttctttgaatagaagtgtaagtgagctacttgttgggtaaggatttggttttaaggtgcagtgaatgtattttattgcaagtttatgtaagttgtgtgatttttacgtagttgtagctgggggaaaacctttgaggaattatgaagagtcctgactcagccattatcttgagataatttaatgtaaatctgtatggtgtgtttttttttaatatttcgtttttatcttttgattggctgtgtttacagtgaacatttcctctactggataactatgtgtaaattgccattagggatttataagcctttacaaccagttttaggccaggaaatgtccacagagtttgaagttttctccttagggaagttgttatgttgctatagtaagggagtaataatagtggagaagcaagtttaaaaaacaagcaaaagccctacacagtgacttactcatatatttccttttttgggggtgttggagaattacagctatgattatagaactcattgtttttgtgttgccagtaaaaataagactagccagggaagcagaaaaggtgtgtagatggtataacagagacacaaccgtgtctgaggaaagaagccctttctctatgtgccccatccctcccttaggaagcatttaaggaaaaggcttgtttttcatttcaggggaggtttaggccaagagagtggttgagtaaacacactgctgtgagagaatgcctggtacttaaatgcccaatagtttgttgtgtgtttcagtttaaagatggagatgatggggaggattgggaggtgacatttggtgtttgattccttaatattatcgttttagtcaaaggtaaattgttggctttgatggaaacctttgtgtatttaaatgcacagttcaacactgaggagattcatttagaatgtacagtctacttgggcttagtttatgatagaaaaaaatcatttaactgacttaccctaagtcattcaaaactttctaagtgaaggacttttagaagacagttttgcaaaattctttgtcatcttctagtaggtttattttagttattgattctgagtttgagatggtttctccaggagtgactcaggtaatcattctgagattggatggtttttcttttatacacctaacaagcatcttgaagatgaattaacagtatgttgcacaattttgcaaaagcagacaccaactatttcagtacatttttctgtatacctcagtatttaaaaaaaagtttgttttatacagtcgttaacatataaaagtgcatttacgatgtaatgaattctgaagtagatcacttgtgttagtaaagaaaaagaagtagacgctgctttacttcaaattctgtttaaaccttggaagtaattttacctagatttcagatttgaaacttggtattttatgtgaaagattttttttgtctttaaaattttttacatgataaaattccatttataatgtattacacattttatttttctacctattagcagtttttttaaatttttttattttttgagacggagtcttgctctgttgcagtggctcgatctcggctcattgcagtctctgcctcccgggttcaagcaattctcctgcctcagtctccagagtagctggaactacaggcatgcactaccatgcccagctaattttgaattttttgtagagacgggattttgccaggctggcctcgaacttctgacctcaggtgatccgcctgccttggcctcccaaagtgctgggattacaggcgtgagccaccgcacctgacccctattagcagttttgtagaaaagtttgaagaagaaagtttataaaatgctaaaataaatttcaaatatattcttaatgatcagagagagacgaaaataaaccaaaatccttatgttgagagtggccgataacaataaatcaacaaagaaaattaagctctctgagggatcgagggacgtatggtgttaacatcagctagtgcatctgcatagaagcagcacggggcgggggggaaattagagaatactcctctggatggatatttagcacatttttaggtgtttccagtcggctcttcatgtttcccagtggctatacaaaacgcctggggctctaaagacatgaatgtaatctttaatcatatattactccattccttagtttttaggtaactctcaattgctcacagaataaaagtcagatttttttttttcagtaagacataccatctcttccatgatgtgccttcctcttgtaacacctgttagtctgtacacatccatactttcttccctgagaaagaaaaaccctgctcatacccaaggttctttgttcctctatttttgctggctaaggtaaaattccttatgactcagaccatgttccatgagatgttttcctgctggttttcaatcactggctgcattgttttaacatataaatacaccagagtctttgattttaaaaacaaatgagcagacatgtacttctttgaccataactctttctagtatgtgtctctccctgtccttcatttcctttgcattcagactttttggaaaaatagtccatattcactgtttttccagttactcaccttttattctctccttagtccacggtacttttatcctctcactacttattgctaacttaatcatttccagtttttatcttacttgacctccccctggctcttgacagtaccgacagtttctctaaaaaaaaccctcaattcttctggcttctataacagcattgtcttctaattttcttatttgctccatttattgtcttatttgtggcattttcctcaaatgctcatgtttctgagattctgatttggtttcatttatctcactctgtgaactttctttgttcatttcattgttttgaggttttctctttatcttccttgctctctgcaggtattgctacacccccaagtctgttttaattcacattttaccgtcagtcaagagcacatactcaaacaacttattcactatttagatttgaatattgcacagatatgatattctaaactcaaaatatctcaaaatttttactacccatgcctactcttcttcccatattttttatttttatttttgagatggggtcttgctcagttgctcaacctggagtgcagtggcatgcacgttcttggctcactgcagccgtgacctcctgggctcaagtgatcctcctgaatagctaggactataggtgcatgctaccatgcccagctaattttttacgtacatatgggggtgccgctgtgttgcccaggctgatctcgaactcctgaccttgcgtgatcctcctgccttggcctcctaaagtgctgggattacaggcctgagccattgcacttggctttatttttattttttagtggcatcatgattactcacaccagaaacaatatgcatatctaataattaaaatctgtgtttctatttttgacataatccctttgtccacttcaatgtgtttctacttccaaattcatttatttttaaaattcattcaattatggatctaatttgattagatttgagtatctgctacatgtcaggtatgatgaataaatattggaactacagttgtgagtgaaacacaagccatgttttcatggggcagttctaacaagagagatagatactaataaaataatcagaagaataaagtgtacccctgaagagctatatagtgctacgagaatgtaaaataagggtcttcgatcaggctgtcacagttgaactaagattccaacaatgagtaaaagttatcctggtgaagaagaaaggaaaatgcatgttcaaatatccggtagcaggagggactgtgaaacatttaccatactgaaagaggtcggcgtggcagtggtgaaaatagtcaagatgaatgtagtgctggtttagtaggtcaagttaggagttttgtttttatcctgagccactagggtttttaagtgaggggaggagcagtaaagatggagggaatcgaataacatcacatttgcatttaaaaataattctggtagcaatgtaaaattatactagaggggagaaagagatgaattaggcggctgcagcagtactggcaagtggtgaccccttggactgaggtcatggtattggaggtgatgaaaagttaggttgaatctgtgagacttggtggtctctatgtgcactgagagaaaagggtatgaatgtctgagatttctgcttatataactggggaaatggtggtgctatttgagaaacggtggatgtctggatgaggacgaaatgcatcttatttgggggtgtgtgagagagatggaggaggaggacgtatggtagatatgtttaggtctttcaggatattaacatgaaggtggatttggttaaatgggtgtgttacttaagaaaaggtctgggctttggataatttccttacttcaggtccttttatatttactagtcagcagacatctccttttcttttctttctttctttcatttttttcttgagatggagtctcgctttgtcacccatggtggtgtgcagtggcgctatctcggctcactgcaacctctgcctcccgagttcaagcgatgctcctgcctcagcctcccaagtagctgggattacaggcgtgcaccaccatgcctggctaatttttgtatttttagtagagacggggttttgccctgtgggccaggctggtctccc

SEQ ID NO: 88832 - DNA, 1050 bp, Homo sapiens
aatttatgagagttcaggccctagagtcagacctggtttgacttcccactttcattgctttgagttatatgaccttggactactgtttaccttctaagttgaatcatttgtaaacttggtatattaaaatgtaatgaaagtatctacttcatggacttgtgagggttaaataacatagttcatacaaagttattgatacatgagtgcccaataaacgctagctgttccgttagtagatattctgtgtactatatagtattaatatatgttttgtatatatgattaccttaacatgatgccacagatactcagcagcataacccttgtgtaactgggaaacagtttaatcagtgatacaacttaattagctaaaacctgttagaaacattgaaggtagtcatcacctgcattgctgtggctacattgtttgtgtatttgagcagagcacccagccttcctcattagtctgcactgcatagctaagaatttacaaagaccttgtcaagaactgtgaagggactgaaaatttagcctgctgcagttttgtagatgttggtagaagacatgagatttcctgagttagacagtggacatcattgttcatggcactgcaagtggaatgggctttatatttgtgttgttttccttgccctcctcaagttccatggaggtgacagaggtgttcgggtagatgctactcacatagtgagtttgcatcataactagaaaccctgagcttagagaaccggaatctttcatagtgggctgcacagaaacctacctgacctttgttccagtagaagaccttatcttgattatattggtcagtgaacaaacctgcccctctcctcagaagggaggtgttgtcttctaagacagttcactatttaatacattcttgaaaagatagcctgggtaaaaacccccaggactacttcttgcaagatgtgcagaaatgctagaggcccatggagaattgtctcctaaacacacctctgagtaactagcctaaatgggggtcacagagttcataaattaatgttcatgtgc

SEQ ID NO: 88833 - DNA, 1122 bp, Homo sapiens
tagaaaatattttactactaacaaactttaagcatagcataaaatcattttgcttcttagggcttgaaataagtgtcttttaatgactttgtaaaattttaaaagacatgcttattcttaagattgaaataaagaaaagagagcctttataatagttgtctttgattccagccttctagcttttttaaaaaatacataactttaaacgaattgtttttagaacgatttaaaattacttttggaatacttagaactgtggttattgttcccaactggaacatgtttttatgttcttcctccaaattaacaggtatttattttgttgtctaaattaatctgcataatttttcttcaggcttttcttcagcaaaatggatcagccttttgggttctttgttttgtaattttatgttgtttgggtgcagaaccaaagcttaaaaactttgtatctagagcatatggcataataaacacttaacaaatatgtgaatgaatgaatggattgaatgaatgaacaaacaaaattgaggtgaagcaaaagcactgatgtcatagggtgtagggtcttcagatgtagagatttttgcagttggcctagtaaaatgaacttgaagattgacactggtttgcagacaactgggaaattctgttattttcagcaacgtattaacaacatactgtaaaaatacagttgtaaagttcatagatccaaagtttcatagtacttttttgatagaaatcatacatgtttatggtagaaattttgtgaaatacagggaatgaagaagaaaatatgacttgtttttaagtctgccacctcgagaaaggcagtgttagtagccatttgggatatttatgcctacaaatgtcagcacttaattaaaattgaggttatatattttcagttttgaatccttcgttgttgagaatccaattaaattttgttttctctttaatttttaaactttacaggccccttcacagatgtagtcactacaaatcttaaattgcgaaatccatcggatagaaaagtgtgtttcaaagtgaagactacagcacctcgccggtactgtgtgaggcccaacagtggaattattgacccagggtcaactgtgactgttt

SEQ ID NO: 88834 - DNA, 1175 bp, Homo sapiens
gctatttaggagcctgaagtgggaggattgcctgagcctagggaggttgaggctacagtgagctgagattgcgccactgcactgcagcgcagcctcagccacagagtgagaccctgttttaaaaaacaaaaaacagatggtagtgaggttttaagttactgagtatttctcctttaaatatctcagttgtataattttaaatcagaaaacactaaaatgaagcctaaattcatagttttaataacttatatttaatctgagcttataggcattatagttaacgttggcaaagttttgaaaattttcacaagctgagtttagaaagggcaaaatcatagattcatatttaatttttaattgtaattgtttattttgttggttgtgcaaaacttagtaaattagaaagacagacaatttaaaaatacttgggatccattaagttgattcttaaacattccagtgtttggtttcttgaacccttcttggttttttttaaatttgcatatttgtgaagtagtaggaatgatactattgccagatacggtttaaggcaaatcccagacttagtataatttaatctgtaactgtttcaatgtatgtctttcagacatgcaggagacaatataatatatcctttttttcttatttagtaatgctacagccctttgactatgatccgaatgaaaagagtaaacacaagtttatggtacagacaatttttgctccaccaaacacttcagatatggaagctgtggtaagtatagaagaagaatttgttttgggaagtggagtttaaactgtgggtgttgtttagcagtcagtagaaaaacttaatttctaaaaactaaaagttaaatttaggtttttaaaaaactgccaatttcttcattatagataatcctaacttaaagaatgaaagaatttttaaatagtatttttttttagaaacaatttagaaatgctgctactggcctggtgcagtggctcacacctgtaatcccagccctttgggaggccaagatgggagtatctcaagcccaggagttcgagaccagctcaggcgacatgacaagaccctgtctctacaaaaacaaacaaacaaacaaacaaaaaacaaaaaaaaccaccacaacaaaaatgagctgggtatagtgttggacgcctgtagtcccagc

SEQ ID NO: 88835 - DNA, 1053 bp, Homo sapiens
tgtttatttttagtggaaagaggcaaaacctgatgaattaatggattccaaattgagatgcgtatttgaaatgcccaatgaaaatgataaattggtaagtaggagaatgtaaaaaaaattgggagctgttgagctctcagttcctttgattaattttgcttttatttttgacctttgaggtatgtgtgatatggctattacacttcataagactcagtggttaagttttaaaaaacttggtatgccttttttttttttttttttaaagtaacattttgtttatccaagaagaaagaaagactcacttttaggtcaagactgcatcctggagaagaatcatttaagtctaccagattttttgtgacgtaaaccactgcaggttcttttttagaatgagatgtgtatacataatttaaaaatacatataaattgctttttggccactatgtaccggcagtttggggataaattcacttacatggacagtttattccaggtttagttattcctaggtattttgctcacttttgtttttagtcaaatccatctgattgtattctttagtaaataattattatgttgcttactcattagtgtaagtctaatacaatttgggggactgagggatgtatttgtttattcaaaaacaaacaaaaaatagtctgtgaatgtaccgagtgggttgtagtcacttaccttgtccatttccctgtctggattgcaaatttgaatcttttcctatggtgagagagacttgaaagataaatttttctgtgtgtgtatgtgacttaatacatacaataatatggataaatagaatggtgtggcacaatttggttacaatctgacatgactactgccttaatctagtggccatttgctctattgaaaagtaaacatgcagattaaatatgtgggctcagttattgtgttcctctttcaggataagcagaaatgaaaaggtctctggtaattaggtgttgaccaaattatattttgaatttttaaaatgcctcttttaagtgatttttgaggtatttgccaaaagcaaaa

SEQ ID NO: 88836 - DNA, 1036 bp, Homo sapiens
ttaaacatatttgagttttaactcttggtagtttattattattgttgatgctcaaattgcctggtaaggagactttttaaattggttcttgagtttgtttgaccctcatagtctttggtaattttcttgtctaatgtggcaagatttttccaggtccagacctggaaagaagctcagggccatttcagtgggagatggtatttcacaactataatcgaccgggtacctgtgacaaaattgatttttaattttatcaaactttctgttcatttttttgaccaaggtaagagtggaggcccatttttcacttgaaggtgcttcttcaaatggtaaaattttaatgataaaactgtgtcagcagcatataggatgatgtggatccttttatttcttggggtaatgattgcattttatggttggattatgttgggtaattcaaaatgtgcaaaatccaatactgatcctgagaagaatgggcgggtacttctatgaaccagctgaagtggtgtttcaattacagcaatacataaatacagcttatgactttgatggctcactggcctcgtcattatgatttttgatggatgtttttgagtgtttataatttacatttcaagttttacacatagaatgagacttaaagattgtaatatatcaccatttcaaatttatgtaattcaaacttgcaaaaattgtgtctatactatttaggctggaagtggccttaattgattaatgtgtatgttaaagagaggctaaaacacaattgtgtttttataaggcagtatttcccagtgtattaggttggaagtgttctgtagacaggtgagcttggaaaaatactgtaaatgtctccaagaggaatcacattgcgtatttgcctattaaaggctctgagaaaacgtaacggtaaagaaatatatttaacccagtattttttttttaatttaaaataacctaattaacttaggaaatatctgatgttctgaaaaaatatactttgggaaatactattcctgcctaaactcactgttgt

SEQ ID NO: 88837 - DNA, 1064 bp, Homo sapiens
aatatactttttatcttatagttatgattgtgatatagagaattctttgagatcttttgaccctttattttagtttattagtatgttgtaaaaagtatgttaacttaagcaaaatcagttcagcttttaactgcgttgctggtaacaacttagtatttaacgtagaactctgtggatggcatttgtatttttttattcagctttatttagtgtttagagcagtggacaagttcataggggttccttacacctttattttttgttttaatatatgcatacattattaaatgatcaccacagtcaagctaattaacctatcaatcacctcagataagcaccatttttatgggtcactttattttaaagagtcgatcaaaatttcatttttggtagtcaacttagaaaaatttggttagtgttcaaagcagattctgcaatagctatcataattgttgatgcactctcctcaaatattgtagagataacaagtcttgaactttatgatttttttttagtgtgttttaaccccactccctcacttccccagcccccccttcctgtatctctttgcagaaagaagtacgctggtatttaagtactgtattagtctgttctcacattgctataaagaaatacctgagactgggtaatttataaagaaaagaggtttaattggcttacagttctgcaggctgtacaggaagcagggcggcttctgcttctgaggaggcctcaggaaacttctagtcatggtggagggcaaagggggagcagatgcctcacgtggtgggaacaggagcaagagagagcgaaggggcagtgctacactctttttaacagctagatctcatgagaactcttatcatgggaacagtgtcatggggatggtgctaaaccattcatgaaggacccaccctcatgatccagtcgcttcccaccaggttccacctccaacactggagattacaatttgacatgggatttgccgggggacacagatccaaaccatatcaagtatgttgtatgcgtataccccacttgtgtgaggattttgatctttttat

SEQ ID NO: 88838 - DNA, 1639 bp, Homo sapiens
ttttgggaaatagctttctgatttggatcatagataaagtgccccaggaaacttaggaaccctttcattttagaacaaaaagactcaatattttttcctggataacaagcataagcaaataccatccttaagcacactaagatgtgtcattaccctagtcctcgggatcagcaggtgtgtgccaatacatttcattttgttaatggcccctagtgtcttcagttgagttgttgtcagtgctagtactgaaagccattgagcctgttccctgtattgttgacagctggaggcacatgatacgaaagcgctgttgtacaaaatagggttctttgaattattagctctgtttggattgtcagctctgtatatacgtaatgtccaattagtggtagtggttattttttaaggatcaaatgtggttttattatttttgaagttttatgacctattcagttctttgtgttcacttctaaaaaatttttgaggccttaactctgacattttctaaatttcttaaatgtattgcatttcatttatgtcctccatctgacatttgaaggtgacatatttccctttttttttttttttttttttttttttttttttttttgagacagtgtctcgctctgtcacccaggctggagtgcagtggcgcgatctcggctcactgtaagcgccgcctcccgggttcacgccgttctcctgcctcagcctctccgagtagctgggactacaggtgcccgccaccacgcctggctaattttttgtatttttagtagagacagggtttcaccgtggtgtcaatctcctgaccttgtgatccgcccgccttggcctcccaaagtgctgggattacaagcgtgagccaccgcgcctgaccttgaaggtgacatattttctagaaaaaaatactgattttttttaaatgaagactgaggggctgtaaagaacagggatttcaggggtcttataaagggatttcaggggtcttatcataaaatggttgaatatacattattttctgttgagacagaacaaatggggtatcagtaagtataattagggaatccctttcccacctgtttgtataatacagtattttatctattaaaggaatttgaaaagaaaggaagagaactatggacttaatggttatatgagtctttaagtgtttattggcctgggatgtgtgtgagagagtgagtgtattgggggataggctttaagtacaagagaggtttatgaaattgttcagattgagtgttatcaaagataagaagacatacaagtgcttgtttttcagattattgacaattattaattagtaaacattaaaagccacaaagaattagatggtattcattttaaaacaatgtaaggctggcataaattttaataaagtatgtacatttaataggtgcatgtaatgcaagtagattataactaattttgtttgggaaatacaaaaagcgagttcagaaactacttttgctttaacatagctattattagtattgtttcttatgcattaatgcatttttataaagtgttaatgtttagagcctaatgctttctgtgtcagtcattcccaatatcatgcagaagaaatcagagttcggtgagaatctgagaatatgtt

SEQ ID NO: 88839 - DNA, 2487 bp, Homo sapiens
tccgtaatttaaaattttatgcaatgtaaagaatttaaaaataatcagttgtcgagcttgatgattcttttagttttttttctctttggtgttgaccccatgtatatctttttttcccccttttggagatagggtctcactctcacctgggctggagtgcagtggcacgatctcgtctcattgcaacctccgcttcctgggctcaagccacctcagtctcatgagtagctgagattacaggtgcacaccaccatgcctggctaatttctaaaattgttttttgtagagacagggtctccctctgttgctcaggctgttcttgaactcctgggctcaagcaggccacccatctcggcctcccaaagtgttgggattacagacatcagacatggtgccctgcttcatcctctttaagtttttatcagttttctggtatgagtatgatactttttcccaatttttaaccaaaacctgaaagttcttctattgccatattggtggccattgccacctcctttatagagtaagtcagtgtgccaacctcattatcagaagttggatttgtgctaggatagaatttgaccacactgaaaatcacaaatgagttctaactactattaaggaaaagaacaggaaaaagtattggcagggtaaaatatatctgaaacagttttttaataataggggcggctattattagattggttggggtgggagaaatgggggtgaagaacaaaaaagctagcaagagaaaaactcagagaattgaagtaggctgctttaaaacgttgcttaactgggaagcttgaagaagaatggaagagtctgccgacaggtcacatacatgctgttgttcattagaacctcattataaattttcatttttaaatagattttacatggatttaggcatactaatcaaatcacatccccttcataagaataacaagttttgccctttgaacaatctgtttatacttaatataaaattggcagctgggatggtgtggtaggtgtgcagcctctgataaatcttataaaatgagtattgtggaatgccataaagttgatttagtaaatgtcttttttagcagtttatagctgaataaagcagattttacctaaaattattttaaagtaagtgaatttaattaaaatgaaaaaagcttgttacactaatactgctacgatgtgtggtgacataaatgctgttggagtgaaggatgttggggtactttagacaacgggctgaagaatacataggtgctgtcatagatatttatctccaggccttcactagcttcaaatggttcaatgttggtgaggattaagattttggggctcatagtcttcaaagcatgctaagtgctcctgtgatgttgaatcacgtgaattaaagcaaacagcattactaaagatgacaaattaatagaagttagcttttcttgggcatgttttttcttaggtagtttccgattttattggaatgattacgataatatccccctaccccccagaaccttatttgaattgcacaaccagagcacggaaaatgaccttcaatggattttgttgacgtcattcagcatactttcattgaataactactcttgaccaaagtgctggttttaggggtaaatacaaagagagatggctcttgctctctcagcctttgaagtattacaggaaagaacttgaacaataattattaagatacataataaagtgctatggtagaggtacgtgccagggattatgggaatagagggagtgggctggttatttagactaatctgactgctgacatgtactgatttaggccttttaaagagtttttcatgaacaaagatgtagaatttatattgttatttgtttaaaacctgtaaggagatttggttagttaaaaaattcccaatatctttgtaatgcagaatgatatggaacctagcaaagctgttccactgaatgcatctaagcaagatggacctatgccaaaaccacacagtgtttcacttaatgataccgaaacaaggaaactaatggaagagtgtaaaagacttcagggagaaatgatgaagctatcagaagaaaatcggcacctgagagtaagttctgttggttgaaaataaattgattgaaatgaaggtataggacatgtgagtgttattaggccattttagcaattagcttttaaatttttgcttggtcagttctttcttctttgccccagtgcctttgctccccaccctactcctcttttaacagtcttcccgtggtttctcattgctgcaagttccttactttagcacacattctaattatttgtgatctggcctgcagtattgccagcttctgctcttgtttctcatgtccttcccattttgtgccctagtcatactgaactgcctaggattgtgttgtcccacatcatagccattagtcacctagggctgttgagcactgaaatgggatttgttcaaattgagc

SEQ ID NO: 88840 - DNA, 1553 bp, Homo sapiens
gtgggatttaaaaaaaggtaaatatagcctatctaacttttgctttttaggaatacatttctcagctccagttttaaaaaatcagtgttattgaggtataatttatatcccatggagacacccactgtgagtgtacaattcattgatacatagaactttgtaaccatcactatagttcagttttagaatgtctatcacccccggaaagtttccttatgtggttagcagttaatccccttttccgtccccagccataggcaaccactaatctactttccgtccctatagatttttagctccagtagtctcgttagtatgcttgtttttaaaaaccttttgtgtgtgtgttttttttctaggatgaaggtttaaggctcagaaaggtagcacattcggataaacctggatcaacctcaactgcatccttcagagataatgtcaccagtcctcttccttcacttcttgttgtaattgcagccattttcattggattctttctagggaaattcatcttgtagagtgaagcatgcagagtgctgtttctttttttttttttctcttgaccagaaaaagatttgtttacctaccatttcattggtagtatggcccacggtgaccatttttttgtgtgtacagcgtcatataggctttgcctttaatgatctcttacggttagaaaacacaataaaaacaaactgttcggctactggacaggttgtatattaccagatcatcactagcagatgtcagttgcacattgagtcctttatgaaattcataaataaagaattgttctttctttgtggttttaataagagttcaagaattgttcagagtcttgtaaatgttattttaataatccctttaaattttatctgttgctgttacctcttgaaatatgatttatttagattgctaatcccactcattcaggaaatgccaagaggtattccttggggaaatggtgcctcttacagtgtaaatttttcctcctttacctttgctaatatcatggcagaatttttcttatcccttgtgaggcagttgttgactgagtttttcatccttacaatcctgtcccatggtatttaacataaaaaaaaataaaactgttaacagattcttgctcgatagcttgtttgtgtctgtcgtgttattagagggaactccactatatatggtcacttgaaattatgatgcaaaggtttctcttgcattgaaaccctcttggatattacagtatttttaattgaaagtcctaattctgttaaggaaaggagttgattaaattttaaggtaccactggtattttgggagattataatcagtttgttttcaagataatagaaaataaggtccatgagaatagaagttatgtgatttcagtgagttgatgtgtacagcatggctgtgctccatctgatttaccccattcttaagttctgagagtatgttctcaaggaagatttaactctctttggttttaaattactttttaaccagcctaataaataagtcttactacttttcataatatttcataatagttaaaa

SEQ ID NO: 88841 - DNA, 1126 bp, Homo sapiens
tcaccatgttggtcaggctgggctcaaactcctgaatccgcctgcctcggcctcccaaagtgctgggattacaggtgtgagctgccgcacccagccaagaaaaataatactcttaaatacttagatgttcacctaaagttgatattatttggtatgggaattacttttgaactgtaatctttcagattacaccactttgaaaacaagttttaacagtagggtaaaaatatagtttttgagggtattcccaacttgtgatcttctaccactttagagacattcaagtaatagttttcttagagctttgcacattcctattcactgagattttaaaaatttcacctttattcgagggaaggatcaatgcttattaccatttggaaaaacgaagatcagaaggtaaatgatctttattttctagctttaaagggaaattaaaccattcatgaataaactttaaaaatgtgaagtgtccttttccttttcacaatacaaaaaaaatttcaacagattgtgtggtttgtgcatttatatcctgttaagcattaatagctaatcactgggacttgaattctgatggcagatagtctcttgcttagtgagatggagttaactattttttagtaggaagtgagaacagctgattttcatgccacgtttcatagccccacttttggtagactaccaccacgcttcttcgcgtaagcagtggcatcttgggaatgaatgcccagccgctcgtgggttggtgcaaagaagtataaacatatatcactaaggaaaaagaaagtttgtcttgcccttctgacacagtgtgtgcacttcaggcaatttttggaaaatataaaaaattccaaattctgcctttcagcagcatcaattgctaggaacatttcattcatttccctgtaatattaatgttctttaagcataatcactaattataagttgtatcctatttttttccagcttaatttctgtggtttattgaaaaccaagtataaatgtgactaaaagcattttgctttgtttttatagttaactttcttaaggttatggacattttataatgtaacatttgattggcctggcctcttgacaattcccttctagttatgcatatcct

SEQ ID NO: 88842 - DNA, 1015 bp, Homo sapiens
aaattgattgtcctttggtttggcatccaagaagccagtagtgatcctagaaagcagtttctcttggcttttgtaatatccttccctttctgattatccttcttgtttatgggtggcgagttttcactttttttttttttttttttttttttttttgcctacttcctctgttgtttcactgaatgattgtattccttagtctttctgttctctctctgcagtctcactaggggatctgatctcatctatgctcttgacatatgcttatgatgcctccatttatgtctctagactcttgtctgtgcgtcagtttcatgaatccctctgctgtcgatactgtgcttcagaggttctaaagctttaatgcacctttgagctcgttaaacctcagaggtgctgtaggcttgggatggggtcaacaatttacgattttagtaagttcccagttagtgctgatggtgctggtccagggaccatgaattgagaacctctaggaggaaaaccacgtacctgtgacagtgggagtgaaagaggtgaggttgtgtttgttaggcctaagtttggatggaggcgggtgacacagagtttgtgcctgatggtttctcctttttttttttttttttaaagacctagaaggtcattacaagcagagatctgacttataaatgtggttggtaactcctgttaactgtgtttttttcattctagcctgaaaactggttttttaaaatggaagccagattatgacagtgccgcttctgaatatggaaaagcaggtatttttgactatagtccagttgctccagtatgtaatcttaaaatagtctgataacttcatttcaccataatacttactcatatgctttctataaggctttaatagttaaaaaacaaacaaaacaactgtgcaagcccttgagtttttttccacttgttattttcagatgtgttgagagctgagtcagagttcctggtacctgctgtctatgacagcagggatggggcggggttggtg

SEQ ID NO: 88843 - DNA, 1049 bp, Homo sapiens
aaactggtgaagtaaggtgctgtcttttgtgactgaagaatctgccggttactggggagtattggggagtgttggtgttagaaagacttcttgattttgagtggaagaaacactgatttgttgccagtagtcaacaattaaaaaagaaaaagttttaaaaatactcgtaagttaccaataattggaaaagttgtaaggaaattgctttagaaaaaagtaatattttatagttttaggatacttcctaagtatttgaagtaagtatgtttataatacttcatataaaatgcagatttcagtaatgattcatttgaggtttttaatgatggaaatagtcaatttttttttctatttcagctgttgcttttaaaaatgccaaacagtttgagcaagcaaaagatgcctgcctgagggaagctgttgcccatgaaaataatagggcgtatctttttcaacttttaaaaagaaattaaacaattagatgattttgacaagctgttttctcttgctgtaaatttactttactacctgtgaagtaaaatgtttttaaattagaaaatgattagaaaaattctgtatttttaaactatgaaggagcgtttataatgaagtttgattataaggtccacactggttcgcagagctacaatacttactttctattgtttgtgattttacttgatgatggttttacttgggatgaagtaaagtaaatctgtagacatgtgctgaagaatgaagaagtagcacaggtattgaaaacacgtgaactactgtatcaatttttttaaatacagttttccttaggtatttgaaataaaaattataagtagtttaaaacagtacattttcttgaggtgtttgcaaacttatcaataaaaaatgtttctcttatttgcaaactgtagtcataataactttgtacttcagtaaaacttcagattattgcgtaatagaaatagtttaaaatctgtgcagtgttttgttagtggttttgggaattatgtagttttaaactatattgacaggtattgaattacttctttttt

SEQ ID NO: 88844 - DNA, 2184 bp, Homo sapiens
gtgctgagacaggcctcaaagtagcagtgcagcgcaaagcttggagagctaagatttcatcactgtcgaagtgttgcactgccctctgaagggcttatgcatggaacaggcccaaagccacatagcaaaggatttgaattaagtgtagaacttccatccaccaaaaacaaggcaccacatgtagtctgaacctaactggggtgattacctgctgaaaacatctgtactctcctgaaaattaagcagaggctgtgcagcatcacattcacagtacaatccagaattactcaacatgcaagaacctggaaatatgaccagttttcaggagaaaagacaactgatggcaacccggcagtgaccagggttgttggcattatcacataaagactgaagcaactataagttgctccatgaggtaaagataaacacaattaaaatgaatagaaaagaggacctgttgttttttataggaaaaattatttttatagaaactataaaaatgaactaattgggaattttaggactggcaaatacattattgaagtaaaataattggataagcttaatctcagagatgacagaaggaagactttgtgaacttaaagatagatcagtaaaagttacctaaacaatagagacaccaaaagatggaaaaatacttcatgaagacctatttttccagtaatttatcagtcatatccttgatcttattactacttttattgttgacttatcaatactatcattgtttctgttatctgaagttttcactcatacatctttttcctagtttctttttaaggattctaagtatcattgtggtgttacgggtcccccccacttcttttttattcacttttcaagattgaatctgtgtagatatttgaaagagatctctttaaaacgtggttgtgatctaaggcttgtgtcaaagtgcggtccccagaccagcagcaggagtgccccctggaatttgttagaaatgggtgaatcccaggcttgcccctagcagccaaattccaggacatgagaattggaaaagtactgttctaggatatttcccctcaggtgtcccgtggaagttactatagcatttataaatctctgtttatacaaacaaagactctgaaagttaaactccaggtgttttcaatactgccaggttattgactttattaaacagatgtaaatttgaccatgatcctctcttttgttttagaaaacaattgctcaagtcttagttcatctacacagaaatgactatgtagctgcagaaagatgtgtccgggagagctataggtaagacgttgtctgggccctcttgacttgcagtggcgacacctctgtgtctacaactaagattgctgctaggacacatgttcctggccatgaaactgtcatttctaaatcttaggagtgctcatctaccatttcatcttttacagtgggtgttttacaccttttttttttttccctttcctgtatttttctctaggggacctccatggaagtgaatgactttagtcattttagtcattttatttgccttctaagaaaaaaagaacaagaaaaagggggaaaaaattatcagatttatgttacagaaatcaaaatgaggaattttctcggtgtttaacatgagcagtcttaatctcaacactgttaacatttgggctggataattctttgtggtcgggcctgtcctgtgcactgtaggctggttagcgggatccccggtctctgccctctagatgccactagcattcccacacttttaagtaccaaaatgtctccagacagtgtcacatgccaggggcagaatcatccctgcctgagatgtgttcttttaaggagaaggtgaagacgtgtgatttgtgcttactgcagcatccctgggttcaatggcagtgaagactgtgctgccctggaacagcttcttgaaggttatgaccagcaagaccaagatcaggtgtcagatgtctgcaactcaccgcttttcaagtacatggacaatgatgtaagtggacccatttgcatagctttcatcttttctcttgaaagaaagaggtttctagtgagattattttttacccatgtacttaagagattttttcctacctctttttttcttctcaagctactactcataaggaaactgaccacttgcattgaatttcaccatag

SEQ ID NO: 88845 - DNA, 1021 bp, Homo sapiens
ctgtttggccttaggcctttagagtatcatcatagtatcagatcaacttaaggccttcagttgtttattataatgatatatgtagataattttttttctaaataacgtcttacataggttttgaaaatatatatatttctaaagttttaattaaaaaaaatttataattgaaacttttactagttgtgtacctgtcccaccatggtcatgaggcatctggggagcagcattgttgggctttgtttttccatctgaatggtagaattggtgttcctgagggtggggagccaggctgtgtctttttagagctgagtaaaacatgttaggattctagttatccagcttttaagaacatgttctgttgttgacagtatgctaagctgggcctgagtttggtggttccaggagggggaatcaagaagaaatcacctgcaacaccacaggccaagcctgatggtgtcactgccacggctgctgatgaagaggaagatgaatactcaggaggactatgctagtattttgcttgctgaaaagaaaagggaaacaaaggtaaaatcctgacatgccatttcaaggacttgggaatagattagggatatccgtacttcattacagtcatgattttggatcctaataaagactagtttttagttaccatcttcccaaatcactcattgtatccattacctgtgaagcatatctttttctttccataagagcttttctaagacaccagcaggaattaacagaaaatgtactgtcatgttttaatacattgattaaaaaatttgcaagccaaattatacataaattatgttctaaacaaaaggggtaataagcataggtattctctcttggacacttgtaagttactgttagtgaattgttttttacgtttcatttaataattgctgctaaaggtgatgtttactgataaatcattttaaaatttttttgttttgaaaagtaaatttatcccccatgatgttagatacatttaaattattaagtcttttcagag

SEQ ID NO: 88846 - DNA, 1095 bp, Homo sapiens
tggccactggctactttgataatctaagaagttatgtctatgttgttggacattagtggtaataaacatttaaatattgatccattttaaaaattgtttaactttttaaattgtggtatatattcatctcttgactagtaggcctactctgggaatctgtcctaagaagtaattcaaaatatgagaacgctctatctaggcactggcttatgagtgcattctctgcattagcagaactagaggcaatttgcggttcagcaaacaggagctggttgaggaaattaaggcagatgtattacatgaatttgattggcaagatactctagagtggtcataataggagaaggagcttctacttttcattttatttacgtgccatgttgtccaaagattttctaagcaacttattttgtaattaaaaaattcattacagagactataaatgacatgacaatttctcaaactaaaacataaattttaaaaaggctattatttttaaaattacaaaaaataagaaatacatcccctaaaacttaaaacaacaattatgttctggtagcagaagggtggctgatgttattctcttgtctatattccacactgttaataatataacataatcctcatcattaaaatttgtcttataaataatttttttttatttaagagagtgaataggaaggagatgcttctttcttctgtaaaattatcacctataatgcacactgtcaaaactaatctggaacaatgagcagttcttcagagagggttgggatgtcctgagcagattgttttgtctctctcatgacagagacgttcccccataggtgataaatttcctttttagtggaaaggaaaaatgacactaaattatctgtttttcctttattgtttaactggaatgattccatagctgtattgatggtagcaactgctgggattggataatgtaactggaaactgcccatacctgtgggtaaggaagccaaattagtgcaatggaacactcaagaccatccattataaaaatattcccttcaaagggagaaaccttttccatactgccagttaaaaggaagagtgactgctttcttt

SEQ ID NO: 88847 - DNA, 1051 bp, Homo sapiens
tgacctctcatcttgggcttcttgatagggaggggaggttgcctggcttacgtgttgagctacgtcttgctgtcataggaagtaacccaggagtgtggaagaccagctggtcatgggagttctggttctgactcatttctcacttttctctcagaggtgacagtgtgttcaagcatgggaaagaggccataaatttgcaacactcatagaatataaacattcccttatgaaccctacagatgacatcagagaaagaatgcctgtgataattaaatgtaagccccttccatgtggcctctatttgtccaccaccaatcatagttctgaatacagcacaccctgcacctgatgcaaaattgtcctatgaacagattgctttttattataaggcagtatcctgcaaacataatatgaagcccaattacagtaaattggcaaatagttaagacatgtttgtgcccccaaaagcttcagaagcatgatgcagagcccaggggactcagtgcaaagtttttccaaggttgaaaaaacaatgtagtgtgaaatctatcagattacaatttgctcacacacaaaataaaatatctatgggtttggcatggaaacatgtttaaagcataagtaagaaaccaataaaaaaaagatggttaaacattggctgtgttttccatatgatgcaaggcagggggtagggtgggaaaaggaattggaagccgaactagcaaaaacttattgtaaaagacagtattataggatgggatgccacaagaaatggagagaaacttgctggaaagataccttaaagatactttaaagacagttctagcctttttcccacagagacgcttgtgtaacatggaggaaattttgctgggtgtggtggctcatgcctgtaaacacagaactttgggaggccgaggcggacagatcacctgcgatcaggagttcgagaccagcctggccaacatgacgaaaccccgtctctactaaaaatacaaaaattagccgggcatggtggcaggcaccagtaatcccagctactcgggaggct

SEQ ID NO: 88848 - DNA, 1119 bp, Homo sapiens
tatgcctgtgtcttaagaagagagaacacacacacacacacacacacaccaccaccaccaccaccaccaccaccaccatgcgatgactgaggcaggaaccggagtaatgcagctgcaagcaaggaccactgtggatgaccggccactacccaaagctggaaggggcagggaacaattctacactaaagccttctcggggagcagggccctgctgacaccttaattgcagacttttagccaccagaacagtgaggcaatacatttctgttttttatttgtttggttattattattattattacttaatagagacagggtctcactgtgttgctcaggctggcctggaacttctgagctcaagctgtcctcccaccttaacctcccaatgcactgggattagaagtcatttctgttgttttaagccactcagtttgtagtacattgttagagcagccgtaagaaactaatacaatgcctaagcacttagatcaagatatgaatctgagctcaaaagaagaggtctccatctgaggattaaaatagtctatcaatgcggagaccctgaggaagaatgttccaggcagagggaagagcatgcctgtttttggcatacgatttcttttatacagaagaaccattctgcagtacaacacccataaactctgagaaaataaatgggtatgaaattttatagcttgatttccatccctggaatgattgaaatagatattacctgcacatattatgttagaaattatattatacatacccagtaaaaaaaaaaaaagcaaaactgcatctcaaaaaaaaaaggcattcatgctttcataaagattgtgtttattgtaatgaaatgttttatggtgcaagtcatttgtggttatttagagtattaaaaaacccatggattttcagaattgtaagggacattagaggttacgtcttgaagaactctcttcttaatgcttaagttttctacattaccattaataagatatcacttaatttctgctaaaacacttccagtaatgtaagaagcagttggacttccagggcaacccatccatttgacaattagacatttttgaccgtagaggtcaaaaacacatctttgtgact

SEQ ID NO: 88849 - DNA, 1029 bp, Homo sapiens
aggcagtccgcttggccccagagccatgagtaaccgtaagacaggtcttttcaatcttgtgggtcaccattttgtcctttcttctttccctcttccctttctccattttttaaaaagttaattttgcctagatttattttctgcatttttgcttgccagtattttgtgcccttaaggggtattggggaaagtcactaatagtctcctcgggcagtcaggagcaggggctttcaggcttgaagaggtgtcacatgctgttggtggcagtggctgccgctgtgctcttgactgtctacacccagcaggtgtcactgggtgggttggcctggaaccactttcagagctgcagaccatgcaggaggaaggcctggagtacctgagcatgcgtgtgtgcaggattgcatgtggatttcacgtcctcaagatgcctgtttttcctctttcctggcaacctggccagccattaactcttacaggtccctttgcacttaggtgcaaaggaatgtcaccctcaaacatcaatgtcatcatcattatattcgcattccctggggtctaatagcatctgcggaatgaaaactgctcttttaagatgcagggacacctgtcaaagccatactcttagttgttgtggagaaaggccctaactcccagtgtggtggctgctgtagtgctctccccagattccccccgtgccctcctccttaggaccaagacttcgattctccctattgcctggagtgttggtgtctgaaagctcatggctgtgtctgttctgggaactgttttctgctaaaaggatctgccttatccaagctttgcctcctctttgttgtggatgtggctctcatttccaagagtggaatttgggggatggggagggaggagaggagtccctgtccccttgccccttgccctgttcttggacaattcccccgggccgtcttgtgggataggcaggagcctttgctgcactgcgcggctccctcgctcctactccattccaaccttgctccccacccccatccc

SEQ ID NO: 88850 - DNA, 1042 bp, Homo sapiens
tggtaggtggctgcagctgccaaaggattcatggaaggcatttaagaaagtaacttgcttttctgtcacactttctcagccttatataagtagatactatttatcaagttcagaaatgaaaaaaggaacagtggaaaggattggaaatttagagcttatttctaaaataaaatatttcatccacacagacgggcatgagcatgttgtctcctgagctgtgggtgctgcagctatgtgtccgtcctgttgctttgtaagtgtgtgtgtttctttacgggtgatgtgtgtttgttcgtagtcagagataagcagatggctttggacttcacctttgaggaaggatggtgttgccactgggcagtttaagagactctcattgacctcatggctctgcccttcactgtatgattgtggagttccttttgtttgtttctcttttctttctgtaaaatggtaaataacatattctattatggttttgtttcgcttttaacactcaagaattacatgcatggttgtgagatagtgtgcacagcacaccttgtataaagcctgacacacagcaggcgctgccttacctttatgaagatgagcagagagcagaatgctcaggcgatgtctcagtcaaaattaacagactaggaggtaagagcatgggccaggagaaggctgatctgaggatgtgggattcacgggaaggcaacttagtgccttcctagagccaaattatgtgagagagagagagtgagagagagagagagagagagagagagagagagtgtgtgtgtgtgtgtgtgtgtgtgtgtgtgtgtgtgtgttagagatttttagttctcaggatttttctcaccagttttactcaatattccaaatctgcagttgcatttttctgattaataggacttaaaaacaatatttagaacaattacatattgttctcactagatcaatactgttaacgtttgcttttgtttttcagcaccatttttgtagtctttatttaatgtgattttatttctaacatgtcattttccttttgggt

SEQ ID NO: 88851 - DNA, 1034 bp, Homo sapiens
tctgctctccaaaacaacatggtgaaaattgagttgtacactttacttttccagaaagcactgggtatatatgatacccaattggtttaagaacctcagatttcaggaggcagctcagttatctccctgtaataacagccaattccacaaaccagttgtttgatatgtggggcttgcaggccccctggtttggggatggaaacaaaaacaccaaattggagttggcctgaaacacagctacccctgaacactcagctgtctctggtcacacgggcttggctttggagactgggttatagcctagagaggacacgagtcaagtccttgatgctacacgatggaaggacataagggcctggtcgtggcaggtccatgggactctaaaaatgaagagcaacatcatggaaaatattgtgacttaagagagcatctaagaggcaaaaaaaagtgatttttttcccaaagcaatgtagacgaggtgttacttaggaaggtgttaaattgaagtaacacttggcccatttgaaaaatcacaggaataccaatacaaaatgggaagggactgaagaatttgcttcctgatgaggcaacattaactttggaattaggtacatctggctgcactaatagtggttttccaactcactggcagtgtttatcaaaatgcagattcctaggttcttgcccagatctagtgaatcatgatctcttgaggaggttcccaggtatcctaatctttagtgagctctccaggtgattttaaaacacagctaaagcttttaagagcttacgatgtgccaggcactgtttcgactgcttgctatgcatgatctcacttagaatgtaaaatgatggtacgagctcagtattatcatctgtgtttcatagccaaggaagccaaggcttagagtagccattggacttgcctgcagtcacacagtggatgatggagcagggatgtaaacacatgcagcatgtctttagagtccacactcctaagcaccatggtgcctgctcagctttttatgctcttt

SEQ ID NO: 88852 - DNA, 1001 bp, Homo sapiens
ctttctaattcctgatttactgaagacagcctttctgtcttgaaggaattactctgtggcatttcccagtcttagcaagtggttctggggggccctgatgaaagcactgtgttctggcgaactgagaaccaactgtggacccttgctttgtttgagggccaggggtggccaggagggtttctctgcagagtccacacctcacccatatgcacacactgggaggaaatatttttcaaccattggtttaaccattgaatagttagctttgtagtacttactcctctgagattttacgcagatgatctcacttaatccacacacatgcacgcccccgtgtagtagccaccatggcggtcccctgacggggtagatacgtggcccgtgtcacacagcatgtgcagcagggctgggacttggcgccagggcctacactctgagccacaatgtctaagccctacctcacccaaaaagattcctctaagtctgtgtcagattagaaatgaagaggggacaaagagaagtaccacggacagcaagaaaagaggaagatgcacatcagaactcataaagcaagtccctcaagaggcattctgtgtgggggcaaattcccaggggttcccggtgtctacaacacaaatacagtgactgacgcaagatcctatgtcctcaaggagagagaggaggtgaaattccagtgttttcatttcgtaagaaggcagagatgtatggaatgcttcaggaagatttccattcaagagtttatgtgggaaaaaagttttattgctgaaagaatgatgtccctaagtatccagacatttctgatttggatggctaggctcgccagaatgtcattaactgggatgtttgctcacctagcgtttaactgtcatagttcaagcctagagaaaaggtgtctccggatgggagtgatttataattcgcccctccattgtcatccatggttgcccaactgatagctaaaaaatcaacagcatccgcct

SEQ ID NO: 88853 - DNA, 1038 bp, Homo sapiens
gcccctggcgtcttacgtcccacaggccccaccccggcgccttccgtcccgcaggctccgcctttggcgctgggctctgacgtcaccacctgcgccgctcacagtagaaacaggaagtgggaccaaaacaaaggagcggcggccgggagcggacttaccttaccttctctgccttcggcgcgcttctcagccgggccgccgacccaaaggagccgtccgactatgtctaacatggagaaacacctgttcaacctgaagttcgcggccaaagaactgagtaggagtgccaaaaaatgcgataaggaggaaaaggccgaaaaggccaaaattaaaaaggccattcagaagggcaacatggaagttgcgaggatacacgccgaaaatgccatccgccagaagaaccaggcggtgaatttcttgagaatgagtgcgcgagtcgatgcagtggctgccagggtccagacggcggtgacgatgggcaaggtgaccaagtcgatggctggtgtggttaagtcgatggatgcgacattgaagaccatgaatctggagaagatttctgctttgatggacaaattcgagcaccagtttgagactctggacgtccagacgcagcaaatggaagacacgatgagcagcacgacgacgctcaccactccccagaaccaagtggatatgctgctccaggaaatggcagatgaggcgggcctcgacctcaacatggagctgccgcagggccagaccggctccgtgggcacgagcgtggcttcggcggagcaggatgaactgtctcagagactggcccgccttcgggatcaagtgtgacggcagaacccgctctgaggtttcctggccatagccaccctttgaaatgctctctgtgtgttagagagatactataccctagaaactctgaacacgccagaatgctgaaatgcccttctacctttgggtttacagccccctccacataaattaagaaattcagtatttctgcactcttagctggattctaaagttctgtatagctcgtaatgatgg

SEQ ID NO: 88854 - DNA, 1133 bp, Homo sapiens
tgtcataatgtttgaggctgtatttgtaagtcttgcaagtgtgagaaagagccgtatcttttgactttatacttcagattaaggttttgtaatgtttcttcttcaaaaggcaagtgaagctgtcatcctcattctcctaggccagacacaaacattgacacgtcaaggttttttttttttttttttttggcctgagtctcactttgatgtccaggctggagtgcgatggcacgacctcggctcactgcaatctccacctcccaggttcaagagattctcctgcctcagcctctcgagtagctgagattacaggtgcccgccaccacgcctggctaatttttgtatttttggtagagacagggtttcgccatgttagccaggatggtcttgatctcctggcctcgtgatccgcctgcctcggcctcccaaagtgctgggattacaggcgtgagccaccgcgcctggccacattttgtttttctcttactgtttgcttacttgtatgacgtagcctgtgtccaaagttttgactaagggaatgatggacctgttcccacttggggaacttgaagaagtgtttcattagcagactaatgaggaaacatattgtctagagagagagaaaaaaatccctggttccctgaaaagattagattgcaatttgtacccctgaattgagttcaggtttttacagctcagagaagtaacagcaggtggttgcaacagcttgtgatgttggtacattgtcgatagaatgtggatgattaacgtgtataacttacaattttttaaatcagggagtattttataaagtgccaacctgataaaatatcctaaattctacagctaccattcattccttttttcagagtaagcagcaggtaatgttgacattaagctcttcagcacaatacaaacacatttcatgtacaggtatagatagccatggtgaaggcacaaagatctacaaggatttttctttagtagttatacaaaagaatattacattttgtggtctgtacagtgtaataaaccagcaatagggacaacaacaaagagaatctaagaaagaagactatgcctaagtatagggaaagtttagagaatcatttttagacaggacacattttgca

SEQ ID NO: 88855 - DNA, 1054 bp, Homo sapiens
tacaccctcaacaaatatctgtggaatgaatgaattgtatgtgcccttgggaaacatctaacttgaaatgtacatttaatggccaattattgtctttgggaacgaaaaaccaagatcatttagactttaatagctaacatttatatagtgctctagtgcttataatgtgccatctgtttcaagtactttacttccatatattaacacattaatctttaccatggtcctgttgttttacctacggtaccaatgtggaatctgaggccctgggcagctgagtaacttgccccaggcttcatagtaagtagtggaactaaaatttgagctttgctatcctggggccaggtagagcccttaactaataatgctagtctgaaactcaagtgttgaaagttattttgtgttcatgatgactctaggagtttctaaaatggcttgtcctgaaaaatgtttcttctcacaattgaatataggatgaacacatacaaagtagaacgctttgagaaagtgttcagctctgaaagactgttttcttggaaaggcattaagtgagtattatttgtaaattcttccaagacctttagtccttggaaacttcattttttaaaggtgcctgccatactgggatctatcatctacctgcgttctgtttagcctggtttatgatctttaaacagcagtgccttaggctgtccttgctggtgctcaccatgggagccgatagatgggaaacctcaaaccaccctggttttccttgacaaccccataatgaatcggtcagtttatgactctgcccagccactgtgggaatgatagtctttctgtctgcactgtctctgggtagcacaaatttcatcagcccactttgtaaaagagtctttatttgatcaaaatatactaatttcacgttacaaagactgttctcgtagttatggtgtcataactactatgggatttggtggcaagtgtgtcacagttcctctgtagctctgtgccacccatctccattggcctgggcttttagaccagagcatcctgacccttagcctgacca

SEQ ID NO: 88856 - DNA, 1019 bp, Homo sapiens
atgcttcctgcctgccgggcagtgctgagggaatggcctgaaggtctgctgctgggacaaacagaagccacacgaggtcatcggaacctgtgtaaagagggacagattgtcttctaatgcaatcgggggctgactggagaaaacatatcctttagccagatgacctggttcggggtgtaaaggtcgtgagtggtgatccttttggagttctccttagtgaagagcatgttggcaaagtcgcagggcccccagatgctcacccttcactagcacccagcattctaccactctgttgttcgctgctctcagctgcccctgagatggagtctgtgttctagatgcggaaaggtgagggagccgaaggagagaccttccaagagataaaggtgcactgtcctttctctcttagactggttccgctcaaggtggccctggagaaactgcttccatttcccctctgccccagttctggcaggcttccctgtcccaggctcccaattccctcacctgccccctccatgcttctgtgccactcttccttccgtgaccgtggggatcatccctgccctcctagttccagccacccacactgtgacgggagcctcctccctggctgttgggcttttggggagggagtgaccacagccccaccccaagtacagatgacagtattcactgatgtggatggttgtcatcttttgtgtgatgtgtgaacagaagtattgtagacagctctgcctttcaaatccccccgcggagctgaaccagcttctgttgggccagaaacttagacaatttagggggccctctttaagaaaatacaaactttgccagatgtggtggctgaagcctgtaatcccagcactttgggaggctgaggcttgtggatcacctgaggtcgggaatttgagaccaatatagtgaaaccccatctctactaaaaatacaaaaactgtggccgggcgcggtggctcacgcctgtaatcccagcactttgggaggccgaggtgggcagatca

SEQ ID NO: 88857 - DNA, 1002 bp, Homo sapiens
aggaacaggtttggagctgagagtcgagtgttctcttctgtgcaggttaagctcgaattgccagtagatttcttattttatttttttgagacagggtatcgctttgtttccctggctggagtgcagtggtgcaatcacagcttctacctcctgggctcaagtgattctcccacctcagcctcctgagtagctgggactacaggcatgtgtcaccatgcctggataatatgtattttttaattttttgtacagacggggtttcactaagtggagatgttggatttgcacccaagctgacggcagagatgcagtgtggaagtcatattcctggagatggtatttagggccatgtcccggacaggaggagagcaggcttggccactgatgggctttgccgtcggatgagctcaggtcaggctcccattttcctccttgggagcctcacaaatgccagtttgtggaggtcatttctgaagtggttcatttctccagaaaaggcttccctgctcttcctgcctgggctgagcgcacctgtcgctggaggaagaggaggcaggagggggagaggaggcggtggtgatggcctccagctcctgcctcgcctggtccacacctgcagtgtttgcttagctctgcagggtggggtcagcctacgtgagaaattcgaaaactcaacaacatttcaaacatcagcagagacagaattcctgtgagacagcagctggcaggcacagagtagcagctgtccctttggtggggtgggggtcggtacatggtctccaagggtccgaggcccactgctcctgaccctatctgagaggtccctatcatttcctacccattttgctaacaaaagctgtctcagaagaagggggagggcagaaggcactgcccttgcctctgggcagcctcatcccagcccttggcactccagggtgccagtgaggtcccacctgtgcccccttaaggagaggctggtagatggctcatccccacggggag

SEQ ID NO: 88858 - DNA, 1056 bp, Homo sapiens
tctctaagactgagggaaaatagccgtggtaaaggggttcagcgggaccttacctggcaaccccatgtgctccctcgccctgtggacgtgatcctggctaaagggcagggctgtttgagtctcgcttactgattttagaaatacagcacttttcctcactttttctcttagcataggacaattcgtgaattaaacttttcttaacctagtattttagcatcctatttgcaacgtgtacattgtatgtacggtaggttcttattttttgtaacaatacaaaaattagctgaaaaagtcattagattttctcagatacatgttctcacaactgatactggtgaggttctgtgtgtaaataagtttgtggaccaagaccttttcatacaatacctcatgtgattcctaaaacaacccaatgtgttagatacactgttattacagaagaggaaatgaaggccatgagaacccatatagaatttgaatttagagctgtctgattctggagtgtactttatccctctctactcccactgatgttatgaaactgctgaaaacaagaattacatcctggaagggaatttttcatacccatcttcatgaagagctacaggacaaggcttctgactttttttaggttagcttagtgtcattgtctgttggtgactgaaggaagctagctggcgcagcccccatgtgtgcaaggcccccgagtacacctgatagagccctatctggtgtatatgggtgcatgtcgctggcatcagcaccctgccggggtgagggtagttcctggagctactgggatgaaatgcagagctcccaacctggaggagtgcatggcccagtggaggagacagggcagtgaccaagtacagtggactgtgcagtagctgacccaggaagaggggcctcagccagggcagtgggcggacggccacacgggcgacctcctggagcagctgtgctggagtagatggaggctgagagcacagacaggcagaaggtggccagggatgtcattgcaggcacaagggatcgtgtccaaagacatggagg

SEQ ID NO: 88859 - DNA, 1022 bp, Homo sapiens
tgtcttggaagcagttagtgaaactgtgggaagtagtttttaaacaaccaacccacccagagtgtaggaaggtccttctgagcctgcggggagccgcacagcacacaggctcccgagagctgccgctcttgttccagagagtaaacctttctattttcctttgcagattcccgactgtggcggttagcattggatttgctgttcgacaagaggtgcgggtgtggcccaggtccccagggcccctccctgggctccctctggccatccttcctttctggcttcagcctctgtgcgcctggtttgctgtttgccctgtgccttaatcatgactggcaaatccaagcctgtgggtttcaaatccgagaaaataaacaagtccagactggctttggggtgtgcggggtggggctccgtggctggcccttgtcccccgtggagggctggcctcgtgtcaaccgtggtctatttgtgacactgctgtggaagcggaagtcttaagtgaacggtccaagtgcatctccagctgacccctagagcgtgtgatctcacaaactaaaaggagcacttagttttggagagcatcctcaatcccaatattctaataattctttcttatcttcctctggttattagcatgagaacatagctctttcatggttcccatagaccttctgaactacacagtgttgtgcgacctgcatggaaggcgtggggctgaggtttaaagcttattaaataattcaagcagcagcactgagaagagccttaatttctttctaattgaaacagttttatttaaatagggccgagggctgcatgtttctcaaaagcagccctgcttcagagcagcatttgtgcagcttcaccttagtctcagcacagactccctggcaggggagctgagagaagtacttaagttgaagtatttaaagttaagtactaaagtatctcaaagtacttaagctgaagataagtaagaattgtaatactgtaatttgtctaaggatgcaatgattgacgtc

SEQ ID NO: 88860 - DNA, 1059 bp, Homo sapiens
tcctccccatgggagtgggggacattcctctgcactctgggagctcttcacaggcctcaggaaccagccgaattctaggactgacctggtcatgaggattcctttaaagccagggtaccggaaggggaaggatgatgaaatgctgccagacacctgcaggctctgaaaaagcgttgactgaatgacgcctccaaccgccagaaataaaccctttctctgtagcttggggtgtccactctagggtgtttgtgctcaccccagggccagccaaggctttcctaaggcatttggccagggtgtttttttaattttccagagaggtgaacacttggctaacttgctaagcaagcatgctggcccttgttaaccctgagtggtgaaaagtcggtagaggaaagatcacagaggcacgcggccgtgggctgccgtccttttccacgctgacctcttccttttgctgcttcatcctgggaggctgtggtctgatgctttgttccctgatgtggggcagtcgggccactgttcagcgcactgcctgctcacggatcagtccccagtctgcggcggtgcctcttcctcgctggggctgtccttgggcttctgagattccgctggctttacagatgcattctccattcttcacacatcagcaattttgaggatttcttgtggggtttggttagagtcacaagtaacattctttttttcagcaacaaaaggggcctttctaaaaaattaagctttttcaataacttctggttactaatacttgattatgatgttaatttttaaagttttgtttgtctgaatatattttaaaattgtacttatttagcaaaagcaagcttgcttttatgtccaggtctcattttaaatgcaggcactgctttttctcagttccttttggaaaggtaatttctgtcacagtgtaatgtgttatcctaacgcctagcgcagccttcatctttgaataacaatgttttttcccacatcaaacgagtgaaccatctttgttttctgtcctgcctctgccgcccacagcttgaattcggagtgatt

SEQ ID NO: 88861 - DNA, 1971 bp, Homo sapiens
ccaaacattgagtgttcccagtttggagtcattttgcttttctttttggttgaatgatggtgatttttttttttttttttttttttaaagaaacagggacttgctctgtcctccaggctggaatgtggtggcgcaatcatggctgacagcagccttgaacccctgggctcaaccaatcctcccacctcagcctcctgagtagctgcaactacaggcctgtgccaccatgcccagctacttttaattttttttttttttgcagagatggagtctcaccatcttgcccaggctggtctggaactcatggcctcaggtgatccttgttccctagcctcccaaagtgctggcattacaggcacgatccactgtgcccggtccatccttagttttcaacatagatatcaaaaaagcattcagcatgaaccagtcgaaagatgatccttactctgagaaagaaaggctcacgttggaagcctgtactccttagttagaaccaagacttgatttttctggtgacaggaaattctttttattgcagatctctcaaaggccttggttctgacagaaattggccccaaacgtgaccctgcgaccctgaagctgttcctgagtaacatggagcggctgctgcatgccaaggcgcatgggtaggaggttcagttcggggaacaccctgcagcccgaggaggaagaacggaacacggacttgctaaaactcccctgggatttgaggaggaagcctgacgtggaaagagtgggaggggcacatgaacatcagactcagggaagccctgtgaggggcccgcctgcagtagatactcctatagccaggcctctggagatgcgtgggcacctgtgttgcttctgatcagaatccatggaactgacctcatgctgctcaaccagcgaatggtgcaaatacttacagtccttcccgagggggcctggcgtcagacaggtttatcaaagcccagtgaatcctctttgtctcttgccttcccagtagggctgtgctgtgagccctagccatgtgagaccactgacacttaatgtcacgttcagtagaggaggattcaattctctggttgctgcatctcaggtgctcagtagctaggtcagctgggagctgtcatggcacaaggcatttgcgtctggcggaggcctgttggttggtggctccaggccctatattcagcctccagagctttggcagaagtgctgtgcttcatttttcactagggaaaatgcccagccggggtacctggctgaagtcggcttgcacaccacagaaaaggctccactcccgcctgcatctgtcctcccttccctctccccagggtccgagtgattggaagctccacattggcactctgccacctggcctcaggggccgcggatgcctattaccagtttggcctgcactgctgggatctggcggctgccacagtcatcatcagagaagcaggcggcatcgtgatagacacttcgggtgagctctcctgtccctgaaatgcagcggcagaaactagactgagagacactgtgggtggggcacttcctgaagtccccaccaactgaatttcccaccttccccagagtttctgtttttttttttttttttttttttttgagacggggtcttggtgtcacacaggatggagtgcagtggtacaatctcggctcactgcaaccatcctactcacgggttcaagcaattctcctgcctcagcctcctgagtagctgtgattacaggtgcgtgctaccatgcctggctaattttttgtatttttattagagacggggtttcatggtgtcagccaggatgctcttgatctcctgacctcgtgatccgcctgcctcggtctcccaaagtgctggaattacaggcatgagccactatgcccgaccccattccacattttttcttttttttttgacacggagtttcactcgtcacccaggctggagtg

SEQ ID NO: 88862 - DNA, 1036 bp, Homo sapiens
caggcaggaggatggctggaacccaggaggtcgaggctgcagtgagccattattgttccactgcactccagcctgggtgacagagcgagaccctgtctcaacaaacaaaacaaacaaaaaaacaaaaagaaagaactgctcccctccccaacctcaggaaaggccctcccagcccttgggtcaggacagcaggaggccctgagggagcttgagctgactcctgcttctgcttctgcttctgctctgtccggagtctcaggctgcctttagcaagtattccgcatgagcgtcatccctgcggcttcaggagaagcagagtgaaccttggagaaaagagaggcacccaaggtggggacctgcgggcttgcctcattcatccctggacaagcctcccagaaacgaaatgggctgctcacctctgtgatcctcagagttagcaaaactgcttgctatgtcatttagacctcttacaaaatgatattcatctatcactggtgatgacattcattctgaattccactcataggcttcaggatacttgccctcatttttttttcccttcatttcaacagttttcactgagtgtcttgtggacatgagtcatcaaatgttttgctgcctttatgatccaatcccaaataaaaagtaaaacatttgtcctagtgcatcactgtcaccactcagaccaggagtcaggacgcggattgatgttcaggtagctgtgtggccttgagagggccatgtcagctctcttttggtgccaggtgaagtctgtactgggggtctggctgcctccctcacagggttgggagcatgtcccaggacgacacctaggagagtaccatgaaaccagagaatgacggaggcagtctcagtcagcgttgagatttattttgccaagattgaggatgtgcctgggaaaaggacacaagccactgtaggatctgtggtctgcacttttttccaaaaaggattttgggcgcttcagtatttaaagaggaaagaaaacaaaagagggtatggtctcatccttgat

SEQ ID NO: 88863 - DNA, 1029 bp, Homo sapiens
accacaggcatgtgcctccacatccagctaatttttatatttttctttttttttcagaaaattattttaatagttacaaaacttttttttttttaacagaatcggtataaaatagcagttgatttctccataattatcagaatttatacttgaggtcttggctaagtggggctgaaatcaacaaaaggtcttggactgttggctgagaaatcatcctaggaagcccgcctgttgatatctgtcatgcttagctctcatgagatgcgccagtcctaaaaaaaaaaaaaaaaaaaaaaaaaaaaagaatctctctttattcattctttggaggcttgaaatgaattcagcagcattcattaaacaccttccagctcctgtcatttaccacttcttcaacattcagttctgactgcatccatttcaactttgtctgctcttttctaagttgctttaataacgttaaatcgtccaaattcttttctctctcttctcagaggttttttactactgctgaagtctgggctatacaatttttttggactctgtctctactggcatgagctgccatcaaagactcataaagttgtttacaggtttggctggcatcaattttccctgcaaaggaagctgttggaaccacagtgtttaattcatgtactattctgtcatcgataggcctcatcaccttgagtaattcctggaactcggtgaattcctcacagttcacaccgccactgggtgctgccatattggacctgatttttatatttttcatacagatggggttttgccatgttgaccaggctggtctcaaactcctggcctcaagtgatctgcctgcgtcagcctcccaaagtgctgggattacaggcatgagccactgtgcccggtcatattaatgtttgtaaatggaaaatgtgtgcattgctcaggaaaaagtaagctaccaccacttatctgttcgagatgcctgatggtgtgctgaatttgattacgaaaattaacataattagaataagatgaagtttc

SEQ ID NO: 88864 - DNA, 1053 bp, Homo sapiens
gcagccggcccgcagttgccgctgtcgtccgcagagccagttcctagcgcagagccgcgcccgccatgagggagatcgtgcacatccaggcgggccagtgcgggaaccagatcggcaccaaggtgggcctggcgcggtgcagggcctctccgcgggtcggctgctggcgggccccgggtctcccggcgcgacccccgccggggcgcgcacccgctgtgcgcccctgggtcctcggagcccggtgcggacccgcgagggccgcagggagggagcgcccggggcgtggccggccggggaccttctactcttcgctccccacccccatcccaactgggagcggctgccggcggctcaggcgcgcctggaattcggccgccggggcgcctggggtgggcgcgggtggcggcgtcccgggctctgggttctgagcgtctgtccccccgccttgccctgcccaagttttgggaagtgatcagcgatgagcacggcatcgacccggccggaggctacgtgggagactcggcgctgcagctggagagaatcaacgtctactacaatgagtcatcgtgtgagtagcaaggccgccgcgccctgcccggccgggacccgcgtggacgctccggcgccgcctcttagcgcggcgagtttgcttcgggaaaagttctctcggggtgtagcaggatgcccggccactcccttcgctcctccggggcgggaaatccgccgtcagtttattcaaacagctcgattcagcctatcctgagggtctgagcgcttgaacgggaccacccgttagcgttgtgaaatcaacgtagcggttcctgcccagccttctctgtctagccgggcgcggtggctcaagcctctaatcccagcgctttgggaggccgagactggaggatcatttggggccaggagttcaggaccagcctgggcagcataggagaccaccccccgcccccctcccgccccgatctctacaacaattttaaaattagccgggcttggtggcccacccctgtagtaccagttaactgagggcttgagctcagg

SEQ ID NO: 88865 - DNA, 1007 bp, Homo sapiens
agcaacatgaacgacctggtatccgagtaccagcagtaccaggatgccaccgccaatgacggggaggaagcttttgaggatgaggaagaggagatcgatggatagtcggaatagagccgccccaactcagatcctacaacacgcaagttccttcttgaaccctggtgcctcctaccctatggccctgaatggtgcactggtttaattgtgttggtgtcggcccctcacaaatgcagccaagtcatgtaattagtcatctggaacaaagactaaaaacagcagagaattgcgggttctacccagtcagaagatcacaccatggagactttctactagaggacttgaaagagaactgaggggccacaaaataaacttcaccttccattaagtgttcaagcatgtctgcaaattaggagggagttagaaacagtctttttcatcctttgtgatgaagcctgaaattgtgccgtgttgccttatatgaatatgcagtatgggactttgaaataatgattcataataaaatactaaacgtgtgtcttcatctctctagccatgtgcataaatgacgtaagttactttgtatggttacaatggctacttgggtcactggtctctccctggggtgaactcctccccacttcagttcacgaaaacaacagaggaaagggctcttctttaaatggaggctttaaggggggcagccaaaactgttgctagctggaaggcaatgcagtacagacaaaagcccctcctccatccgcagccaccttttagactcccacaggatcttgcattttcccaagtcaggtcctgggctagggttccccaaccttgtaggggaacaaacagccccaaaaggcctccggacaaagccaggggtgctgggtgggagctggggtgccaacagccagccctgcatggaagggatgggcccttttctgctgtgacccatcacacctgatggcttctaccaccggccacacctttggagtttccaaagataa

SEQ ID NO: 88866 - DNA, 1061 bp, Homo sapiens
gatgaggacacctcacttccagaaggccttaaggactggaacaaggagcgggaaaaggagaaagaggagcccccgggtgagaaagttgccaactagaggcccagagggaggccatctcagtctgtccactgtggtttcagctggtgcattatttcagctgtggctttcagaagaatgggaatgctgcgctgattttagccagccactggcccagctgaaatgatggggaaaggagtccttagtcctttcagcctcagaggtcacagtgggtggcaggtgactttccggaggccttgagggaaatgcacactgtcccatagcctcattgggctcccagacgtgctggaaaggttgagcccagagtggccgaggctggaccctgtggcaccaagtggggtcggctgaccgtgtggcagggatcgttgcactggactcttggcgtgtgggaagggatgctttctctttgtcgcccactcttcattcctgtttctcctcagttcccctgtgcagatgggctgtgaaattaaattggagtcttgataagaacattttaatttgacttaatattttaaagattgaatccagatcacttgttgctgtcttaatggaatggttttctacaggagctgtaacatacttaaaaatatgaatgtattatgtaaatatggcttctttacataaaaaataaaatgtcaacactgtacttttctgaacacacatagggtccctatttatgctctggatatttttagaaaacataatggcaagaaattaaattttcttgctttttagaggagaatccttcaaaatctcagcctcgctggttctcattagctcccacaggaggttggaaccttctagagttatgtgtcctgtaaagatgcactgagctctggatataaagtacatgggtcctgaggggttagtcatggcctgaatctgtgataaccaccccagtgcaggtcctcaagaggccagtcatggccagatgttggccacaccttctgggtatagaagttaacgtataactgtagcgggcctggcaggctgacctgagccgt

SEQ ID NO: 88867 - DNA, 1001 bp, Homo sapiens
caggtgatagaactaagttatttaaatgagcatttttagatgctgtcttagtttgctattatgtgagctatattgtctattaaggtaaatagttgcctgtaattatctattgactactaatactttcatcttagttcagagggccagaattataccaggcttacattaaacgctagaatagcttagggttatcatgagtcaaaacagaattatatttacacaaaacctttattcattgtactgctgatttaaaaattaactatggatttggctgtccatattgtgtgactgatcagtttgggcgtatttcggtgggtaagctgttctgtgttcattttttaggtgctgatgttgctaatgtctgtaatgaagctgcgttgattgctgcaaggcatctgtcagattccataaatcagaaacactttgaacaggcaattgaacgagtgattggtggtaaggaaactgaacataactcaagtggaaaggctgataaaatgaatttgaggccagggatttctctgtttgggcaagaactagaagcaaagaaagtgtatccactcagccctggggcccaccacatttgtgctctcttggtgtcatggcccctcccatgcctctcctccctctcctccttcttcctgccaccgtcccctgccacctgccctctgcatggaggtccatggtgctgggtgagtttgagatggcagctcacgaatgctttgcttgcacaggcagccagcagcgaggtgtctacccatgaactataccaatcaagtttgttaaaaagctcacaaccttcctgtttacaaaagtttcatcacatgagttagaggtgctctgtgctagatacaggtgatgggtgtaaaatatctgtaacagccgggtgcggtggctcacgcctgtaatcccagcactttgggaggccgaggcaggcagatcacaaggtcaggagtttgagaccagcctggctaacatagtgaaaccccatctctactaaaaat

SEQ ID NO: 88868 - DNA, 1083 bp, Homo sapiens
tgacctttggtaggattttagcataaagaacccctttgtatcaaagagtgccattcccatctttgaactatcatttatgtttacatttcacagttttccaggatttttaggtgattcttctctcatcagaacttcttctttgggggttgtctttaataagaccatgttagtaaccccacttaaagtctgggcagatgctccatttatttcgaagagttggttgccatggagcttatttgggaattctgttgcctttgaagaacacttgcaagttaccctcctttgtattaagtgcagaaggtataccttggtgtagctatatatatttatattgatatcttgcaccacatgtgaaagctggaggtgagcagccagtcctaacccgtgttgcgctgtgtgtccccagctcttttctgctgagcatgctgcctacggtgctcatcatcgccttcttgctctacaccatcagaagagggcctgctggcattggccggacaggccgagggatgggcggactcttcagtgtcggagaaaccactgccaaggtcttaaaggatgaaattgatgtgaagttcaaagatgtggctggctgtgaggaggccaagctagagatcatggaatttgtgaatttcttgaaaaacccaaagcagtatcaagacctaggagcaaaaatcccaaaggtaaaatgaaatttaagattaactttttgaaatgtttcttgatctctgaagttataattctgtgaagtttgattacttattatagatagctgtttttctgtccttcctctttctcagcttactaggctagcctctgcccaactcgaggatcgttttgggtcagttctgtgtgcatgtgtcttgtatagtgtatgtattcctgaaaatatctgtgtcacctcctcttggaagattttcttgattcgtcttccttttccctccaatctgatttagatgccctatctctcagcaactgtaggcccgctgtagctcactgacaatgtcacactctgctgtcacccagtgtcccttcgagggatgtatgtggacaggacacctgtgctggcgctgaggttcacggcac

SEQ ID NO: 88869 - DNA, 1104 bp, Homo sapiens
tacttttgtgtgtgtgtggctttggaagccagtagctacttccttagttcagttctttactgttcctcgaataatctcctgactaaggcaaaaaaaaaaagcttctcctacgagaatcagtctaacagagatgccgatgtcagcacagccctaagcagtaagtcatattggcatttccacgtgactgtgtttctatcccgtgtacagagagatccagagccctacactccacgacctgggggctcacagcacagaacctagaagcacctgctgacactcttcaactgatttttaaatgttgttgcttggagataaaaattacataagggactttttgcctgcattctagtgcaaaacatctgaagagctgtacacccacaagggtgactatttcccctgagtggccgtgttgtcccagtgccctggttcagtgtctcctgagtggatgacaggtcttcattctctatcttgaatgtattatggttactaatagttttataatggaggtctaagaattaaagttgtgtgggagtttcaggacaaaggaaggctaaaagtttgtcaagacgttgagcgtattttggttacctatgagaagggttgtgacagtgtacagtggcagctgttggccacgctgcagaaatgagctggagctcatgggttttcagctacatttttcataactttgtagtacatccatcttgagtaaattaagccacaatttggtacctagggtctcaaactaaaatttatttttataaatgaattttaaaagaaaaaatatctacttcttttaaagttagaagaaaattaacctgctgacaggcaacatttttggggtgctttctgcactagttttccttgtaaatgatttgagtgagtaggtttggtttctgacgaaagtagactggagggtagcattgtatgcctcaaatgtctcagtgtgtttggctcatacgtgggctatactgtattattttggtatgcttacaaatgactaaccaatcaaattgtcattaatgtttggaaaatctgttaatgcacatgcacaataatttcctgaaagccataggacatgtctgtagtcagcaccacgatagcacc

SEQ ID NO: 88870 - DNA, 1028 bp, Homo sapiens
ttagccaggcctggtagcaggtgcctgtagtcccagctactcaggaggctgaggcaggagaatggcgtgaacccaggaggcggagcttgcagtgagccaagatcatgccattgcactccagcctaggcgaaacagtgagactccatctcataaaaaaaaaaaaaaaatgtatctgagaaacagaggagggtttttcagaaccttctgcagattccttccatgatgaggagacacttaagagctgtggccttttattaccttttaaaatagaattataattaaatacagagctacattatcagcatcacagagccagctgttataaacaggatttctgaattgtcttcctcctcttgtctgttcagcttcccctatatatagatgtaaagcatattcaaacatggatattaggaaatttgctgttggcaatgttttttttcctcttaaatttgtattttttagctctgcttttgttgccgaaccaggaggttttccttcttcacttggtcttatacctgtcagttctgtaagaggtaaggtattttgtaattgatgaaaagataaatttaacagtcgtaagagaaataccaattatcttccttatttcaccatctttctaaacaggaataaaattagaaatgactcactctgttacgttaccttgtgctatccttgtaggttaggaatattgatttcttaagagagtgagccaaatatttatttgatattgaacctagaaaatgtttctctgtatgttacttcttttacataactaagatcattctaataatatgtcatgtttgaacagaaaaaaaataagatgtgattatcatgtgatccctggatagacaaataagaaaattccaaacacatgtaagttgatccttttataggagacagtgtaagagttaagttctgtagattatctttttggcaattcagtgtgtcaatttgttacattctaatagaagaagggagagttatgcagtttattgtggaaacttacaactgtactgccataggcttct

SEQ ID NO: 88871 - DNA, 1046 bp, Homo sapiens
taattctgtcatctctgaaagtagttcctgttgaaagagaaaactgtgatcgttaattttttaaatgcgtattttaggcattttagagcaaatgatataatctttctgagtaaactcatccccctgtcctcttatactaataagcttctcatgttaaaaattcaaatgcaggatttttcccaaagcatttttaagcaaatgtaatcttccttaagttagcttgaacagagatggttttgcattgatttttagtaagaagcagtagttcttcagactacttttttaagtaaaatgctaatgtttgacaagtttgcaacctagattgatttttgtttttctctgattgaaagacagaactgattgttaaaactccataaactgactgcattcatagtcatgtgctttctcactggcgtgttggattcctgagtgcctgtgagcgatgctgttgtgtgtgtgtgggagtgaattataatgtgtttgtgctgagaacattcagtttcagtgtcactgcaccacaatggccccttgcagcctggcagggtccgaatgcacaagactgttctgtctttctctgagatccaccaatcaagtgcggggccggatggggagcggatgggtgtgaggctcttattcaatgagatcagttacatcaacatcttccgcagctgcttgtagggaaaccattaacacaagacagccaacataaatatttattatgaaatcttttacatttctctagtctttccattgctgactatacatttagcatttgttgaaagtaacaacaaatctagagaactgtggggcagcctggagagactgccttttggatataaatgctccagtagtttcatgttccagttccactcgtaccattaggatttgtaaaggtgtgctgatgtaactgatcactaaataatgcttgtcagtaaaaattactaaccatcttcttttggctattctgggtaccacaaatgagttttaaaaacagggccaggccaggcatggtggctcacgcctgtaatcccagcactttgggaggc

SEQ ID NO: 88872 - DNA, 1043 bp, Homo sapiens
gccttggaggattccaggctatggtaccaaaaagcaggccatcagagtcagtactgacaaagactcatggatcagctgtggcatgacaccatggtgccacttgccgaatccatctgagccttagtttatttattcaccaatagagatcaaaatcagtatgaataattgctaacatttattgttcactgcctgtactaggcacagaattttatatgcaattattaacctgtttaatgctcacaacaagcccacgtctgttagtatcctcattttacagatgaaaggagattagatagcagtagagacccaaaccatcccccacaccacactatagactgcttcattgtctgtcatttgttgtattgccttctcatccaaatttgagctcttaataatataaatcagactcatcagaggaaatgtatcccagactttttgtgttcacattaaatatgtttatatgaatatagattattagccatttttattttcaaaccaaaactttttcagatcttacagccatgtgtctggtaaggctttgtgtgtgtcctctcttcatccatacatcactggatccttagaggctgtgaagtaaactagcttctctcagccccagtttcttcatctggaaaataaacaagttgtgagtcagttatctgtaggattccttttaagtctaaattctaatctacaagtatgaatatgtaattattcattttaaagtttcctttaattgaatttgacagttaatatccaaccagaagaagttttctatacataggcaaggtgttactgaatcaagcctctgtgtttttgtatgaaatgctctgttacctggtatgcttccaacacagataacctttcttggctcaagaaaaggtaagcttttgcttttttaccagatgtgactacccctgaatctacaaagaatcttgtggagtcatctatggtgaatggaggtttgacatcacaaacaaaagaaaacgggttaagtacctcacagcaggtgcctgcacagcggaagaagctcctcagagccccaa

SEQ ID NO: 88873 - DNA, 1042 bp, Homo sapiens
gatgggcaccatcttctagaaccatgagtgtggtgtgatggttcttccaaaattgcttaggagaaaacagatttactgtagtcttgtatcttttttacatatattgttttcaaacaagcagaatgttttattttactgaccacggcttagcagaagcctttcaattttcttttttaacatgtttgaacaagcagatgaatgaaatgtatttcacagaaaccacaaaacccacgtcaggtgtaaaagtgtttttgttttttttacctgacaagtcaaaactgtaagacatgctaagtggccgcattgctgaaaaaaagaaaacaaacaataaaaagaaaataattcagctgttaggaatatacagagaggacaaaaaagggaacggattaatgaagacccttagtggctacatgtcagactctaaggcaggcagaagctagtgaatgaaaatctgaaatacattaaaaccatgcaagagtcttagtttcagttatatcactaagacttcaaatggaggaacaataaaaggaaaaagtaactttttagaaaacaagtaaaaaatgaaagcatgataaaaatacaaacattttaaagaatcacagaataagatgtttgacttaaatatagatttttaaaaaagccatgttttaaaacatgattttagggaacatacaacatctttaaaatttcagagtaaatttatccttcaataatttatgtcaggatgaaaatttggctctcagaataaaggtgaaacagttcataaaaaattctcagttcagctagttcagcagcatcaccattatgtgttaataaactatctattgtaggccatataacctagtagttgaaggacaggacagattgcctgagtttgaacctcagctctgccactaactgggagtgtgaccccaggcaagttacttaacctctctgtgctttagttacttcatctgtaaaatgggaataatcctatcttatggaattgttataaagattaaataacttcatgtaaaaaaggtgcttagaatagtgcttgaca

SEQ ID NO: 88874 - DNA, 1033 bp, Homo sapiens
accaacttggtgaaaccccatctctactaaaaatacaaaaattagccaggcatgttggcacacgcctgtaatcccagctactcgggaggctgaggcacgagaatcgcttgaacccgggaggcagaggttgcagtgagctgagattgcaccactgcactccagcctgggcaacagagtgagacccctcctgtaagcaataaaatacaatttgagaatgtataaccaaatcactctgatatccagtaatctccctattgctttaggaaccttaatatttaatgacttgaaagtaatcttttatcaagcagtgttccagtcaatgaaatgtaatttataatactgtactgtatgactagacttcagtaaaaattacttaattactgaagtctttagccatttttcttactttcaaggtctcagccagaaaactgaaaccaactccaccacggccacggagcctccatgaaagaatattagaagaaattaaagcagaaagaaagctgcggcctgtatcaccagaggagattagacgtagcagattaggtgagtccactgcttcctgtactcagtctagagtcatcccctgggaaaaggatctttatacacccagccccatgaaagtaaagagttctcattccttgttcatttctctgtatctcactcacttgttctccctctcactctctcgtatacataccccctctcactctctcatatacataccccctcacacttacttgaaatttatagggtgggaaatccttccgcctatctaatactgaactatatgagaacatcgtgccgtaattgaaagagctctgccagtctctaggctgaggttttaggaaagtctctttacctctctgagcatcattttcttcattggcagaagggggataaaagttcctcttaacctacattatgagttttatgtaagaattaaataggattatggtaaaaaaatactttataaattgtattgcatatacaaagataacgtattatattttaaaaatatagatgatagatgtac

SEQ ID NO: 88875 - DNA, 1964 bp, Homo sapiens
tgatataggacccaagaagataaattcaagaaaaaggaaagactagctctttagaggatctcttgaaagtaaaaagattaaattatgtataacgtcctaaaatgagcagtatggttaagaagtatttctgtgatgacaggaggatagattgcttagaatcaagagagtttatgattcttgtttggtggcttatttaacattttattttctccagtgtttatgcagttgtagtaataataagactttgttgtttgggaaagtttattaggtacaagttgatgaagttttaactttcacacgcttaattaaggggttaaagacacgcaggctctttgtatactcataagtatacctgactagcaattagagcacattttggtatacagggtctttagaaggtagtaactgatgcagtttaggttatagtctagatcttcacatggttaaaaagcatttgcttttctggcatgccacaaagaattattaatagcagtagttttagagattagaatcatgtgtggtctcacagtctttcaggacttaaatacccgtctgacaacaatcatttattttaacttttggtttcaaaatttttgatgtacctttagtttagatgtataaagaatcgtttaaaaattatggccatatgttgatttaaaataatcttaaggttggtagaaggttttcctgaaaggaacaatgaatgcctgtgtgcatactaataaagggatcccttgagaatggtttcttggtatagggaacattcaggctttgtttgggttttgaaaagaggatacgatcagtcaagcttctcagcaaggttcatgctaatttggaggggaagatcgtcttggcataaaatcctatttgattttaaagagagaatatttgtggaaaaggttgaaatagtgaaaaaatatgttttttttgtttttgtttttttgagatggagtctcgctctgttgctcaggctggaggcagtggcgtgatctcggctcactgcagcctccgcttcctgggttcaagcgattctcctgcctcagcctcctgagtagctgggactacaggcgcccgccaccatgctcggctaatttttgtatttttagtagacacgggtttcaccatgttgtccagaatggtctacatctcctgaccttgtgatccacccacctcagcctcccaaagtgctgggattacaggcgtgagccaccgcacccagcaaaaaaatgtttaaaaacattttttttggtctgctctttctgtatttcttgtgttcccatcctgatcattaaaggaaaggaatatatgaagtatatgtgtaggtttccagagtaggtagtgggggtgaatggtagaattagagattggtgaaatgccttatcagttacagtaatagataaaaattgttctctttgaataataagttcaaatatgtcaggttaattcaatctaacaaatatgctttgagttcctactatgtacaagtagtgttctagttttacatgggtgatgtaagggcaaatagttctagtcattaaagaagagaaaataaaacagaaacacagtggtgaatttaccatgaatctaatgcagcttaaacttcaagtcccttcatttacacaggccccttctaagtgagtgggaggagccttaacagtaagtttagatgttcatttgcaaaattaagattttagctgtaattggataagattgctatcactttttttttttttttttttgagacagggtctcgctttgtcacccaggctgtagtgcagtggtttgatcggctcactgcagctttgacctcccagattcaagcaatcctcccacctcagcctcccgagtagctgggactacaggcatgtgtcaccatgcctgggtaattttttttttttttttttcctgagatggagtcttgctctgtcaccaggctggagtgcagcggcgtgatcttggcttac

SEQ ID NO: 88876 - DNA, 1052 bp, Homo sapiens
gtctttgatagcagagacagaatttgaaaaaattattttatttatttatttttgagatggagtctcagtctgtcgcccaggctgtagtgcagtggcacattcttggctcactgcaacctctgcctcctggattcaagcgattctcctgcctcagcctcccaagtagctgggattacagacgcccgccaccacacgcggctaatttttgtaatttttagtagaggcggggtttcactatgttggccaagctggtcttgaactcctgacctcaggtgatccacctgtctcggcctcccaaagtgctgggattacaggcatgagccaccacgcctagcctgaaaaaattattttaaatactgatttacttgcaaataaggaattaaagtgtatggtcacttcttaattgaataattttttttttcttaaatagatctcctttctgtgaagaaataatctgttgccgtggagaccaagtgcgactggcagttcgtgtccgagtatttacttaccctgaatctgcatgtgctgtttggatcatgtttgcttgtaaatatcgctcggtattatagggccaatatttatataagatttatacctgtgtttaattggaattttacacattgtacattacttagctatttagaggtttgttattttaaaatcacaatctggcttgaatggcatacttcaattttgtatatacttgactggtaatgtttaaaaaaaatcatgcattcctttaaaaattaaggctgaaaaacttgtataaatctccctggaatttagtataaattaagtgtatattctattttaataaatgctactttgtttacagttatcagtagtttaaatattaatataaaatgcattcagttttctttacacaaacaggtaatcaaagagatgtttgtctaagggtttgagccctagacaaatcagtatgatcattacttttcacaggttaatggaattattttatacagattaggagaaattaacctcatgacagatttatttattgcattggtgaaaataaatgttaatgaattacc

SEQ ID NO: 88877 - DNA, 1051 bp, Homo sapiens
aggctgaggcgggggaatcacttgagctggggacatcaaggctgcagtgagctgaggacgtcaaggcagcattgagctgagatcatgccactgcactccagcctgggtgtcagaactagaccctatctcaaaagagaggaaaaaaaaaagaaatttcttcattcggacactcaactcaaatagttatttttgctttcgcgtgtagtcttcctacacttaaatacgaaattgtaaccatagtgtttaatatcttggtaatttttttcacagaacacagtatcagatattttcttttctttttttctttttttttttagagacagagtctcactctgttgtccaggctggagtgcagtggcacgatctcagctcactgcaatctctgcctcccaggttcaagcgattctcctgcctcagcctcctgagtagctgggattacaggcacacaccaccatacccagctaatattttctatttttttataggtctttataactttttaaaattgaaagtaatataaccaaagaaaatctggaaaaagagtggaaaattatatataacctccccagtaataaccattgttggcattttgttgttgttcttgccagtcatttttcttatgtatgtattttcttgaaattatcacatatagatactatcagtcattggttgagtgttttccatttatttgcatttcttgctgtatgacttgtttgcttgtttgttcatgtacttcagctattaatctattaaaatattccaggctgggcacaggagctcatgcctgtaatcccaacactttgggaggctgaggcaggaggatcacttgagcccaggagttcaagagcagcctgggtaacacagtaagacccctgtttatacaaaaaaaattttaaaattagctaggtgtcatggtgcacacctttagtcccagctacttgggaggctgagatggggaaatcacttaagcccaggaggtcaaggctgctatgaatcatgtcaccagcctgggtgacagaggaagaccctgtctcaaaaaaaaaaaaaaaaa

SEQ ID NO: 88878 - DNA, 1023 bp, Homo sapiens
ttggggattaatattgacatacttgaaggctttttattgtagtagcatatactttagttaagtacttttaaagaacagacttatcttatgaatcagaaagcactgatatgctgtaagttactggataactcatcacaatttgccagtcttctgaaaagttagtgatagaaataggactgtacttgtatttccagttttttgcatgctttctgagacattagcaaattgttctctttggttttatataagcttattatttactgtttaataaaagtattcttttatgttggcctaactgaatatgtagtgtggtataatttcgtttggattatattgctaggtgatggaactagaatggctgattcaacaacaatgttatcaataagtgatccaattcatatggtgctaatcaaaacagacatatttggtgagacgactttagtagcatcatattttctggaatggcgatcggttttgggctcagaaaatggagtgaccagtctgactgtggaacttatgggtgtaggtatggtgattaatatatcattgttaacctttttatagccacagttcatttgtaaatatattttatatctttaaaatgcttttataatccaagagggaaacctgtaaaatagaatttcgttagagttacaattggacctcagcatcctaatcttgagaaatgtcttgaagaataatatcagtatagcacttcatggtcaatctgaccttgtcttaggagaaatgtttttttctggaaaatgaatacaggaattttgagggttttaatttcaagttcatttgattaaatataaggctataaagaaaattaatattcttgacacacatacaaacttatgtgtgtccagtcatcacaccctggaatacatcccctttggtaccagtgattcttgcaaaatacagagtagatgttctcccaaccttttacagtgtgggtgagtgagactcggaagaggaaataatttgctcagtgttagtatcaactagtccttgagggca

SEQ ID NO: 88879 - DNA, 1809 bp, Homo sapiens
gcaagagtctggggcgatagaacgagcggtcttggcgttttaggacggccgtgagaatgaagcgcttagcgagcgacttctggaagtcggatcgagtgtaagttgtatttggaggtttatattctgctgtaagatatcaggttttttttctttcttgagacggagtctctctgttgcccaggctggagtgcagtggcacgatctcggctcactgcaacctccgcctcccaggtttaagcgattctccgcctcagcctcccgagtagctgggattacaggcgcgcgccaccacgctcggctaatttttgtatttttagtagagacggtttcaccatgttggtgtggctggtcccgaactcctgacttcgtgatccggccgcctcggcctcctaaagtgctgggattacaggcgtgagcctccgcgcccggcagatatcagggtttctttaccgctgaaacatgtgggtatcagcgaagttgaaccaggagcttcaatcagcaattctcaaataagtcatggaagagaagttactaaagggtttgtaatgacggaatttgttaatatttcggagctccagaagaacctccagtttctgcagcgctcgctcgactgagtgcaagatgctgaagtgataaaagcgaccatttatggtgcccttgtgtgccaggctttgtgctgtctagtatctttaatcctcacaacactatcgtgagagggcactacactaggtttttccattcttatcggtgacgaaacagatttataaagggtaaataagttggcttgaggttacacatctactaagttgaaagctggtaagattcccttatcattaggcagatcaaagtatgaaagtaataagatcatactttgatctgcctactcccagtccgtgttcttctgattatactatactccctctcagaagattccttttggttgagtgttgtttgtggagaaatggtaacaaaggtgccagataaccagtggagactatttctagaatttgtactcaaaagattcattctttaaaagcttacctttgttcccattcaattgtggtaacaattgtgcatttactgttagctggagaaccttaaaacttcagaagcagtatttgactgctttgtgatgttataaattgtaatatgagttttctacatagatggatgtccatggtagaataagagaaatccttgctgagactatacgggaagaattggcacctgatcaacagcatttatcaacagaagatttgatcaaagcccttagacgtcgaggaatcattgacgatgtgatgaaagaacttaattttgttactgtgagtaatcttttagggaaataaatgagagtatatatgtatatactaatgcgtaacactacttataaggttccgatgtggggcctttcgttttagtaaaaccacttcaaggtcattctgtttactagtgtccttgtttcaagtataggctagctctgcccttgaatatactgaatagttttgtgtatcaatgaaatttgtgttagatatcttattcctgtctctacagtgacagaattttctcttattttctaggtctgtaaatttgaatatacatactttagtccaattagttcaccataacaaagttctttttcattatgatctgtaacttttttagattaagcgtatttttaaaataagcactcttttgggattatattctctatgattaacaaattacaaatttctttaagaaaataattgactgcataagagtcctcaaatcttttaatacaaataggtcaataatgggatgatagtctct

SEQ ID NO: 88880 - DNA, 1013 bp, Homo sapiens
tgaaaatcaatatctagctatgatgttatgatgctttcagtactaatataactattgtattctgtctaaactttttgaagtgctgtgggccaggcgtgttggctcacgcctgtaatcccagcactttgggaggctgaggcgggtggatcacctgaggtcggtggatcacctgaggtcaggagtttgagaccagcctggccaacatggtgaaactccgtctctactaaaaatacaaaaattagctgggtgtggtggtgcgcgcctataatctcagctactcaggaggctgaggcaggagaattgcttcaagccaggaggcagaggctgcagtgagccaagatcacgccactgtactccagcctgggagacagaggcagactctgtttcaaaaaataaaataaagtgctgctaattttggtgacttactgaacatatcttttataatttcagccagcagtatctgttggaaatgttggccagcttgcaatggatctgattatttctacactgaatatgtctaagattggttacttctataccgattgtcttgtgccaatggttggaaacaatccatatgcgaccacagaaggaaattcaacagaacttagcataaatgctgaaggtatgtaagactttaccttgtatttttccactacaaagtagagttgttttaaattagaaatagactttattgataattgttttgtagcaaatgtttacttagtgccaactttgtgtagagttcacaacccaatcacattgtcctattcttttatgtcctggttttagttgttgttagcctcttgtaaatggcaagtcttacgaaggttgagaataagatcatacttgtatcttttttttttttattatttttgagacggagtctcgctctcttgcccaggctggagtgcagtgacgcgatctccgctcactgcaagctccgcctcccgggttcacgccattctcctacctcagcctcccgagtagctgggactacaggtgcctgccaccgc

SEQ ID NO: 88881 - DNA, 1038 bp, Homo sapiens
gttaaagtcaaaagaaaaataattttttatattttcttacagttaacttttcagaaatgaatctgttccatagaataaagcccactggcttattttaaggtacttctaaaaggtcttattttaaccagatgtcatatatgttccgtattttaattattgaaaacatttaaatgcaaaaggtattataattcaatttttgtttatcataataatttcaacttgtataacttcactgtcatatgatttcattttcttcttgtttttatagtgtattcattgccttcaagaaagctggtggctctacagttaagatccatttttattaaggttagtatgttgtagtttgcctttttgtttattaaagtgtaatgagaaaataagtaacattagggattaagattcaaaaattactactgtttttaccatatgtacagttaagatctgattctacagagaaataatcttacaatatttcagatgtgttactgtcttttcatgattatatagaaaggaagcagggcttttatcttgagtgttaacatattttcagttcgggtagcattggtgaaaaaatgtaagcatattaatattagaggtttattccatttgtattacctttcagctggtggcatctacatataaactatgtatatatcaaattatgtatatgtcataaaatattctgaatccgacttctttcctcctccactgctgtcattgagtgcaaaccagtgtcatcttcatgcccctgactaacttgctgatctgcctcccacaaacagcagcactgatgatcctctaaacgtacaccacatcactactctctttgaaaccctccagtggcttctcctctcactcaaaattgtgatccaggaaaaggggctcgcttcctgatgcactgtgacaccaggtttttgagacaagaaaggctttatattgcaaattgactcccaaggagacaggagtcgacctcaaatctgcctccctgtgctgacttcaaggcagtgtttttattagaaaaggttcagagggtggatt

SEQ ID NO: 88882 - DNA, 1014 bp, Homo sapiens
cttgcctgtcccagagcctgcctctcttaactgctgcactagactaccttcttattttaaaagttagcctgcatttctcttacctgcattttaaattttattgagtagttattttatgagcagtctttgaaaaattttcataaagcgggctccccctgaaattttataacccacattccagatttaccagctgtgaatgtcttgccacacctacttgatctctcgctatgcgcgtacacagtttccttcttcgaaacaatccagaagtaggctagcaatggtcacccctacatacttccgcacacatctttcaagaacaggacaccattaccacacccaagaaaaccagcatttaatgaatttattcaggagtatcatccaacatactcaaatttccacagctgttccgaaagtatccttcaattctggatccattgatggttcacaggttgtatttggctgttacatctttttagttgttatccttcagagtaaaactggcctgcccctctttctttctttacaatattgactcctttgaggaaccggggctggatgtggagcattctccattcatctgattgtttccatgtgaccagattcgggtcacaaatttctggcaagaacccttcacagatgaccatgtattggttattaggtaacaatagattactcaagtagagaactgggaaattgtcctttgtccatcacaatagattttttttgaaatctagattcctcatgattcattgatttcttttctttttcttttttcttttttttttttttttgagaaagtttcactcggttcccccggctggagtgcaatggcacaatctcggttcactgcagccttcacctcctgggttcaagtgattctcctgtctcagcctcctgagtagctgggattataggtgcctgccaccatgccccgctgatttttttatttttagtagagatggggttttaccatgttggccaggctggtcttgaactcttgacctcaggtgatcc

SEQ ID NO: 88883 - DNA, 2002 bp, Homo sapiens
aaccactcagcgttttcggaagaagtaggaacttttatttcctttaatgattccattctcttccacagtttccctcactgctttagatagtaactaggtgttattttctttcagtctctgctgtggtgcttctgaaaattactgtcttctgaagtaggtttggggagtaggtcagaacataccttatctgctgtagccaaggacagaaaggctggtttttcatgcagccatggggtgaggcatgattgtgcgtgttccccagtgggtgttacaggggcctgctctcacaagtagaaaactctgtgtggggcgaagggagatgataagtgatcttatggtgtggcgtcttttcctttcctaaaccaggtaggttatcgtagctgtaaaaacagacacactagagtcagctcttgtaccctatgaaagaatactgattcttatttttatttcttgtagctgttctaaagaaatccaaatggcagttctgctgaaatttgtttcagaaggggacaacatcccagatgcattaggtcttgttgagtatcttaatgagtggcttcagatactcaaaccacttgtaagttctattatagcttaagcctcttctttgtctggttgtattcattaactcgcactttatatactacctaagtagaccaagtaagtgaacgtttgtattaaatatagacatatctttacataaaatttagtttaagctgaacttttgaaaattagaggacagttaaccaacctattatttacagttttttcattaaagctgactttccaaaaaggaaaatccttagttcttcattgtacttactattcatgttagattaattatgccagacatagtcttgcaataataaacaagccttctgtggaattcaggaatttttttagggaagtaaaaagtattgctatgtgagcaatactgtagctattgaatatgtattacagttgatatttttctctattatgaaatgagagcattacacccagggaagtgagttagcctttaggcataacagaacactgagcataaggctgctttctaagatgggtaactagctttttaattcatgcttttgccaagaacaaattgatacaaatcacataatgctgattttttttttaatccctattctttttgaatgtgattttccctaataaacttcatctacagcctttctggcatatctttataatttggaacttaaagaaatttatcttcagttgacatgaagacaaagaaactttatttttccttaacaataaaacctggctataaaagtgccaaccaaaaggaacacaaaaggagagttttataattcactttaaaaggagatttgatggtaaagtttaaagattaaaatattttgttcttcaattacagagcgatgaccccacagtatctgcctcacggtggaaaataccaagttcttggagattactctttggcagtggtcttccccctgcacttttctgatctaatttctgttttataccttatacccaaaacacttactaccaacacagctgttaaacattctatacaaaaaaattgtatgatctggtattaggaaattactttcacagtaaatatcaaagaaaaaagattaagggtctctttgccatgcttttcatcatatgcaccaaatgtaaattttgtacaataaaattttatttcctaagtaattttgtcttaaatgtattttttttaatttcagactctctattagcttcctagtttgtctctaataaatcaccacaaacttagtgacttaaaacacaccagtttaattttttcattaactaattaattaattttcattctgtattttaagtaaaatgagacgaggtcttgccatgttgcccaggctggtctcaaactcctgggctcaggcaatcctcctgccatgtcctcccaaagtgctgagattacaggcattacaccactatgcccagccacaaatttgcttttaaattctgacttctgagt

SEQ ID NO: 88884 - DNA, 1738 bp, Homo sapiens
tgccctgtctttaaagggagtagcctaattctcagcatttgggagtttttgactaaatgtgtggatatgatttgtatttcctatttcttaatatatatgtgaagatacaatactgacaagtacttagatttggaggttttgcggtactgaggggagttgggggaagaatggaaataccattgacctcctaaaaagttgttacttgcaaagtttgggaggtgacatcaaaaactcaactgcccttacaatagtcattccatccatctgttgcttatttgaattctcatttatttttactttatggcattaaaatacaataaatctgtcaattatgtattttatattagtagtagcttaagattgggtcacttcatttcggtagatataattgttagtattatccttcaggacaaaaagcatctgctaacaacctgtggtttaaaaatataggccaactttatgttcaaacattatgttgataatatttttagcagtattacacagtggaggtccaaattggattagacttttgcattgaattccaaagtattggtaagtctagcacatagtataaagtcttgctaaattcttgtgggtacattatttttaaaacctgtctgtctgtcggtatcacacagaggtcacttcttgagtaaaataagatgaccttaagaattcacataattcttgaagaagaatataagtcacgatgcttccacatgaggccgcgtcacaccaccatcgtttggaaatccagcaccccagccgttttaccctaagataacagtgcagcacttagtgtggttgaatgtgtcatgtgggaatgatttttggtcaccttttcagttcattgttagtccttttatgtttgtgtgcatctatgttcgtctgtgtgtttggtaaatatgaattgaatagatgacttcttattttatgttttaggccaagattgacagacacctaatattcatgacttgagaatattctgcagctataaattttgaaccattgatgtgcaaagcaagacctgaagcccactccggaaactaaagtgaggctcgctaaccctctagattgcctcacagttgtttgtttacaaagtaaactttacatccaggggatgaagagcacccaccagcagaagactttgcagaacctttaattggatgtgttaagtgtttttaatgagtgtatgaaatgtagaaagatgtacaagaaataaattaggggagattactttgtattgtactgccattcctactgtatttttatactttttggcagcattaaatatttttgttaaatagtcttttgttggtttgtgtgcattatcttaggacagctctgcttcaaataatgaatattttcctgtgagtttataatttctgtaacaagcaattgacatactgccgaggcgggtggatcacttgagatgaggagttcgagaccagcctggccaacatggtgaaactccatctctactaaaaatacaaaaaaattagccaggcctggtagtaggcacctgtaatcccagctacttgggaggctgaggcaggagaatcacttgaacccgggaggcagaggttgcagtgagccaaaatcgcaccactacattccagcctgggcaatgagtgaaaactccgtctcaaaaaaaaaggtttttatagttgcccttcaatagtctttctatccttaatagtacaggttaggtgaaagcaataatagaagagttatgata

SEQ ID NO: 88885 - DNA, 1052 bp, Homo sapiens
atgacatttccagttgaaactaggcttgctttcggtacacaggtgaagacttgaggaagccagtgccagagaggacgtgcctcacccctcagctggctgaatgcgcttcattggcttacgctttgctttctgtatgctttctgtccttctgggtggtgtcgcatatatttttaaaaccacattcagtgtgatgaacacttgttggtacacttctaaggttagtcatctttccttctctgagcagatccttgagaagggcattgacagtggatgctttaaatagtgttcagtttttaccagtaataatattttttggtggatgtcatgaaaacacatgacatcgtgttgtgcccatgataaaaagtcctgactttttattgaatgaggtgtgctggtcaaagagacagacgtggctgccttctctggtaacagccagaggaaaaagttagcaattctagatgggttctacagctttaaaaaacttgttgtatccttaggtcctcataatattaaatattttctaattttaacagattttaagagtcagatatatactttgacttgaatgatgtagtgttgcttaaggaagaaaaaattataaaaaaaatgtttcttttattttcaggagtttttaattcatatctagttcatttccactcatatctatttctgctaatagattgacagcaacctttggtttaatgctgtgttctctagctacaccaacaagttatatattcctttccaatattaaccaagtatttattttatgttagcctatgactgagttttatctatgcttgcacatatatagaatgtaaaaatataattctccatgtttaatgtatccatataaaaatgaaaatacccattttctgcattcttaaagggttaagaaaagtaacatgtaataagcacatggaggactttagaccatttcttgtgttagaggagactttatacatttgtgaggttttctgtcttttggtccttttatgttcttagtccatttcattattgttttaatatttctaccaaggaatgaccaagaa

SEQ ID NO: 88886 - DNA, 1340 bp, Homo sapiens
gtacatctctgaatcattaaagaatattgaggcttttcttggccgggcgccgtggctcacacctgtaatctcaggactttgggaggccaaggcgggtgaattgcttgaggtcaggagttcaagaccagcctggccaacatggcaaaaccctgtctctactaaaaatacaaaaaattagctgggcatagtggtgcacgcctgcagtctcagttacttgggaggctgaggcacgagaatcacttgagcgtgggaggcagaggttgcagtgaaccaagattgtaccactgcactccaggctgggtgacagagcaagacgctgtctcaaaagaatattgaggcttttcccctcattattccagtgttcaaatagggtgaaaactatgtggatggttttatttgcgcctaggtcctctgtgttagagtactcaagtcctgctctgtgtgcacttcctttcacttgtttttatttcctcatagtgctctacggaaacgtattcgagaggacagaaaggccaccacagctcagaaggtgcagcagatgaaacagaggctaaatgagaatgaacgaaaaagaaaaaggtggttatattggcaacctattctcactaagatggggtttatgtcagtcattttggttggcgcttttgttggctggacactgttttttcagcaaaatgccctataaacaattaattttgcccagcaagcttctgcactagtaactgacagtgctacattaatcataggggtttgtctgcagcaaacgcctcatatcccaaaaacggtgcagtagaatagacatcaaccagataagtgatatttacagtcacaagcccaacatctcaggactcttgactgcaggttcctctgaaccccaaactgtaaatggctgtctaaaataaagacattcatgtttgttaaaaactggtaaattttgcaactgtattcatacatgtcaaacacagtatttcacctgaccaacattgagatatcctttatcacaggatttgtttttggaggctatctggattttaacctgcacttgatataagcaataaatattgtggttttatctacgttattggaaagaaaatgacatttaaataatgtgtgtaatgtataatgtactattgacatgggcatcaacacttttattcttaagcatttcagggtaaatatattttataagtatctatttaatcttttgtagttaactgtactttttaagagctcaatttgaaaaatctgttactaaaaaaataaattgtatgtcgattgaattgtactggatacattttccatttttctaaagagaagtttgatatgagcagttagaagtt

SEQ ID NO: 88887 - DNA, 1045 bp, Homo sapiens
tgtatatccagacatcgtgtctgtagtgcagacatgaaggaggcggaaggggaatgagcagaaaggttgactcctgccatgacttttaaaaaaaaaaatagtccttatactagccagaactggttataaatccttcctttaaccaatgactggccagaaggaatgagattactatgattggtttggaatcagttgtgaatcagctaaagaatcaaagtcctccaactacttgaggggttgagatgtggggagggatgagtaggctgggatagttgttgtgtacataacagttatagctggagggttaaattatcgttgttctttcagaggagaaaatgcatagcaaaaatcttagcaatgatcttgcattgattctgtttcctgggttccaataacaagacttgtctcattttttgcctttcttgcagatggaaaaaggagatgatattaacataaaacaagtgttactgaacatgagaaaataccgaatgggtcttattcagaccccagatcaactgagattctcatacatggctataatagaaggagcaaaatgtataaagggagattctagtatacaggtaaacttcatacaggttttaaatcatatctatttgttaaatacacatagcatcaaataactgcactccacttgagcccttgtctttgtttcaaagagtgtatttgaatttttgtggtaaatccagctggctgtcttaaaattgtaaaattttagctagcttcctcatatatactcagcctcaggttaaatcctgtgtgttacttaaaagcccttgtagaaacaagatttcattaaagaaactgaatttttcattttgggggtggttaatcttttaattattaaagtaactggaaacttgagatacttttgccttcattaaacactgatacttggtttatgtgatatttgactttataacaacaagcaacttgaatatttatggcagatataatgaaattccagcaaaatgttatattcttctggttggtggctttattctcattaagctatttttactgcata

SEQ ID NO: 88888 - DNA, 1480 bp, Homo sapiens
tcactaaagagtataaattataaagtcacagtttctcataaagaggctttgatagtttcacttcctgaaatgtgtatattcacaatcttttgcaatagttattttaaggtgatgtgttttatttttttctctactgcctcttcgaaatcaaaaagttatatatactttttattttatattaatctttttcaatttttgtttttataattttaatgtattttaaatttattttaaagttttatttctcctttttgctttaatatttcttcctttttaaattgtttttcatttttcctttgtatgtgtttttcttaaaagaacagaagaattaaaataatatctagtgatgtaggtatttcagttttgtttttaatcagccttgagaagaaaatacaggctcaaataacatttgtagtcagttctaaatagctatagagttttcccaaggattacctttcttttttagtattatctgataacaaaataaaaaaaaattttcctgagaaaattcaccgttcctttgcttttgttgactctgtatattaatgttaaacaggaagcgaggccactgccaggggctgagccctgcagacccagtgccctgcaggtagtgccctcctccctactgcctcccaggactggatctgggcttttctggtgtgtggttactgtgcttatagagcattgaggtaacacctcgtgcatattttacagatagaaggaaaatagcagtgaattttagttcagagtcctgagggtgaggtatcaaatactctggctgaaggtctttctctaggtttacttcctgcatagctgggcaagggtgtggggtggtgccatgtggggtaaccagattcccagcaccctgtgaggtggaccttcccgggttttatggattcctaccgcatgttagctaaatggctgttttcagttgtgcaatagatatgagtagcctttggttagtgttctttctgtgattacaacatgaggaaatacattcctttggtgtgatattttagtggaactttaattttaaaatcatgtagttttctaaaaccaggctttctttttttggtatgttgtctaggagatatgtggtctttattttaattaagttgctgacctttttactattttacataatataacagttaaagggtgattaaactgttttttaaaaaagtgatttttaaaaaaaagtgcttgttgacatcatctttctgagaacactagtatatgtgatttactataacaagatcttagtttttcctgttggcaaatgacatgtaatatttacagaggtcttgggttcagtccagcagaaacatctcagataaattgatgtgtgaaactaaagccattttacattttctttcatatggagataatataaacagttttttcatttaaaagtaaggagagactggctatttagtatggatttctttgagagggacaacttgtaatagtatgcattctc

SEQ ID NO: 88889 - DNA, 1020 bp, Homo sapiens
acacctgagtggagagcaacgtgaaaaggtgatgtcagcaagaatttaggatgtatggaaaggatggtaaaggcaccaactggatggatcagggagacatggaatgcagaatgcaggaaataggtaatctcttaaattgcacaaatctaggtttcatttttgtgctctagtgtgttacacttgtgatgacttgacttccctgagtgacagtgcgatgggtgtgatccatattcatatgcacttcatagggctgtgaggactgagagaggtgacccagtgacgagtgtcacacaaacctgacatgtcgtaggcaccaaatggttctagacagtggttctggttggttttgtggtcaattggaaacctttcatcaagtagaattttctttgcagagcaaacaattgaaatgttaatattctatgtgtactaaagtttgtattctccattaatatgggggagtatatggtgacctggtgtttagtgccagctttgtttttggttcattgctcgatttatgagagagaatgcataatatttgttgttcgactattttacttgcaggattgaagagagttgacaaatctagaaaatgctttgagttcttggacatcactgtttgaaaacgtactgattacccttagttgagaatgggaaaatctaaaggggaaaagtcactggttcacgctgtactattagaattggtcatcttcttgcctgacttgtaagttaaggatgcttgatctttgctgtgatttaacctgttcaggatgaattgtaaccagttacaatgaatacaaattctcctttctgtttgacctggaaaactttccaaaaggagatgtctttacaataatgatatatttggtgaaagctgtgggttgtttttttttttttaaagcttatgatgacagtattgaaagaggaaactaatctgtattgtcagcacagccacagctagcactagtcatttcttgagaggtggagctgtttctcagaaaacatgctgtttgagggtaggag

SEQ ID NO: 88890 - DNA, 1054 bp, Homo sapiens
tttagattttttgtagagatggggtttcgtcatgttgcccaggctggtctcaaactcctggactcatgtagtccacctgcctcgacctcctgatgtgttgggattacaggtgtgaggcaccgtgctcagcctccgtaatgtatttcaaatctgttttcttctctgttcacattggcttggttcaggccctactacgcttttcctcgtcattacagtagcctccaaacccatctccttgtttcccttctgttcccacttcagtccattttcatggtatctggagtaatctttgtataatgcaagtgtgttttccactctcctctctaatagtgctgcacaatttttatgaaaaagttaaacttctttagcattatcatactgggctttttggagattgacccctttacacacctctctaaatcttttctacccattttcctagaaattattcatttcagtaaaactgaatcacttggagttcttctagcgtgactggtttttaatacctcagtggcttcaaatatgtcattccctttttgaaatattcttcccctcctctctctgacccatctcaatcaaagttctccttctgcaaataccagctcaacaacctctttcccgtgagtggtattctcatccagtggaggtggtggttctcgttcactaagtccagaggggctcaggaatgtgtattttttaaaagctgggatggtgttgctgtaccttttccaactgatagtcattatgtaatttaaaaatgtgtttctggctgggtgctgtggctcatgcttataatcccaacactttggaaagctgaggtaggaggattgcttaaggccaggagtttgagaccagcctgggcaacatctctacacagaacttttttttaattagctgggacgtggtgatgcatgcctgtagtcccagctatttgggaggctggggcaggaggatcacttgagaccactaattcaaagctgcagtgagttgcaatggcaccagtgcactccagcttgggtgacagagcaagactgtctctaaaaaattttttaaa

SEQ ID NO: 88891 - DNA, 1127 bp, Homo sapiens
ctctccccggatcgtgcggggcctgagcctctccgccggcgcaggctctgctcgcgccagctcgctcccgcagccatgcccaccaccatcgagcgggagttcgaagagttggatactcagcgtcgctggcagccgctgtacttggtgagtcgcggacccacgcggcagtcgccgacctcctccgagacccggactcgtgccctgtccgcagggtccctcccgcctcccccgcctctcgcctctagcctctcgctcggggcggaagtggcggcgcggtccgcgtcaggggcgcgcctgcgctgaccgctctcttgctccttttggtttaaaaaaaaaaaaaaaaaaagcatacttgagctgagcagctcatggttagcgcaagcgcagttagttctggagggcggtgccacagcggcttcttggggagcgcgtggatgcgccaccagcgttgcgcggcccgggtctgggggtccttgggaaagccgtgggggcgctcgggcgcgcgcccccgggccgcagcttcgccgtagctcccacgccgctgtgcttggttcttgctcgcggacagctctttctctggccgggtgttttgtggccgggtgggcagctggcgtccccgggagcggtgagggcgggggcgggcgagccgggccgcggcgtccgggtccagctggcgcccgcgcaggacctgtgggagcaggccgctctgggcgccgggccggccgccgcagccctctgcgaggcgaagctcgctctcctggcggagccgcggtggttgggggtggctcgtggcctctggcgagggcagcgctctcgggaccctccgtcttcattttcccccgtggcccagcagcgcccagcgtgggttcggcccccatagaaccttcccggaacgaaagaggctttgcttgtgttcgtccagtgatagcgtgtcattctctttatagttttccttactgaggtatactttccctacagtgaaacgcagctttcatgtgtgctcccagacgggtgtcacaaatgaatcccctcttgcaagccccctcaaatcaaaatagcctttccttgccctgagaaagtgccctcatcccctccccgggggcacggtgttccgatgcctatcgccc

SEQ ID NO: 88892 - DNA, 1053 bp, Homo sapiens
cccttggtgcttggcccagtgcttgacacattcaaggttctcaatgtaaattttttgagacggagtcttgctttgtctcccaggctggagtgcagtggcgtgatgtcagctcactgcgacctccgcctctggggttcaaacgattgtcttgcctcagcctccctagtagctgggactataggcatgcggcaccatgcctggctaatttttgtatttttagtagagacggggtttcaccacgttgtctaggctggtctcgaactcctgacctcaggtgatccgtttgccttggcctcccaaagtgctgggattacaggcatgagccatcgcacccagcctctcaataaatacttaattgaatgaatgaatgtttacttgctgattgtgttcttttgttaactatatgttcaccgctttccttgtacactgattcagtcttatagtttttgtatcaatttgtaggaatttttgtataaaatatctgccttttattttcttataggtctgggataaaagtgaaagtggtgattggcattgtactgctagctggaaggttagtatttatttttacatttattaaaaatacagaaatatttactgtttattttatagttatctatgaattgttttgagaaaataacatttatacagtagttcttttcctgggaagacattttactgtttttcgctattaaagtaacaactgtgtttctcagaatttgagagtaagaaaatctgtaattctgtagcattctaacataattatcttagtaattcagaatattccttttgcctttacatattttaattgttgtgatgtttcatacatagttttctcttaaaaaaaaaaaacaaaacctttactcaagtagaaattttcttttttttttttttttgagacggagagtcttgctctcttgcccaggtgggagtgcagtggcgtgatcttggctcactgcaacctccgcctgttgggttcaagtgattcttctgcctcagcctcccaagtagctgggactgtaggcgtgcaccacgatgcccggctaatttttg

SEQ ID NO: 88893 - DNA, 1150 bp, Homo sapiens
tttactctgctcccagccgctggtaaccactaatctactttctgtctgtatggattttggagcaaataaatctaatgttatttattttattaggtgggtattttctgtagaaagaatttgcaagtaaaatggtggacttacagaatctttgtttcaaaggttggttacgctaaactctgaagcaactctccaactatcagcactggaagtagtcaagtttatctggctagatttttcttttattagtaaaatgtcagaagaactggacttcagaagcattacaatcctaaatatagaatgtcttctaaaggttaaaacattctggaatttaactttttatttacatgttatgttgatcagttttcttctctcatagaagtaaaactatattctgtttcctgatgtaaaaccagtgtttatgaaatatgaataagtatttaggaaaaaagaagccctgggataatgagtatctgttcttttcttttttttttttgattccccagacacatagtggatctgtatggcgtgtgacatgggcccatcctgaatttgggcaggttttggcttcctgttcttttgaccgaacagctgctgtatgggaagaaatagtaggagaatcaaatgataaactgcgaggacagagccactgggtgagacatttattagtattctggggaccgggaagacatgagcagccaaggagcattcatccgaaggctacctcagataattggtaaaatatcaccactcccctctagttttaccagttctaaagttctttcttccatgtttttttcttccttttttatttcattttaacttgggtctgaagcaatacttaggagcatcactgcattgtttataacttttatgatgaatccagaatatttgcattgtatttgattttacctattagtatattttatgatagtaatatatgattttaaagtattctggctcactgcagtctcaaactcctggccccacctcagcctcctgagttgctgagattataggcatgagccactgtgcctaactctaaaattcttttttttttttaactttaaactcttaagggttaataaaattcttttttttttttttagacggagtctcactgtgtcacccaggctggagtgcagtggcacaa

SEQ ID NO: 88894 - DNA, 1180 bp, Homo sapiens
cggtgtcttgccatgtagcccaggctggtcttgaactcctgagctcaagcagtctgcctgcctcggcttcccaaagttttgggattacaggtgtaagccatcacgcccaactcatttacagttaaagggtctaatgcttgcagcatgctttgtgtgacaaaacttcttgtctgaaaattctaacattttcttttttttttgtgatcagtttgcttaagagagattacttatataacaaaggtaggcttttggaggtagacttttttttcattaaagggagtaattaattatagctcactaatttgttagtgattcccagctatatatgtggtattttgccatgtacttgtaggaacttgtggcccagagatgtatccaagcttatatacctagtgaatgatagaggagtttctgtgtgattccagagtctgtgtgtcttttccactctaccatgctttctttttgtatataatttaaattgttattattttttttttaggttaaaaggacaactctggtggatagcagaacatctgttactgatgtgaagtttgctcccaagcacatgggtcttatgttagcaacctgttccgcagatggtatagtaagaatctatgaggcaccagatgttatgaatctcagccagtggtctttgcagcatgagatctcatgtaagctaagctgtagttgtatttcttggaacccttcaaggtaagtttacatattaaacctctgataacatcctagtaaaataaactagtaacttttaagctaacaatttgataatttattctctcaaaggtgcttcttctcaagatatatagagtatatgttctccatttttcacccaggcatgtcatttgtccctgttttcactcaacagaggaagccggcattgtaaatattttcatgtgaaccttttggatgttttctatgcatatgcaaataactatttaatgttgtcataaacacatatatgcaaacacgcccagatattcactagcacaagtagacacagaacaccagatattgaaacccatacatttgattgattgattgattggttgattgagacagagtattgctcatttgcccaggctggagtgcagtggcaccatcttggctcacagtagcctccacctcctgagttcaagcaattctcctgcctcagcctcccaag

SEQ ID NO: 88895 - DNA, 1089 bp, Homo sapiens
tcatagctcactgcagcctccaactcctgggcgcaagtgatcctcctgcctcagctcctgagtagctgagacaaacggcacatgccaccacaccaggctaattaaacaaattttttttttgtagagatagagtcttattatgtggcccaggttcttcttgaactcctggcctcaaatgatcctctctcctgagtctctcaaaatgctgggattacaggcatgagccaccctgccgcagtgtttcttctttttgtcaaagcacttaagatctttttgtcatgaagttagtcacagtagggttactttttgtttcatagttaatgaccaaaaatttcaggaggaaaaattactaagacctcttaagtatcttttaaaaatatgttgaatgcttgaaagcttttttcaggcaaagagctcctttctatctgagccataagaatatgctaaaaacagttcataaggatggaatcttcagttcccatgtgtgacattctcaggtgcatacttgcagtgtggccatgtcagctatgtggcagagacctagattcactagtagtgtgacaggctaactgtaagctggttgtctgcttgcctccagtgtgttcattctgtgaatgaaatgtgtatttcttttgttatctaaaatgttctttctccccgtttctagctctcgtgctcattcccccatgatcgccgtaggaagtgatgacagtagccccaacgcaatggccaaggttcagatttttgaatataatgaaaacaccaggtcagtcctgctttggttttaataattgttcagaattgcatttaattttttaaaatgttatttctttattcatttacagaattatgtgtcattcatcatatgtttgctgatttactataatataccaagttctgtgctaggctgtgatagcacaggcatgagtgataaagaggagaaagtagaccagcctggccaatatggtgaaaccccgtctctactaaaagtacaaaaaattagctgggtgtggtggcaggtgcctgtaatcccagctactcgggaggctgaggcaggagaatcgcttgaacccaggaggcggaggttgc

SEQ ID NO: 88896 - DNA, 3678 bp, Homo sapiens
ctgcaatctcggcactttggggggccaaggcaggcagctgggaggtggaggttgtagcgagccgagatcacgccactgcactccagcctgggcaccattgagcactgagtgaatgcaactccgtctgccatcccggcacctcgggaggccgaggctggcggatcactcgcggttaggagctggagaccagcccggccaacacctacagttacttttaaattaatgtcatttttgaagaatggattatttaatgaacattttatatataaatatatgtctttttggaaaggggaattgagtcaagagcagatttatattctcttaactgtgctttatttaggctgaaactaacaattctccaaatataactgataatctataaatatttaatgacaagtggcagtctatttagggaaaactaaattagtattgagacagtcttgtgaataacatatttaactttaattttgaattgtgaatttcagttcttttctttccattctttcattctttcctacttgctgccctgcccatttttttttttttttttttttttttttgaggcaaggtctcactccgttgcccaggctggagggcagtggcttgatcttggctcactgcaacctccacctcccaggttcaagcaattctcatgcctcagcctcctgagtagctgggactacaggcgcccgccaccatgcctggctaattttttattttgtatttttagtagggatggggtttcgccatgttggccaggctggtcttgaactcctggcctcaagtgatctgtccaccttggcctcccaaagtgctgcgattacaggtgtgagcaactgcacctggccttgccctgcctttttaaattaattattgtcatctattttattcttctgccttgtgtgggagaataaaatcatcctgttttgttgtttctttcttccatgaaacagtcactgagtatcatttatgtgctgggatcactccaggtcttggcgagttaaatgaaaatgacattggcccagctcaagggccaaggtgtggggtttgggcagatgtgcacattattataaagtgatgtggtggcgagaccacttgtattaatttagaattttacgtgtgtatatatatatgtgtgtgtatatatatatgttttaaaactttgtttggaatgcctcagaaaatgttttttattaacaggaaagaactgacttcctctggtgggccaacaaagtttgaaatccatatagtggctcagttcgataatcataattctcaggtctggcgagtgagttggaatataacaggaacggtgctagcatcttcaggagatgatgggtgtgtaagattgtggaaaggtaagagttcagtgaaggggtaattgttggtttatatttctgctctgcaatttttacttaaaatgtaaactctgaaatattttttgaaaatggtcttttacagttacttttaatgtcatattaatttatgttattttgaacatcagtttacctagttcatagaagttaatgactgaattgttttttaagttatgtggaacagagcagttttcaaaactaaagtaattacaacagaatatgcaatatctccaataaaaagataccagttgtcatatatgtaccttacatgactgctctacaaactcaggctaggactgtagtggctccttttttatcaaataaattgctttagacaatccatccttaataggagaaaatccagtatcttccctgcttcttctctgcagctcccataagttaagagccttgggggccctgattgtaagtttcttctaagtgccaggctgagtgagaaggtctggtcagttgacactgactgtggtctctgtagcttggttctgcacttctccttggatgattatccattaggcagagatgtctgtgatttgtgcaccaccatagaatggtgtcccatacttagcattcagaattatagctatctttgtttatttgccatttagcagttattgtttcccaaagtgcagtttgggtaagcttgagggcctcccatgttcaattttgggctttggtaaaaccagcccagaccttcctttcctcagtgtaatttgattttaggggctttgctgtccttttctgcctttaggctttattcaggaccaccttgccatgctccccagcagggtgcctaacttgattttcttgggctcattgtcttcagagaccaatttttcattcaaactaataaggccattttggataagccactgaagctccaaaggttttgttacctacatccatttcagaagacatgataggtacccttataacttatacttgcataattaagaagacaacttcattaccttacatacatatgtaagtgaaattcattataatgaagactttaatattataatgaagattttaatattaacttcataatgtggtagctcagagaattgtctttgctagtatctgtaagatgggtggtgaaagctttatatttttaaaattagtgatactttgaaaacttctaaaaagttgttaaaactgagataatatgtctttcatttaaaaagtgtctttaatgtttatcctgaaagaaatgtagctcatagcctctgtctcgtttctttaattgtagtttaaggacatgggtacagatttgtgcccttaggcattggtattaatcatgttaatgtatttgattattttcctttcagctaattatatggacaattggaagtgtactggtattttgaaaggtaatgggagcccagtcaatgggagttctcagcagggaacctcaaatccttccctaggttcaactattccaagtcttcagaattcattaaatggatcttctgctggcaggtaggctgcttcatgggaaaactggaaatcatctttgttttaaatcattctggtagccatacttaaggtggattatttcatggattataagatggagtggaaatgttcacatgtgcttgtattagcatttaagaattcattttgttagctatgtatttggcttacttggtcataatatttgcaggtaggttatgaagtcattacattatattctgaagctttagtggtctattggtagaaatgtttacaggtttaagattcaactttgcttccgcaacagtgagaggaaggttatctggtttaatggtgagagttttagtccaaatgaacattagtgttttttagtgcttgtagtgtggtctttgcattaggtcaaactgaaattttaaataaaatacatttcttaaggctttctagaagagggtacattaagttatttggcttttgtgtttaaaactttaatagaaataagaggaaataataaaacacgagattgatttttagaatatttagcatatgttacattcttgtatatcataataaggaatatttgatgtcatctagagtctgtttccatgttcaaattttaaatatgtgaatttgtaagataaaattattttaatatgcctttgtgaataatttggaatagaattcaggaaacgtcaaaacacagcctaatgaattgtcctgtggttatatcctcttgttatcctatataaaagaagaaaattgtatttaaaatttcaactatttttatattgttatgttttcataaagaagttctgcttttgattttgaggtttta

SEQ ID NO: 88897 - DNA, 1100 bp, Homo sapiens
ctcctattaaggatggattgtctaaagcaatttatttgataaaaaaggagccactacagtcctagcctgagtttgtagagcagtcatgtaaggtacatatatgacaactggtatctttttattggagatattgcatattctgttgtaattactttagttttgaaaactgctctgttccacataacttaaaaaacaattcagtcattaacttctatgaactaggtaaactgatgttcaaaataacataaattaatatgacattaaaagtaactgtaaaagaccattttcaaaaaatatttcagagtttacattttaagtaaaaattgcagagcagaaatataaaccaacaattaccccttcactgaactcttacctttccacaatcttacacacccatcatctcctgaagatgctagcaccgttcctgttatattccaactcactcgccagacctgagaattatgattatcgaactgagccactatatggatttcaaactttgttggcccaccagaggaagtcagttctttcctgttaataaaaaacattttctgaggcattccaaacaaagttttaaaacatatatatatacacacacatatatatatacacacgtaaaattctaaattaatacaagtggtctcgccaccacatcactttataataatgtgcacatctgcccaaaccccacaccttggcccttgagctgggccaatgtcattttcatttaactcgccaagacctggagtgatcccagcacataaatgatactcagtgactgtttcatggaagaaagaaacaacaaaacaggatgattttattctcccacacaaggcagaagaataaaatagatgacaataattaatttaaaaaggcagggcaaggccaggtgcagttgctcacacctgtaatcgcagcactttgggaggccaaggtggacagatcacttgaggccaggagttcaagaccagcctggccaacatggcgaaaccccatccctactaaaaatacaaaataaaaaattagccaggcatggtggcgggcgcctgtagtcccagctactcaggaggctgaggcatgagaattgcttgaacctggga

SEQ ID NO: 88898 - DNA, 2825 bp, Homo sapiens
gtactgcatattttcttttgtaaatagcttctattttttgatctgtattcttattgtgccaataaccatctgtgttagatctgtgatgcattttcccttttccatttgtattatgtcctttaacagaaagcacagctgagtacaagctaactggagtaactttgctgttttgctgcttgttgcatgcacacaggaatggaaagcgagctccttttccccttccccagcgccgtttgacctctcccaagatacaccagcagcctgcttactactaaacgcaatccaaaaggcctttaaaaatacagtgtatattttttgtactagtcagtttattgacactatttgaaacttttgaaatataaacggagaggctttctgttgagacattgtcaccaaaacaattttttgaaatgttcctgaaactaatttgggtttaaagattaaaagggttgttaccattcttatctgagtagttgggaggaggggaataccactttagttcatttggaaaatatagacatatttcttttgctttcttaaaacagcttaaaatgatgaacttttataattttaatttgaagattgaataaatattttttataaagattgttttgagtgctgatttgtttactttttgtagatttgctttatccatgatattcagtacaactctgtcatttctttgtaatatttaaaaaatattagtaaaggagtgaattaataaagtagtaatagtaaaatgaaaggaacttgactgtacagtttgtagccaggttaagcatttggtattgtttcatttacaatttgggactaagatggaaacactttttttataagtttttaattcatagtcactaaagagataaatgtttcttatatacatttgtgtatttttatggtgttatttattccatggcttagcttccttcaaatcaaaatttggacacacactattaagagaagccattaaaattttactaaaattgtgcatgtaaattaattgtcagcattccatgtctcaagattttcttaatttagttcgctgtttaaattaattcatgtcctgtaaagttctgaccttgataacaaagctataaatatttaagtttgctaatatgcgtaagtattatcggtaagttacaagatggaagaagaataacagtagggcacagtcattctgtgaatccttttacttatcaaaatttggtagctattctaaggcttttgcagaaaaataagtgttcaatgtttgtagttcttcaaaagcatgttgcagtagccagccatactatgtgtattcccagtatcatgtacgcactaaaaaaaatgtgtgcttgctgctgctgtgagtgaaccattgcttaagataaaaaacttaactagatctgtaaatgtacagaatagcatcagatgtttctgagagattagaaaatgttttgaatttataaaattaatgtttttctttgtaacatttatatatattttttaacattttaagtttaacagattgtattcctttcaagtttctatacttgcttaagcaatcttgatttgagtaagggtcttgatttgtgctattatgttctgttagttttggcatgaatatactaaagcttttttttttttttctagcatgtgttttctcctctttggttctctttgtatttactacttttctctttttcttgtgttttttttttcctgtttttgttttgtttggtgttttgttcctgtcttcattgtttcaggtatttctttacccctctggattccccacgggctggatcgagatggtccagttatgcccagctccttcctcctcctcctcctcctctggtagagcactcttgcgatgctgacactgccaacctccagtatcctcaccctcgcagacgatatctctctcggcctcttaatcccttacctgagaatgaagggatttaaaacactgatttaacattgaaaggccttattcaagtgcttgtaaatgctttcatttctggctgctttttgtttttcattttctttcagaagatttttctaacttagggtctgtcttgcatgtattacaaccagaatacagtgtttggaacctaaatctgtttgtgcgtctgcatcaaaggaacatttgcttcactgggtgataacctttgatgaaatgagatatgtccaagtaacgttaactgtgaagttacacacagtagctgacttcaaagtgcctgttctgtaaattttattttaaactgttaccatagtcttaagttgtttatgctttatcagactggctaatgtgaaagcataatattatgaagtttattctgccttatgagaccttaaaaaatggatttcattttacaggctaatgttgtaactgactagtatgtaaaataaatcattcctgtgtataaagcagcaaaacctaatgtggactttttggtcttttttttttttttttttttttaaaggaaattgcctttcactacttggaattactgtttaaagcttttgtaattattatccaagtaggttatgtaataaaatatatttaaaaatatacgaatctcttgccttataaaaacagaatgtattttatttaagataattgccaaggcttactcttctttcactatctcacaaaaaacccaaacaaaaattaggagatgtgagcaaatattacatttatttaaaaggtagaaagtcagtatgtagactactaacatttagaatggacagatgttgactttcagtctaattagtcaacattagaatattttctagaatattttaaaatgagaatgtacttgattataattgtggtaaaatga

SEQ ID NO: 88899 - DNA, 1783 bp, Homo sapiens
agctgattgaaggtgaaacctgacgcctttcagcgcctaccaacaggaaaggtctgcatctgcccacggaaggacgaaacctatcgggggggatttgttggcgggggatacttctttgcgcatagagtgactggcggtgccctggagacccaaactgaataaagtaagcattattttcaaattcgccaagaccttgaaggcggcgccaacgggagccgtcccccgggtcccacgcagcgcagagctccatttcctcctccggactcgcagggcgcgcggcttcctcgcttcaaatccaggaacgcgctgtccccaccaatcaccgggcttcttcccgccccatgtcttcccgctgtccaatcaaaagccagctcagtctcctccccttgcctggtgccgcgaacagacgtaaaccagaggcgggcgcggtacggccgttccgggctccagccggtgcgggggccacgcgcacgcgcacttgcagtgccctgggacacctcttcagtccgtggactttcccgctgcacactgccctccgaagtcggggacgcgggctcggtgaggggggacgctggtgcctcggcctgcgcctaggcgggaggcagacgcatgcacctttggcctacgtttcggctgccggaccgacgggacagtgacggttgggccgggtgggggcgcaggctgtggggcggcctcagggcgcgagcaaggggactgccgcgcttcccgcgcctctgcgcctggcgcagcctctgagctgagctccgcctggttgggattaattgcacgcctctgtgtcatcgggctttggccgggcgtgatgagacagactgttaggggatcacgtccttctttcctcccctcttgtctggggacttccacctcttgagggacaggccctctccgtgctaccctctggagtttcttgcagtgtgcttgtgaagtgaccggtgatgtttcctttatgtgccctgtgatgggcggttctgttcctcctttttgtttaaaattctgacccaggaagtaaccttgttaacttaacttaatgcccttgtcttccgtttactcacttgatttggtttctgctaggttgcgttcatttattcctaatagtttacctacattccttgcctatgatttcattatcaacagaacgtgaaatgagacgaatgttaatacactctacttttactttgctgttactttcagagtttgtttagtaaaacatgaggacctcttcaagtcagtcgtttggagaacagctgtttatatgaccatatttccatttgctcttactattttgaggtcattcgactggcgtttttactgctccaaaatcaactttttctccaaatttcagttttctaggcaaaaacggcaagccttgaacaataatataccaaatgcctacctagttttaaagtatatcttaaagtgccaagagtaaatgatgagttttggggaagtttgactcggctttgggttccacggcgtgtgcttttaaatgtgtttaattgtatacatagacctacgattaatgactatagtcagtaatcttttatgtacctaggaatgtaattagtgagtccagatgtgaaatttgaggtcactactttaaggaaatagcaagagaaattgcaaatatagccactcagttcaaataggatagaagaaaaatattgtcttcacttgagatgatggaggaggggtgggtaatgcaataatgtgagaaattaaaggaaatttcctttaggaatgtgttatgtccatgaatggtttacaa

SEQ ID NO: 88900 - DNA, 1025 bp, Homo sapiens
ctgaggtaacttggctcttgtcattctagtaactttcagctcctgaagtcaagtttctctttcttagaaactcaaccaggctgggcgtggtggctcatgcctgtaatcccagcactttgggaggccaaggcgggcagatcacctgagttcaggagttcgagaccagcctggccaacatggcaaaaccctgtttactaaaaatacaaacattagccaggcgtgatggcgcacgcctctaatcccagctactcgggaggctgagacaggagaatcgcttgaacccggaaggcagagattgcagtgacctgagattgggccactgcactccagcctggacgacagagggagactctgtctcaagaaaaacccccaaaactcaaccagcttttattttctttacttttaaaatttctgttttattaccagattgatgtttggttaaatacaccttgttttgtatcttcaactggattgtgtatagtttacacatccattacatgtagggtcttgcataatatataaagtttgcctatgcttaaactggccactttcttgtcttttctcaacctaaacatttagtgaggagcaccatcttgacctttgggctgaaggggttgtattaacactctcagctcttttagctttaagatttttgtgactgtattgttgaatacagataaactccctattgccaagccacaggtttccgtgctttgcacagaggatgatggtttgaaatacaggggccctatttgtttttaccccggtggttggttttactgtcacgcagccctatgtcatgatgacatttaaatatgtgtaatttaattcttaacaattaaaacaaattttttttgtataggtatcctgatatccaggcatcttacttagtagaagggagattttcagttccatccgggtcatctcccggaagccagagtgatgctgaaccaagagagaggttacagcttagcttccaggatgatgagtaagttcataccttcatttgcttgtactgtgttaaa

SEQ ID NO: 88901 - DNA, 2166 bp, Homo sapiens
gtatagtctttccacctatgcctttcctttcctgtactcaatgaaattttcctgtacctacccatgagtgcacctttggcttaagctagtgactttttatgtactacagccccagtaaagagatggagaaactgggaagtaaattgtagttagggttggagagttgcctcaggcatgaaaggttgggatttgagaaatatggaaggacttttaaaaaaaaatccatcctggccaaatttgagtctggctctaggtatcagtttgtcatgtaatgaatttgttgcatttagaggctttttcctgaagttccgttcccacccctctctttctgtggtgagctgctctagacccaagagcttttggagtagggtgggaggaacattgcctgtaagaaaaatactttcatccacacagaaaacagcagaggtagaaagaaagataaggacaagaactaggactagggataaaagtaaaaacgattgaaacctttattaattcagagatttggctattttggcaaatatgccaatatcctttaagtctgcagattttagaaagctgaattatgtagattggtagtttcaaggatacttattttggaagtaaaaaaaccactttttgctgcttgaaagagtagcagtatgacgttctttgattttggtagactgtatcactggacccaaaatgttggttcagtccccagaatacagtgcagtgttagcagttgtagttttctggctagactcaaatgtttctttttattgcttccattttttctttttaagaggtaaaatacataactgattaataaatattttgtagatttacccaaggtaactaacattttatcattcttctgtttcctaataaaaaagttctatctctaggaaaaagagctatgtggaaagtcaacgtttgtcaaatgctctcagcaaacagtcagctttacaaatggagacagcaggaccagaagaggagccagccggagctacagaatccttgcagggccaagatctcttcaacagggcttcaccactggaacaagcacaaggtactgaactatttgaaattatttcttaatgcatatgttttaatttcctttttcatttccttatctttggattttttttttttttttttgaggcagggtcgcactcctgtcgcccaggctggagtgcagtggcgtgatcacagctcactgcagcctcaacttcctgggctgctcaacctatcttcccatctcagcctccttagtagctgggtctacaggcacacaccaccatgctaggctaactttttgtgtttttaatagagacagggtttcgccatgttgcccaggctgggctcgaacgcctggactcaaatgatctgctgtgccttggcctgccagaatgctgggattatgggcctaagccactgtgcctggcctttttgtttttttttttttttttgcttaattttgagatgggttctagctgtgttgcccaggctggtcatgaactcctgggctcaagcaattcaccctcctcagcttctcgagtagctgggactggatgcatgcatcgtcactcctggcttcgatgtattcatcttgtactatcataccatgaactgaaaatgctttggtttgcattgtacctattaatatcatatttacagtacttttataggaaaggtctcctcttaaccttgttgactcatttaagctgaaattctctttgctttggaaaccatgctgtcggatggccacagcatactttatattcaagacaagcctatttttagtgcatcttccacttttctcccactaattaatttatattcttatcgagagtcaattttgtttctaagcctattttttttataaaactgatgaattataagttctaaaagaaattactgtttctaagaaaactaggttgaatgcattggaaatactcaaggataagtcatttgataaattgccctcgggccaggcatggtggcttacgcctgtaatctcaacactttgggaggctgaggtgggcagatcacctgaggtcagaagttcaagactagcctggccaacatggcgaaaccctgtctctcctaaaaatacaaaaattagccagacatcatggtggctacctgtaatcccagctacccgggaggctgaggcaggagaat

SEQ ID NO: 88902 - DNA, 1044 bp, Homo sapiens
taagccttcgtctcaaaaagaaaaattgctctcaaattagatgtggagaagaaactacaaaaatatggggggtcaggcactgtggcttatgcctgtaattcctgctgaggtgggtgaatggcttgagcccaggagttcaatatcagcctgggcaacaaggtgaaactctgtctgtacaaaaaatacaaaaattagcagggtatagtgctgtgcgcctttagtcccagctacttgggaggctgaggtgggattgcttaagcccaggcggtcaaggtgatcatgccattgcactccagcctgggagacagacccagaccctatctcaaaaataaataaataaataaaaatatagggaaagttgtttaaaaaaatcataggcttctgctgtctgattcctcttaagtactccacattcactttcttttatcaaagaaatcaaagctggaaattgaaaagtacattctatgcacttatatagtgtggtattctgtaactccaaactagttcagtactcaaaaggacttgcctgattatatgttgtaagattgatgaatgagtacacattatatgttagaaaaattttaagggaggtttgtatttctcttgatgaaaaatgttatatatatgaaagaaaagagtggtattatcactcaaataagcaataaaagaaaaaaatagatgaattggatttcagaattaaaaacttttatgcttcaaaagacactatcaagaaaggaaaaagacggggccgggcacggtggctcacaccggtaatctcagcactttgggtggccaaggcgggcggatcacctgagtctgggagttcaagaccagcctgaccaacatggagaaaccccgtctctactaaaaatacaaaattagccgggcatggtggcacatgcctttaatcccagctacgtgggaggctgaggcaggagaatcgcttgaacctggtaggtggaggttgcggtgagccgagatcgcgccattgcactccagcctgggtaataagagcgaaactccatctcaaaaagaaaaaaaaaa

SEQ ID NO: 88903 - DNA, 1705 bp, Homo sapiens
ataatataagggaccttaaaactggaaagcaacaaaagtatagaaacatgagatgcttgattaaaaagaggaagaaatgagaataggggaaaataaacgtgttagaaaacagactgaagggagctgctactgcgtgtaggtctcatctcatctgtggagctatgccactttatcagaatggagacattttccagggaccaagcatggcagagtacacagtgttctcagtagccaacatgaccaaaaagacagggatgttttacatattgtgctttcccatacagattttttcccaatttttatattatgaaaactttcaaagctcagagcttatattgcacagctgttaacatttgccatattttaagtgatcatctattttaaataacagtagattatagtagtccttgatgcccctggtgcttagatatttgtgagaatagctcagcactgtcctctctaaatgtaaaattggattaagattccatgtttctgtcttaaaaatcagtgcgcattttccaatataattcctatgctggtgttatttacatatatatgtaatatatatgaaatataatcacacttagagggaaatgttacattttcattctgggccttgagtatcattaaatggctgcgtgccctttagggttacatgttccctggttgaggagcagagaaattgatttttccaatgtaatggtgcaaacagttccttagatacaggctgcctggtctagctttgctgttatcttcactttctcgtaagccttgtgttgctcaagttcagttatgtatttgtgtacttactatattacgagcctctctgagcatgtgcacagtttgagggaagccttaagttttaaggatgttctattgggcaggtcaggtgagggaggtggcgtgggggaaagggaagttattaatacatgtacaattgctagccctttattgcctaagctgtgatttacagatactgaacacagtggaggttgagaacatatttggtcctttttgtagccttgtactatgctcttcagagccctgaatgtgcttctcttacttgccattttgtttcttatagattgttgtgcttgatgctggaaaacattttgaagacaagactctaaagagtgacctaagccacactagcttattagaaaatgagaaacttatcttaccgacaagcttggaagattcttctggtactgcagagtaacctgtgtttccctggtcttcaccttgccactccactttattcttctttgttgcagtagttatgatgccaactttttgggttttttgtccttaccttttcttcctacctgccagcactcaaatggccacttctattaagtgatggaattgaagaatttatttctatatatctatcctgatatgattatactcatcctcagtttaacatagttagggtacaaagtagtcacctggaggtgcccttcagtatatagcattgtgtttagaaattaggggaaccatgaaattttttttttttttttgagatggaatctcgctttgtcacctgggctggagtgcagtggtgtgatctcggctcaccacaacctccacctcctgggttcaagtgattcacctgcctcaacctcctgagtagctgggattacaggtgcccaccaccatgtctggctaatttttggatttttagtagagacagggtttcaccatg

SEQ ID NO: 88904 - DNA, 2863 bp, Homo sapiens
gaagaccatgactgactgaggggtcatgttttattttgtgcttgctgagctgggtgttacagtgttgaaaactcctacagtggcctttctccttccctccctcctccctccttcctccctttctttcttttacttctcctgtgataggctcatctatacttttttgaaagaggtaaccatttgccacaccattttctggaaagtctgctttcttctcattgatttgtgatgccacatttattgtatcctgacttttgataacatgccagggtctgtttctgtcctgtcttctcaaagaggttaaatatttatcttgtattaaaatgttcataatggtttataattgactgaagttacaatagttttctcatgtcaaacaaaaaagacaccaaaatcttagtccattgactcatttatgtcttatcggcctttttaattacaaattattgcttagtcactactttaaagcatgtcctgttttttctcgattttatcaatagatgatgatattgatgatgaaatgttttatgatgatcatttggaggcttattttgaacaactggcaattccaggaatgatatatgaagacctagaaggaccagaacctccagaaaaaggttttaagttacctacaaatggtcttagacaggtgtgttccagtctttatgatttttcagaaatttgacattagaaaattactattggtctccttggatgttcacatgaaatgtaagcctttggactttggacttttctttggactctgtgtttccgaggtatgaattgataagaaatgcctaccctttcttccttcttggtacctttccctcacctacagaaaattaaaggagtaacacaatggacatctacaccctcttcctccagttaaccaattgctaaagtttgccacctttgcattttctttctctctccataaatactttcttctctgaatcatttgaaagtaagtcacagagagtatgacatttcactcgaatacttcagcatttatcttttgtagataaggacattttcctgcataaccacaattctgttacctaactttgatataataatttaaattactgtacagtccatgttcacatttacccaataatccccagaatatcctttattcttactattttttatctacaatttaatcaaagattaaccttgcctttggttgtcctgtctctttattctcttttaatttggagtagttctttcatgacgtgatctattttgcaaaatctaggccctttgttttgtagagtgaactgtaatctagtcaggagggaaaaataaccataatctgttttctctcctgactagattagattaaacgttttggcaagaatacagattaaacagtttctcatgaatggattcatagtaaaccaagcagtgttgtgtacttctcattgccctacaccgggagacgtttatctctcccacaattggtgatactgtttttgataattttggctaaggtgatgtcagctggatgtctccttgtgaaggtagcttttccccttcgttattaataagtcatctgtgggatgagatatcagccctttgatcatcttattccccggcaactcttcactagctggtttcagtgtccttgctgactcttggaaatattgattactctcgtggtgacaatggcgatttttctaattccttctacacttattttctggcatccttcagtaaagccacattttctccctcaaaatatttcattttaatttaaaagattaatacagctaagatattctttcaacaggcaaatgaaaacggtagcttaaactgcaagtttcaatcagaaaataacagctctctgatttccctcgactcacactcttctgaaacaactcacaaagagtctgaggaaagccaagttatttgtctacctgggactagtaagtatagaaatatgattcttttgttcttaagttctagttttgactttactttttttaaaaaaaaaatatttctctggtatgatttagcatatattaactcttctagtccctcaggtctttagacagtctaaaacttttcaaaagagcttttaataatagctgagtaaattagtgttactagaaataccgtagtatatatttcttggattgaatattacaaataattgtattctatccagacattgataattaaatatgaattctttgggtatggtagcagtttatcatgtttattattgcctcttactgttgcttattttctctctacgaaaatggctaaatttgtcataggagtgctaagtattagggttacataaaataatttgactggcaagaatcagttattatgttagattactcagatttgatgtggctcctttaacatttttctttattttttcaggtaattctataggtactggagatagtagaaggtacacagatggtatgttaccattttcctctggtacttggggaactgagaaagaaatagaaaatttgaagggtattgttccagatcttaacagtgtaagttatgcatttttcttagatttcctataaaaaaaggaataaggggtcttttgtgtttatatgatatcagtttttttcaaagaaacagtaactgttgacttctgaaaaatacagaaaaagtactcactactgataatttttcgatatgtttataagtatcatacaattatatacattttcttgcatttaaatatttattgacttgcatttagattagtcatttggaaagttctttagcccagtgtccagtcattacatgaaaaagcaaacggatcttttaccttgctcaaacatgtttgtttttcattgtttcagttttttctgtttgttaatagtacccc

SEQ ID NO: 88905 - DNA, 1037 bp, Homo sapiens
catttgtagtataaactgccttactcctattaaaagatattaatatctagggctgtttatccatattaattttatgaggctagtcacactaataggcttaccatgtttgtggagacttttattggtaatgataaaagttgggctgacaacatttctatcatcctgtaatgtaatgcacacacagagctcacttttggtatgtaaatctcttgatgtgtttcctatgaccacatcacaaagtctggttttggtaagttgcttatcattggttcatatattcacatatagtctagaatacagcgaatactgtgtgttctcttctttcatataataaacattttatatcaactatataatttttcccataaattttaaaataagttataaaaaacaagacttactgttgctctgttaaaaaatctgattttttgttttaaaggaatgtgcaagtaaagatgttctggtgaagaccctcagggctattgatgtgaaacttaactctgataattttcatgatgcaaatgccaatagaggtggttttgatctgactgaccctgtaaaacagggggcagagtgtcctcaccaaaataagacagttttgcacatggatggatgtttagacactgagactcctacggtgtccattcaagaaaatgtggatgtagcctctttgaagcccattagtgacagtggaattaatttcactgatgccatttggtcaccaacttgtgaaaggcgaacatgtgaatgtcacgagtccatcgaaaagaataaagacagtaagtggactttttaaaaaatagagtgaaagaaatagatgttcatacattttgaataggacatattttcatgtgaaatgtgccagtctttcctgttgaaatattttagtgttttatagtttaaacaaaattttaaatctacttgtacagggaggattgctcagaaatggtatcttttctcacagatctagtgaaaatgtacctttctagctaactcttagcattctttctttattcctcattctccattatagactt

SEQ ID NO: 88906 - DNA, 1985 bp, Homo sapiens
ctgatgctcattcctaggttctgtgctgtaggttaagaatgtgttttttcttaggctgggcattttggcttatgcctgtaatcctagccgtttgggaagccaaggtgagtgaattgcttgagcccaggagtttgagaccaggatgggcaacatggcaaaaccccatctctagcaaaaaatacaaaaattagctgagggtggtggcacacgcttgtaggcccagcttttggggaagctgaggcaggagaatcgcttgagcccaggaggtagaggttgcagtgagccaagattgtaccactgcaccccagcctgtgcaacagagccagaccttgtctcaaaaaaaaaaaaagtgttttgtttgttttttttaataagaaatggtcacttaacaaggtaaagaactagcactgttctgacaggtaggaagcctcagtgggctttggtgctctgcttttcctgaacagaaatatcctgtgtctgcttttcttttgtcttaggttgtgaatgtgggacacagtctagggtcgcaaaggagcagtgtggatctgattggtccctcatggacacatgatagtggggagcctccgtcatgtttgggccatgagtggactgttccctctggctcaccattcacttttctcctttctgctccaaccctgcagtgccaggcagaggcctagagtgctacagccaggcagtctagcatctggctggcatacatttcaccaacacatttaaagttcttggcgattctgatgcctcaagcagggtcttgggcctcctagtttgccacaaatccaccactcccagttgtgtttctggccctggccctctttgcccatttgccccatccctctgaggcattttagtgatggcctttggcctgaggttgagtgtgcttaggctggcgttcctttcccagggagggctgaggtgctcggcagcagccttgagggcagacattaggggactcccagtctttgtccggaccggggtttcctgggatggggggcaagcggtcctggggcacgcttgtagccatcttcatgacaagcttatagagggcttatcagtctgatgactcctgatgaaattccaccagcattcatggatgagtgcctcaatgcaagagtgccaaactctccaaagcaaacattaattttagagagaaaaagctttcattgtaaagcccctgagtaaattggggtacgttagtgacaaaataactacagcaaggtgttctttagcaaaagtttgacaaccacagacttaagcatttaatacagatgcatgagtcatgagtgcaagcttttacatacttgttacaactttatttccttagtatttcattttcctaacttgtatctgtgtgctagtgtttgtttaggcattagtgtaatgtatttatataaacattcttttttaagctgaagcatttgatttgattgcacaagatgaagaagaatttaataaagagcatcaatttatacaggtttgtaattatttgttttatccaaaatttaaaatttttcctgtattagtgtaagtgtaggcacagtgttcatttctttctgaatatatggttagtatagaattatttcatatttttcttatggctagacaacttctgctttttccctcatactctaaataaaatactctaaattattaattgaagatcattgacatactgaaatatatctttaattcacttagaattgctttaatggcattaatggatatttccatagtttatttttattttttgagacaggacttgctgtgtcacccaggctggagtgcagtggtgatcatagttcactgcagcctcaagcttttgggctcaagtgatcctcctgtctcagcctcctgtgtagctgggattgcaggcatgtgctaccatgcctagctatttttttattttttgtagtgatggaggcttgttacgttgcctagacttgtctggaactcctgggttcaagcaa

SEQ ID NO: 88907 - DNA, 1098 bp, Homo sapiens
aagcaatagatgaagataacattcttcttattatttttcagatggggtctcgccatgttgctcaggctggtcttgaactcctgggctcacatgagtctcccatcttggcctcccaggtagctgggattacaggaaagcgctgtcatgagcaactcatgatcgtgtgtattataactcaagtgttcaaaaatactcattttccttttctggacttcattagctgtggtagctgatgatgcttcagtttgtccaattttttttttgtctagtttttcaaaattactttttaaattttcttggtaagacttttttagtttttgtatattagaacaacagaaaagtgacttgctgggggaaagaaacgaaacaataactttctccctaggaagaaaacatagatgctcataatacttcggttgcactgggcgatacgtcctggggagctacaattaattacagtctgttgaggaaatcacgtagcacatcagatttggataaagatgatgccagttatttacgtctgtctttaggagagttctttgctcaaagatctgaagctcttggttgccttggtggtggtaacaatgtgaaaagagtaagtatggaatctgttggaagtgctcacagtcaccagattttagattttgagtattatgatggcacagtgactttaaaatggagatagaataggatgggacagaagagtggtaaaaaacttaggtttcatcatcagtcagacctttactgcagttctagctctgtcttttagctaattctgggacattgagcaatttaactcctctgtgcctgaatttcccgtttcttaacagcacagttttatagggctttgtaagatttaaatgtgacggttcatgtaaagcatttagcactaaaccaacatgtaataagtatttaatagttgttcattgctgttgttattgttggttggtgtgaagaattctaaaattgctttttaaaaactattgtctaaagagatgttttgaaatatagaagtgttttgatttaattaaatgtaatgcatgtacaattaaaaagacaagttattcagatagtgataagtcctgtaaagcatgagtg

SEQ ID NO: 88908 - DNA, 1157 bp, Homo sapiens
tgctcgaacccaggaggtggagagttgcagtgagccgagatcacgccactgcactccagcctgggcaacagagcgagactccatctcaaaaaaaaaaaaaaaagtgatttttttcttgtgagaagaaataagacttttccctccattagtgacctggcccttgtctgtgtgcaggcctggaggtaggaaccagggtggcatattggaggaatggaaagcaggcaggcagagctgctctgaggagcagggtaggcaggtatgaagggagaatggcagatgattccaggggccaaatcatgagggctcctggtaggaggggggttttatctcagatgaactgggaggaagtgcttagaggcacagggcaactttgttgtggtgccagcccatctccaggtgcagcagcctgccgccatatgtcaggtgcccaggtagtgaaagtcagcaaaagacagaagagggaaagaagcaggcaaacacttaggaaatgggagagatgtgatgaaggctggggacaaggatgacctagtagaagcagagaaaagggcaagaattcaagatttattctatagagtcaaagaatttgttgataaattccacagagggtattagggttattggagggattgtttagcaaaactggatttcattaagagtatgattttgaaataacagatgtagtgttagaagtcacagctgattcatagaagttgaagagtaactgaattccttattaatggaattatagtaaggaaagataaggtgggcaaagcactggatcatgaaaaaaatggatctattatttggaatttttgttgtggtataagtgatgacgttttatttgcattcaagttactgaatcaagggaagaaattaagatattaatcacaattaataaattaatcacttgggaaagtgaagaccaataaaaaattgagtgtatttaatgagttcacattttagttctgtcatgtgactgctgtataagaaagacaagtggaaactgcctaccctttagcaagctccttgaatgcagaccttccagaaactttcatgcaaattggtaggagcgtccctaatcttaatacacatttttcaaggatgtgtttattctataaaataaagtacctttatattgtaatttccaggaagcagga

SEQ ID NO: 88909 - DNA, 1069 bp, Homo sapiens
agataaggtttccccatgttggccaggctggtctcaaactcctgacctcaagtgatccgcccacctcagactcccaaagtgctgggatcacaggcatgagccaccgcacccgaccaagaagtactcagttttaaattcaacttattgtatgtttgtgaaatgtttcaagctgaaaaatattgaatgagtttatgtgtgtatttgcaagggaaagattaaaatccacaatcctccttcaaagtttggactctgcagcattgagccaaattaactatgttgttgttctctgtccaagtgactatacgtttaaaccattatagtgaaggcaactgacatttggggtacaaagacatcttccttggtaaattagtcattttgcctggtccttattccacagactgtgtttgtcaaatagtgtatacttataagttgaatattatatatttcctgcaggagatttaaatgaacagtcccaggcacagctaagtgaaggatcaattacacttcaggttgaagcagtagagagtacttcacaagtggatgaaaatgatgtgacgttaacggctgataaaggcaaaacagaggtagcttcagcctttcgtaaggaaatctaagattatcttgttgtagttcttatctaggatcaagacgagatcacctgtgaaaaatttatgccgtttaacatcttttctttcctggcttcagatttcttgcaagtgtcctttaaatttttctttttaagtttttgtggcgatataatatacacacagatgagtttataaaacagatttgtagtcaatgaatgaattatcacaagtcatacacttgtgtatacctcagatcaagaaagagaacattgccaacagctcagaaacaagtttttttgccgcctccagttacctgacctttaaccctgtattaattttatctgattctaaacttcacttaaaagaaaccatgtggcatgtattccttttctttggcttttttcacctcaccttacatttgttagatgagtataatataaacttatttttattactgtatggtattctgttatatgaatatt

SEQ ID NO: 88910 - DNA, 1055 bp, Homo sapiens
aaaaaataatgctgaagtttctgaggtctgtggtaagaatgatcttttttatgtgtaattacaaagaaggacagagaaattcatgctttgcactccaaacttcaaacgttccagccacagtgagtgataagtgcttagttaagatggaaaaggcactacatttgtgggtggggaagataggaacagaaacatgctctgatttatggcagtcggatttggtactatctgaggtttcaggtatccacttggaggttttgaaacgcatctcccaatgataatgggggactaatgaatgttcatgaaactggggtaaatttatctgatgtttaattttctcacttctaggacactttcttcatgagcaacaaaccccaaagatacaaagacaagctaccagatagtggtgattctatgcttaggatcagcaccattgcttcagccattgcagaggcatcagttaatactgatccttcccaacttgctgcaatgatcaaggcactttcaaataaaaccagagacaagacttttcaggaagatgagaaacaaaaggactattctcatgtgcgtcatttcttacctaatgatttagaaaaaagtaatggatccaatgcacttgatatggagaaataccttaaaaaaacagaagttagtagatatgaaagtgcattggaaaacttttcaagggctagtatgtctgatacttgggatttatctttgcccaaagaacaaactactcaagacattcatccggtggacttaagtgctactagtgtaagtgtgagggcaccagaagaaaacacagcagctattgtttatgttgaaaatggagagagtgagaatcaagagtcatttagaaccataaactcctcaaattcagttacaaatagagagaataacagtgcagtagttgatgtgaagacatgttccattgacaacaaattacaagatgttggtaacgatgaaaaagctacctcaatttccactccatctgatagttattcatcagtgaggaaccccagaataacatccctttgtctgttaaaagactgtgaaga

SEQ ID NO: 88911 - DNA, 1091 bp, Homo sapiens
tcagagtgatatcaccagcgagttgagtaccacaattattcaaggcagtccagccgcattggaggaacgggctatggaaaaattgagagaaaaagttccatttcagaatagaggaaaaggaacattatcatctattatccagaataactctgatacaagaaaagcaactgaaactacttctctgagtagcaagcctgaatatgtaaaacctgactttagatggagtaaagatccttcctccaaaagtggaaatctgttggaaaccagtgaggtaggttggacatcaaaccctgaggaattggacccgatcaggctggctctcctgggcaagtcaggtctgagctgtcaggtggggtcagccacatcacaccctgtgtcctgccaggagcctatagatgaagatcaaagaataagtcctaaagataagtcaactgctggccgtgagttcagtggccaggtttctcatcagaccacctctgaaaaccagtgtactcctattcccagcagcacagttcacagctctgtggctgacatgcagaacatgcctgctgctgtgcacgcactcttgacacaaccctctctcagcgctgctccttttgctcagcggtatttgggaacactcccttcaactggaagcaccaccttgcctcagtgccatgctggcaatgccacagtctgtggcttctcaggaggccttccctatccagctgttgcaggagagcctgtgcagaactctgtggctgtgggaatttgtctaggatcaaatatcggctctggatggatgggtacctcttccctctgtaacccatattctaataccttaaatcagaacctgctaagcacaacaaaaccttttcctgtgccgtctgttggtacaaactgtggaattgaaccatgggattcaggagtgacatcaggattgggtaagatgctttttctctattattattacttgctattattttctcaaatgacaccacaaagctagtttgtttcaaggagttactggttagcattaattccttgtaagttttgtgcttcttcctaaactgagaacaccgtgtatttctgtgcaagcgtccctaaagttg

SEQ ID NO: 88912 - DNA, 1741 bp, Homo sapiens
ccctttgttacggactctgttatctacatttaaagtgaatttacttcaaagtttatttcatgtttctagttcttgggttactaacgcttctactagttacttttgctgagtcttcctgattttcttctagtggcttctgattttttgatatttaaaaatttttaatgtgagctcacattcattgaggctgctttttgctttaggaatccaatgatgtgtcctagtctttggaagcgtcccttgagagtacttttgcagaaatgtttgaggtgttaaaagcctttgtgatttttttcagcttggggctcccatgtcccatgtggcctaggcgtaggctttcatgttcttgcaaataatcttctatgccacccctctctggacaggttccttgttgactccatagacatgtggacagttttttcagttcattcctttgagtttctgggctttatatgcagatttcaaattccattcgagcctcaccctgctcacaacaagcttgaagtcacatcttctgttctctggaacatattaaagctctaccaccttgagcgcaagtctggaacccagacctttctgggccaccatggaaatcagctcctacttactggtctgcctttgatctctacttattttgtgtttggctagagcaaaacaaaatgtgagcacgtctgtgtgtgtgtgtgtgtgtgtgtgtgtgtgtgtgtgcctgtataatacagtctgtcttctgtatctgtggattctgcattcttgtgttttactaaccttggatcagaaatattcagaataataaaaggggtagttgcatctgtattgaacatgtacagacatttttttcttgtcattattctctaacaataaagtataatggctatttacatagcatttacattatattaggtacattatgttaggtgtttgaagtatacaggaggatgtgcctaggctatatgcaaatactatgacatttcctatcggggacatccacgagttttgatatccggtgggggttcctgtactgtcaaacatttccacatgtgggtgtgtgaggggtctgagtttggttggtttcccgcatttagggaagtgagtctgtcatgatcataggcacttgttttaaacttttgatatgtctgttttgataccattttaacatttgcagattaaatctgaaaatgccaagatattcatgatctttttaaaaggaattgagaagttgttattctaataatagaacccattgaaaaggggtctataattttataaaattatcagttcatcttaagatacagtcttttcaaagtaacagcagctgaattctgtagtatatttgggtacatagactacctcaaaagaagaatttaacatttatttttgtagaaaataagcaattgttaaatagcctgggaaaatgtaggtaagttttacttactgctgactcataatttgtggctagaaatggcagtgatatgaacatacatgttgtgctattaatatattgcttttcataaatcattccctttttttgataattaggtagaaacagaaaagaaagacgttcttgattttggtgacttgacttatggaggctggaaagccctcccactaaaattgataaaccgaacgcatgccactgtgccaattagactgattattaatgctgtaagtatgaacatacagtaagaaaccatttacagaatgcactgatcttatgaaagtacatttttttaaggatttt
